United States Patent Application Publication US 2011/0277190 A1 - sequence listing, part 3

SEQ ID NO: 8319 - protein, 362 aa, Glycine max
MLELSESHSKNLHFPLTHIILFFTCFKLSKAQSSMEPVPTYITHHSWEPSVVITVGAIIIALLLMGIISIYLRRCAESHIIITTTQTTTTLPCSCAQGINRELLNTFPTLFYSNIKDLKKGNETLECAVCLTDFTDKDALRLLPKCNHVFHPHCIDSWLACHVTCPVCRANLSQESSHVSITVPPHNEEEGSRNTTTNEATQIEQSTSNDVGQVCLGDPTPTSDAAKIMYISEEQQQQHSSSEPTFEVELDPNTNSTTTTINNNGGDGVVVVSERNLSRSNSTGHCIVEEQGKGVERYTLRLPEDVRRYILVNHGRSVQRSASVKGVCWSDSEESYKGKRVNGEVRVEKRWVICTPPFVGHG

SEQ ID NO: 8320 - protein, 135 aa, Nitrosomonas europaea ATCC 19718
MTETANDLAGIKVMVVDDSNTIRRSAEIFLAHSGCEVILATDGFDAMAKVIDCQPDIIFLDIVMPRLDGYQACMLIKKNPRYQSVPVIMLSSKSGLFDRARGRMVGSDEYLTKPFTKEALLDTVRKHTSHHRVPA

SEQ ID NO: 8321 - protein, 200 aa, Yarrowia lipolytica CLIB122
MVWPFSRFSSKPVDEKSPKISPKLQQPEGCEIATVAAGCFWGVEHVFRHKYEGKGLYDCRVGYSGGAKESPSYLKVCTGLTGHAEALQISFDPKQISYPELIELFFKMHNPTTLNRQGSDKGTQYRSAIFTHNDTQQKEAEAVKNKMEETFYKNPIVTEIEPISSFFDATENHQKYLNKNVNGYTCPTHFIRTLPEKHVA

SEQ ID NO: 8322 - protein, 107 aa, Oryza sativa
  misc_feature (35)..(35): Xaa can be any naturally occurring amino acid
  misc_feature (61)..(61): Xaa can be any naturally occurring amino acid
  unsure (1)..(107): unsure at all Xaa locations
RAGTEWLDRRTRALVPCGRLRRPSGGVENTRRLIXVQEAYETLFDPRRRAIYQRALARGVXRLDFYYFRRVVLYYYQDQEDKSGWRRTCGDQMEELKKRSMPNDLEE

SEQ ID NO: 8323 - protein, 1063 aa, GIBBERELLA ZEAE PH-1
MKERDTQNMNGTQIELDSLPTTDSIKHEPPILYGAGNWINGFRRAEPRPGYLPTDAPERFYDLRAANAKTANTALARELKGRHLQMIAFGGSIGTGLFVASGGSLYRGGPASLLLSYVLIGGMQYCTMQSLGELCVAFPIAGSFSAFSTRFLDPSWGFAMGWNYCLQWLFVLPLEIIAGAFTIGYWDETIDRSVFVSVFLLTIVAINLFGVKTYGEAEFIFSIIKITAIVGFILLAIVINIAGEPEGHYIGGMYWRNPGAFKNGFKGFCSVLVTSAFSFTGTELIGLAAAETANPRKSLPTAIKQVFWRIMIFYLVALLLVGLLVPSDDSRLVGGDNVADATASPFVIAIEKAGTSLLPGIMNAIILIAVISVGNSAVFGSSRTLAALAEQSHAPHIFAYVDRQGRPLMAILFASCIGLLAFLADVKYHDAIFNWLLSISALSTLFTWGSICLCYIRFRAAWSHNAHTIEQLPFKSNVGVAGAWVALIGYILVLLSQIWIAASPVYAPDIVDGASGVAQNFFLKVLAIPIILLFYICHKAFVVQYMGDVHMKAMEASYATILWGVALAVVGFLSHRIIAIALRPHSSRFNGLPRPKGQQPFAGHALRILRGGGPNDVYLQWTRQWPDAPFIRCLSWLNEEILLVNSLEACREVLQTNAYFFAKPGFFHTLVGEFLGLGLLFSVGEQHKRLRRIIAGPLSRPSIRKLFPTFVTYSQKLNREIGEALERSKSGIVEIEDLIIRVTLDIIGVSLLGRELRDFRSESSPLSFEQCYNAILAQPLAGQIISFINPFIPLRWLPVSANLNFIRAKSALKTMMEGLIEQRTAEVGAAKLMNEDDKLSDDLLTRMIEASAEESQKLSKEELIDITMQVIAAGHETTASALVWTAYSLAKDPASQQSLRAEIHSLGTEMSAKGIDELPFLDNVIREAMRVHSPTLIIPWEAQKDMTIAGTHIPKGTTVQIVPAMIQLNPEIWGSDADVFRPGRWEDMGGNASSPYAMETFSNGPRMCPGKALALLNMKVLLVGLIRDFEMEIVDDGKEVELRNPSLTLKAKSLIQFKMRKVS

SEQ ID NO: 8324 - protein, 136 aa, Tropheryma whipplei TW08/27
MEQTLVIIKPDGIRRGLIGQVLSRIEAKGYQIVDIRMLVPDRQSVEEHYLEHRDRHFYLPLVDFMTSGPIVLVRAEGHGVVDALRTLVGVSDPTLALPGTIRGDFGRNWGLDVIQNIVHASDSVKSAKRELDIWFP

SEQ ID NO: 8325 - protein, 227 aa, Haemophilus ducreyi 35000HP
MKQIEQLFINNHAWATRMKDEQSDYFKQLAEHQKPTYLWIGCSDSRVPAEKLTGLGPGELFVHRNVANLVIHTDLNCLSVVQYAVDVLNIEHIIICGHTNCGGIKAAIGTVEDYGLISNWLLHIRDLWFKHSHLLGKLSPEQRANMMTRLNVAEQVYNLGRCSIVKSAWECGKKLSIHGWVYDVNDGVLNDQGVIATSRENLEITYRNAIAKLTTEADELVAKKLAE

SEQ ID NO: 8326 - protein, 399 aa, Arabidopsis thaliana
  misc_feature (225)..(225): Xaa can be any naturally occurring amino acid
  unsure (1)..(399): unsure at all Xaa locations
MDEALTNASAIGDQRQKIEQYKLILSSVLSSNDLLQAQRFIDHILSDDVPLVVSRQLLQSFAQELGRLEPETQKEIAQFTLTQIQPRVVSFEEQALVIREKLAGLYESEQEWSKAAQMLSGIDLDSGMRAVDDNFKLSKCIQIARLYLEDDDAVNAEAFINKASFLVSNSQNEVLNLQYKVCYARILDMERKFLEAALRYYGISQIEQRQIGDEEIDEDALEQAXLSAAVTCTPISLELGPSGPGVLATLFKGGRCSRLRVYPIPQKGFLERILRGPRVVPFPGPRPPHQKASLPDKSTVLDRAVIEHNLLSASKLYTNIRFDELGTLLAIDPRKAEKIAANMIGQDRMRGSIDQEEAVIHFEDDVEELQQWDQQISGLCQALNDILDGMAKKGMSVPV

SEQ ID NO: 8327 - protein, 410 aa, Burkholderia fungorum LB400
MTSRRGVHVQTLGNVTLATVDLSQQDHDNYYLGYANGVLWPVFHYRLDLADFDTRFAAGYRRVNQLFAEKLLPLLRPDDIIWVHDYHLIPLAAELRAIGCGNRIGFFLHIPMPPPMIMAAIPEHEWLMRSLFAYDLVGFQGQIDVEHFTHYAESEANARQVGPQQLRAFNRTLRLGAYPIGIDVEEFVSLANGKEAREMFTRMRDEYSRRRLLLGVDRLDYSKGLPQRIHAFRELLAHYPENRDSATLIQIASPSRESVAAYDDLRRQMDSLCGAINGDYGELDWMPVRYIHRHVARKRLPGLYRASKVALVTPLRDGMNLVAKEFIAAQDPSDPGMLVLSRFAGAAEQLKEALLVNPYDTQGTAHAIQRALTMPLDERRNRHAALMKRIREHDVHWWSSSFLDTLQDIP

SEQ ID NO: 8328 - protein, 189 aa, Lupinus luteus
RVFTQKIHDLIGTHVDVPAPDMGTGPQTMAWILDEYSKFHGYSPAVVTGKPIDLGGSLGRDAATGRGVLFAAEALLNEYGKSVSGQSFVTQGFGNVGSWAAQLISEKGGKVVAVSDVTGAIKNSNGIDIPSLLKHSSEHKGVKGFRGADPIDPKSILVKDCDVLIPAALGGVINKENANEIKAKFIIEA

SEQ ID NO: 8329 - protein, 465 aa, Burkholderia fungorum LB400
MDDHYDVIVIGGGPGGYVAALRAAQLGRRTALCERDQLGGICLNWGCIPTKALLHTADTLRTVRKAAHLGIGIDDPVVDFTRVMARSREVAQKLNRGVSHLLRKAGVTVLAGTAAFAADRSVRVHGADGALRTLQARHTIVATGAAARQLPALPWDGERIWTYREALAATAVPKSLLVVGAGAIGMEFAGFYAAMGTEVTVVEVAPRILPASDADVSEFVARACERDGIRLRTGCSVVHSAAHAEGVRVMFRSENAEEQREFERVLVAVGLDGNTEGLGLEHTRVAFERGLIIADAAGATSDPVVHAVGDVTGAPMLAHKASHQAIACVERIAEVNRGERHASPKIPGCVYSHPQTASVGLTEDEARRTGRALRVGRFPLDANGKAIALGDPSGFVKTIFDAASGELLGAHIVGPEAPELIHGFTLAATLEATESELIETVFPHPTLSEAMHESVLAAFGRPLHI

SEQ ID NO: 8330 - protein, 189 aa, Lupinus luteus
RVFTQKIHDLIGTHIDVPAPDMGTGPQTMAWILDEYSKFRGYSPAVVTGKPIDLGGSLGRDAATGRGVLFATEALLNEYGKTVSGQRFVIQGFGNVGSWAAQLISEKGGKVVAVSDVTGAIKNSKGIDIPSLLKHSREHKGLKGFHGADPVDPNSILVEDCDVLVPAALGGVINRENANEIKAKFIIEA

SEQ ID NO: 8331 - protein, 233 aa, Nicotiana tabacum
MFEKMDEQLLDALCDRLRPVLYTENSFIVREGDPVDEMLFIMRGKLLTVTTNGGRTGFFNSDYLKAGDFCGEELLTWALDPHLSNNLPISTRTVQALSEVEAFALVADDLKFVASQFRRLHSKQLRHTFRFYSQQWRTWAACFIQAAWRRHCRKKLEESLREEESRLQDALARGSGSSPSLGATIYASRFAANALRALRRNTSKKARMVDRYHPFCFRNQLNQILRQKISNCI

SEQ ID NO: 8332 - protein, 109 aa, Diaporthe ambigua
TGGKAPRKQLASKAARKSAPSTGGVKKPHRYKPGTVALREIRRYQKSTELLIRKLPFQRLVREIAQDFKSDLRFQSSAIGALQESVESYLVSLFEDTNLCAIHAKRVTI

SEQ ID NO: 8333 - protein, 189 aa, Lupinus luteus
RVFTQKIHDLIGVQRDVPAPDMGTNAQTMAWILDEYSKFHGHSPAVVTGKPIDLGGSLGREAATGLGVIFATEALFAEYGMSISGMTFAIQGFGNVGTWAAKSIYDRGGKVVAVSDISGAITNPNGIDIPALLKHKESNGNLTEFSGADAMDPNDLLVHECDVLIPCALGGVLNKENAADVKAKYIIEA

SEQ ID NO: 8334 - protein, 436 aa, Streptomyces argillaceus
MDKTTGTTSSGTPAPDEGLHTDVCVVGGGPAGLALALMLLRSGVRVTLLEKSARFDRAFRGEILQPGGQRILGDLGVLAAARAAGACELNGFQLVDRDRVLLDIDYRRLPAPYRHLLAMPQRHLLDALLEQCRALPGFRFLDGHRIGALVEEDGRITGAVARGPGGRRTVRARVVVGADGGFSKTRALAGIGAGRVEAFGHDVLWFTVRAPGRQTGYVRIHRTAGNPVLVHDSHPDRLQIGWTLPHRSWPELAARGGDEVRGELTTALPQFADLIEASVSDLSDLSLLDVYAGKADAWTRDGLVLIGDSAHTHSPLGAQGINLALQDAAVLHPVLVAALRDGCVDQARFAPYLETRMPAVDVVMRMQQMQAKGMFGTGGPVADRLRSGVARLIRHSPLGRKITHRVAYGHPVVEVRTDLFTTGPTARAERTGGPKG

SEQ ID NO: 8335 - protein, 1034 aa, Bifidobacterium longum NCC2705
MLLKVNREIDRCKRVMRERVWPHIHQVLAQCTVGAVKNPGEPEMPAAFITRAVSGQVIFQPLAVGEPWGTSWGTTWIRVEGQLPETLPEGRAIELVFNLGWLEWPVGGHIEAMAYRADGTVIKALHPRNHWMPLVSADGVKDRVVNPDGSFVVYVEGAYNPNVPSFTVTELGTKPTGKADERYEFSSIDIAALDQDMFDYWADLDVVTGSLENMNDADPRYWKLAKAMQRSINLWDEKDYNTLALARKALDKVMHNPANASAMTLTAMGHSHIDSAWLWPVRETERKVGRTVSNALALMDIDPDFTYVMSAAQHFAWLEERHPDLFERVKARIAEGRFIPVGGMWVESDGTMPCGESLIRQISYGKRYFKEKLGVVPNGIWLPDSFGYTGAWPQIAKRSGYSWFLTQKLCWNDTTRLPHHSFMWEGVDGSQIFTHFPPADKYDSDMSANDMAYVQSNYKDKDLSDRGILLFGYGDGGGGPIREMTMREHRFESFEGMPKVEYGTPDDFFSKAETEMKAEAGSEMPRWKGEFYFELHRKTLTSQQEMKRGCRKEESMLRTVEYLGVVASLESADYVYPTERIDRIWKTLLLSQFHDILPGSAIEWAHRVAREEYARDLKALSDIARDAIAAIAVANPDVARIAKARISQFADVDPWRPASLVSCGEPVEVNRREDGSATLDNGLLCVHVAADGTVDSMIDLKSGREMVAKDHVMGRYEILKDEPGVFDAWDVERDAFLCATALADGHIVSIETTADGSAVIVTKNSYRDDEISTTITLRPGKSQLDFHADVEWNVPEKLLKVDIPMALSASRAQYECQYGLIERPIVKNTEGEEAMFESCSHRFVRIHDSSYGIGVANGSTYGSDVSSLRDRDDALAGTMVRMSLVAAPTAPDPRTDIGHHEFDWTVLPCASVAPLVAAAGEINAPTIENMPDIAAPITLEPIEGTPVIDWIKLADDGSGDIVARLYEAAGAKAKAMLHVGGTLDGWTVRETNTLEQDESYPDEPAGLIGGKQQAEGAELALNPFQLTTLRLSRA

SEQ ID NO: 8336 - protein, 347 aa, Candida albicans SC5314
MSKTVILTGASGYIGQHILGELLDQNYKVIAIVRSQKSSDTLSKLFKQTPKLQFEIVEQFDKPHALDKVLEKHKEATIFISTAAVVTFHAEDYERDVLDPAIDLVKNIFSSIKEHAPQITRVILTSSSASVVGLDKAFSYDAEYSDNDWSPFTREMSTSDGTMAYFASKKLAEKEAWKFLKEEKPNFDLVVIMPALILGPVRFSSELKNGKFPSTSGIIGGLLHLKSDDPIQPMAAGAVDVRDVAKVHVDVITSEKASNQRILVESGKVTNDNIIQTIIDNFPSYKDKLPTPNPVPHSKFVKPKDERSRKIIGFSLRSLGDSVVDLVKQIDQENSVIESIKKLDIKK

SEQ ID NO: 8337 - protein, 216 aa, Arabidopsis thaliana
MSKLQSEAVREAITTITGKSEAKKRNFVETIELQIGLKNYDPQKDKRFSGSVKLPHIPRPKMKICMLGDAQHVEEAEKMGLENMDVESLKKLNKNKKLVKKLAKKYHAFLASESVIKQIPRLLGPGLNKAGKFPTLVSHQESLESKVNETKATVKFQLKKVLCMGVAVGNLSMEEKQIFQNVQMSVNFLVSLLKKNWQNVRCLYLKSTMGPPQRIF

SEQ ID NO: 8338 - protein, 273 aa, Panax ginseng
PYYVAPEVLLKHYGPEADVWTAGVILYILLGGVPPFWAETQQGIFDAVLKGHIDFESDPWPLISDSAKDLIRKMLCSRPSDRLTAHEVLCHPWICENGVAPDRALDPAVLSRLKQFSAMNKLKKMALRVIAESLSEEEIAGLKEMFKAMDTDNSGAITFDELKAGLRKYGSTLKDTEIRDLMDAADVDNSGTIDYGEFVAATIHLNKLEREEHLMAAFQYFDKDGSGYITVDELQQACAEHNMTDVFLEDIIREVDQDNDGRIDYGEFVAMMK

SEQ ID NO: 8339 - protein, 545 aa, Tropheryma whipplei str. Twist
MNGIKHIFITGGVVSSIGKGLTAASLGSLLTMRGLKVFIKKLDPYLNVDPGTMNPLQHGEVFITEDGAETDLDVGHYERFLDVDLDRTANVTTGQVYSKVITLERTGRYLGETVQVIPHITDEIKRRIRLAPDDIDVIITEIGGTVGDIESQPFIEAARQIRREVGRENCCFIHVSLVPFLESAGEQKTKPTQHSVAILRAAGIQPDALVLRSDKPISSANQKKIALMCDVSAVVNAVTVPNIYEIPCVLNQHGLDKFVIKHLDLEAGEIDWSYWDDVLDAIENNRSEIEIAIIGKYTGLPDAYISVIEALRAGGFESKTKVNIKWVDSDDENLEDQLENINGACIPGGFGIRGIEGLIKAIRICREREIPTLGICLGMQCMVIEYARHVVGMHGASSTEFTDDTQWPVVTTMLEQRDILIDDQFGGTMRLGSYRAVLSIGSLAASLYGTTDIHERHRHRYEVNNGYAQRLVERGLIVSGRNTEQDLIEFIELDRKDHPFYIGTQAHPECKSRPKRPHPLFKGLVAAALARKEIAEFNSGKTVLQ

SEQ ID NO: 8340 - protein, 330 aa, Bradyrhizobium japonicum USDA 110
MTDRPTVLVTGGAGYIGSHACRALSAAGYQPVVYDNLSTGHRSFVAGPLVIGDLLDDAALARAFADHKVTAVMHFAAASLVGESMTDPQKYYINNVQGTLSLLQAMRNAGCHRIVFSSTGAVYGNADSKELPEDFPCAPINPYGASKWMIERMLADYRAAYGFGAFCLRYFNASGADPAGGIGELRDNETHLIPRAMMALQGHVDFAVFGDDYDTPDGTAIRDYIHVTDLAAAHVAALKLLEQGHAGGSFNLGTGSGFSVREILNAIRQETGREVPHTVKPRRAGDPTYLVADPSAARKVLNFVPRHSDLPTVIRTAWAWHQKAHPFRSR

SEQ ID NO: 8341 - protein, 309 aa, Burkholderia fungorum LB400
MVLVREVELSLSRLFADSEVPGFIHLSLGQEAVSAGVASVLEVQDTLATTHRGHGHVLARGIDVGGFFKEIMGRVGGLCKGRGGSMHVADLALGVLGANGIVGAGIPIALGSAVAHHVRKTRGVAVAFFGDGAMAEGVLHETMNMAALWKAPLLLVCENNGWSEFSPTERQFAARLEALAGAFGIAYKRVDGDDAVAVSEASGIAAAAARSGAGPFVLECVTHRVRGHYEGDPQKYRDPTELDGLAGKDPLKRMHTHLESAGVSASEIDQIGRAVLTRVEAAIEAARADALPDFDEASRDVYTGREAIV

SEQ ID NO: 8342 - protein, 387 aa, Azospirillum brasilense
MTSAPLTTPANPVVIAGYARSPFAFANKGELAKVRPDDLLAHVVAALVERTGVNPQDIEDVVVGCAFPEGEQGMNIARTVSFLAKLPLTAGATTINRYCGSSMQAIHQAAGAIQMGAGEVFLCGGIESMSRVPMMGYNPLPHPGLKDHYPEAYCSMGVTAENVARRYEISRADQEAMAAESHAKAAAAQQAGRLAEEIVAIQTAAGLVERDGCIRPGTSGETLSGLKPAFLADGSVTAGTSSPLTDGASAVLVTTEAYAKANGLPILARIRSVAVAGCAPEVMGLGPVPAAQKALARAGLSIRDIDVIELNEAFAAQAIACMRDLDIDPAKVNLDGGAIALGHPLGATGARITGKAAALLKREGKQFALATQCIGGGQGIATVLEAV

SEQ ID NO: 8343 - protein, 409 aa, Actinobacillus pleuropneumoniae serovar 1 str. 4074
MTNHQTISTPKQVFVGLQMLFVAFGALVLMPLITGLDPNTALLTAGIGTLLFQLCTKGQVPIFLASSFAFIAPIQYGVQQWGIPTTMGGLVFTGFVYFALSALVKWKGANILEKLFPPVVVGPVIIIIGLGLAPTAVDMALGKGTTIEPNTALLISMATLITTLIVAVFAKGLMKLVPIMFGIVVGYILSLIFGIIDFSSVTNAAWFSLPKLTTPEFKLEAILYLLPIALAPAVEHVGGIMAISSVTGKDFMTKPGLHRTLLGDGVATSAAAFLGGPPNTTYAEVTGAVMLTKNFNPRVMTFAAIWAIAISFCGKVGAFLQTIPGVVMGGIMMLVFGSIAAVGMSTLIRAKVDMGEARNLCIVSVVMTFGIGGMLINVGEFSLKGISLCAIAAIIMNLLLPKEAAKKAE

SEQ ID NO: 8344 - protein, 459 aa, Oryza sativa
MVSKKTSIAAAAAAAGDSGAAETSLLPERYAGAGTPAAAASVLGAVFNVSTSVVGAGIMSIPAAMRVLGVAPTVALVVGVALLANAAVDFMLRYTRGPSSYAALMGDAFGRAGAALLNVFVAFNAIGTLTVYLIIIGDVMSGTTSDGKVHDGVLTEWFGQQWWTGREAVLVAAAVLLLPLVLRKRVDSLKFTSAVSILLAVVFMFISLGIAVYALFTGTAKMPRMLPDFSRLSSPFELFTAVPIVVVAFTFHFNVHPIRTELSKTSDMKAAVRISLVLCAAIYAAVGFFGFLLFGDATMADVLANFDRSSGAGVPQALNDAARLSYALHLVLVFPLLHFSLRVNVDELLFPGRRPLATDTRRFVALTAVLMAVLYALAIAIPSIWTLFEYSGSTFAVCISLIFPGAIVLRDAHGIAKTKDKALAATMIALAVITSSIAIASNVMSSISGKVEGGHAAGR

SEQ ID NO: 8345 - protein, 301 aa, Arabidopsis thaliana
MAATPTHFSVSHDPFSSTSLLNLQTQAIFGPNHSLKTTQLRIPASFRRKATNLQVMASGKTPGLTQEANGVAIDRQNNTDVFDDMKQRFLAFKKLKYMDDFEHYKNLADAQAPKFLVIACADSRVCPSAVLGFQPGDAFTVRNIANLVPPYESGPTETKAALEFSVNTLNVENILVIGHSRCGGIQALMKMEDEGDSRSFIHNWVVVGKKAKESTKAVASNLHFDHQCQHCEKASINHSLERLLGYPWIEEKVRQGSLSLHGGYYNFVDCTFEKWTVDYAASRGKKKEGSGIAVKDRSVWS

SEQ ID NO: 8346 - protein, 535 aa, Streptococcus salivarius
MAKDIKFSSDARAAMVRGVDTLADTVKVTLGPKGRNVVLEKAFGSPLITNDGVTIAKEIELEDHFENMGAKLVSEVASKTNDIAGDGTTTATVLTQAIVREGLKNVTAGANPIGIRRGIEAAVATAVEELKAIAQPVANKEAIAQVAAVSSRSEKVGEYISEAMERVGNDGVITIEESRGMETELEVVEGMQFDRGYLSQYMVTDNEKMVADLENPFILVTDKKISNIQDVLPLLEEVLKTSRPLLIIADDVDGEALPTLVLNKIRGTFNVVAVKAPGFGDRRKAMLEDIAVLTGATVITEDLGLELKDATMAALGQASKVTVDKDSTVIVEGAGSTEAIANRVNLIKSQLETTTSEFDREKLQERLAKLSGGVAVVKVGAATETALKEMKLRIEDALNATRAAVEEGIVAGGGTALVNVIAKVAELDLEGDDATGRNIVLRALEEPVRQIAYNAGYEGSVIIDKLKNSPVGTGFNAANGEWVDMVEAGIIDPVKVTRSALQNAASVASLILTTEAVVANKPEPEAPAAPAMDPG

SEQ ID NO: 8347 - protein, 652 aa, Mycobacterium bovis AF2122/97
MCGLLAFVAAPAGAAGPEGADAASAIARASHLMRHRGPDESGTWHAVDGASGGVVFGFNRLSIIDIAHSHQPLRWGPPEAPDRYVLVFNGEIYNYLELRDELRTQHGAVFATDGDGEAILAGYHHWGTEVLQRLRGMFAFALWDTVTRELFCARDPFGIKPLFIATGAGGTAVASEKKCLLDLVELVGFDTEIDHRALQHYTVLQYVPEPETLHRGVRRLESGCFARIRADQLAPVITRYFVPRFAASPITNDNDQARYDEITAVLEDSVAKHMRADVTVGAFLSGGIDSTAIAALAIRHNPRLITFTTGFEREGFSEIDVAVASAEAIGARHIAKVVSADEFVAALPEIVWYLDEPVADPALVPLFFVAREARKHVKVVLSGEGADELFGGYTIYREPLSLRPFDYLPKPLRRSMGKVSKPLPEGMRGKSLLHRGSLTLEERYYGNARSFSGAQLREVLPGFRPDWTHTDVTAPVYAESAGWDPVARMQHIDLFTWLRGDILVKADKITMANSLELRVPFLDPEVFAVASRLPAGAKITRTTTKYALRRALEPIVPAHVLHRPKLGFPVPIRHWLRAGELLEWAYATVGSSQAGHLVDIAAVYRMLDEHRCGSSDHSRRLWTMLIFMLWHAIFVEHSVVPQISEPQYPVQL

SEQ ID NO: 8348 - protein, 580 aa, Crocosphaera watsonii WH 8501
MKKRSNWLRLLPYLLTEWPSLLKGFLCILGFVLVTLALPYLAGQVSLNIGQGNLEKVAYWLGLGTLAFLVRGIFQYGQNIFMIDASLEMVLSVRNKVYAHLHKLGLDYFEVAKTGDLTYRLTADIDKVGEIVDKLSHQFVSNVLQLIVIPAYMFYLNWQLTIASLILAPLMATLVSMFGEKLLILSRRSQNQISNLSALLTEVFSGVRVVKAFAAQDYEVKRFAQEAKENRRARYRAEKLKATQYPVVGFLQAVSIMSLFFIGGWQISQGNLASEEFVSYLAAVAILLHPIDLMTSNYNEFKQAEASVDRIFELMDEKPTVKETENSLTLPQVTGKVEFSEVSFAYKLDKPVLRKLSLLAEPGQIIALVGSSGAGKTTLVNLLPRFYDPQDGEILIDGIDIKEVSLKSLRRQIGIVPQETTLFSGTIAQNIAYGQEELDYEAIENAAKIANAHSFISQFSQGYQTWLGERGVNLSGGQKQRIAIARAVLLNPRLMILDEATSALDSESEALVQEALERVMKNRTVFVIAHRLSTVRSADCILVLEKGQVVESGNHDQLLGKQGRYAKFYQQQYAKGTEEF

SEQ ID NO: 8349 - protein, 330 aa, Methanococcus maripaludis S2
MKVFYDSDFKLDALKEKTIAVIGYGSQGRAQSLNMKDSGLNVVVGLRKNGASWNNAKADGHNVMTIEEAAEKADIIHILIPDELQAEVYESQIKPYLKEGKTLSFSHGFNIHYGFIVPPKGVNVVLVAPKSPGKMVRRTYEEGFGVPGLICIEIDATNNAFDIVSAMAKGIGLSRAGVIQTTFKEETETDLFGEQAVLCGGVTELIKAGFETLVEAGYAPEMAYFETCHELKLIVDLIYQKGFKNMWNDVSNTAEYGGLTRRSRIVTADSKAAMKEILREIQDGRFTKEFLLEKQVSYAHLKSMRRLEGDLQIEEVGAKLRKMCGLEKEE

SEQ ID NO: 8350 - protein, 1111 aa, Geobacter sulfurreducens PCA
MARRTPLSDDTPLWYRDAVIYQLHVKAFADSDGDGVGDFRGLMGKLDYLQSLGITAIWILPFYPSPLRDDGYDIADYYNVNPSYNTLREFREFLREAHARRIRVITELVLNHTSDQHPWFQRARRAKPGSVHRDYYVWSDTPDRYRETRIIFQDFETSNWSWDPVAKAYYWHRFYSHQPDLNFDNPRVQSEVLRIIDYWLGMGVDGVRLDAVPYLFEREGTNCENLPETHDFLKRLRGHMDASFPNRMLLGEANQWPEDAVAYFGEGDECNMLFHFPLMPRMYMAIEMEDRFPVVDILDQTPAIPEGCQWAIFLRNHDELTLEMVTDEERDYMYRIYASDPKARINLGIRRRLAPLLGKDRRRIELMNALLFSLPGTPVIYYGDEIGMGDNYYLGDRNGVRTPMQWSPDRNAGFSGANPQRLFLPVIIDPEYHYEAVNVDIQERNPTSLLWWMRRIIAVRRRYRAFSRGAMEMLYPANHKVLAFLRRHEDEVILVVVNLSRFAQAINLDLQEFAGISPEDLFSRNRFPVIREATYPLTLGPHDHFWFLLRRREAPLQAEEELPRIRLRGELPWWETLRQTRGDAHLERVTTDYLKRSGWFRGKARAIIGYVLRDTVLLRQGERVFPIFFLEVRYQDGPPETYLIPVAFLTGAGAKRVSAESPRAAIAALSVGDEEGILCDAVHDREFRDALLALALGRRRLHGEENSLIVPVHAGAGRIGSREEMRHLASELPKAEQTNSIITYGDRHVLKLYRKVEPGINSEVEMARFLTAKSSYPNVAPFQGSLELRHPGVEPGAIGLLQGYVQNQGDGWRLSLHLLGQYFERILSCRGELPPPPSRFSSLMDGSACTVPEPAAELIGGFYLEMAGLLGRRTAELHLALAAGGNDPAWRPEEYSTLYQRSVYQSMRNQARRSLQLLAQHHKDLPAEALASADRILSAEKELLACLRPIVGRRIQAMKSRIHGNFRLEKVLFTGKDFMIIDLEGEPDRPLGERRIKRSPLRDVAGMIRSFHNATLTALARHGAGHPGDIPLLEPWAEACWYHVSCRYLAGYLEQMGTSPLVPTERSDLETLLRSFLLDNALHELGYALANRPERVSSYLRGVETVLREFR

SEQ ID NO: 8351 - protein, 462 aa, Erwinia carotovora subsp. atroseptica SCRI1043
MTTTTETSQTEAAAAPQRSELIYRLEDRPPLPQTLFAASQHLLAMFVAVITPALLICQALGLPAQDTQRIISMSLFASGLASILQIKTWGPVGSGLLSIQGTSFNFVTPLIMGGLALKNGGADVPTMMAALFGTLMVASFTEIILSRFLHLTRRIITPLVSGIVVMIIGLSLIQVGLTSIGGGYAAMGNNTFGAPKNLLLAGAVLVVIILLNRQRNPYLRVASLVIAMAVGYLGAWLMGMLPESAPAPHDTVIMVPTPLYYGLGFDWNLLIPLMLIFMVTSLETIGDITATSDVSEQPVRGPLYMKRLKGGVLANGLNSCLSAVFNTFPNSCFGQNNGVIQLTGVASRYVGFVVSLMLIALGLFPAVSGFVQHIPEPVLGGATIVMFGTIAASGVRIVSREPLNRRAIMIIALSLAVGLGVSQQPLILQFAPDWIKTLLSSGIAAGGITAIVLNIVFPHEEK

SEQ ID NO: 8352 - protein, 387 aa, Zymomonas mobilis
HHHHHHATLPAGASQVPTTPAGRPMPYAIRPMPEDRRFGYAIVGLGKYALNQILPGFAGCQHSRIEALVSGNAEKAKIVAAEYGVDPRKIYDYSNFDKIAKDPKIDAVYIILPNSLHAEFAIRAFKAGKHVMCEKPMATSVADCQRMIDAAKAANKKLMIGYRCHYDPMNRAAVKLIRENQLGKLGMVTTDNSDVMDQNDPAQQWRLRRELAGGGSLMDIGIYGLNGTRYLLGEEPIEVRAYTYSDPNDERFVEVEDRIIWQMRFRSGALSHGASSYSTTTTSRFSVQGDKAVLLMDPATGYYQNLISVQTPGHANQSMMPQFIMPANNQFSAQLDHLAEAVINNKPVRSPGEEGMQDVRLIQAIYEAARTGRPVNTDWGYVRQGGY

SEQ ID NO: 8353 - protein, 453 aa, Neurospora crassa
MRGEVVHIHLGQAGTQLGNSAWELYLLEHGLTQDGRKDPDSTVAGEGGSYDTFFTESSNGKYVPRSLFVDLDPSPIDEIRTGPYRQLFHPELLISGKEDAANNYARGHYTVGKEMAENVLDRIRKITDNCHSLQGFLVFHSFGGGTGSGFGALVLERLAQDYAKKCKLEFSVYPAPRVATAVVEPYNAVLATHSTLEHSDVTFLVDNEAGMTCRRNLDIPRPSYEHLNRLIAQVVSSITSSLRFDGALNVDLNEFQTNLVPFPRVHYPLISYAPVISATKSAHESFKTSELTLQCFEPNNQMVVCDPRNGKYMAVALLYRGDVVPRDTSAAVAALKAKSSFNLVEWCPTGFKIGINHQKPMSVPTASPADGGLASVDRSVSMLSNTTAIAEAWSRLDHKFDLMYSKRAFVHWYVGEGMEEGEFSEAREDLRSLEKDYEEVAGDYNDVDVDAEY

SEQ ID NO: 8354 - protein, 406 aa, Zea mays
MEAPPVPEPMDLDAPPPAAADAAAAAPVPPAVSDKKKEGEGGDTVTGHIISTTIGGKNGEPKRTISYMAERVVGTGSFGIVFQAKCLETGETFAIKKVLQDRRYKNRELQLMRAMEHPNVICLKHCFFSTTSRDELFLNLVMEFVPETLYRVLKHYSNANQRMPLIYVKLYMYQLFRGLAYIHNVPGVCHRDVKPQNVLVDPLTHQVKLCDFGSAKVLIPGEPNISYICSRYYRAPELIFGATEYTTSIDIWSAGCVLAELLLGQPLFPGESAVDQLVEIIKVLGTPTREEIRCMNPNYTEFRFPQIKAHPWHKIFHKRMPPEAIDLASRLLQYSPSLRCSALDACAHPFFDELRAPNARLPNGRPFPPLFNFKHELANASPDLINRLVPEQIRRQNGVNFGHTGS

SEQ ID NO: 8355 - protein, 258 aa, Alkaliphilus metalliredigenes QYMF
MMNIPAVSEENNEVLPHEETMTLIQMAQKGDLQAQEKLVSHNLGLIRSVIKRFSNRGYDREDLFQLGSIGLIKAIRKFDISFNVRFSTYAVPMIIGEIKRFLRDDGIIKVSRSLKQTASRVKVTKEKLFKEFGREPTLHEIAKVLEITKEEIVMALDSNMYPEYLYEVIHQDDGSPIHLIDKISETDSLDDSEVIDKIMLKEVIGRLEPRERQIIILRYFKDKTQTEIAKVLGISQVQVSRIEKKVLQTMKDMMSKAY

SEQ ID NO: 8356 - protein, 198 aa, Gossypium barbadense
MAPKKDGVSKRVFNKGSWTAEEDRRLAKYIEIHGAKRWKTIAIKSGLNRCGKSCWLRWLNYLRPNIKRGNISDEEEDLIIRLHKLLGNRWSLIAGRLLGRTDNEIKNYWNSHLSKKIINHDVRTEQTSSSEQIVPHKAWETVQMEEEEVVKGSDEIENSEFSIDVDEFFDFTTEGCFSLDWVNKFLELDDQQDPLAMV

SEQ ID NO: 8357 - protein, 336 aa, Oryza sativa
  misc_feature (139)..(139): Xaa can be any naturally occurring amino acid
  unsure (1)..(336): unsure at all Xaa locations
MIQAMASHAGGSGGGGGGSGRDAGSAQRGPMQGLARQGSLYGLTLNEVQSQLGEPLLSMNLDELLKSVFPDGADLDGGGGGGGIAGQSQPALGLQRQGSITMPPELSKKTVDEVWKGIQDVPKRGAEEGGRWRRERQPXTLGEMTLEDFLVKAGVVTDPNDLPGNMDVVGGAAAAAAGTSDLNAGAQWLQQYHQQALEPQHPSIGAPYMATHLAPQPLAVATGAVLDPIYSDGQITSPMLGALSDPQTPGRKRGATGEIADKLVERRQKRMIKNRESAARSRARKQAYTNELENKVLRLEEENERLKKQKELDEILNAAPPPEPKYQLRRTSSAAF

SEQ ID NO: 8358 - protein, 563 aa, Glycine max
  misc_feature (151)..(151): Xaa can be any naturally occurring amino acid
  misc_feature (322)..(322): Xaa can be any naturally occurring amino acid
  unsure (1)..(563): unsure at all Xaa locations
MTAASSSTPFLGIREESPQITTHHQPSTVSPTTAPQKKRRNQPGTPYPDAEVIKLSPKTLMATNRFICEVCNKGFQREQNLQLHRRGHNLPWKLKQKSTTKEPKRKVYLCPEPTCVHHDPSRALGDLTGIKKHYYRKHGEKKWKCEKCSKXYAGQSDWKAHSKTCGTREYRCDCGTLFSRRDSFITHRAFCDALAHDSARQPPSLSGGGIGSHLYGSTTNMALNLSQVGSQISTMQDPNAQPTELLRLGAASGRTGQFDHILGSPFRPSNQQQQQQPFFMSSEPNQTYHHPDQNKPFQQGLMQLSDHLNNNSHHNNSPFSLXFCSNNTSNASFSEHFNNANGGGGNNNNNNNNEGTNYFATSSAPSLFSNSVNASALSHMSATALLQKAAQMGATTSNGGTASLLKSFGSASSSSGGGGSKLVNAANYVSGMFGGNNHVNEQSNSNLQDLMNSFAVGGNSSIFEDGFEAYEHSNNNSNRDPKVHAMSGSSSSIGGSDRLTRDFLGVGQIVRGMSGSGGVAQREQQQQHGFNLSSLEAERYNNNSNNAAPSSGQAFGGGGGNFQ

SEQ ID NO: 8359 - protein, 435 aa, Yarrowia lipolytica CLIB122
MEIAQKAHLAATVLKTVSNDDRTATLKMVHDALREAKDEVIAANVKDLDAAKSANLSPSLIKRLDLSTGDKYDSMLQGILDVASLDDPVGKVTLARKLDDNLELYRLTCPVGVLLVIFEARPEVIANITALAIKSGNAAILKGGKESLHSFTAIAKAVTKALEKSKVPPGAIQLIATRDEVSSLLSQDQYIDLVIPRGSNELVKHIKDNTKIPVMGHADGICAIYVDQDANAKMAADIVVDAKTNYPAGCNSVETLLINEKVISDKWPTVASALVDANVEIRATPELIEALPADLKSHCKTATEEDFKTEFLAHIIAAKSVPTVEDAMAHINSHGSSHTDCIITDNETTAGKFLKGIDSAGVYWNASTRFADGFRYGFGTEVGVSTNKIHARGPVGLEGLVNYQYILKGNGQIAASYLGAGGDKPFKHEDLPLEN

SEQ ID NO: 8360 - protein, 545 aa, Listeria innocua Clip11262
MELAFPVAVNHVIDTLLPGKDFGLIITAALALLFFYILNTFMQYIVTYFGHMLGLNIETDMRRDLFSHLQKQPFGFYDNQKTGKLMSRMTTDLFEIGEVAHHGPEDIFISIMSLFGAFFLMLNINVKLAISTFILVPILTVLIVYFNKRMTKVTTGIFKDLGNFNAGVENAISGVRVVQAFANEPHEKGRFAVLNQAYRKSKLMFYKVMGLSFSFNYFLMRLISLFALLFGAYFTINGEISYGEFVGFILLTNVFIRPIEKINNVIESYPKGFAGFKRFLEVMDTEPAIQDEKDAKPASAFRGDIEYKDVSFEYSDGKNVLSHINLSIKAGETVAFVGPSGAGKTTICNLLPRFYDVSDGEITIDAENIKHFTLPSLRAQIGVVQQDVFLFSGTVRENIAYGKLDASNEEIEHVVKLAHLSKVVEEMPDGLDTIIGERGVKLSGGQKQRLAIARMFLKNPPILILDEATSALDTETEQVIQASLEELAEGRTTLIIAHRLATIKHADRIIVVNETGIAETGTHDELLAKENGAYKRLYDAQFNTI

SEQ ID NO: 8361 - protein, 188 aa, Triticum aestivum
  misc_feature (156)..(156): Xaa can be any naturally occurring amino acid
  unsure (1)..(188): unsure at all Xaa locations
MCGILAVLGVGDVSLAKRSRIIELSRRLRHRGPDWSGIHSFEDCYLAHQRLAIVDPTSGDQPLYNEDKTVVVTVNGEIYNHEELKAKLKPHKFQTGSDCEVIAHLYEEYGEEFVDMLDGMFSFVLLDTRDKSFIAARNAIGICPLYMGWGLDGSVXFSSEMKALSDDCKRFISFPPGPLYSSKNGGPK

SEQ ID NO: 8362 - protein, 734 aa, Bacteroides fragilis NCTC 9343
MDSILFWLVPFASVLALCFALYFHKQMMKESEGTPQMIKIAAAVRRGAMSYLKQQYKIVGWVFLGLVILFSVMAYGFQVQNAWVPIAFLTGGFFSGLSGFLGMKTATYASARTANAARTSLNAGLRIAFRSGAVMGLVVVGLGLLDISFWYLLLNWAIPADVLTPTHKLCIITTTMLTFGMGASTQALFARVGGGIYTKAADVGADLVGKVEAGIPEDDPRNPATIADNVGDNVGDVAGMGADLYESYCGSILATAALGAAAFIHTDDTVMQFKAVIAPMLIAAIGIILSIIGIFSVRTKENATMKDLLGSLAWGTNLSSALIVAVTFFILWLLQLDNWMWISCAVVVGLVVGIVIGRSTEYYTSQSYRPTQKLSESGKTGPATVIISGIGLGMLSTAIPVVAVVIGIIASYLLASGFDFNNVGMGLYGIGIAAVGMLSTLGITLATDAYGPIADNAGGNAEMSSLGKEVRKRTDALDSLGNTTAATGKGFAIGSAALTGLALLASYIEEIRIGLTRLGNLVLTFPNGDTISTANATFVDFMNYYEVNLMNPKVLSGMFLGSMMAFLFCGLTMNAVGRAAGHMVDEVRRQFREMKGILTGETEPDYERCVAISTKGAQREMVVPSLIAIIAPILTGLIFGVPGVLGLLIGGLSSGFVLAIFMANAGGAWDNAKKYVEEGNFGGKGSEVHKATVVGDTVGDPFKDTSGPSLNILIKLMSMVAIVMAGLTVAWSLF

SEQ ID NO: 8363 - protein, 492 aa, Capsicum annuum
MDLSKYRPSSAYDSPFLTTNAGGPVYNNVSSLTVGPRGPVLLEDYHLIEKLATFVRERIPERVVHARGASAKGFFEVTHDISHLTCADFLRAPGVQTPVICRFSTVVHERGSPESIRDIRGFAVKFYTREGNFDLVGNNVPVFFNRDAKSFPDTIRALKPNPKSHIQENWRILDFFSFLPESLHTFAFFYDDVCLPTDYRHMEGFGVHAYQLINKAGKAHYVKFHWKPTCGVKSMTEEEAIRVGGTNHSHATKDLYDSIAAGNYPEWKLFIQIMNPEDVDKFDFDPLDVTKTWPEDILPLMPVGRLVLNRNIDNFFAENEQLAFNPGHIVPGVYYSEDKLLQTRIFAYADTQRHRIGPNYMQLPVNAPKCAHHNNHRDGAMNFMHRDEEVDYLPSRFDPCRPAEQYPIPSCVLTGRREKCVIPKENNFKQAGERYRSWAPDRQDRYINKWVESLSDPRATHEIRSIWISYLSQADKSCGQKVASRLTVKPTM

SEQ ID NO: 8364 - protein, 356 aa, Burkholderia fungorum LB400
MNKILIVGALGAVGQCALEHFESLPEWQVVGASRRKPVFPTKAEWVSVDLRDRADCEAKLGQLRDVTHIAYTAVYEKADVTRGWSEMDHVQINLDMLKNCIEVVEKASTNLRHITMLQGTKAYGGHLGPFRQPARESDPRYMGPNFYYPQMDWLAEQQKGKDWSWTILRPQIVCGIALGSPLNIVSAIGVYAAISREYGIPLRFPGGASRIGEATDARLIAKAMAWAGTHSAAANQTFNITNGDVYVWENIWPRIAKLFDMETAPAHPFSLARVMPQNEPIWDKIVQKYDLAPNTYAEIVPSWQFADFLLGYGQRPNPHHMSTIKIRQAGFNDCIDSEEMFVELISDLQRRRVLPA

SEQ ID NO: 8365 - protein, 78 aa, Triticum aestivum
MGKLVSAALLLVLLLAATGEMGGPVAVAEARRCESLSHRFAGLCLRGHNCANVCRTEGFPDGKCRGARRRCFCTTHCR

SEQ ID NO: 8366 - protein, 382 aa, Solanum pinnatisectum
MASEAHPVVDAHSFPKTPTVCVTGAAGFIGSWLVMRLLERGYNVHATVRDPENQKKVKHLLELPKADTNLTLWKADLAVEGSFDEAIQGCQGVFHVATPMDFESKDPENEVIKPTVRGMLSIIESCAKANTVKRLVFTSSAGTLDVQEDQKLFYDETSWSDLDFIYAKKMTGWMYFVSKILAEKAAMEEAKKNNIDFISIIPPLVVGPFITPTFPPSLITALSLITGNEAHYGIIKQGQYVHLDDLCEAHIFLYEYPKAEGRFICSSHHAIIYDVAKIVRQKWPEYYVPTEFKGIDKDLPIVFFSSKKLMDMGFQFKYTLEDMYKGAIETCRQKQLLPFSTRSTADNGKDKEAIPISTENYSSGKENAPVANCTGKFTNGEI

SEQ ID NO: 8367 - protein, 309 aa, Crocosphaera watsonii WH 8501
MSIVIFGSINMDMIAQTPHLPQPGETVIGDHFITLPGGKGANQAVATAKLGRLTYFVGRVGGDSFGRELLKRLETLKINTQGVFIDQKTFSGVAMINVETSGENTIIVIPGANGNIDESDITRLEKILSKTSLLLLQLEIPLAAVEMAAREAKELGVTVMLDPAPAPEKLPDRLYPLIDIITPNQNEAEKLVGFPLDNEEEIKKAANVLLKKGVKIVVIKLGDKGAFYATDKEQDFVPAIKVKTIDTVGAGDGFNGGIAAALDRGLCLKEALKWGTIVGALTTTKEGAQTALPDLDVVHSLLLSDNSSV

SEQ ID NO: 8368 - protein, 161 aa, Arabidopsis thaliana
MNSVCISSCINDAHDPRVPVRPVRASYVNLYKWPESDAEFVRSVRRGGGLPAARVVDSISCRQMYLRSYTFSREDDESKSEKVSSGTQTSCLGRVKGTASSRRKSKEENGIIIVESTKPRRRGEKRRVSRKNKQEQACSVILRIFRRLLSCAATVDVVDPN

SEQ ID NO: 8369 - protein, 328 aa, Rhodobacter sphaeroides 2.4.1
MAQRVLVTGGAGYIGSHACKVLKRAGFEPVTFDNLSTGWEQAVKFGPLARGDLMDRASIDAALETWKPVAVMHFAALSLVGESMRDPGTYWRVNVTGALNLLEATVAAGVKNFVFSSTCATYGDQDGVVLDEDTPQRPINAYGASKRAIEEMVANFGAAFGLNHTIFRYFNVAGADPEGEVGEQHDPETHLIPLMLDAVAGRRPALTVFGTDYPTRDGTCIRDYVHVMDLAQAHVLGLNRLLDGGPNRVFCLGTGRGFSVREVIEQSRAVTNREVPILFGDRRSGDAAALVCGSERAVRELGWEPELSTLPHMIADAWRWHRAPKFHE

SEQ ID NO: 8370 - protein, 205 aa, Brassica napus
  misc_feature (168)..(168): Xaa can be any naturally occurring amino acid
  misc_feature (196)..(196): Xaa can be any naturally occurring amino acid
  unsure (1)..(205): unsure at all Xaa locations
MQTSAESVIVSVAISVVLLWIWRTLKWVWFKPKMLESYLRRQGIAGTPYTPLVGDMRRDNSMSKEARSKPIKLTDDIISRVLPFPSHMLKTYGRTFFTWRGTIPSITITDPEQIKEVFNKVYDFPKPHTFPLTNLIISGLFSYDGDKWAKHRRIINPAFHLEKIKNMXPVFHQSCNEVVDKWDKMVSDKGSSCEVXDVWPGLMSI

SEQ ID NO: 8371 - protein, 169 aa, Sulfolobus tokodaii str. 7
MVMDKVKEYKKEKNPFRLFVDHLNAVGTGIKYMIQPQRITLKYPEESLTLPTGYRGMIRLYKDICIGCTLCALICPADAMKMVTEGGKKFPSINYGRCVFCGFCVDVCPVDALKETRVHDAVFTNRRDLVFRPDRFDQDFDQPIPSQGIVKKVRAVVDEKKGIKYVPDE

SEQ ID NO: 8372 - protein, 148 aa, Triticum aestivum
  misc_feature (134)..(139): Xaa can be any naturally occurring amino acid
  misc_feature (146)..(147): Xaa can be any naturally occurring amino acid
  unsure (1)..(148): unsure at all Xaa locations
MGESNENIQFSWGKKRAKGGAKMDTQFYGSFTFDNVKYSLYDCVYLFKNGESEPYIGKIVKIWQQNEAKKVKILWFFTPDEIRNYLRGPVAENEIFLASGDGTGLADINPLESIAGKCTVVCISKDERNRQPTXXXXXXADYIFYXXF

SEQ ID NO: 8373 - protein, 264 aa, Geobacter sulfurreducens PCA
MSRIAGTFAELKHNSRKALVTFITAGDPDLAATEALIPLLAESGADIVELGVPFSDPMADGPTIQLSSERALAAGTTLPKILDMVRRVRTRCQVPIVLMGYYNPILIHGLERFAADASAAGVDGVLLVDLPPEEAAEFKACADRHGLDVIFLLTPTSDEGRIRKVARQARGFVYYVSVTGVTGARSGVEASVSSNVAAIREAITVPVVVGFGISTPDQAAQVAASADGVVVGSAIVKLFERFTAAELGREVATFVSALREAIGN

SEQ ID NO: 8374 - protein, 447 aa, Erwinia carotovora subsp. atroseptica SCRI1043
MAQIVSLASFLDSVQQRDPHQPEFLQAVNEVLSTLWPFLEQNPHYADYSLLERLVEPERVIQFRVAWTDDKGQVQVNRAWRVQFSSAIGPYKGGMRFHPSVNLSILKFLGFEQTFKNALTTLPMGGGKGGSDFNPKGKSQGEVMRFCQALMTELYRHLGADTDVPAGDIGVGGREVGFMTGMMKKLTNNTACVFTGKGLSFGGSLIRPEATGYGLIYFTEAMLKRHGLGFEGMRVAVSGSGNVAQYAIEKAMELGARVVTVSDSNGTVVDENGFTPEKLALLEEIKNKRYGRVEDYAREAKLTYLAGKTPWEVPVDIALPCATQNELDLPAAQTLIANGVKAVAEGANMPTTIPATDAFLDAGVLFAPGKAANAGGVATSGLEMAQNAARLGWKAEKVDARLHHIMLDIHTACVQYGGEDSQTNYVRGANVAGFVKVADAMLAQGVV

SEQ ID NO: 8375 - protein, 137 aa, Triticum aestivum
MVLSMKHCRDQAQEVPLSLSLSLGAMADRTKKQRRGVAAGEFVCKTCSRAFPSFQALGGHRTSHLRGRHGLALGLAAGINEPSSTKKTVDQKQAHQCHVCGLEFEMGQALGGHMRRHREQESATTAQAPPVLLQLFV

SEQ ID NO: 8376 - protein, 148 aa, Brassica napus
YADTQRHRLGPNYLQLPVNAPKCAHHNNHHEGFMNVMHRDEEVNYFPSRYDPVRHAEKYPTPPAVCSGKRERCVIEKENNFKEPGERYLKYRSFTPERQERFIGRWIDALSDPRITHEIRSIWISYWSQADKSLGQKLASRLNVRPSI

SEQ ID NO: 8377 - protein, 481 aa, Leptospira interrogans serovar Copenhageni str. Fiocruz L1-130
MSRKTLTTAGGHPVSQNQHSLTAGPRGPVLIQDTHLIEKLAHFNRERIPERVVHAKGAGAYGTLTITQDLTKYSRASIFSKKGKQTSLFLRFSTVAGEKGSADTERDPRGFAVKFYTDEGIWDLVGNNTPVFFARDPLKFPDFIHSQKRDPVTGYKNPIRMWDYWAGSPEAFHQITILFGDRGIPDGYRFMNGYGSHTFGLWNSKGERFWTKFHFKSMQGIRNLSMEKASALAGTDPDYATRDLFEAIERKEFPKWKFCVQIMPEKEATKYKFNPFDLTKVWSHKDYPLIEVGVLELNSNPKNYFEEVEQAAFSPSNMPPGIGASPDKMLQGRLFAYPDAHRYRLGIQYQQLPVNRPKNSVNVYHRDGRTRFQCDGNYDNYEPNGFEGPVQDSSYAEPPLSISGDMDRYNSHIGNDDYSQAGDLYRLMSVEERERLTSAIASTMHNLPKPLLEANLKHFHLCDPEYGEQLAAKVGLALSRV

SEQ ID NO: 8378 - protein, 395 aa, Bradyrhizobium japonicum USDA 110
MTVRAGREFLAIPGPTTMPDEVLRAMHRPAIDIYSKEMLDLTESLLSDISKLFATRGKSYIYIANGHGAWEAALSNVLSRGDKVLVLESGRFAIGWGNAAALMGAEVEVLKGDWRRAVRPHEVEERLRRDKEHRIKAVVVVQVDTASGVQNDIEAIGKAIKASGHPALYMVDTVASLGCMPFEMDKWGVDVAMSGSQKGLMTPPGLGFVSANARALEVHKKANMSTPYWSWSEREGTENYRKYAGTAPVHLLFALRKAIDLLHEEGLENAFRRHSLLGEAARRAVSAWTEGQVLGFNIAEASERSNTVTTVTMSNGHDPAVLQRYCKDKCGVVLGTGIGDLSGQAFRIAHMGHINAPMLLGTLGVVEIGLNALKIPHGKGGLEAAVAYLGEEVAA

SEQ ID NO: 8379 - protein, 458 aa, Ashbya gossypii ATCC 10895
MDSTKLSCDKVSLLQLASIRRNVWDSKASHPRLIHMEMVAHQSACQEYSIEILKHLIDLENQTRSSWTSFQSQPELTVEMRTLIFDFIMSCHTRLGLSSSTLFLCYNIIDRYCSKIIVKSPTYQLLGLTALWLASKFADKKPRIPSLQSLCCHQHTKQQFKEMELHILKSLNWSVCSAPSHDSFVDILLKTKIANLSFKRLNLNDLKYGATILCELSCFDPALNYNYNSSAIALASVTVITCALRLAELSEFIDCRRCTTDKNLIVICNQLLCLLACEDNFPSSFNLKYASEGGTLHSNPIMARLFAYYRRLADEKKRSWRDAGTRVGSPCAGSAPDSAAGGSPDIRIGGDTPPGSVPPSALGPLAPHMPTIKTFVPPTPTTPSNSSRTQLSLCAKPHTLPAPVSVAASARAKGTAHQHTPPVQNPAHLLHTAQSKRAASAMDLEFFDMDHALVKKLR

SEQ ID NO: 8380 - protein, 717 aa, Ustilago maydis 521
MTDQIKAVFAAKAVKNEAVFVSFVTAGFPTKDDTVEVLLALEQGGADVIELGVPFSDPQADGPAIQESNQVALEQGVGYTQCLDYIRQARSKGLKAPVLLMGYYNPTLAYGEDKAVQDAKAAGANGFIMVDLPPEEAADFRASCTKHGLSYVPLIAPSTSTKRIEHLASLADSFIYVVSKMGTTGATAAVSSSLPDLISKIRSITSIPLAVGFGVSTRQHFIEVGEHADGVVIGSKLIAKLREAPANTAARVEAARSYCAEITGKNEGGIQRKQPLSIKHVIEQPDSVPIPKVDGVVPADRPPVAGLDTIVDSEGKLRPPRFGKFGGQYIPEALFDAHQELEKAYLDALDDPEFWKEFEGYYEYIGRPSELYHAERMSKEAGGAQIWFKREDLNHTGSHKINNAVGQILLARRLGKTRIIAETGAGQHGVATATACAKFGMECVVYMGSEDVRRQSLNAFRMKMLGAKVVAVESGSKTLKDAINEANRDWVTNLHNTHYIVGSAIGPHPFPSIVRDFQSIIGKEVKQQLQEKKGKLPDAIVACVGGGSNAIGIFHPFVQDKSVRLIGVEAGGDGIDTDRHSATLSRGTPGVLHGVRTYLLQDKFGQITETHSISAGLDYPGVGPEHSFLKDSGRAEYIAATDEEALRGFKLCTQLEGIIPALETSHALWSAFQIAKTMKPDEDIVVSLSGRGDKDVEQIANAIANAGWAERLGWNIA

SEQ ID NO: 8381 - protein, 137 aa, Physcomitrella patens
MRWIVGGGVQRTIASPGRGILAIDESNATCGKRLASIGLENNEVNRQAYRQLLCTTPGLGEYISGAIMFEETLYQSTSDGKKMVDCLVEGGIVPGIKVDKGLVPLAGSNEESWCQGLDGLASRTAAYYKQGARFAKW

SEQ ID NO: 8382 - protein, 223 aa, Bacillus cereus G9241
MKILVVDDESSIRNLIRMQLEMEGYEVLTAADGREALEKWNEGPDVLILDVMLPDTDGYELLRLFREKDRDIPVLMLTAKSQMNDKLLGLQLGADDYVTKPFNYAELILRVKNMTRRVKKKEVTVSHEVIGAGEITICPKERKVHVSGQEIQLTYREFNLCQLFVSNPQRVFMRDELLEKVWGFEYIGNTRAVDIMVQRLRKKLGNSGEYIKTIYGVGYKLDC

SEQ ID NO: 8383 - protein, 363 aa, Neurospora crassa
MGSKEHQKPKILLLGTIEHAHEAWSRITSIADIIQPTSTDRTSFLSECASGAFSSCLLAYRTFDSTTLTGPLDHDLISALPPSIKYICHVGAGYDAISIPACTARGIRVSNTPSAVDEATADCALFLLLGAMRNFNAGMTALRRNEWRGGTTVEEEQTKTIKMPPLGRDPRGKTLGILGMGGIGKCLARKVAGAFGMKVQYLNRKRDWEGEKELKEEQGGGSPRVEVEWVETMEQLLGTSDVLSLNLPLNAETRHIISTKEFAMMKPGIVIINTARGAVMDEAALVEALESGQVQSVGLDVYENEPEIHPGLLANPNVMLVPHMGTWTVETETKMEEWAISNVQMAIEEGKLRSIVPEQRNMQ

SEQ ID NO: 8384 - protein, 543 aa, Rhodospirillum rubrum
MAAKDVKFSSDARDRLLRGVDTLANAVKVTLGPKGRNVVIDKSFGAPRITKDGVSVAKEIELKDKFENMGAQMLREVASKSADVAGDGTTTATVLAQAIVREGSKAVAAGMNPMDLKRGIDLAVAAVVKDVKTRSRKIATNDEIAQVGTISANGDEEVGKIIARAMDKVGHEGVITVEEAKGLDTELDVVEGMQFDRGYLSPYFVTNAEKMVADLENPYILIHEKKLSGLQPLLPVLEAVVQSGRPLLIIAEDVEGEALATLVVNRLRGGLKVASVKAPGFGDRRKAMLEDIAILTGGQVISEDLGIKLETVTLDMLGTAKTVTITKDNTTIVDGAGVKADIDARCAQIRATIEDTTSDYDREKLQERLAKLSGGVAVIRVGGASEVEVKEKKDRVDDAMHATRAAVEEGIIAGGGVALLHAAKALDALSPANADQKVGIEIVRRALQAPVRQIAENAGVDGAVVAGKLLESSDADFGYNAQTGVYENLVKVGVIDPTKVVRTALQGAASVASLLITTEAMVAEIPEKKPALPAGGGMGDMDF

SEQ ID NO: 8385 - protein, 348 aa, Oryza sativa (japonica cultivar-group)
MGLDVGEIGMGLDLSLDLKMFAARSAVRMAAAAAKEATGVEACIRSLEEERRKIEMFRRELPLCARLLADVIELMKEEAGKRRKDGDDAEAKAEDGDKTKWMSTAQLWVDSRGSDADSENDRRSGSTSPASRLLGGAEESSSRAVAPPPYFRREERVVLRPAMPLLPPASHRSPPPAAAAAATAAGDDHRHVVASSFATAVPSPVPAALSLQAQAQQQQQQARKSRRCWSPELHRQFVAALQQLGGPQVATPKQIREVMKVDGLTNDEVKSHLQKYRLHNRKSPGTASASHSIVLVGDLWASQEVSCSQSGSPQGPLQLSGSGVAVSAATAGDSCCEDDDKSEGYVRK

SEQ ID NO: 8386 - protein, 99 aa, Rhodospirillum rubrum
MQDRVLVRRLEEDEKTKGGIIIPDTAKEKPMRGEIIATGPGARGEDGVLHPLDVTSGDIVLFGKWTGTEVKIDGVEYLIMKESDILGVIEDADAARRAA

SEQ ID NO: 8387 - protein, 218 aa, Arabidopsis thaliana
MYAYKPQIKVNLSRNTKTNIKTPKKNQSSLLEFEKMGMSKSKGNTHNIFLLCNYILLGSASSCIFLTISLRLFPSLSGLSLIFLYTLTIATAVSGCSIFASSTSATASDRLYGSHMVATVLTAIFQGAVSVLIFTRTGDFLRFLKSYVREEDGEVILKLSGGLCVLMFCLEWIVLVLAFLLKYSDYLDESVVDDDDFKVRRQEEDLKDWPSYPFQLKI

SEQ ID NO: 8388 - protein, 487 aa, Triticum aestivum
MEKASLEEALLPRSLVCKELGGDESLAVGDEVKRQLWLAGPLIAGCLMQNLIQMISVMFVGHLGELPLAGASMASSFAAVTGFSLLLGMATALDTLCGQAFGARQYHLLGIYKQRAMVVLTAASVPLAVVWFYTGEILLLFGQDPDIAAEAGTYARWMIPALFAFGLLQCHVRFLQTQNIVLPVMLSAAATALCHLVVCWLLVYVAGMGSKGAALSNAVSYWVYVIVLAVYVRVSSSCKETWTGFSTEAFRDVLSFFRLAVPSALMVCLEMWSFELIVLLSGLLPNPKLETSVLSISLNTAAFVWMIPFGLGSAISTRVSNELGAGRPDAARLAVRVVVFLAMAEGLIMGLVLICIRYVWGHAYSDVEEVVTYVAWMMLIISVSNFFDGIQCVLSGVARGCGWQKIGAWINLGAYYIVGIPSAYLIAFVLQVGGTGLWLGIICGLMVQVLLLMTITICTDWDREADKAKDRVFSSSLPTDFATEDHT

SEQ ID NO: 8389 - protein, 145 aa, Ashbya gossypii ATCC 10895
MQALGGNEEPPAETDELDVFHNVGQGLAGRYREIMVQYWQQLINEIESTNEPGSPHRDDFKSHSLPLARIKKVMKTDEDVKMISAEAPILFAKACEIFITELTMRAWCIAEENKRRTLQKQDIAQALQKSDMFDFLIDIVPRGLE

SEQ ID NO: 8390 - protein, 470 aa, Neurospora crassa
MAMNLRTGSRAFGGALRNHARVSRRGYATAEPDLKTVLKEAIPEKRELFKKVKAHGNKVLGEVKVENTIGGMRGLKAMIWEGSVLDANEGIRFHGRTIKDCQKELPKGKNGTEMLPEAMFWLLLTGKVPSTNQVRQFSRELAEQAALPDFVNKLLDGFPKDLHPMTQFAIAVSALNHTSKFAKAYEQGLNKADYWEPTFDDCISLLGKLPTIAAKIYQNSYKGGGALPAEVDLEQDWAYNFAAMLGKPGKENENFQDLLRLYLALHGDHEGGNVSAHTTHLVGSALSDPFLAYSAGLQGLAGPLHGLAAQEVLRWILQMKEAIPSSYTDEDVRSYLWNTLNSGRVVPGYGHAVLRKPDPRFEALMDYAASRPKIAADPVFQLVLKNSQIAPEVLKQHGKTKNPYPNVDSSSGVLFHHYGFHETLYYTATFGVSRGLGPLAQLIWDRALGLPIERPKSINLEGILKQVEGQ

SEQ ID NO: 8391 - protein, 618 aa, Neurospora crassa
MLRRAIPRISRRTVPAQTSSPLFGLCARPVRTSTTTSAHARLLSTSAARMTAPSPLAPVEHPFSSTIPFESFQLLPEEQKAGAAEDALLQQQIKEVEAWWASPRFKGIKRDWTAADVVSKRGSLQQTYTSSVMARKLWNLVQERYAQGKPIHTLGAIDPVQMTQQAPHQEVLYISGWACSSVLTSTNEVSPDFGDYPYNTVPNQVQRLHKAQSMHDRKQWFLRSKMTPEERAKTPYTDYFRPIIADGDTGHGGLTAVMKLAKLFAENGAAGVHFEDQMHGGKKCGHLAGKVLVPTGEHINRLKAARFQWDVMGTENLVIARTDSESGKLLSSSIDARDHEFILGVADPSITSLAETLADMEARGAPGSEIDAYEAEWVKNTKLVTFDEAALAHFEHHNVRQDLFATYKATIAQNPNMGITARRALAQSITPEHPVYWDWDVPRTREGFYHFRNGMAAATKRALAFGPYADLLWVETGDPSVEVATELGRAVREQFPGKGLVYNLSPSFNWMAHGFTQDTLKSFVWDIAKEGFTLQLVSLAGLHSTATISNELARRYKNEGMQAYVELVQKREKELGVDVLTHQKWSGANYVDAILGHIQSGSSSSKSMGEGNTENQFV

SEQ ID NO: 8392 - protein, 161 aa, Zea mays
MAGKSHTRKAFLLCNYVLMGAASSCIFLTLSLRLLPSPCGLLLLFLHALTAVFSAAGCSGSFTAPATPAQWHNAHTAGAALTAIFQGAVALLAFTRTSDFLAELQSYVRDEDGAVILKMVGGLGTAIFVLEWAALALAFSLRLDDDDDDDLQAKNRQPYHV

SEQ ID NO: 8393 - protein, 329 aa, Oryza sativa (japonica cultivar-group)
MNTAVEVRCAAAGGGGVNAAAFGRRMMRPAPAGHCRVIRAAATSTVASGRGEDDYYKVLSLDRAGEVGAEEIRRAYRRLALRYHPDACPPSRRAESTRLFLQLRRAYETLSDPALRVRYDAELMMRVRRPARPAAEEDASSSSSSLARDVWEAQLRTLRARSDERRRHGADGTARRGRWFEIIVEVVLEIINFQEMNRVYWFVGTGDSMPRESICTDGPGVGLVSNRQLNGGPTGDKQRLDRRHTGGQTGGGDSKRQLIPAVRLEIESRSDRRQPGGQTGASTSVRPRSIDFEEILGSAVCDNIEVGSSAPYSKENGQSRDKPNSIKNL

SEQ ID NO: 8394 - protein, 282 aa, Neurospora crassa
MPGRLAGKNAIITGAAGGIGLETSILFAKEGANVLMADISAEAIQRAEAKVKQLVPNASRVESIVCDVSKEDQVEKMVSHLDSWGGLDIIFNNAGIMHSQDDDAVATPESIWDLTHNINVKGVWFGCKHAVLSLRKHKKTKGSIINTASVVALVGSATPQLAYTASKGAVLAMTRELAMVHAREGFRFNSLCPAPLNTPLLQDWLGDDKAKRLRREIHFPTGRFGEAVEQAQAVVFLASDEASFVNGHDMVVDGGMTKAYVTPEGPATAAPVNNALKESLEE

SEQ ID NO: 8395 - protein, 159 aa, Ustilago maydis 521
MQIFVKTLTGKTITLEVESSDTIDNVKAKIQDKEGIPPDQQRLIFAGKQLEDGRTLSDYNIQKESTLHLVLRLRGGAKKRKKKVYSTPKRIPHKRKKVKMSILKYYKVDGDGNIKRLRRECPSPECGAGIFMSWHRNRQYCGKCKLTFMFEEGTKPPTA

SEQ ID NO: 8396 - protein, 295 aa, Kluyveromyces lactis NRRL Y-1140
MSELTNYKRLEKVGEGTYGVVYKAVDLRHQNRVVAMKKIRLESEDEGVPSTAIREISLLKELKDDNIVRLYDIVHSDAHKLYLVFEFLDLDLKRYMESIPKDQPLGGNIIKKFMMQLCKGIAYCHAHRIIHRDLKPQNLLINRDGNLKLGDFGLARAFGVPLRAYTHEIVTLWYRAPEVLLGGKQYSTGVDVWSIGCIFAEMCNRKPLFSGDSEIDQIFKIFRVLGTPNERTWPDIIYLPDFKTTFPKWNRRNLSEVIPSLDANGIDLLDKLITYDPIHRISAKRAVQHPYFKEE

SEQ ID NO: 8397 - protein, 462 aa, Pirellula sp. 1
MPISGKHFPIADGTSMSLSCRTTIQTATLALLALLSGVHHSPLVSAQDNGPRKSMRVATDRDIVSGGSRLEGPRSGTMMPTPDQVDVTRDRLFDDLAEEFEHFDRLGNLVRRVSHLVKPSVIHIEAHKTQGSGATAESFDEAGSGVVLDVAGESWVLTNRHVIKGAASNQIVMRTSDGRRWVPEKILMDPNTDVAVMKLSPSIAGIESAERDSIRRGTSSFAKMPPAARLANSDEVQIGDFVIAIGSPFGLSHSVTFGILSAKGRRDLSLGEERIDLQDFFQTDAAINPGNSGGPLLNLRGEVIALNTAIASSSGGSEGIGFAIPINMAARVAEELIVHGRLRRGYLGVTLDPNFAAADLSPASGIYASMKITPDFDSRFGSQEEIKLGGARVKDIRPGSPAELAHLQRGDIILQFDSINVEDDDHLVALAGMAQPDQRPISMVILRDGKRYRTEVTLTFQP

SEQ ID NO: 8398 - protein, 342 aa, Spinacia oleracea
MVVQGEIVCVTGAAGFIGSWLVKRLLEHGYIVRATVRDPGNVKKVQHLLDLPNANTHLTLWKADLNEQGSFDEAISGCAGVFHVATPMDFDSNDPENEVIKPTINGMLDIMRSCAKAKIRRLVFTSSAGTVNVEEIQKPVYDETCWSDMEFCSSKKMTGWMYFVSKTLAEKAAWKFAAENNLDFISIIPPLVVGPFITPTMPPSLITALSPITRNEAHYSIIKQGQFVHLDDLCMAHIYLYEHPNAKGRYIASACDATIYDIGKMLREEYPEYNIPTKFKDFEEDMEHVHFSSEKLMGLNFKFKYELKDMYKGAVDTCRTKGLLPPSYGENENNENPNTIID

SEQ ID NO: 8399 - protein, 655 aa, Claviceps purpurea
MDSNGNRLHLDFGSNDRLPVNDRAYPTTPSTFPQPVLSPPTAQQQQQQQQQQQTCGGLQPPQQQPNGASGSASASTPASASTSAVGYAPQGYFSQPGAAQSANNEFAQNGYLQGRSNTPGTNDPNVGLAHQFSHQNLGGSVRSAPRGPPSSQRPRTAGSQPAGAYAGYSNSNAPPLPTQSGTSTVSEFRPAPERNPDRYGPNAMSNQKKCSQLAVDFFKDSVKRARERNQRQSELEQKLQDPTQSSVRKEQLWSTAGRKEGQYLRFLRTKDKPENYNTIKIIGKGAFGEVKLVQKKGDGKVYAMKSLIKTEMFKKDQLAHVRSERDILAESDSPWVVKLYTTFQDAYFLYMLMEFLPGGDLMTMLIKYEIFSEDITRFYIAEIVLAIEAVHKLGFIHRDIKPDNILLDRGGHVKLTDFGLSTGFHRLHDNNYYQQLLQGRSNRPRDRNSVAIDQINLTVSNRSQINDWRRSRRLLAYSTVGTPDYIAPEIFTGHGYTFDCDWWSLGTIMFECLVGWPPFCAEDSHDTYRKIVNWRQTLYFPDDITLGVEAENLIRNMVCNTENRLGRGGAHEIKNHPFFRGVEFDGLRRIRAPFEPRLTSNIDTTYFPTDEIDQTDNATVLKAQALQMGHPMEESPEMSLPFIGYTFKRFDNNFR

SEQ ID NO: 8400 - protein, 220 aa, Methanococcus maripaludis S2
MSDENLLTTLDTYLASGIHIGTQQKTEDMRRFIYRVRADGLYVLDVRKTDERLRLAAKFLSNYEPEDIMAVTRRVYSVGPLKEFGKVTGINTVAGRFVPGTLTNPSARKFAEPEVLFLSDPRVDKQALKEAIEIGIPVIGMCDTEHLTAHIDFIIPTNNKGRKSVSLMYYLIAREYMKNRGLIGEEAPFSYDQFLEKAMNVKVKMNPSNRQRGRFHRRRR

SEQ ID NO: 8401 - protein, 228 aa, Actinobacillus pleuropneumoniae serovar 1 str. 4074
MKKYFAEFFGTFWLVFGGCGSAVLAAGIPELGIGYAGVSLAFGLTVLTMAYAVGHISGGHFNPAVSIGLLVGGRFNAKDLVPYIVAQVIGAIAAAAVLYTIASGAAGFDVTAGFASNGFAEHSPHGYSMAAALVIEVVLTAFFLIIIMGATDKRAPAGFAPIAIGLALTLIHLISIPVTNTSVNPARSTGVALFQGSWAIEQLWLFWVAPILGAIIGALAYRFIAEEK

SEQ ID NO: 8402 - protein, 455 aa, Photobacterium damselae subsp. piscicida
MRKPLLVLSALALGISSVVTPMTATAALPTAVNNQQVPSLAPMLEQVTPAVVSIAVEGKHVSKQRLPEAYRFFFGPDFPTEQVREQPFRGLGSGVIIDAKKGYVVTNNHVIDGADTIKVQLSDGREIKAKLLGTDKMSDIALLQLEDAKDLTAIKLADSDNLRVGDFAVAIGNPFGLGQTVTSGIVSALGRSGLNIENFENFIQTDAPINSGNSGGALVNLNGELIGINTAILAPNGGNVGIGFAIPANMVKNLTDQLIEFGQVKRGVLGVTGGELTSELAETFGYKTNHGAFVNQVLPEGSAAKAGLKAGDIIVSVNNKPIRTFSELRAKIVTLGAGKKVTLGLIRDGKELNVPVTLEAAKQTQVKADDLHESLAGAEFANTSPEDKVHGVKVTELNKQSIAARYGLKKGDIIIGLNRQPIKNLGELRKALEKKPNVLAMEVKRGDSVLYLIMR

SEQ ID NO: 8403 - protein, 340 aa, Phytolacca americana
MVAQGETVCVTGAAGFIGSWLIKTLLDRGYVVRATVRDPDNTKKVQHLLDLPNAKTYLTLWKADLNEEGSFDDAINGCTGVFHVATPMDFDSKDPENEVIKPTINGLLDIMRSCVKAKIRRLVFTSSAGTVNVEEVQKPVYDESCWSDMEFCRSKRMTGWMYFVSKTLAEQAAWKFAAENKLDFVTVIPPLVVGPFITPTMPPSLITALSPITRNEAHYSIIKQGQFVHLDDLCMAHIFLYEHPNAQGRYIASACDATIFNIGKMLREEYPEYNVPTKFKDFKEDMERVHFSSKKLTDLGFEFKYGLKEMYTGAVESCRAKGLLHDHAANSLDNDVNGTT

SEQ ID NO: 8404 - protein, 457 aa, Lotus corniculatus
MAASSVFSVASHSVSPSNHHAHKGKTKIGGSGLRLANSRSFGSGRISMAVAVNASRFEGIPMAPPDPILGVSEAFKADKCDLKLNLGVGAYRTEELQPYVLNVVKKAENLMLNRGENKEYLPIEGWAAFNKATAELLLGADNPAIKEQRVATVQGLSGTGSLRHAAALIERYFPGAKVLISSPTWGNHKNIFNDARVPWSEYRYYDPKTVGLDFEGMLEDIKSAPEGSFVLLHGCAHNPTGIDPTPEQWVKIADLIQQKNHIPFFDVAYQGFASGSLDEDAASVRLFVSRGMEVLVAQSYSKNLGLYAERIGAINVISSSPESAARVKSQLKRIARPMYSNPPVHGARIVADIVGNPDLFNEWKAEMEMMAGRIKNVRQKLYDSISSKDKSGKDWSFILKQIGMFSFTGLNKNQSDNMTNKWHVYMTKDGRISLAGLSLAKCEYLADAIIDSYHNVS

SEQ ID NO: 8405 - protein, 371 aa, Photobacterium damselae subsp. piscicida
MLAFLGRSVLLGLATAAILLLAVPDLRQNIISTPTVSISDDDSSSQLSFNYAVRRASPAVVNIYNRRYNTEDRLKLTTQGLGSGVIMSDKGYILTNYHVVAQADQVIVALQDGRFFTAQLIGKDQKTDLAVLKINAENLPVIPVNPNYKAAVGDVVLAIGNPYNLGQTTTFGIISATGRSGVSFYGHQDFLQTDAAINEGNSGGALVNTKGELVGINTASFHPANIETYGISFAIPYESAIKIMKKLIADGRVIRGYIGIIAEKLNPVMARLYDADQINGILVLGMNPDGPAAKAGIHVRDILVEIDGKPVKDMLSVLDIVTDIRPGTHVKVKVLRNGKPMILDVLIGNKPENLGTKPEPPVQQLPPVPPS

SEQ ID NO: 8406 - protein, 636 aa, Guillardia theta
MRRSVLSAAAVLSLSLSLLSLTPSNASTGVSSFSSSHRIPSLTRSALRLSKEGKGEDDKYGDPEAYVPQGGSKVTRNFMTCEDLRMSLRGGAGSDAIVPDQKLQIVFVSAEIAPWSVTGGLGAVCDGLPRALAKLGHRVMSIAPRYDQYYDAWDTEFTAEVPLGDTTTTVRFFHAFKKGVDRVFVDHPLFLEKVWGLSKQKLYGPKWGKDYEDNQLRFAMFCAAAMAATEKLSLGGYPYGQDVIFVANDWHAALVPMYLKKAQKEGTGWFKAKSACLLHNMVFQGRFPYDPNAASRLRLPQAMVDEMVTKQPLKVGRQKKASKGLKESVEIPNPPMDVLNFLTGAIKFSDAVLTVSPQYAKEVASSSAKGAELEKILTKTGIKGILNGVEDIVNPSNAELGLDIMYDGASLEKKAQGKTAMQKSLGFAVDENIPMFVFMGRLDAQKGVDIMFEAIDSALKGGMNAQFVTMGSGIEELEEVAAELEERYPNNFKAVLSFKGQEKYKTYAAADFAIMPSRYEPCGLVQMEGMRFGTLPIVCPTGGLLDTVSDMETGLVMEHEVDQDDITPADVEMLVKNFNRAISLYGNKDKYKQMQVNAMAAAKDYSWTRAAKQYVNTFLEIGGPNQLNMKDWFDII

SEQ ID NO: 8407 - protein, 176 aa, Triticum aestivum
  misc_feature (9)..(9): Xaa can be any naturally occurring amino acid
  misc_feature (79)..(79): Xaa can be any naturally occurring amino acid
  misc_feature (87)..(87): Xaa can be any naturally occurring amino acid
  misc_feature (108)..(108): Xaa can be any naturally occurring amino acid
  unsure (1)..(176): unsure at all Xaa locations
QPGRPLMAXSATSLAPFQGLKSPAGFPVKRRSKGGSLGRVRNGGRIRCMQVWPIEGIKKFETLFYLPPLSTEALLKQVXYLIRSKWXPCLEFSKVGFIFREHNGSPGXYDGRYWTMWKLPMFGCTDATQVINEVEEVKEEYPDGYVRIIGFDNMPQVQWVSFIAFKPPGCEESGKA

SEQ ID NO: 8408 - protein, 426 aa, Thiobacillus denitrificans ATCC 25259
MMDVKSYMQTLGRQAREASRAIARADTEQKNRALLTMAAAIRRDAARLLAANAQDMEHARAAGYDAALLDRLQLSEKTVAGMAEGLEQIAALPDPVGEIDGLKFRPSGIQVGKMRVPLGVIGIIYEARPNVTADAAALCLKSGNAAILRGGSEALRCNQAVAACVREGLEAAGLPAAVVQVVETTDRAAVGELITMKDYVDVIVPRGGKGLIERITGEARVPVIKHLHGNCHVYVDDRADLAKAVKIVENAKTQRYGTCNTTESLLVARAVAAAALPQIGAMLAGKGVEMRGCPESLAILQAAGVPADKLRPAVESDWYEEYLGPIIAVKVVDDLDAAMIHINTHGSQHTDAIVTEDYGRARRFLREVDSASVVVNASTRFADGFEYGLGAEIGISTDKIHARGPVGLEGLTSQKWVVLGDGHVRA

SEQ ID NO: 8409 - protein, 228 aa, Chlamydophila pneumoniae J138
MALLILLRHGQSVWNEKNLFSGWVDIPLSQQGIEEAFSAGRAIQNLPIDCIFTSTLVRSLMTALLAMTNHHSKKIPYIVHEDPKAKEMSRIYSAEEENNMIPLYQSSALNERMYGELQGKNKKQTAEQFGEERVKLWRRSYKTAPPQGESLYDTKQRTLPYFEKNILPQLQHGKNVFVSAHGNSLRSLIMDLEKLSEEEVLSLELPTGKPVVYQWKNHKIEKHPEFFG

SEQ ID NO: 8410 - protein, 1785 aa, Anabaena variabilis ATCC 29413
MLWLRLQAEEEIKIQQLIKQQAIATQTELVTQLKTRILALKRIGKHWEMHGSIPQAQWELEARAYLEDYGGYQAIKLVDPSWQVLRSVSVAKNKAAENLEIMPKFPQCKGATAQPSHETTLTHTVNLNQGDRVFFACVPLWMGDKFGGAVLGIFQVKQFFESVLHIAPGYKIRVFDGQELIYGQDRQSSTLPSWQQSVNINFDGMTWQLQIYPTPELLKDLYSPLPTVVLVAGIFNAGAVTLLIYFAQATKLSNHQIGRINQELADRIEKQTQVEIALRASENRLRELLETVRVIPWEVDLKTQHFTYVGPQAETLLAYPIAQWYEENFWDNHLHPHDRDWAVRFCQEAANKGQNHELEYRMLAADGRVVWLRDVVNVVEVDGTPVMLRGFMFDITDLKRVEETLRLRERALAASSNGIVISDAKLPNYPVIYVNSAFEQITGYKATEIVGRNCRFLQGNDTTQPAIEELRSALKAGKNCKVILRNYRKDGSLFWNQLSVSPIYNDNGQLSHFIGIQTDISDRQQAEASLRRQALTFENIYDGVIITNLQGQILDWNPAAERMFGYSKDHICGQSISILHKVEEDAALNSAIIAEITKQGRWSGEINFVRQDGSQGICETTIVALQDDQGQTVATISVNRDITERKHAELLLRRSEERFQAFMNHSPTPAWITDIDGTIVYLSETYRRTFQLPTQELIGTNIFDIYPPELIQTFRETIQIVARTHQVMETVESVPCSDGTVRDFLVYKFPISSKPDECLIGGIAIDITERKQAEAALRKSEERWQLVIEGNQDAIWDWNIITNETFRSARWAELIKEQNYQPIADHADCISRIHPDDYERVMAVRQDCLSRKIPNYVVEYRLRCNDDSYKWVLVHATGQWDERGNPVRMVGSIKDITERIEAQEALQRQLHRTLLLEKITQKIRQSLDSKEIFETAATQIGQALAVDRCLIHSYISHHDPHIPLVAEYNNVLDYCSMQKWEFTTTGNRHILQMMSQDKAIASANVYTDPLLQTAVPSCCEIGVKSMLAVRTSYQGEPNGAICLHQCKYFRQWTPEEIELLEAVAAQLGIALAQAQLLEQETRQREELTIKNFALEQAKRAAEAANRAKSEFLAMMSHEIRTPMNAVIGMTGLLLDTELTSQQRDFVETVLTSGDALLSIINDILDFSKIESGKLELEEQPFEVRTCVEQVIDLLAAKAAQKDIELAYLIHPQVPMQIAGDLTRLRQILTNLLNNAIKFTPEGEVVVSVRSQPSPNQKTKNCCEIIFTIKDTGIGIAPETMDLLFQPFVQADASMTRKYGGTGLGLVISKRLGEMMGGYLWVESRGCVGGNPPPGWQRKNSISSASVATGSTFYFSMTVPVVAHADLETSITSPVQLSGKRLLIVDDNPTNRQILRLQAEPWQMETYTAPSGAEALALIDQGMAFDIAILDVQMPEMDGLTLARQIRQRPSYQHLPLVILTSWGQPDTDLSDIEFAACLNKPIKQSQLFDVLAASLGNQPIRASVVPDRSAQVNSCLAQQIPLRILLAEDIVVNQKVALLILKKLGYRADVVANGLEVLEALQRQSYDVVLMDVNMPEMDGLKASQIICQTWSPRSRPYIIAMTANAMRGDREACLAAGMDHYISKPLQLEELAKALGKCHPSTSSTEKALEKTSSQNQTFTDISDLKFATIDTKILQALRDMLGGDKVAFAELINCYLTESPKLIENLNVAINTEDTQGIWKTAHKFKSSSGSVGAVFLAQLCKLLEAKGRNNNLEGCIELGSQLCQEYELVKTALYREVNKETP

SEQ ID NO: 8411 - protein, 397 aa, Schizosaccharomyces pombe 972h-
MSFRNSSRMAMKALRTMGSRRLATRSMSVMARTIAAPSMRFAPRMTAPLMQTRGMRVMDFAGTKENVWERSDWPREKLVDYFKNDTLAIIGYGSQGHGQGLNARDQGLNVIVGVRKDGASWKQAIEDGWVPGKTLFPVEEAIKKGSIIMNLLSDAAQTETWPKIAPLITKGKTLYFSHGFSVIFKDQTKIHPPKDVDVILVAPKGSGRTVRTLFKEGRGINSSFAVYQDVTGKAQEKAIGLAVAVGSGFIYQTTFKKEVISDLVGERGCLMGGINGLFLAQYQVLRERGHSPAEAFNETVEEATQSLYPLIGKYGLDYMFAACSTTARRGAIDWTPRFLEANKKVLNELYDNVENGNEAKRSLEYNSAPNYRELYDKELEEIRNLEIWKAGEVVRSL

SEQ ID NO: 8412 - protein, 331 aa, Synechococcus sp. CC9605
MAQLFYDSDADLGLLNGKTVAIIGYGSQGHAHALNLKDSGVNVVVGLYDGSRSAEKAKADGLEVLSVADASAKADWIMVLLPDEFQKDVYEKEIAPHLNAGKVLSFAHGFNIRFELIKPPADVDVVMIAPKGPGHTVRWEYQNGQGVPALFAIEQDASGNARGMAMAYAKGIGGTRAGILETNFKEETETDLFGEQAVLCGGLSELVKAGFETLVEAGYQPELAYFECLHEVKLIVDLMVKGGLTSMRDSISNTAEYGDYVSGPRLITADTKAEMKRVLADIQDGTFARNFVAECEAGKPEMKKVRDRDSQHPIEKVGKGLRSMFSWLKDA

SEQ ID NO: 8413 - protein, 124 aa, Zea mays
  misc_feature (70)..(70): Xaa can be any naturally occurring amino acid
  misc_feature (76)..(76): Xaa can be any naturally occurring amino acid
  unsure (1)..(124): unsure at all Xaa locations
MDSSLASAAAIADQRQKIEQYRHILASVLSSSPPDISQAKRFLDHMVSDEVPTRGVASIGSRRFAQDLGXLESDAXKERCPLRAHADPSRRVASFEEQGWVVIRREACRAIMSLEQQWVKSRQA

SEQ ID NO: 8414 - protein, 483 aa, Malus x domestica
MAAPLPIEIEPSSTNGQPHLADAYNRHVAVVAFPFTSHASALLETVRRLATALPNTLFSFFSTSKSNSSLFSNNSIDNMPRNIRVYDVADGVPEGYVFVGKPQEDIELFMNAAPENIRRSLDASVADIGKQISCLITDAFLWFGVHLADELGVPWVTFWISGLKSLSVHVHTDLIRDTIGTQGITGRENDLIVDKNVNIQGLSNVRIKDLAEGVIFGNLDSVISGMLLQMGRLLPRATAVFMNGFEELELPIPNDLKSKVNKLLNVGPSNVASPLPPLPPSDACLSWLDKQQAPSSVVYISFGTVASPAEKEQMAIAEALEATGAPFLWSIKDSCKTPLLNEFLTKTLSKLNGMVVPWAPQPHVLAHDSVGAFVSHCGWNSIMETIAGRVPMICRPYFADQRLNARMVEEVFEIGVTVEDGVFTREGLVKSLEVVLSPESGRKFRDNIKRVKQLAVEAVGPQGSSTRNFKSLLDIVSGSNYQV

SEQ ID NO: 8415 - protein, 390 aa, Saccharomyces cerevisiae
LLEKRPEDVVIVAANRSAIGKGFKGAFKDVNTDYLLYNFLNEFIGRFPEPLRADLNLIEEVACGNVLNVGAGATEHRAACLASGIPYSTPFVALNRQCSSGLTAVNDIANKIKVGQIDIGLALGVESMTNNYKNVNPLGMISSEELQKNREAKKCLIPMGITNENVAANFKISRKDQDEFAANSYQKAYKAKNEGLFEDEILPIKLPDGSICQSDEGPRPNVTAESLSSIRPAFIKDRGTTTAGNASQVSDGVAGVLLARRSVANQLNLPVLGRYIDFQTVGVPPEIMGVGPAYAIPKVLEATGLQVQDIDIFEINEAFAAQALYCIHKLGIDLNKVNPRGGAIALGHPLGCTGARQVATILRELKKDQIGVVSMCIGTGMGAAAIFIKE

SEQ ID NO: 8416 - protein, 1224 aa, Ustilago maydis 521
MAVVDVGFSGYFWLAIKSFAARVICLLSDSGLRSAVSDRMPTKSRKSAPSKFAFFLDQQETFSLHISIFEPLGAVGVAPFQTDNRISLHRVFDRLPDTALQGGHGRATRSQRNFLSTDKSTKSFGSPIDIRFGPLRIDWAERAQDKEMSQASQYRNASSSSTSVGPATVTASASELTKASRRRNVFHAKQPQVALPVASFEKTDSFQGDVSGSKEAESRLASCTEMFQGMTIGATEVAFGIVHLFRDKQDATSNATPTRRAASTTGQTALENQIPEQDIGAVVAVLAVPAYLTASHFLSYIEPAVEAITHLRMLRDMHPNRCMVLIRFRDAKDAEDFHKMYNGQPFNAMDPQEICQVVYITSLTVSKHSSLPFSYPTLTNSDPWPLRPPANAVNQPAYELPTCPVCLERMDSSVTGLMTISCQHTFHCSCLSKWGESRCPVCRYSQTGQPSMHQRRRTPRSSMDPSTPVRQANQVGGSDADESDAESDLDEPSCCAVCETQQDLWVCLVCASVGCGRYKHGHAHRHFSETGHLYSLELETQRVWDYAGDGYVHRLIQNKADGKLVELPSASSATATPEHSSTLPASASYASAMSMSGTKHSGPPAIHSRGDNTRPPYDAQERRRQQQQQQRDQNYAIRDQDSCRSADDQLEAIGMEYSYLLTSQLESQRHFYEDKLDQFQAQLASLTGDLEMLSRKSQLIDELSARTAELERTNEQLRRDKDKSDKKADKAIELARTLERDLHSERSMNKGLMDRLEKTKESEVGLKAQVTDLQEQVSDLMFFVQARDKLDQEGSEAQGGDVEKLDSTFGNAFVISGRNARCGTGGSSTHPPITSLKLESKLIWPVLEKKTLRVMQHGGGKSTKHNPQSTKHEAIVNLCNVLYSYHLPARQTKPREYYIMSLNKTFTLNDGNKIPLIGLGTWLSKPGEVENAVEIAVKAGYRHLDLAKIYQNQDEVGAALKKVIPSVVKREELFITSKLWNTSHQPDKVEAAYNETLKELGLDYLDLYLIHWPVAFQPGSDLVPKTEDGKFTALDLETSLVDTWKALIALQKAGKVKSIGVSNFTIAHLDAIINATGVVPAVNQIEAHPLLPQDDLVAYAQQKNIHLTAYSPLGNNLTGKTKIVDYPQVSEVAKKYNADPAQVLIAWGVKRGYSVIPKSVTETRIKSNFEQLELKDDDYETVTSLYKQLGKVRFNVPFTYSPQWDINVFGEDAEKEAKNEVKTE

SEQ ID NO: 8417 - protein, 283 aa, Triticum aestivum
  misc_feature (140)..(140): Xaa can be any naturally occurring amino acid
  misc_feature (224)..(224): Xaa can be any naturally occurring amino acid
  misc_feature (248)..(248): Xaa can be any naturally occurring amino acid
  misc_feature (261)..(261): Xaa can be any naturally occurring amino acid
  unsure (1)..(283): unsure at all Xaa locations
LYRTSLYKKAGWYRSGIPGISSTHASELTGRRAYGGVDIVDVDLNKCEPWDLPEAACVGGREWYFFSLRDRKYATGQRTNRATRSGYWKATGKDRAILAHGEALVGMRKTLVFYQGRAPKGTRTEWVMHEFRLEEERHRXPPPAEGRRRRRRGEVPAQDWVLCRVFYKSRTSSPRPPSEEVCTFFSELDLPTMPPLAPLIDACIAFDSGTAMNTIEQVSCFSGXAALPLRGSMSFGDLLGWDNPEKKXIRTSLSNMSSNSXSRLELTPNWSQENGLSQMWTPL

SEQ ID NO: 8418 - protein, 196 aa, Glycine max
MVLSKTTSESDVSVHSTFASRYVRTSLPRFKMPEESIPKEAAYQIINDELMLDGNPRLNLASFVTTWMEPECDKLIMAAINKNYVDMDEYPVTTELQNRCVNMIAHLFNAPLEETEAAVGVGTVGSSEAIMLAGLAFKRKWQNRRKQEGKPFDKPNIVTGANVQVCWEKFARYFEVELKEVKLRDDYYVMNVCYFG

SEQ ID NO: 8419 - protein, 540 aa, Tropheryma whipplei TW08/27
MAKKITFNEDARRGLERGLNTLADTVKVTLGPRGRNVVLEKKWGAPVITNDGVTIAKEIELDDPYEKIGAELVKEVAKKTDDVAGDGTTTSVVLAQAMVREGLKNVAAGADPISLRRGIEKSVAAVSKALLTSAKEVETEAEIAACASISAGDPQIGDIIAQALEKVGKEGVVTVEESNTFGTELEITEGMRFDKGYLSAYFVTDAERQETVFENPYILICDSKISSVKDLLPVVDKVIQSGKQLLIIAEDVDGEALATLVVNKIRGIFKSVAVKAPGFGDRRKMMLQDIAVLTGGQVISEEVGLKLENATLDLLGCARKVVVSKDETTIVDGAGSSDQIAGRVSQIRKELENSDSDYDREKLQERLAKLSGGVAVIRSGAATEVELKERKHRIEDAVRNAKAAVEEGIVAGGGAALLQSGTSALKDLQLTSEEAVGRNIVRSAIEAPLRQISLNAGLEPGVVVGKVSSLPQGHGLDASTGEYVDMLSRGISDPVKVTRSALENAASIAGLFLTTEAVVAEKPEPKPAPGPADPGAGMDF

SEQ ID NO: 8420 - protein, 501 aa, Arabidopsis thaliana
  misc_feature (31)..(31): Xaa can be any naturally occurring amino acid
  unsure (1)..(501): unsure at all Xaa locations
MFKQFLSKLPRKSSKSDSGELNRSSSGPVSXSPVQRSGTSGGGSGPVRSNSGKRMSSAVFPASVVAGIEPLVPFKDVPSSEKLNLFVSKVSLCCVTFDFSDPGKNSIEKDVKRQTLLELLDFVASGSVKFTEPAILAMCRMCAVNLFRVFPPNYRSSSGGENDDDEPMFDPAWPHLQIVYDLLLKFITSPCLDAKVAKKYLDHAFIVRLLDLFDSEDPRERECLKTILHRVYGKFMVHRPFVRKSMSNIFYRFVFETEKHSGIAELLEIFGSIVSGFALPLKEEHKIFLWRVLIPLHKPKSVGNYFQQLSYCITQFIDKEPKLGSVVIKGLLKFWPITNSQKEVMFLGEVEEIVEAMSVMEFQKIMVPLFLRIACCVTSSHFQVSERALFLWNNDQIVNLIGHNRQAILPIMFTALEKNAQNHWNQSVLNLTLNVRKMFCEMDEALFMSCHARFKEDEAKQCSAAEKRKEVWARLENAASMKPITGKTAVLVTPRATSIAC

SEQ ID NO: 8421 - protein, 307 aa, Capsicum annuum
MIKGIVGNQQLGLPAGFRFHPTDEELVQHYLCRKCAGQSISVSIIAEIDLYKFDPWQLPEKALYGEKEWYFFSQEDRKYPNGSRPNRAAGTGYWKATGADKPVGKPKTLGIKKALVFYAGKAPRGIKTNWIMHEYRLANVDRSAGKSNNLRLDDWVLCRIYNKKGHTLRSITMWASKRGESFGEFEDEIKPKIFPTQLAPAPGQWPPRPQSTPASDYFNFETSESMTTTRMHTTNSSSGSEHVLSSCDKEVQSAPKWDDLGTAALDFQINYLDGLLNDPFEIQMQQQNCNIDQFNTFQDMFLYMQKP

SEQ ID NO: 8422 - protein, 331 aa, Rhodospirillum rubrum
MHEPRFDVAGIGNAIVDVLSHADDAFLATNDLPKGGMTLIDETRAEVLYASMGPGIEASGGSAANTMAGLASLGARTAFIGKVRDDALGAIFRHDITSIGVTFPTAPLTEGPSTARCLILVTPDAERTMNTYLGACTQLAPDDIDAEVIADSAITYIEGYLWDQPAAKTAILQAAAQARKAGRKVALSLSDSFCVDRHRDTFLELVDNHVDILLANEHEVMALFGSADLDQATAALRGRCALAVVTRSAKGCRIVSAESVTDVPAETVDHLVDTTGAGDQFAAGFLFGLCRGYEPKLCARIGAIAAAEVVSHFGARPEAASLADLVKAKLG

SEQ ID NO: 8423 - protein, 263 aa, Festuca arundinacea
MSRKKKVRRRSTGPDSVSEIIKKWKEQNQKLQEENGARKAPAKGSKKGCMAGKGGPENSNCKYRGVRQRTWGKWVAEIREPNRGNRLWLGSFPTAVEAAHAYDEAARAMYGATARVNFSERSLDANSGCTSAPPVLMSNGPTAVSHPADGKDESESPSLRSDGPTATLRRSDAKDEPESAGTVVHEVKTEVSNDSTSVREERKTVEVFQPKGKALHKEEKVSYDYFNVEEVLDMIIVELSADRKMEVHEEYQDGDDGFSLFSY

SEQ ID NO: 8424 - protein, 451 aa, Neisseria meningitidis MC58
MSEYTPQTAKQGLPALAKSTIWMLSFGFLGVQTAFTLQSSQMSRIFQTLGADPHNLGWFFILPPLAGMLVQPIVGHYSDRTWKPRLGGRRLPYLLYGTLIAVIVMILMPNSGSFGFGYASLAALSFGALMIALLDVSSNMAMQPFKMMVGDMVNEEQKGYAYGIQSFLANTGAVVAAILPFVFAYIGLANTAEKGVVPQTVVVAFYVGAALLVITSAFTIFKVKEYDPETYARYHGIDVAANQEKANWIELLKTAPKAFWTVTLVQFFCWFAFQYMWTYSAGAIAENVWHTTDASSVGYQEAGNWYGVLAAVQSVAAVICSFVLAKVPNKYHKAGYFGCLALGALGFFSVFFIGNQYALVLSYTLIGIAWAGIITYPLTIVTNALSGKHMGTYLGLFNGSICMPQIVASLLSFVLFPMLGGLQATMFLVGGVVLLLGAFSVFLIKETHGGV

SEQ ID NO: 8425 - protein, 510 aa, Listeria innocua Clip11262
MEFWRGSVFYEIYMKSFQDSNGDGLGDFKGLTSRLDYLVDLGVDGIWLTPFYPSPQVDNGYDVSDYCDINPDYGNMADFREFMKAADARGIKVIIDLVLNHSSTEHAWFKESRSSKTNPKRDYYIWREKPNNWESFFGGSAWELDKLTGEYYYHSFAKEQADLNWANPAVRAEIEQVLAFWLNEGVAGFRLDVINNLTLVLEFPDNPVVDNEMEHVYDRNQQGLEQALEQIAAFCRKEREVFLVGEISSDKLPEIAKYSSKTMLDVTFNFNFGSVELLDAQSVFTTLNEMETALQEGQWPTLFFGSHDMSRFTTRLSNGNLSKTKLLAFLMLTAKGIPFIYYGEEVGMPDLTFSSVEEMRDIQGTAAYYQALQAGSDEQSALELAINKTRDKARGPMVFPDGKPFTTGQPWIKMASLNEEDALSMWHFYQALLAFRKGHDFKEKEYASLTLDGETLSYQRGEFLFLLHFGETEVTYPLQEKSELVFGDAEMLEADVKMGAYAGIALRVED

SEQ ID NO: 8426 - protein, 504 aa, Kluyveromyces lactis NRRL Y-1140
MFRNSNTLRTLNLLRKMSSKIENDYLIQTKAFINGKWTETDDKFAVTNPSTGDTIREVTNCGVSDFNKAIEIAHDAFGTFRQTNVRERAQILDNIYNLMLENKQDLAKILTLENGKPYKDSLGEIVYSAMFFKWFAEEAPRIYGDIIPSAVSSDQKIFTIRQPLGVIGILTPWNFPSAMIARKLAPVIATGNTCVIKPAHETPLSALALGVIAEKAGLPAGVCNILPTNHTSEIGEYVCEHELVKKITFTGSTKIGQLLMGQSSKGKNIKKFSMELGGNAPYIVFKDADLDRALDGIIGCKFRQSGQTCICANRIFVHEDLYDEFSKRLVDKIDKTFKLGDGFQDGVTHGPLIHDKSIDKVASLVQDAKTKGADVLIGGSRASSLGPLFYQPTVLGNVTESMDIFYEEIFGPVAPLIKFKDVDEVIKRANDTDVGLAGYFYSQNISTIFDAAEKLNVGMVGVNTGEISEPAVPFGGVKNSGLGKEGSKYGIDDYTELKAIIVAP

SEQ ID NO: 8427 - protein, 279 aa, Agrobacterium tumefaciens str. C58
MPIQSSIALAVSCAQGRSQARFSDQSSSFRFSSPFETGIKQPMDTKPKNLPDAADFAHVSEWVFDLDNTLYPHHVNLFSQIDRNMTAYVAELLKLDPEEARVLQKRYYHDHGTTLQGLMINYGISPDEFLERAHAIDYSALKPHPELGEAIKALPGRKFILTNGSVKHAQAAAGALGILDHFEDIFDIVAANYLPKPASATYEKFAALAKLDTKKAAMFEDLPRNLAAPKALGMKTVLLVPSNLEGVIMERWEIPDVTDEHIDYITDDLTGFLAKTIAR

SEQ ID NO: 8428 - protein, 317 aa, Arabidopsis thaliana
MAALCCCPTTIIVSGKVSSRIKTAGPLPRINPFKNQKRLITERRNLIVKSIIEDREAIDVKNDNFKAEEELSEDKVEDTDRLMSRGINAAIVLAAGTVAVTKLLTIDHDYWQGWTLYEILRYAPEHNWFAYEQILKTNPVLAKMAISGIVYSLGDWIAQCYEGKPLFEFDRTRVLRSGLVGFTLHGSLSHYYYQFCEALFPFQEWWVVPAKVAFDQTVWSAIWNSIYFTVLGLLRFQSPADIFSEIKTTFLPMLTAGWKLWPLAHLVTYGVIPVDQRLLWVDCIELIWVTILSTYSNEKAEAQASEETNSSSHSSED

SEQ ID NO: 8429 - protein, 622 aa, Schizosaccharomyces pombe
MNKFFSFPILGLLLTCVRFVVAKERLFEWNVTDVYDVDPDGSGNSRWVIGVNNKWPIDPLVVDYGDQVIIKMTNSLANNRTTSLHSHGLFQKFTPYMDGVPQSTQCEIPPGATFYYNYTALQNGTYWVHSHDMSQYPDGLRTPFIINALEEPYDYDEEYIISMTDWYYTPFNILVPDEFKTWKNPTGAEPVPDTGLFNDTANATFAMEPGKTYRLRFINIGAFNNYDVMIEDHNMTIIEVDGEYTEPQEVSSIHLTVAQRYSVLVTAKNSTDRNYAITAYMDESLFDTIPDNYNPNVTAWLSYNSDASYDLGPDIDEIDSYDDAELNPLYSWDVTESNHSINIWFDFFTLGDGANYAEINDSSYVFPKVPSIMIANSTNVDGYNLEPVTYGPYTNAYIFEYGDVVDVIIDNHDTGKHPFHLHGHTFQVLERGEENAGLYSDQESHTYYDNPMRRDTVEIEPGSFIVIRFIADNPGAWVIHCHIEWHMESGLLATFIEAPEMIPSISSPDFVKEQCMLDGVPTIGNGAGNYKNISDLSGAPSPPGEMPAGWTSKAIGTMAACVISACIGMGSIIFYGASIHPVPTEELDENDDLQEAALENAAMFLDTDKAVEKVVEGKDEIK

SEQ ID NO: 8430 - protein, 613 aa, Arabidopsis thaliana
MESCDCFETHVNQDDLLVKYQYISDALIALAYFSIPLELIYFVQKSAFFPYKWVLMQFGAFIILCGATHFINLWMFFMHSKAVAIVMTIAKVSCAVVSCATALMLVHIIPDLLSVKNRELFLKKKADELDREMGLILTQEETGRHVRMLTHGIRRTLDRHTILRTTLVELGKTLCLEECALWMPSQSGLYLQLSHTLSHKIQVGSSVPINLPIINELFNSAQAMHIPHSCPLAKIGPPVGRYSPPEVVSVRVPLLHLSNFQGSDWSDLSGKGYAIMVLILPTDGARKWRDHELELVENVADQVAVALSHAAILEESMHARDQLMEQNFALDKARQEAEMAVHARNDFLAVMNHEMRTPMHAIISLSSLLLETELSPEQRVMIETILKSSNLVATLISDVLDLSRLEDGSLLLENEPFSLQAIFEEVISLIKPIASVKKLSTNLILSADLPTYAIGDEKRLMQTILNIMGNAVKFTKEGYISIIASIMKPESLQELPSPEFFPVLSDSHFYLCVQVKDTGCGIHTQDIPLLFTKFVQPRTGTQRNHSGGGLGLALCKRFVGLMGGYMWIESEGLEKGCTASFIIRLGICNGPSSSSGSMALHLAAKSQTRPWNW

SEQ ID NO: 8431 - protein, 121 aa, Magnaporthe grisea 70-15
MSVLDALKGVLKLALMHDGLARGLREASKALDRRQAHMCVLNEACEEEAYKKLVIALCSEHKIPLIKVPDGKQLGEWAGLCVLDREGNARKVVNCSCVVVKDWGEESQERSVILNYFQTEQ

SEQ ID NO: 8432 - protein, 485 aa, Candida dubliniensis
MAPTFTNSNGQPIPEPFATQRVGQHGPLLLQDFNLIDSLAHFDRERIPERVVHAKGSGAYGVFEVTDDITDVCAAKFLDTVGKKTRVFTRFSTVGGELGSADTARDPRGFATKFYTEEGNLDLVYNNTPVFFIRDPSKFPHFIHTQKRNPETHLKDANMFWDYLTSNEESIHQVMILFSDRGTPASYREMNGYSGHTYKWSNKKGEWFYVQVHFISDQGIKTLTNEEAGALAGSNPDYAQEDLFKNIAAGNYPSWTAYIQTMTEAEAKEADFSVFDLTKVWPHKKYPLRRFGKFTLNENPKNYFAEVEQAAFSPAHTVPYMEPSADPVLQSRLFSYADTHRHRLGTNYTQIPVNCPVTGAVFNPHMRDGAMTVNGNLGSHPNYLASDKPVEFKQFSLQEDQEVWNGAATPFHWKATPADFKQAQELWKVLKRYPNQQEHLAHNIAVHAAGADAAIQDRVFAYFGKVSQDLANAIKKEVLELSPRK

SEQ ID NO: 8433 - protein, 450 aa, Erwinia carotovora subsp. atroseptica SCRI1043
MTKHYDYLAIGGGSGGIASINRAAMYGQKCALIEAKYLGGTCVNVGCVPKKVMWHAAQIAEAIHQYGPDYGFDTTVNQFNWGTLVKNRSAYIDRIHQSYDNVLGKNKVDVIHGFARFVDAHTVEVNGEKITADHILIATGGRPVHPNIPGAEYGIDSDGFFELDALPKRTAIVGAGYIAVEIAGVLNGLGSETHLFVRKHAPLRSFDPLIVDTLVEVMNTEGPTLHTESIPKAIVKNADGSLTLELENGQSQTVDCLIWAIGREPATDNLNLSVTGVGLNDKGYINVDKFQNTTVSGIYAVGDNTGAVELTPVAVAAGRRLSERLFNNKPDEHLDYSNIPTVVFSHPPIGTVGLTEPQAREQYGDDQVKVYKSAFTAMYTAVTQHRQPCRMKLVCVGKEEKIVGIHGIGFGMDEMLQGFAVAVKMGATKKDFDNTVAIHPTASEEFVTMR

SEQ ID NO: 8434 - protein, 413 aa, Methanococcus maripaludis S2
MKRIALGFQHVLAMFGATVTVPLVVGYAIGLSMSEIALLLQAVLLAMGVATLLQTFAGSRFPIVQGSSFAFIPGLIAVGSGMGLAAVEGALIIGGVIEAITGALGLIGKLKKLFSPIVTGVTIMLIGFSLADVAVQYSFNYFADPTGSSIVTSILVAALTFITTILVSLQGKGTLKAMPVIIGAVVGYVISIFLGLVDFSMMNQLSWFALPKLMPWGMPVFDVNAIIILLFAFMVSIIESVGDYHAISTIADLKIDDNKINRGIASEGFSCTLAGLFGACGTTSYSENIGLVALTKVSSVQVVQIGAVILVLLSMIPKFSGLLASIPAPVLGGLTTALYGMISITGLKLIKDKVELNDRNTLILASALVLGLGAPQLPAEFLSLFPKIISSILESGMAVGAITAILMDQLLKK

SEQ ID NO: 8435 - protein, 313 aa, Medicago truncatula
MATLSAPSNHSPNEDAEALRKAFEGWGTDEKTVITILGHRNSNQIQQIRKAYEGIYNEDLIKRLESEIKGDFEKAVYRWILEPAERDAVLANVAIKSGKNYNVIVEISAVLSPEELLNVRRAYVKRYKHSLEEDLAAHTSGHLRQLLVGLVTAFRYVGDEINPKLAQTEAGILHESVKEKKGSHEEAIRILTTRSKTQLIATFNRYRETHGTSITKKLLDEGSDEFQKALYTTIRSFNDHVKYYEKVVRDAIKKVGTDEDALTRVIVSRAQHDLKVISDVYYKRNSVLLEHVVAKETSGDYKKFLLTLLGKEE

SEQ ID NO: 8436 - protein, 485 aa, Candida tropicalis
MAPTFTNSNGQPIPEPFATQRVGQHGPLLLQDFNLIDSLAHFDRERIPERVVHAKGSGAYGVFEVTDDITDICAAKFLDTVGKKTRIFTRFSTVGGEAGSADTARDPRGFATKFYTEEGNLDLVYNNTPVFFIRDPSKFPHFIHTQKRNSETHLKDANMFWDYLTSNEESNHQVMILFSDRGTPASYREMNGYSGHTYKWSNKKGEWHYVQVHFITDQGNKTLTNEEAGSLAGSNPDYAQEDLFKNMLAGNYPSWTCYIQTMTEAQAKEADFSVFDLTKVWPHGKYPLRRFGKFTLNENPKNYFAEVEQAAFSPAHTVPYMEPSADPVLQSRLFSYSDTHRHRLGTNYTQIPVNCPVTGAVFNPHMRDGAMNVNGNLGSHPNYLASDKPIEFKQFSLQEDQEVWHGAATPFHWKATPADFKQSQELWKVLKRYPNQQEHLAHNVAVHASAADAPIQDKVIAYFAKVSPELSNLIKKEILELSPRK

SEQ ID NO: 8437 - protein, 1353 aa, Venturia inaequalis
MSLGDVKNGSAVNVKDGSKTSRGSSETEEIEKDNARTQMGQAPVPGMDTDPSGGLKELKNMRKLDSNVIEVKDQNDDPFRHLPEHEQEILRRQTFIPDVKVGYFTLYRYASRWDWAAWWLSVFCSIVSGAAMPLMTVVFGGLTGLFADYFKNVITYKQFNSELSHFVLYFLYLAIGTFVTTYIMTVGFIYVGERCTGKIRERYLKAMLRQNIAFFDKLGAGEVTTRITADTNLIQDGISEKFGLTLNALATFISAFVIAFIKYWKLTLILTSTVFAITLVMGVGSSFVVRWTVRSQTEYAKGGTIAEEVLSSVRNAIAFNTQDKLAKVYDSYLVIAETNGRKLQMSLGAMIASMMTLIYLNYGLSFWQGSRFLVQGDMTVSQVLTVLFAVMIGAFSLGNVAPNFKAFTSAVAAGQKIFAAIDRTSPMDPDSPDGKVLEKMSGPIELRNVKHIYPSRPEVVVMNGVDLIIPAGKQTALVGAFGSGKSPIVGLVERFYEPVGGEMFLDGHDIREINLHWLRQNISLVQQEPVLFATTIYENIRFGLLGTEFEKVDPERQRDLIEGAAKMANAHDFIMVLSEGYQTHVGERGFLLSGGQKQRIAIARAVVSDPKILLLDEATSALDTKSEGVVQAALDKAAQGRTTIVIAHRLSTIKNADNIVVMSRGAIVEQGRHSELLERKSAYFNLVEAQRIAAEIKNDNPEEVEILQEVDGQKLHRAATNEKGEPIDPDDEDPVGRLKRMQSGKSISSVELGKRGTEQTPEYSLLQLLGVVWSFNKTEWPIMLLGFICSVIAGGGNPVQAIFFAKAVSALSLPPAQYAELRSEINFWSLMYLMLAGTQLISNFGQATAFGYCSERLIHRARDQAFRHMLRQDIEFFDREENNAGSLTSFLSTSSTQLSGLSGSTLGTILQVSTTLVVAMTISLAIGWKLALVCISAIPVLLACGFFRFWMLARFQARTKAAYVNSAGFACEATSAIRTVASLTREEDVFEKYHAQLEAQAKSSLVSILKSSALYAASQSFIFFCIALGFWYGGTLIAKREYSQFQFFVCFMSIIFGAQSAGTIFSFAPDMGKAKHAAAELQTLFDRKPKIDCWSEEGDRLTSVEGHVEFRDVHFRYPTRPEQPVLRGLNLSIKPGQYVALVGASGCGKSTTIALLERFYDPLSGGVYVDGQEVSKLNVNDYRSYLALVSQEPTLYQGTIRENVLLGADREGVPEDEIIRACKDANIYDFIMSLPDGFNTVCGQKGGLLSGGQKQRIAIARALLRNPKILLLDEATSALDSESEQIVQLALDKAAKGRTTIAVAHRLSTIQKADVIYVIDGGRVVEEGSHNYLLSKNGRYAELVMMQSLEKAG

SEQ ID NO: 8438 - protein, 585 aa, Ustilago maydis 521
MSNESNQIKIGAYLLERLVQLGSQSVQGVPGDFNMGFLDLIEEHPKLKWIGNSNELNAAYAADGYARVKRTIAAVVTTFGVGELSALNGIAGSFSERLPVIHVVGVPSTGAQGSHSLLHHTLGDGRFSAFENMSKEISADSAILKSKQGAGESIDRILITAMKSARPVYLALPTDLVHATIPAEALKTPLDYSIDDNDAKAEEYVLQVAQKHIADAKSAVILVDACAARHGCIQETHELIEKSGLPVFATPMGKTIVDEDHAQYGGIYVGSLTSEKVKNVVEQADVLITVGSLKSDFNSGNFSYRTPKSSTIELHSDYTTIGYSHYPGIGMKKLLPKLSALLETNGDARREETKKIVPKFENALPHDSSSTITQEWLWPRMGQFFQEQDQVIVETGTSSFGMLEAKLPAKTRWVSQVLWGSIGWSVGATLGVALAARENALGRTHLFVGDGSLQLTVQEIGTMIKHGLCPYLFILNNDGYEIERQIHGPQRSYNDIPPYDHSLLLDFFGNEKFHSDAKSHENDPHQSKKQYYRVQTKQQLDELLKDQSFANPDRIRLIEVVMQRGDAPEALKRQAEATGQANKYE

SEQ ID NO: 8439 - protein, 466 aa, Thermotoga maritima MSB8
MRSTKIVCTVGPRTDSYEMIEKMIDLGVNVFRINTSHGDWNEQEQKILKIKDLREKKKKPVAILIDLAGPKIRTGYLEKEFVELKEGQIFTLTTKEILGNEHIVSVNLSSLPKDVKKGDTILLSDGEIVLEVIETTDTEVKTVVKVGGKITHRRGVNVPTADLSVESITDRDREFIKLGTLHDVEFFALSFVRKPEDVLKAKEEIRKHGKEIPVISKIETKKALERLEEIIKVSDGIMVARGDLGVEIPIEEVPIVQKEIIKLSKYYSKPVIVATQILESMIENPFPTRAEVTDIANAIFDGADALLLTAETAVGKHPLEAIKVLSKVAKEAEKKLEFFRTIEYDTSDISEAISHACWQLSESLNAKLIITPTISGSTAVRVSKYNVSQPIVALTPEEKTYYRLSLVRKVIPVLAEKCSQELEFIEKGLKKVEEMGLAEKGDLVVLTSGVPGKVGTTNTIRVLKVD

SEQ ID NO: 8440 - protein, 610 aa, Neurospora crassa
MRTPDATSTEFPENVRAALKANAMMNPPSPAYCRDEKDPDFKSSSCTSFGENSTPSTVSLSEKTEVAEVNANEWVRGVGFWRCFIGLCVPILLSAFEGSVVSTALPTISRDLGLGPNSSWVATAFLLASIICQPLYGQLADIWGRRHLMMVAVVIFCAGSAVSGFANSGAVLIFGRIFQGLGSGGIDLFAELILCDIIPLKRRGHYVAIKAAVYALGTTVGPVLGGIFAEVGWRWCFGVNIPVCAISLVMMWMWLQVSSGRSTDSDKLTIFKQLGRVDFLGIGLLTSSVVFLLFSLTLGGAAYAWTSPMVLGTGAAGLTGVLCFAFWERCRWCEHPIMPPHVFSNRTTVAGFIVTIIHGFLTYGYQFYLPPFFQAVLNASPTKSGVLILPCTLTIVVLSAVGGPLLAKFGRYRLMHQAGFTLMLVGFACCVAYAEKSKVVEWIVFSFLVGIGSGIIVSTTLPSVLVELTDKDNAAATGSWAFLRGLGSLLGVAVPNAAFNAQVATLLHTITDREAQEALTQGRAYEHASAQFVGSFGEEVKAQIVSLFALGLRAPWIIFLGLAGTGLLVTLLERQVKLRRGLDSDFDLKHKVESSEVTREVVSWKDTDMA

SEQ ID NO: 8441 - protein, 460 aa, Xanthomonas axonopodis pv. citri str. 306
MPMSDPSAPDHLQRSLSNRHLQLIAIGGAIGTGLFMGSGKTISLAGPSILFVYLIIGAMLFFVMRAMGELLLSNLEYKSFIDFSTDLLGPWAGFFCGWTYWFCWIITAIADVIAIAAYAQFWFPGLAPWIPAILCVLLLLGLNLVTVKLFGEMEFWFALIKIIAIAALIVTGAGLVVWGFRSPSGNVASLSNLWNDGGMFPMGIGGFFAGFQIAVFAFVGIELVGTTAAETADPRRNLPKAINSIPVRILIFYVLALIAIMAVTPWRQVVADKSPFVELFVLAGVPAAASLINFVVLTSATSSANSGIFSTSRMLYGLAEEQHAPKGFAKLSRAAIPARGLLFSCLCLLLGAMLVYLIPNLVTAFTLVTTLSAVLFMFVWSLILCAYIAYRRKRPEQHAASAFKMPGGVLMCYVCLAFFAFVIVLLTLQDDTRQALLASPVWFLLLAIGYAVKRRGNRQR

SEQ ID NO: 8442 - protein, 274 aa, Manihot esculenta
  misc_feature (3)..(3): Xaa can be any naturally occurring amino acid
  misc_feature (245)..(245): Xaa can be any naturally occurring amino acid
  misc_feature (249)..(249): Xaa can be any naturally occurring amino acid
  misc_feature (263)..(263): Xaa can be any naturally occurring amino acid
  misc_feature (265)..(265): Xaa can be any naturally occurring amino acid
  misc_feature (267)..(267): Xaa can be any naturally occurring amino acid
  misc_feature (270)..(270): Xaa can be any naturally occurring amino acid
  unsure (1)..(274): unsure at all Xaa locations
ARXRFEVWPYLETYTEDVATEIGKELQGKPDLIIGNYSDGNIVASLLAHKLGVTECTIAHALEKTKYPDSDIYWKKFDEKYHFSCQFTADLIAMNHTDFIITSTFQEIAGSKDTVGQYESHTAFTLPGLYRVVHGIDVFDPKFNIVSPGADESIYFAYTEEKRRLTSFHPEIEELLYSPVENEEHLCVLKDRNKPIIFTMARLDRVKNLSGLVEWYGKNAKLRELANLVVVGGDRRKESKDLEEXAEMXKMHTLIEKYNLNGXFXWXSSXMNRV

SEQ ID NO: 8443 - protein, 439 aa, Neurospora crassa
MDTLQYGARDLPWSSIPTDLLRAELSKRVDATDKSRPQCGSGEKGEYNTGLHVFALVLILLLSTLSCGFPLFSRRAMKGSRLQRKIIFFSQYFGTGVLMATAFVHLLPTAFLSLTDPCLPYVFSEGYKPLAGLVSMTAALAVVALESYLTTRGATHSHSHTIFEDEEENGHMHNDTHHDFKDTPERIPLQDREVTQGLIGQQSPIASTSAHHSPSDQPRAVGDNESANSLDLDLTFDELQPIPNTDHDQLLEPSNTSPHRTGLKPAVAPDSPNPEEQKRMLLQCLLLEAGILFHSVFIGMALSVATGPPFIVFLIAIGFHQTFEGLALGTRIAAIHFPRSSPRPWLMVLAFGTTTPIGQAIGLLIHTFYDPLSQTGLLMVGFMNAISSGLLLFAGLVQLLAEDFLSEKSYATLHGRKRLHAYLAVVAGAGLMSAVGAFA

SEQ ID NO: 8444 - protein, 568 aa, Xanthomonas axonopodis pv. citri str. 306
MPYATARSGDVMSSAAPPCCTSLLGLSLSMFVAPGTLTAAPLDAPVVNAPAPTPPTPDLAYPELFQAVQRGELFDDQKHFVDFLPLRDPALINADYLAQHDHPGFDLRKFVDANFEESPPVQTDAIRQDTALREHIDLLWPKLVRSQNHVPPHSSLLALPHPYVVPGGRFREVYYWDSYFTMLGLVKSGETTLSRQMLDNFAYLIDTYGHIPNGNRTYYLSRSQPPFFSYMVELQAGVEGEAVYQRYLPQLQKEYAYWMQGSDDLQPGQAARHVVRLADGSVLNRYWDERDTPRPEAWLHDTRTAAEVTDRPAAEVYRDLRAGAESGWDYTSRWLADGQNLRTIRTTAILPIDLNSLLYHLERTLALACAQPGAECTRDYAALAQQRKQAIDAHLWNTAGYYADYDWQTRTLSNQVTAAALYPLFAGLASDDHAKRTASTVRKTLLRPGGLATTAVKTGQQWDEPNGWAPLQWVAVDGLRRYGEDALARTIGERFLAQVQALFAREHKLVEKYGLETDAAGGGGGEYALQDGFGWTNGVTLMLLNLYPGKDTKAAPAKRVRKPEAAAR

SEQ ID NO: 8445 - protein, 482 aa, Neurospora crassa
MAPASTLLRAAAPAPHAHTSFPSHHTPTSSPNRTTITNTNPSANSTSSTPLHRIQTIAKHMALPQITSFPAEVVPQAPEDPLFGLARAFKADPSPQKVDLGIGAYRDENAKPWVLPVVKKADEIIRNDPEANHEYLPIAGLASLTSKAAELVVGASAPAITEGRVASIQTISGTGACHLGGLFLSRFYNPYGDASKKPTVYLSNPTWANHNQIFSNVGLPIAQYPYFDQKTKGLDIDGMKKALSDAPERSIILLHACAHNPTGVDPTLAQWREIAEIMAAKGHFPFFDTAYQGFASGDLDRDASAIRLFVELGFELVVAQSFAKNFGLYGQRAGCFHFISAPSPDAASITTRVASQLTLLQRSEISNPPIYGAKVASIVLNDPALFAEWKENLRTMSGRIIDMRKALRAKLEELGTPGPWNHITDQIGMFSFTGLNEKQVAKLREEFHIYMTKNGRISMAGLNKKNVDYVARAVDKVVREVQ

SEQ ID NO: 8446 - protein, 396 aa, Haemophilus ducreyi 35000HP
MFNHIEAALTDPILGLNDAFRADIRKTKTNLGIGVYMNAEGQTPIMNAVKLAETRLLAEESQKNYLQIDGIAHFNSYTQTLLFGQDADVIQTGRVKTAQSLGGTGALRIAMEFIKRQTDAKTIWISNPTWPNHNAIAEAVGLTIKNYRYYNPETNGLDWDNLLADLQQAERGDVVLLHGCCHNPTGIDPTAEQWDKLAILSAEKGWLPLFDFAYQGLANGLDEDAYGLRAFAKNHKELLIASSYSKNFGLYNERVGAFTLVAENAEIANNAFTQIKSIIRVLYSNPAAHGAHTVTTVLADDQLRANWIAELSEMRDRIKTMRTKMVQLLAEKGAKKDFSFISDQNGMFSFSGLTATQVDRLRDEFAIYAVRSGRINVAGLTDDNIEAFCDAVVKVL

SEQ ID NO: 8447 - protein, 315 aa, Manihot esculenta
  misc_feature (303)..(303): Xaa can be any naturally occurring amino acid
  unsure (1)..(315): unsure at all Xaa locations
MASASLLKSSPVLDKSEFVKGQSLRQPSASIIRCHPTAPSALTIRAGSYADELVKTAKTIASPGRGILAMDESNATCGKRLASIGLENTEANRQAYRTLLVTAPGLGQYISGSILFEETLYQSTTDGKKMVDVLVEQNIVPGIKVDKGLVPLPGSNNESWCQGLDGLASRTAAYYQQGARFAKWRTVVSIPNGPSALAVKEAAWGLARYAAVSQDNGLVPIVEPEILLDGEHGIDRTFEVAQKVWAEVFFYLAENNVMFEGILLKPSMVTPGAECKDRATPQQVADYTLNLLKRRIPPAVPGXMFLSGGQSEVEA

SEQ ID NO: 8448 - protein, 257 aa, Brassica napus
MLSIVASPPVISAVSLSKPLQSLAKAALSLSKRAKPTSPFPKTARSISVYKSPMNNLFTRLGFGSRPQPDPAASSAIAQGPDDDVPSPGQQFAQFGAGCFWGAELAYQRVPGVTKTEVGYSHGFVDNPTYEDVCSETTGHNEIVRVQYDPKEVSFESLLDVFWKRHDPTTLNRQGNDVGTRYRSGIYFYTDEQEKLAREAMEKQQKILNRKIVTEILPATKFYRAENYHQQYLAKGGRMGLSQSAEKGCNDPIRCYG

SEQ ID NO: 8449 - protein, 175 aa, Triticum aestivum
  misc_feature (134)..(134): Xaa can be any naturally occurring amino acid
  unsure (1)..(175): unsure at all Xaa locations
MAPTVMASSATSVAPFQGLKSTAGLPVSRRSNGASLGSVSNGGRIRCMQVWPIEGIKKFETLSYLPPLSTEALLKQVDYLIRSKWVPCLEFSKVGFIFREHNASPGYYDGRYWTMWNLPMSGCTDATQVINEVXEVNKEYPDAYVRIIGFDNMRQVQCVSFIAFKPPGCEESGKA

SEQ ID NO: 8450 - protein, 283 aa, Streptococcus suis 89/1591
MDLQELCRKVIQARPRNSHKGSYGRVLLIGGLYPYGGAIIMAALATVNSGAGLVTVATEKDNIPALHSHLPEAMAFSFDDQALLISSLENADLVLIGPGFGENSRAEQLLDFVFEHLSDQQILVLDGSALTLVAKQNRKNFPCKQVILTPHQKEWERLSSIPIADQTSQRNLEALQSFQENTILVAKSSATQILKTQPNQVTPIGAGGPYQATGGMGDTLAGMIAGFAVQFPHVQLYERILVATYLHSYIADQLAQDYYLVKPTDVSRNIQKTMLQFQTQTTA

SEQ ID NO: 8451 - protein, 138 aa, Ashbya gossypii ATCC 10895
MSDVEEVQQVPVEQQEVTIEDALKVVLRTALVHDGLARGLRESAKALTRGEAQLVVLVDSVTEDNIIKLVEGLANDPENQVPLIKVADAKQLGEWAGLGKIDREGNARKVVGASVVVVKNWGADTAEREIILDHFSQQ

SEQ ID NO: 8452 - protein, 482 aa, Kluyveromyces lactis NRRL Y-1140
MSTTMLSTRNALARGLLRTSGGAAGASRNNLLLSLVASRYYSNGEKTLKQRFAEIFPEKAEEIKRLKKEHGKTVIGEVLLEQAYGGMRGIKGLVWEGSVLDPEEGIRFRGRTIPDIQKELPKAADGEEPLPEAIFWLLLTGEVPTETQVKALSADLASRSELPAHVESLLDNLPKDLHPMAQFSMAVTALESESKFAKAYAQGVSKKDYWNYTFEDSLDLLGKLPVIASKIYRNVFKDGKITSIDQNADYGKNLAHLLGYQNKEFVDLMRLYLTIHSDHEGGNVSAHTTHLVGSALSSPYLSLSAGLNGLAGPLHGRANQEVLEWLFKLREEVKGDYSPATIEKYLWDTLNSGRVVPGYGHAVLRKTDPRYTAQREFALKHFPDYELFKLVSTIYEVAPKVLTKHGKTKNPWPNVDSHSGVLLQYYGLTEASFYTVLFGVARAFGVLPQLIIDRAVGQPIERPKSFSTEKYIELVQSINAKK

SEQ ID NO: 8453 - protein, 337 aa, Shewanella sp. MR-7
MTILVTGGAGYIGTHTVVELLNAGSEVIVLDNLSNSSIEALNRVERITGKSVTFFQGDILNKALLQKVFSDHNIDAVIHFAGLKAVGESVAKPLKYYENNVTGTLILCQVMAEFKVKNLVFSSSATVYGDPASLPITEDFPTGATNPYGQSKLMVEHILADLHHSDPSWNIARLRYFNPVGAHASGLIGEDPNDIPNNLMPFIAQVAVGKREALSVFGNDYPTHDGTGVRDYIHVVDLALGHLKALEKLATKPGLVTYNLGTGQGYSVLDMVKAFEKACGKSIAYQIAPRRPGDIAACYANPDHAKTDLGWQATHSLEDMANSSWHWQSTNPNGYKG

SEQ ID NO: 8454 - protein, 193 aa, Kluyveromyces lactis NRRL Y-1140
MIALGFGFSVMFAVFIFFRVSGGNLNPAVTLTLVLTNVIPWPRALVMWISQMVAGMAAAGAASAMTPGEILFANGLGGGASRSRGVFLEAFGTAILCTTVLFMAVEKHKATPMAPFAIGIALFVGHLICVYYTGAGLNPARSFGPCIAAASFPNYHWIYWIGPGLGAIMSAALWHILKFLNYENCNPGQDDIL

SEQ ID NO: 8455 - protein, 132 aa, Blumeria graminis f. sp. hordei
MVSADATPKGQMTVLDALKGALRTALMHDGLARGLREASKALDRREAHMCVLNEACEEEAYKKLIVALCSEHKIPLIKVPDGKQLGEWAGLCVLDREGNARKVVNCSCVVVKNWGEESSERMMLLNYFQTEQ

SEQ ID NO: 8456 - protein, 294 aa, Zymomonas mobilis
MDISNVHEINASNSRGFGIGIAINLAFILVEIGYGITSGSLSLIADAGHNLSDVLGLALSLAAFIAERSKPTSRFTYGYRSSSIFAALFNALFLVIACGAIGWEAIRRFSEPVDVPGGTIMIIAGIGIIINFATALLFKDGHEELNRHAAFLHMLLDALVSAVVVLSGFIIKMTGWHWIDPSLSLAIVVVLLWSSWSLIKRSFAMALNAVPPSIDVSAVVTRLDQLPDVINVHHVHIWPVSTSETAMTAHIVRSKIQNNDAFIGSVADIMKKEFDIGHVTLQIEHDGCDNEIIC

SEQ ID NO: 8457 - protein, 230 aa, Streptococcus suis 89/1591
MVKLVFARHGESEWNKANLFTGWADVDLSEKGTQQAIDAGKLIKEAGIEFDLAFTSVLKRAIKTTNLALEAADQLWVPVEKSWRLNERHYGGLTGLNKAEAAAEFGDEQVHIWRRSYDTLPPEMAKDHEHSAHTDRRYAHLDDSVIPDAENLKVTLERALPFWEDKIAPALKDGKNVFVGAHGNSIRALVKHIKQLSDDEIMDVEIPNFPPLVFELDENLNIVKEYYLEA

SEQ ID NO: 8458 - protein, 198 aa, Trillium camschatcense
QVTFSKRRNGLLKKAFELSVLCDAEVGVIVFSPRDKLYEFSSTSMQSTIDRYRMHTKCVNTNMPTEHNTQQWKYEAVSMANKIELLEASKRKLMGESLEPCTVDELQELESQIERSLSNIRGRKDYLLEQQIEELKEKERRLLEDNELLRHKSEEETELQLATPKGVQYDHGSQQMELETELHIGWPPKVATQCISHA

SEQ ID NO: 8459 - protein, 422 aa, Sulfolobus tokodaii str. 7
MNSAVQETLTSNLYDQQVKKLYHVGGILGLTEDVLQVLSTPERVIQVKIEIKGADGKVKTFVGWRSQHNSALGPYKGGVRYHPDVTQDEVIALSMMMTWKNSLLQLPYGGGKGGIRVDPSKLTKEELEALSRRYVDALYKYIGSDIDIPAPDVNTNPQIMAWYLDEYIKITGKADFAVFTGKPIELGGLPARIYSTGLGVATIAKASAKKFLGGIEGATVIIQGFGNVGTYTAKFLQEMGAKIIGVSDSKGGVIDPNGIDVQKIIEIKESTGSVINYPSGKKVTNDELLISECDILIPAALENVINKFNAPKVKAKLIVEGANGPLTADADAIMKERGIPVVPDILANAGGVVGSYVEWANNKMGEIMSEEEARKLIIQRMENAFEGVYQKYNKLGDQDLRTAAMAISIERVVNAMKARGML

SEQ ID NO: 8460 - protein, 663 aa, Pirellula sp. 1
MPSSPSRRRFEAYRQAVRDRHRRGNQDTEKDLASGRGGHHHGGGPGGKKIGTRDRSFRELFLAFWGLIAGQRGAILTALALLTVSIGLRLIPPLGTKLAIDSVLIRPPKPLPDWVSGIPNLSEILGDPMSSPMRVLIAIGLLVTVLTAIGTAVNLVGRWIATKAVNKTQVSIRATVFDHAVHLPLHHVHSMKSGGVASLIREDAGGVADLIFSMLYNPWRAIVQFIGSLVILMLVDWKLMLGGMFLLPTVWLTHRTYINRIRPLFRDVRKQRQKIDSGATETFGGIRVVRTFSRSRSESSRYVREGDFLVRQQLFTWWWMRIIETIWEVLIPLASTGLLLYGGYQIIEGNLTLGDLMMFLVYLTMLLDPLATIAGSAVAFQNNLAGLDRVLDVLDVEEELPSREGSISLASKQRVGDLSIQNVTFRYPGTETPVLKEVSFDVASGQTVALVGRSGAGKTTLTNLIARFYDPDEGRICFNGRDLRDIQLSSYRSLLGIVEQDVFLFDGSIHENIAYARRRASREDVISAAQAAAADEFIRKFPEGYETVIGERGVKLSGGQRQRLAIARAILADPQILILDEATSNLDSESERLIQDSLSELLQDRTAFVIAHRLSTIMNADKIVVLEDGEVLEIGTHEELVASGGRYRDMVMLQMDQGMQASR

SEQ ID NO: 8461 - protein, 450 aa, Shigella flexneri 2a str. 301
MTKHYDYIAIGGGSGGIASINRAAMYGQKCALIEAKELGGTCVNVGCVPKKVMWHAAQIREAIHMYGPDYGFDTTINKFNWETLIASRTAYIDRIHTSYENVLGKNNVDVIKGFARFVDAKTLEVNGETITADHILIATGGRPSHPDIPGVEYGIDSDGFFALPALPERVAVVGAGYIAVELAGVINGLGAKTHLFVRKHAPLRSFDPMISETLVEVMNAEGPQLHTNAIPKAVVKNADGSLTLELEDGRSETVDCLIWAIGREPANDNINLEAAGVKTNEKGYIVVDKYQNTNIEGIYAVGDNTGAVELTPVAVAAGRRLSERLFNNKPDEHLDYSNIPTVVFSHPPIGTVGLTEPQAREQYGDDQVKVYKSSFTAMYTAVTTHRQPCRMKLVCVGPEEKIVGIHGIGFGMDEMLQGFAVALKMGATKKDFDNTVAIHPTAAEEFVTMR

SEQ ID NO: 8462 - protein, 105 aa, Escherichia coli
MTRTNLITGFLGSGKTTSILHLLAHKDPNEKWAVLVNEFGEVGIDGALLADSGALLKEIPGGCMCCVNGLPMQVGLNTLLRQGKPDRLLIEPTGLGHPKQILLSF

SEQ ID NO: 8463 - protein, 308 aa, Oryza sativa (japonica cultivar-group)
MVSSALPRGEPVTHICVDLADPAAVSAALAPLTDITHVFYVAWAPHFFEEDQNREANSRMLRNVLSAVVPNCPALVHVSLQTGSKHYIGPPESIGKFTIETPFSEDMPRLDNCPNLYYDQEDALFDAVSRSRRRGAAVISWSVHRPSLVFGFSPQSAMNVVCTLCVYAAICRKEGGRKLRWPGSLGAWEGFSNASDADLVAEQHIWAAVDPAARNEAYNCSNGDQGEPDGGGIVREEGLVAAAELDQVANWWFVDALFMDKWEFLDTMNKSKEHGFLGFRNTVKSFGTWIDKLRLYKIVPSCRIVSSL

SEQ ID NO: 8464 - protein, 321 aa, Erwinia carotovora subsp. atroseptica SCRI1043
MMKPSVILYKKVADDLRARLDQHFTVTELDAFPALDHPALATAEGIIGSGGKVDKDFLQHAPRLRAASTISVGYDTFNVDALNEKGVILMHTPTVLTETVADTVLALMLASARRVVEVVERVKAGEWKGGVGSDWFGTDVHHKTIGILGMGRIGLAVAQRAHFGFSMPVLYNARRHHAEAEERFNARHCDLDTLLAESDFLCITLPLTAETHHLIGREQLAKMKPSAILINIGRGAVVDEDALTEALVKGTIQAAGLDVFVKEPLPVDSPLLDLPNVVALPHIGSATHETRYDMAACAVDNLIAALSGQVKENCVNPQVLK

SEQ ID NO: 8465 - protein, 736 aa, Magnaporthe grisea
MSEAPQARRVGSVDDHSVYDDAKTYYTSEERHNNSRSGPRQRTYSQNSLLGQMERLGLKEPFRRGSHDESNHNRRFLIQVDPTLESLKSQEDTDGNMQITIEDNGPKVLTLRTAGSNGHNRFDIRGTYMLSNLLQELTLAQEYGRKQVILDEARLNENPVNRLSRLIRDHFWDALTRRIDASSIEVAAKDPKDWTDDPRPRIYVPKGAPEQLEYYKKLAADKPDIRLDVVELPETITPEYVVGINKAPGLLAVDMEETVDPKTGERVMSGRPFVVPGGRFNELYGWDSYMESLGLLVNDKVYLAKSMVLNFCFCIKHYGKILNATRSYYLCRSQPPFLTDMALRVYDKIRHEPDATEFLRTAILAAIKEYHSVWVAEPRLDPVTGLSRYRPEGAGVPPETEADHFLHILEPYYKKHNMTFKEFVEAYNFGRIREPELDKYFLHDRAVRESGHDTSYRLEGVCADLATVDLNTLLFKYETDIARTIRNVFGDKLVIPAEYCVGSLQPGQVETSAIWDRRSKRRKLAIDKYLWNEEAGMYFDYDTAKRQQCNYESCTTFWALWAGVASPKQAAIMVTRALPKFEAYGGLLSGTEESRGQIGLDRPNRQWDYPYGWAPQQMLAWTGLYRYSFTEEAERLAYKWLFMITKAFSDFNGVVVEKYDVTRPVDPHRVDAEYGNQGLGFKGVAKEGFGWVNASYIYGLQIINAHMRRALGTLTPYDTFIKALEDNRNRALSEMV

SEQ ID NO: 8466 - protein, 471 aa, Oryza sativa (japonica cultivar-group)
MAAAAVLLAAILLALSPLPMSLSAGGGGGGDTGTAEAAADRITALPGQPRVNFSMYSGYVTVDAAAGRALFYWLIEAADPASAPLVLWLNGGPGCSSVGYGASEELGAFRINPDGRSLYLNPYPWNRVANMLFLDSPAGVGYSYSNTTSDLFTAGDNKTAHDSYAFLVNWLERFPQYKYRDFYIAGESYGGHYVPQLSQLVYRNNKDVEKPILNFKGFMVGNAVIDDYHDYVGTFEYWWTHGLISDDTYQKLQVACDFESSAHASEACNKIYEVAEAEQGNIDAYSIYTPTCKKTSFLKRRLIRGNSPWLPRGYDPCTEKYSTKYYNLPEVQKAFHANVTGIPYAWTTCSDDLFYYWKDSPRSMLPIYRELIAAGLRIWVFSGDADSVVPLTATRYSIDALYLPTVTNWYPWYDDEEVAGWCQVYQGLTLVTIRGAGHEVPLHRPRQALKLFEHFLQDKPMPQPVHSIQSF

SEQ ID NO: 8467 - protein, 119 aa, Zea mays
AFNCSNGDLFKWKQLWPILPDHFGLEWAGSQGEENRFKLEEAMAGKKTVWAKIVRENALITPELFEIPNWWFVNPMFSVETQLLGSMNKNKGHGFLGFRNTVSSFNPWIEKLKVFKIVP

SEQ ID NO: 8468 - protein, 413 aa, Triticum aestivum
MSSQGQQRPELAGVKVKKRKKDLKSKYEPEAFCEELIGEISEAEGNLEVISKKLDSLADPLDFKKYAEPLFDVLFAGGMIDAGSGELPETDVSPFCIFAAEESLPVIKKYVEVFNLLIRRYRYLQKGFEDSITKILRLLHRLPASGCNKFAIACSIFFSQQMAPMSLLNVLFMDHIVKDGHALQFVTILFKSNLSEQSIEHLMSSLRKNGLDDRVIEFFPASKRTDEFFSRHFNSEGLKDIATFYEKRVHSKQKSDFVEAMKKMISEPLPFAEVVAFLKQTKSAYTEAELIPLVWEAIMGAVDWTRKPEQYEEHALKVAKDWSKLQLVLVSNAKTELTLLVSVQNFCYDNAPATKLFSKFVTLFYKLDIVSEAAVMYWYTKGAAQKGKAMFTQQVEPFIRWLKEAEEESGDEK

SEQ ID NO: 8469 - protein, 309 aa, Glycine max
  misc_feature (216)..(216): Xaa can be any naturally occurring amino acid
  unsure (1)..(309): unsure at all Xaa locations
MAPGSSVFKEVLESHLMSSDYETGKAKSEAKSNITSTKSSVGLSGKSGISSNNGVYELLGCPVCKNLMYPPIHQCPNGHTLCSHCKVEVHNICPSCHHDLGNIRCLALEKVAESLELPCRYQSLGCHDIFPYYTKLKHEQNCGFRPYNCPYAGSECSVMGDIPTLVAHLKDDHKVDMHDGCTFNHRYVKANPHEVENATWMLTVFNSFGRHFCLHXEAFQLGSAPVYMAFLRFMGDDNEAKKFSYSLEVGANGRKLIWQGIPRSIRDSHRKVRDSQDGLIIQRNLALYFSGGERQELKLRITGRIWREE

SEQ ID NO: 8470 - protein, 362 aa, Bordetella pertussis Tohama I
MTGSTAGKVLVVGALGVVGRAALEHFGQRPGLARVGLSRHAPDFAPEASWVSADLRDAQATRAALAAHGDATHVVYAALNEQPDLLKGWRDSGNVDLNTGMLRNTLDALREAPLRHVTLLQGTKAYGVHTGRPMPVPARETDAVRDHANFYFDQQDLLAERAAAQGFGWTIFRPQIVLGVALGSAMNPVATLGAYAALSREAGQPLRYPGHPHLLTECTDARLIARAIAWAWDEPRAHGEAFNIANGDVVLWQPVFERLAALFGMPLGEPVDTRMREAMPQLAERWRAIAERERLAVPELRDLIGLSWQYADATWAARHPLPVPPLVSTIKLRQAGFGDCIDTQDCIVEHLREMQRLRYLPR

SEQ ID NO: 8471 - protein, 495 aa, Rhodospirillum rubrum
MPEGTTRIAALDIVREAGLLKDKAYIDGAWVGADDGGDFPVLDPATGREIGRVPNMGAAETRRAIDAAAAAWPAWRARTAKDRAAVLRRWYGLIMDNQEALAVLMTAEQGKPLGEARGEIAYGASFVEWFAEEGKRLYGEVVPAHGTDKRILTLREPIGVVAAITPWNFPSAMITRKVAPALAAGCPVVLKPAEDTPLSALALVELAERAGLPKGLINVVTTHEAKAVGGEMTANPIVRKLSFTGSTEVGKILMAQCAGTVKKVSLELGGNAPFIVFDDADLEAAVAGAIASKYRNAGQTCVCANRLYVQEGIYEAFTEKLKAKVEAMRVGPALEGDVQQGPLINKKGLDKVDGLVRDALDKGATAVLGGKVHALGGTFYEPTILTGVTAAMRMATEEIFGPVAPLYRFSTEAEAIALANATRFGLAAYFYTRDIGRVWRVAEGLEYGIVGINEGIISTESAPFGGVKESGIGREGSRHGIDDFVEIKYLCMGGI

SEQ ID NO: 8472 - protein, 371 aa, Bacillus cereus G9241
MKTLELQERLTEIFQHLHENPEVSWKEYETTAYITNFLKEEGISYKIFDDCPGVIAEIGSGNPVIAIRADMDALWQEVNGEFKANHSCGHDAHMTIVMGLILQLKNMRWKSGTVRFIFQPAEEKGNGALKMVEKGAVDDADFLFGVHLRPIEELSLKQAAPSIRHGAAGFLEGTIHGEDAHGARPHQGINAIDVISMINIGLKNIWLPPQSSYSVKMTRCQAGGDNLNIIPGNGHFSLDVRAENNTLLEELKKKIEHVIESAASMGSKTSYEWIDLAPGAEVSEEAERFMRKGILEVYGEDKCTGPLYTTGSDDFHYYTVKRPHLKAVMLGLGADLQPGLHHPYMKFDHSCIMDGVEILKQTVLKVLEDRG

SEQ ID NO: 8473 - protein, 470 aa, Escherichia coli K12
MVDQVKVVADDQAPAEQSLRRNLTNRHIQLIAIGGAIGTGLFMGSGKTISLAGPSIIFVYMIIGFMLFFVMRAMGELLLSNLEYKSFSDFASDLLGPWAGYFTGWTYWFCWVVTGMADVVAITAYAQFWFPDLSDWVASLAVIVLLLTLNLATVKMFGEMEFWFAMIKIVAIVSLIVVGLVMVAMHFQSPTGVEASFAHLWNDGGWFPKGLSGFFAGFQIAVFAFVGIELVGTTAAETKDPEKSLPRAINSIPIRIIMFYVFALIVIMSVTPWSSVVPEKSPFVELFVLVGLPAAASVINFVVLTSAASSANSGVFSTSRMLFGLAQEGVAPKAFAKLSKRAVPAKGLTFSCICLLGGVVMLYVNPSVIGAFTMITTVSAILFMFVWTIILCSYLVYRKQRPHLHEKSIYKMPLGKLMCWVCMAFFVFVVVLLTLEDDTRQALLVTPLWFIALGLGWLFIGKKRAAELRK

SEQ ID NO: 8474 - protein, 372 aa, Candida glabrata CBS138
MHEHSVEKTQILQKYLELPQNGKVIAEYVWVDGTGNLRSKARTLNKVITSIEQLPEWNFDGSSTNQAPGYDSDIYLKPVAFYPDPFRRGDNITVLAECFNSDGTPNKFNHRHEANKLFQAHKDEEIWFGIEQEYTLFDMYDNVYAWPKGGYPAPQGPYYCGVGAGKVYARDVIEAHYRACLYAGINISGINAEVMPSQWEFQVGPCEGISMGDQLWMARYFLHRVAEEFGVKISFHPKPLKGDWNGAGCHTNVSTKDMRVPGGMKYIEQAIEKLSKRHNEHIKLYGADNEQRLTGRHETASMTSFSSGVANRGASIRIPRPVAKEGFGYFEDRRPASNIDPYLVTGIMCETVCGAIENANMSKEYERETNEQ

SEQ ID NO: 8475 - protein, 103 aa, Solanum tuberosum
PVGRLVLNRNIDNFFAENEQLAFNPGHIVPGIYYSEDKLLQTRIFAYADTQRHRIGPNYMQLPVNAPKCGHHNNHRDGAMNMTHRDEEVDYLPSRFDPCRPAE

SEQ ID NO: 8476 - protein, 313 aa, Pseudomonas syringae pv. syringae B728a
MTSKLDQLKKFTTVVADTGDFGAIKSLEPEDATTNPSLLLKAASDANNAKMLGEAFDGSKGDIGLACDRFAVAIGQEILKVVPGRVSTEVDARLSFDTNALIERSERLIGLYDAAGIKRDRVLIKLAATWEGIRAAEKLEKDGIQTNLTLLFSFAQAVACAEAGVFLISPFVGRIYDWYKKSTGTDYTGAEDPGVQSVTRIYNYYKANDFKTVVMGASFRNLNQIEQLAGCDRLTISTDLLKKLAEDTGTLERKLTPDKAGEKRSDTVKNLTESQFRWASNEDAMATEKLAEGIRQFARDQEKLEALLSAKKA

SEQ ID NO: 8477 - protein, 325 aa, Sinorhizobium meliloti
MAQAIVVRELGGPEVLKMEGVTLAAPGPGEVQIRQVAIGLNFIDVYFRTGLYKSATGLPFIPGKEGAGVVTAVGDGVSMFSVGDRVAYASADGAYASERNVDASQLLKVPEGISLETAAAMMLKGMTAQYLLNQTFKVGPETTLLFHAAAGGVGFIAGQWAKALGATVIGTAGSQEKIDLALAHGYDHVINYRTDNFVERVKDLTGGRGVDVVYDSVGRDTYPASLDCLKPRGLWASFGNSSGPVDAFNIGILAQKGALYATRPTLFTYVATRPALEACANSLFDVVQSNKVRININQTYPLAEAGRAHTDLETRKTSGTTLLIP

SEQ ID NO: 8478 - protein, 200 aa, Oryza sativa
MDRDESLGTQPLTGRRVRADTRHPVYRGIRLRSGKWVSEIREPGKSSRIWLGTYPTPEMAAAAYDAAALALRGADAALNFPGTATSRPAPASGSPDDIRAAAAAAAAMIGSGHRGNQRAADASTSRAATAAPEAAVAAGAGDQKRVVDEDDVFEMPRLLVSMAEGLMMSPPRLSPSTDGVGGVSPEDDEDEDGMSLWNHS

SEQ ID NO: 8479 - protein, 98 aa, Solanum tuberosum
KKYSGDHKEEVKTEDTSVPVEKYEETEEKKGFLDKIKEKLPGGGHKKTEEVAAPPPPPPAAVEHEAEGKEKKGFLDKIKEKLPGYHSKTEEEKEKEKN

SEQ ID NO: 8480 - protein, 628 aa, Neisseria polysaccharea
SPNSQYLKTRILDIYTPEQRAGIEKSEDWRQFSRRMDTHFPKLMNELDSVYGNNEALLPMLEMLLAQAWQSYSQRNSSLKDIDIARENNPDWILSNKQVGGVCYVDLFAGDLKGLKDKIPYFQELGLTYLHLMPLFKCPEGKSDGGYAVSSYRDVNPALGTIGDLREVIAALHEAGISAVVDFIFNHTSNEHEWAQRCAAGDPLFDNFYYIFPDRRMPDQYDRTLREIFPDQHPGGFSQLEDGRWVWTTFNSFQWDLNYSNPWVFRAMAGEMLFLANLGVDILRMDAVAFIWKQMGTSCENLPQAHALIRAFNAVMRIAAPAVFFKSEAIVHPDQVVQYIGQDECQIGYNPLQMALLWNTLATREVNLLHQALTYRHNLPEHTAWVNYVRSHDDIGWTFADEDAAYLGISGYDHRQFLNRFFVNRFDGSFARGVPFQYNPSTGDCRVSGTAAALVGLAQDDPHAVDRIKLLYSIALSTGGLPLIYLGDEVGTLNDDDWSQDSNKSDDSRWAHRPRYNEALYAQRNDPSTAAGQIYQDLRHMIAVRQSNPRFDGGRLVTFNTNNKHIIGYIRNNALLAFGNFSEYPQTVTAHTLQAMPFKAHDLIGGKTVSLNQDLTLQPYQVMWLEIA

SEQ ID NO: 8481 - protein, 136 aa, Debaryomyces hansenii
MRSQFKDEHPFEKRKAEATRITQRFNDRLPVICEKAENSDIQEIDKRKYLVPGDLSVGQFVYVIRKRIKLPSEKAIFIFINDILPPTAALMSTIYEEHKDEDGFLYVLYSGENTFGETEMKRLNVADLELDFDSVN

SEQ ID NO: 8482 - protein, 459 aa, Solibacter usitatus Ellin6076
MVTGRRFVLRTILSVSAVVAIGAQLAATPPQILEYIRTTWDTLTRSHRNLAAAAADPKSHPGPDGRWLVYVPHSENFSTIDAELRREVPEAELRTLSIRPLPEDPAHLREQGLLYLPRPYVVPGGRFNEMYGWDSYFIQLGLLRDNQIMLARDLADNFLYEIRHYGRILNANRTYYLSRSQPPFLTQMLLGVYRRTHDREWLEQAVPQIETYYRYWTSDPHLTPATGLSRYFDLGEGPAPEVIASERDSQGRTHYDLIRQFFRTHKIADYDVGQYYDAAADQLTPLFYKGDRAMRESGFDPSDRFGPFSIDILHYNPVCLNSLLYLMETGTAEIMGILHREADQALWTKRAEQRAALVNRLAWDERDGLYYDYYFVHHRVRRYPFLTTFYPLWAGIASRGQAARVAASLHLFERPGGLQTSINVSGNQWDAPFGWAPWNTLRSKAYGAMATRLTPTGSR

SEQ ID NO: 8483 - protein, 735 aa, Brassica oleracea
MEVCNCIEPQWPADELLMKYQYISDFFIAVAYFSIPLELIYFVKKSAVFPYRWVLVQFGAFIVLCGATHLINLWTFTTHSRTVALVMTTAKVLTAVVSCATALMLVHIIPDLLSVKTRELFLKNKAAELDREMGLIRTQEETGRHVRMLTHEIRSTLDRHTILKTTLVELGRTLALEECALWMPTRTGLELQLSYTLRQQHPVEYTVPIQLPVINQVFGTSRAVKISPNSPVARLRPVSGKYLLGEVVAVRVPLLHLSNFQINDWPELSTKRYALMVLMLPSDSARQWHVHELELVEVVADQVAVALSHAAILEESMRARDLLMEQNVALDIARREAETAIRARNDFLAVMNHEMRTPMHAIIALSSLLQETELTPEQRLMVETVLKSSSLLATLMNDVLDLSRLEDGSLQLELGTFNLHTLFREVLNLIKPIAVVKKLPITLNLAPDLPEFVVGDEKRLMQIILNIVGNAVKFSKQGSISVTALVTKSDNRAPPDFFVVPTGSHFYLRVKVKDLGAGINPQDIPKLFTKFAQTQSLATRSSGGSGLGLAISKRFVNLMEGNIWIESEGVGKGCTAIFDVKLAISNESKQSGIPKVPANPQHVNFAGLKVLVMDENGVSRMVTKGLLVHLGCEVTTVSSNEECLRVVSHEHRVVFMDVCTPGVENYQIALRIHEKFTKRHQRPLLVALTGNTDKSTKEKCMSFGLDGVLLKPVSLDNMRNVLSDRLEHRVLYEAM

SEQ ID NO: 8484 - protein, 354 aa, Zymomonas mobilis subsp. mobilis
MAKATQDSNRPHKADVGSAIPNHDLPPIPGRYHADREELLEFYRRMLMIRRFEERCGQLYGLGLIAGFCHLYIGQEAVAVGLQAALQPGRDSVITGYREHGHMLAYGIDPKIVMAELTGRASGISHGKGGSMHMFSTEHKFFGGNGIVGAQVPLGAGLAFAHKYRNDGGCSAAYFGDGSANQGQVYEAYNMAALWKLPVIFVIENNGYAMGTSIQRANAHTALSERGAGFGIPALVVDGMDVLEVRGAATVAVDWVQAGKGPIILEMKTYRYRGHSMSDPARYRSREEVNDMKENHDPLDNLKKDLFAAGVPEAELVKLDEDIRQQVKEAADFAEKAPLPADEELYTNILVGKY

SEQ ID NO: 8485 - protein, 335 aa, Chondrus crispus
MTAPKVGINGFGRIGRLVLRAAIEKGTCQVVAINDPFIDLDYMAYMLKYDSTHGRYAGDVSIKDGKLQVDGNSITVFAHRDPAEIPWATAAADYIVEATGVFTLKDKAAAHFKGGAKKVVISAPSKDAPMFVCGVNEAKYTPDLDIISNASCTTNCLAPLVKVIHEKYGIEEGLMTTVHATTATQKTVDGPSNKDWRGGRGRGRNIIPSSTGAAKAVGKVMPELNGKLTGMAFRVPTPDVSVVDLTVRLASETTYEDIKATMKAAADDSMKGIMKYTEDAVVSTDFIHDDASCIFDASAGIMLNSKFCKLVAWYDNEWGYSNRVVDLIAHISKVQ

SEQ ID NO: 8486 - protein, 149 aa, Helianthus annuus
MADQLTEDQISEFKEAFSLFDKDGDGCITTKELGTVMRSLGQNPTEAELQDMINEVDADGNGTIDFPEFLNLMARKMKDTDSEEELKEAFRVFDKDQNGFISAAELRHVMTNLGEKLTDEEVDEMIREADVDGDGQINYEEFVKVMMAK

SEQ ID NO: 8487 - protein, 433 aa, Glycine max
MTLISDVENLADAEIPDTAHQISTDSWFQVGFVLTTGINSAYVLGYSGTIMVPLGWAGGVVGLILATAISLYANALIARLHEYGGTRHIRYRDLAGFIYGRKAYSLTWALQYVNLFMINAGYIILAGSALKAAYVLFREDDGMKLPYCIAIAGFVCAMFAICIPHLSALGIWLGFSTVFSLVYIVIAFVLSINDGIKSPPGDYSIPGTSTSKIFTTIGASANLVFAYNTGMLPEIQATIRQPVVKNMMKALYFQFTVGVLPLYLVTFAGYWAYGSSTATYLMSDVNGPVWAKAMANIAAFLQSVIALHIFASPMYEYLDTKYGIKGSALAFKNLSFRVLVRGGYLTVNTFVSALLPFLGDFMSLTGAISTFPLTFILANHMYLVTNENKLTSTQKLWHWINICFFALMSAAAAIAALRLIDLDSKTYHVFADL

SEQ ID NO: 8488 - protein, 132 aa, Geobacter sulfurreducens PCA
MAVNSLTERNEERNVQPREETRSNERYIRPAVNIIETEEGLVLTADIPGAAKETLDVNVEKGILTISAPVSHEMPGTTAYREFELASYYRQFSIPESLDHEKAKAEYVNGILTLRVPKAEAAKPKRIAVQVG

SEQ ID NO: 8489 - protein, 276 aa, Thermotoga maritima
MYVAALFFLIPLVALGFAAANFAAVVRKPEGTERMKEISSYIRSGADSFLAHETKAIFKVAIVIAILLMIFTTWQTGVAFLLGAVMSASAGIVGMKMATRANVRVAEAARTTKKIGPALKVAYQGGSVMGLSVGGFALLGLVLVYLIFGKWMGQVDNLNIYTNWLGINFVPFAMTVSGYALGCSIIAMFDRVGGGVYTKAADMAADLVGKTELNLPEDDPRNPATIADNVGDNVGDVAGLGADLLESFVGAIVSSIILASYMFPIYVQKIGENLVH

SEQ ID NO: 8490 - protein, 523 aa, Beta vulgaris subsp. vulgaris
MEGRNVKNGDTNNNKIVGSSLSIEKNPISPPEASSLKKLALVASIAAGVQFGWALQLSLLTPYVQLLGIPHTWAPYIWLCGPISGMIVQPTVGYYSDRCTSKFGRRSPFIAVGATLVGFAVSLIGFAADIGHATGDPNGNVPKPRAIAVFVVGFWILDVANNTLQGPCRALLADMAAGSQAKTRYANAFFSFFMALGNIGGYAGSYGRLYTVFPFTHTKACDTYCANLKSCFFISITLLIVLTILALSVVRERPFTLDEIQEEENLKNNTGGCARLPFFGQLFGALKDLPKPMLILLLVTCLNWIAWFPFLLFDTDWMGKEVYGGTVGEGKAYDMGVHAGALGLMINSVVLGIMSLGIEKLARLVGGVKRLWGIVNLILAVCLAMTILVTKSAEHYRATHHVPGAIGPPLPPPGVKGGALAIFAVLGIPLAITFSIPFALASIFSASSGSGQGLSLGVLNLAIVVPQMFVSVTSGPWDALFGGGNLPAFVVGAVAATASAILSFTLLPPPPPEAKIGGSMGGH

SEQ ID NO: 8491 - protein, 413 aa, Arabidopsis thaliana
  misc_feature (219)..(219): Xaa can be any naturally occurring amino acid
  misc_feature (252)..(252): Xaa can be any naturally occurring amino acid
  unsure (1)..(413): unsure at all Xaa locations
MMIAQELGIYVVESKGGAILCLLLSLLCLGTWPALMALLERRGRLPQHTYLDYSITNFLAAIFIAFVFGGIGESTHEAPSFITQLTQIQDNWPSVLFAMAGGVGLSIGNLATQYSLAFVGLSVTEVTAASITVVVGTTVNYFLDNGLNRADILFSGVGCFMVAVCLGSAVHSSNSADIKAKLGKLSGDCETVTPEECQRLFGVEEEEEEEKEMEKVGHXAAGLSCGFGNGLQFMGGQAAGYAASDAVFALPXYRLFGGYICLGRTNDQWHTLKQGVPKLIVYTAFFYFSLSCFVIAVALNISFLYKPVLDSPRSSFREYLSDWNGRGWALAAGLLCGFGNGLQFMGGQAAGYAASDAVQALPLVSTFWGIYLFGEYRRSSTRTYALLVGMLVMFTVAVGLLMASAGERETRFT

SEQ ID NO: 8492 - protein, 544 aa, Treponema pallidum subsp. pallidum str. Nichols
MAKQLLFNEEARKKLLSGVEQISSAVKVTLGPKGRNVLLEKGYGAPTVTKDGVSVAKEVELEDPFENMGAQLLKEVATKTNDVAGDGTTTATVLAYSMVREGLKAVAAGMTPLELKRGMDKAVAIAVDDIKQNSKGIKSNEEVAHVASVSANNDKEIGRILASAIEKVGNDGVIDVDEAQTMETVTEFVEGMQFDRGYISSYFVTDRDRMETVYENPYILIYDKSISTMKDLLPLLEKIAQTGRPLLIIAEDVEGEALATLVVNSLRGTLKTCAVKAPGFGDRRKEMLEDIAILSGGQVISEDLGLKLESADIALLGQAKSVKVDKENTTIIDGSGKSKDIKDRIEQIKKQIEASTSDYDSEKLKERLAKLSGGVAVIKIGAVTEVEMKEKKHRVEDALNATRAAIEEGIVAGGGLALIQAAAALEKADLSGLTPDEAVGFKIVRRALEEPIRQISENAGIDGAVVAEKAKEKRGIGFDASKMEWVDMIKVGIIDPAKVTRSALQNAASVSGLLLTTECAIAAIPEKSSSTPPAPDMGGMGGMY

SEQ ID NO: 8493 - protein, 402 aa, Azoarcus evansii
MPRHVYICDAIRTPFGRYGGTLSSMRADDLAALPIKALVARNASVDWAAVDDIIYGCANQAGEDNRNVARMAALLAGLPVEVPGTTVNRLCGSSLDALGMVARAIASGETELMIAGGVESMSRAPFVLGKADSAFSRSAKIEDTTIGWRFVNPLMKAQYGIDSMPETAENVAQEFGVSRADQDAFALRSQQRWSAANERGFFGREILPVEIPRKKGDPVIFSVDEHPRADTTLEGLAKLKGVVRPDGSVTAGNASGVNDGACALLLASEDAVRRHGLTPRARILGSAAAGVPPRIMGIGPAPATQKLIARLGMDIGEFDTIELNEAFAAQGLAVLRQLGLPDDGEHVNPNGGAIAIGHPLGASGARLVTTALNQLETTGGRYGLATMCIGVGQGIALAFERV

SEQ ID NO: 8494 - protein, 519 aa, Zea mays
  misc_feature (472)..(472): Xaa can be any naturally occurring amino acid
  misc_feature (499)..(499): Xaa can be any naturally occurring amino acid
  unsure (1)..(519): unsure at all Xaa locations
MQFSSVLPLEGKACMSPVRRGSGGYGSERMRINCCSIRRNKALRRMCFSARGAVSSTQCVLTSDAGPDTLVVRTSFRRNYADPNEVAAVILGGGTGTQLFPLTSTRATPAVPIGGCYRLIDIPMSNCFNSGINKIFVMTQFNSASLNRHIHRTYLGGGINFTDGSVEVLAATQMPGEAAGWFQGTADAVRKFIWVLEDYYKHKAIEHILILSGDQLYRMDYMELVQKHVDDNADITLSCAPVGESRASDYGLVKFDSSGRVIQFSEKPKGAALEEMKVDTSFLNFAIDSPAEYPYIASMGVYVFKRDVLLDLLKSRYAELHDFGSEILPKALHEHNVQAYVFTDYWEDIGTIRSFFDANMALCEQPPKFEFYDPKTPFFTSPRYLPPTKSDKCRIKDAIISHGCFLRECAIEHSIVGVRSRLNSGCELKNTMMMGADLYETEDEISRLLAEGKVPIGVGENTKISNCIIDMXCQGWKERLHNKQRGRPRSRPAGRRILXIRSGIVVVLKNATIKDGTVI

SEQ ID NO: 8495 - protein, 223 aa, Zea mays
MASLLARQAAQALRARQTAQLGPAASAMQGHLRTYMNAGIPKRFKEDEEKEQLAKDLAKDWNAVFERSINTLFLTEMVRGLMLTLKYFFDRNVTINYPFEKGPLSPRFRGEHALRRYESGEERCIACKLCEAICPAQAITIEAEEREDGSRRTTRYDIDMTKCIYCGFCQEACPVDAIVEGPNFEFATETHEELLYDKEKLLENGDRWETEIAENLRSESLYR

SEQ ID NO: 8496 - protein, 374 aa, Nierembergia sp. NB17
MASEAVHASPTVCVTGAAGFIGSWLVMRLLERGYNVHATVRDPENKKKVKHLQELPKADTNLTLWKADLAVEGSFDEAIKGCQGVFHVATPMDFESKDPENEVIKPTVQGMLSIIESCVKANTVKRLVFTSSAGTLDVQEQQKLFYDETSWSDLDFINAKKMTGWMYFVSKILAEKAAMEEAKKNNIDFISIIPPLVVGPFITPSFPPSLITALSLITGNEAHYCIIKQGQYVHLDDLCEAYIFLYEHPKAEGRFICSSHHAIIYDVAKMIREKWPEYYVPTEFKGIAKDLPVVAFSSKKLTDMGFQFKYTLEDMYKGAIETCRQKQLLPFSTNRPSENGLDKEAISISSENFASGKENAPVANHKVKLTSVEI

SEQ ID NO: 8497 - protein, 92 aa, Solanum tuberosum
TTAIDVWSAGCVLAELLLGQPLFPGESGVDQLVEIIKVLGTPTREEIKCMNPNYNEFKFPQIKAHPWHKIFHKRMPPEAVDLVSRLLQYLPG

SEQ ID NO: 8498 - protein, 230 aa, Zea mays
  misc_feature (226)..(226): Xaa can be any naturally occurring amino acid
  unsure (1)..(230): unsure at all Xaa locations
RKMARKPLDYEELNENVKRVQYAVRGELYLRASELQKEGKKIIFTNVGNPHALGQKPLTFPRQVVALCQAPFLLDDPHVGLMFPADAIARAKHYLAMAPGGLGAYSDSRGIPGIRKEVADFIHKRDGYPSDPELIYLTDGASKGVMQILNTIIRNEMDGILVPVPQYPLYSAIISLYGGSLVPYYLEEEANWNLDFSNIRQAVAEARSKGISVRATVIINPGNPTXQFLS

SEQ ID NO: 8499 - protein, 305 aa, Triticum aestivum
  misc_feature (253)..(253): Xaa can be any naturally occurring amino acid
  unsure (1)..(305): unsure at all Xaa locations
MALAFDEYGRAFIILREQEKKSRLQGLDAQKANIAAGKSVARILRTSLGPKGMDKMLQSPDGDVTITNDGATILELMDVDNQIAKLMVELSRSQDYDIGDGTTGVVVLAGSLLEQAEKLLERGIHPIRIAEGYEMASRIAVDHLESISTKYEFSATDIEPLVQTCMTTLSSKIVSRCKRALAEIAVKAVLAVADLERKDVNLDLIKVEGKVGGKLEDTELVQGIIVDKDMKHPQMAKRIEDAHIAILTCPFEXPPKPRTSIKLTFDTVEEIPEPSRGQEAKIPSMNWVQKCQGCWLNPLVFLSMG

SEQ ID NO: 8500 - protein, 207 aa, Oryza sativa
  misc_feature (91)..(91): Xaa can be any naturally occurring amino acid
  misc_feature (106)..(106): Xaa can be any naturally occurring amino acid
  misc_feature (152)..(152): Xaa can be any naturally occurring amino acid
  unsure (1)..(207): unsure at all Xaa locations
CCPESAYGGRAVSQSLEQRRESLVSCRDGPSVMASSATTVAPFQGLKSTAGMPVARRSGNSSFGNVSNGGRIRCMQVWPIEGGQKFENLSXLATVNVEELLKEIQXLLPVPVWCPWLEFSQGPICLTVKNHRFPRITTTGGYWDHCAKLPMXFGCTDATQVLKELEEAKKAYPDAFVRIIGFDNVRQVQLISFIAYKPPGCEESGGN

SEQ ID NO: 8501 - protein, 613 aa, Brassica oleracea
MEPCDCFETNANQDDLLVKYQYISDALIALAYFSIPLELIYFVNKSAFFPYKWVLMQFGAFIILCGATHFINLWMFFNHSKVVAIVMTLAKVSCAAVSCATALMLVHIIPDLLSVKNRELFLKKKADELDREMGLILTQEETGRHVRMLTHEIRSTLDRHTILRTTLVELGKTLCLEECALWMPSQSGLYLQLSHTLSHKIQVGSSVPINLPIINQLFNSAQAMHIPHTCPLAKIGPPVGRYAPPEVVSVRVPLLHLSNFQGSDWSDLSGKGYAIMVLILPTDGARKWRDHELELVEVVADQVAVALSHAAILEESMHARDQLMEQNFALDKARQEAEMAVHARNDFLAVMNHEMRTPMHAIISLSSLLLETELSPEQRVMIETILKSSNLVATLISDVLDLSRLEDGSLLLENEPFSLQAIFEEVISLIKPIASVKKLSTNLILSADLPAYAIGDEKRLMQTILNIMGNAVKFTKEGHVSIIASIMKPESLRELPSPDFYPVPSDNHFYLCVQVKDTGCGIHTQDIPFLFTKFVQPRTGAQRNHSGAGLGLALCKRFVGLMGGCIWIESEGIEKGCTASFIIRLGICNGPGSSSGSMALRLAAKSQTRPWNW

SEQ ID NO: 8502 - protein, 516 aa, Lycopersicon esculentum
MKSTVHLGRVSTGGFNNGEKEIFGEKIRGSLNNNLRINQLSKSLKLEKKIKPGVAYSVITTENDTETVFVDMPRLERRRANPKDVAAVILGGGEGTKLFPLTSRTATPAVPVGGCYRLIDIPMSNCINSAINKIFVLTQYNSAALNRHIARTYFGNGVSFGDGFVEVLAATQTPGEAGKKWFQGTADAVRKFIWVFEDAKNKNIENILVLSGDHLYRMDYMELVQNHIDRNADITLSCAPAEDSRASDFGLVKIDSRGRVVQFAENQRFELKAMLVDTSLVGLSPQDAKKSPYIASMGVYVFKTDVLLKLLKWSYPTSNDFGSEIIPAAIDDYNVQAYIFKDYWEDIGTIKSFYNASLALTQEFPEFQFYDPKTPFYTSPRFLPPTKIDNCKIKDAIISHGCFLRDCTVEHSIVGERSRLDCGVELKDTFMMGADYYQTESEIASLLAEGKVPIGIGENTKIRKCIIDKNAKIGKNVSIINKDGVQEADRPEEGFYIRSGIIIISEKATIRDGTVI

SEQ ID NO: 8503 - protein, 486 aa, Shewanella sp. MR-7
MSQQYLTSQSGSPIADDQNSLSAGERGPLLLQDWHLIEKLAHFNRERIPERVVHAKGTGVYGTFTLTKDLSEYTIADHFNGVGKQTETFVRFSTVGGEMGSADAERDPRGFGLRFYTARGNHDIVGNNTPTFFLRDGIKFPDFIHTQKRNPLTNLKDPQAMWDFWSLNPEAMHQVTILMSDRGIPANYRQMHGYGSHTFSFWNAKGERFWVKFHFKSQQGVVNLTNEQADKLKGIDPDSSQRDMVVAVTDGNFPRWTVNVQIMPEADANTYHINPFDLTKVWPHGDYPLIEIGVLELNRLPQNYFAEVEQVALAPSNLVPGVGASPDKMLQARLFAYADAQRYRIGANYNQLPVNCPHATKANHHQRAGAMAGTQCPYHGSQTGGDAAANYGPNSTVGALVEPANFAEPPLRLDGEAARYSRYNQDDYTQAGNLYRIFSEAEKARLVETISGSLRQASVEVQQRMLAHFHKADADYGQRIQTALGL

SEQ ID NO: 8504 - protein, 518 aa, Lycopersicon esculentum
MDALCAGTAQSVAICNQESTFWGQKISGRRLINKGFGVRWCKSFTTQQRGKNVTSAVLTRDINKEMLPFENSMFEEQPTAEPKAVASVILGGGVGTRLFPLTSRRAKPAVPIGGCYRVIDVPMSNCINSGIRKIFILTQFNSFSLNRHLARTYNFGNGVGFGDGFVEVLAATQTPGDAGKMWFQGTADAVRQFIWVFENQKNKNVEHIIILSGDHLYRMNYMDFVQKHIDANADITVSCVPMDDGRASDFGLMKIDETGRIIQFVEKPKGPALKAMQVDTSILGLSEQEASNFPYIASMGVYVFKTDVLLNLLKSAYPSCNDFGSEIIPSAVKDHNVQAYLFNDYWEDIGTVKSFFDANLALTKQPPKFDFNDPKTPFYTSARFLPPTKVDKSRIVDAIISHGCFLRECNIQHSIVGVRSRLDYGVEFKDTMMMGADYYQTESEIASLLAEGKVPIGVGPNTKIQKCIIDKNAKIGKDVVILNKQGVEEADRSAEGFYIRSGITVIMKNATIKDGTVI

SEQ ID NO: 8505 - protein, 271 aa, Crocosphaera watsonii WH 8501
MKKLIEGLQKFQSGYFLSHRELFEELSQGQHPRILFITCSDSRVDPNLITQAEVGDLFVIRNAGNIIPPFGAANGGEGAAIEYAISALDIQQAIVCGHSHCGAMKGLLKLNSLQEKMPLVYDWLKHAEATRRLVKDNYSHLEGEELLEVTVAENVLTQLENLQTYPVIHSRLHQKKLTLHGWIYRIETGEVLEYDRASHDFIAPQSSITDTEPEYSFHPRNHAPGSTPFKRPATTRASSNGNGKNGSNRSSLPGYEQFSPEQAQRIYRGSY

SEQ ID NO: 8506 - protein, 298 aa, Agrobacterium tumefaciens str. C58
MRAFVIGNIALDETYSIAALPQAGASIFGEQASRSLGGKGCNQAIVLARCGVETTLVAAVGTDDRAIAIGKSLTREHLTPKLIPVDSATSDISIILTTPDGENSIITTRSAAAALDRDAALDALGDTVSGDLVILQGNLSEETTLVILNAARSKGLTTAFNPSPLQPWFASILPLIDIAVLNRIEAEALTGESGAGAGAFLLRAGVGLVIITLGGQGCVLVSANGAIEVAAAPATIVDTTGAGDCFTGVALASAIRRGVAIDARALEDASRAAAITVGRRGTQDAFPSHEEMMAILRA

SEQ ID NO: 8507 - protein, 396 aa, Zea mays
MEPARRLLLSDYDGAIESPLPSPPPSSATPFRPGVAVVVGILTSVFSITFLLLLYAKHCKRSAAESSGPYGSAGSGGGFGSSGNGAGGDRRNSGVDRAVVESLPVFRFGALRGQKEGLECAVCLGRFEPTEALRLLPKCRHGFHVECVDTWLDAHSTCPLCRSRVDPEDVLLLPEPPKPSTTGPPDPPETKAAAAAAGKEPAPAPPPAPAPTPAQSGRRISGRHSTGSVRAPGRVGPASRRSADGGVAVGCFDGAKVRKDRVLLVEPAAVVAEPDPVAFDRRFGHRILVSTAGGCKGETAPAAQQRWSDLRPSDLMFVRAEFLVTDAGRHSCSAAVNSGNARSAIGVRSVSELAGVRRLPPIRAGTCEGEPRSRGGGAPRWPGSSWWAPRGDPGRA

SEQ ID NO: 8508 - protein, 236 aa, Carboxydothermus hydrogenoformans Z-2901
MTAFIGELIGTAIIILFGGGVVANVVLNKSKGQNSGWIVITAGWAFGVAVAVYATGKLSGAHLNPAVTIALAYLGQFPWAKVPMYIVAQILGAFIGAVLVWLAYLPHWAETDDPGAKLGVFSTGPAIRNYAANLLTEIIGTTALVFGVLALGVNKEPAASGLAPLLVGILVWALGLSLGGPTGYAINPARDLGPRIAHAILPIPGKGSSDWAYSWVPVIGPIIGGLIGAILYQMVF

SEQ ID NO: 8509 - protein, 54 aa, Oryza sativa
MGSETFLEILLAILLPPLGVFLRYGIGMEFWIALLLTILGYLPGIIYAVYVLVA

SEQ ID NO: 8510 - protein, 179 aa, Sulfolobus tokodaii str. 7
MYIMPLRPGRCYRHFSGPAYTRKEYIPGVPMPKITKFTMGNVNGNYDYELRLVALEKGQIRHNALEAARVLALKQLTNKTGSDQNFALIVLKYPHHVIRENKMMAFAGADRLQDGMRLSFGKPIGTAARIERLGDIIMIAKVKKEHLEIAKKAFEAAASKIPLKTKIDIVPIPKEAVVQ

SEQ ID NO: 8511 - protein, 502 aa, Arabidopsis thaliana
MEETNIRVVLYSIFSLIFLIISFKFLKPKKQNLPPSPPGWLPIIGHLRLLKPPIHRTLRSFSETLDHNDGGGVMSLRLGSRLVYVVSSHKVAAEECFGKNDVVLANRPQVIIGKHVGYNNTNMIAAPYGDHWRNLRRLCTIEIFSTHRLNCFLYVRTDEVRRLISRLSRLAGTKKTVVELKPMLMDLTFNNIMRMMTGKRYYGEETTDEEEAKRVRKLVADVGANTSSGNAVDYVPILRLFSSYENRVKKLGEETDKFLQGLIDDKRGQQETGTTMIDHLLVLQKSDIEYYTDQIIKGIILIMVIAGTNTSAVTLEWALSNLLNHPDVISKARDEIDNRVGLDRLIEEADLSELPYLKNIVLETLRLHPATPLLVPHMASEDCKIGSYDMPRGTTLLVNAWAIHRDPNTWDDPDSFKPERFEKEEEAQKLLAFGLGRRACPGSGLAQRIVGLALGSLIQCFEWERVGNVEVDMKEGVGNTVPKAIPLKAICKARPFLHKIIS

SEQ ID NO: 8512 - protein, 273 aa, Sulfolobus tokodaii str. 7
MEGGRRDGIPISIEELNKLKNIAERARRNVVKMLFYDQTIHVGSSLSSIEILTTLLFRYIREGKDPINRDWLILSKGHAAPALYAILVEKGYINEDELWKIQDISGLLQGHPEIHIPGIDMSTGSLGQGLSFGIGVAQGIKMRGGNGRVFVIMGDGEQDEGEVWEAMTHAVTRKLDNIIAFIEMNGFQLDAATSEVKPKDFLPDVWKAVGWKTLSCDGHDFISLINTIEEALKAKAPVVIFAKTRRGMGFKAIENTEKQRASPDDAKKYLTNA

SEQ ID NO: 8513 - protein, 466 aa, Salmonella enterica subsp. enterica serovar Typhi
MGQLSESHALGGGLKSRHVTMLSIAGVIGASLFVGSSVAIAEAGPAVLLAYLFAGLLVVMIMRMLAEMAVATPDTGSFSTYADKAIGPWAGYTIGWLYWWFWVLVIPLEANIAAIILNSWIPGIPVWLFSLVITLALTGSNLLSVKNYGEFEFWLALSKVIAILAFIALGAAAISGFYPYAEVSGISRLWDHGGFMPNGFGAVLSAMLITMFSFMGAEIVTIAAAESDTPDKHIVRATNSVIWRISIFYLCSIFVVVALIPWNMPGLKSVGSYRSVLELLHIPHAKFIMDCVILLSVTSCLNSALYTASRMLYSLSRRGDAPAIMGKTNRSKTPWVAVLLSTGAAFLTVIVNYYAPAKVFKFLIDSSGAIALLVYLVIAISQLRMRKILLAQGGEIKLKMWLYPWLTWLVIGFICFVLVVMLFRPAQQLEVISTGLLGLGIIGTVPIMSRWKKLIRWQKAPLQNLR

SEQ ID NO: 8514 - protein, 207 aa, Triticum aestivum
  misc_feature (88)..(88): Xaa can be any naturally occurring amino acid
  unsure (1)..(207): unsure at all Xaa locations
LRSACPLPFDEAKLWQGENGPELKQEIQKQFRNISAIMDCVGCEKCRLWGKLQVLGLGTALKILFSVDGENNLNQQFQLQRNEVIALXVNLLNRLSGSVQFVHETGSPAQETIKQQTFHLAKGVSLTKCETLSCKDTRDSCFYESPLHTGRWCHQGHLQSYSSLTKVLEHLEANKAVYLFPSFHFGLPLQFGGKFTAKPLSILKKKK

SEQ ID NO: 8515 - protein, 746 aa, Candida albicans
MSVIAGHHVPRSNDQRQYDTPSVPINIAPDSEGHIHEMSRLKDYEVIEKLGQGTFGVVQKAKSKKDGSLVAIKQLINHSAKEGFPITAMREITILKQLNHKNILTIQDMIFEEPKMSNRTDIITMRGSFYTVTPYMSSDLVGLLENPKIKLELGQIKCIMQQLLKGIQYVHNQKFLHRDIKAANILIGQDGVLKIADFGLARIYHGNVPRLGMGPGGGEKAYTGLVVTRWYRPPEILLGERKYTTAVDQRGIGCVFAELFTGKPILVGKSDSHQAQIVFELVGSPLTWTDAAKLPNKNEYSCGLACKRSLEAKFASIMPTEAIDLLSGLLTLDPFKRLNALDALNHKFFSTDPLPLLPTQMPKFEESHEIDKERFKKLKDKEQAVSELKPPTEIRYDNHSESRYNADHSTFGGGGVGGKETSFSSGKSDYIDHYEPRARRDHYEPRIRNDNKDSNDVRGEFESATRQEQRRRDIQNRLDAGGMDTYIPKTTTGKLREHSGTESLSQKYDNYQPINVSRGSKSPSPSKLSSISQSKADLISKPSAPKVASRESSLERKQVSNGIRTTTDVEPPRARARRPTDMFGRPLTSNSTQAQPTRNKSVERPKDLEKPTNGVTEDRNKKPVLEEKKEVVKPNLAIPKIKKSSSLVSLSSRSSTTPVISNPSKVTKRAASSVTPPVLPKKPKISKTSSESEVSDLEEDSDFTGENATVFERFMALEQLQKSPVYKRIINEKMRFEKLSGGHKSM

SEQ ID NO: 8516 - protein, 663 aa, Zea mays
  misc_feature (206)..(206): Xaa can be any naturally occurring amino acid
  unsure (1)..(663): unsure at all Xaa locations
MAAVAPPPAPAPAPVPAPAPATVPVADQTTDLLQKLSLDSQPKAADATQPAAATAKKQGAAASQPLSVAIPPEPSITPVIQDFTDPNLFYLPAYYYGGYDSSMSEWDDYPRYLNSDGVEIAPAVYGDIYGCGYAPYGAYSPATSPVPTVDGQMFGAQHYQYPAAYFQPPTPVPSTTQSDLQSSKNPEKPAAKADPAKTTNGVPNGXPLLGGVPSAGYLDTTYGYDSTGAHFAWYDGSAYANGQQRTTTNHFPSSTFGNGSPARYQNKSTTTPQMGMQNRRPTTTSPAPTYPNRMYPSSRPYTQYGNSIKTGLPYGSNGYDSRIYGRWGLGMDNRYRPRGRNGYYGYGNESQDGTIELNRGPRSGRFKNQKLYGHTVTIAVKGQSLPSGESKDDSAVPDRAQFNRDDFPVQYDAAKFFVIKSYSEDDIHKSVKYNVWASTTNGNKKLDAAYQEAQSKGSACPIFLFFSVNTSGQFVGVAEMTGAVDFEKTLGYWQQDKWNGSFSVKWHIVKDVPNNILKHIILENNENKPVTNSRDTQEIHLEQGLQMLKIFKEHVSKTSILDDFAFYESRQKLMQDKRSKQQQVQKQVWDSRTPISVTGSEQQQEAANGKPNPSVPNGVPAEVKAAKASAENGTATPAISYAAKVAQAATEKPVLANGVAKTG

SEQ ID NO: 8517 - protein, 441 aa, Lycopersicon esculentum
MGNNRYNSPSREDKNDEEASVIIPETAHQVSNDSWFQVGVVLSMGVNSAYALGYSGTIMVPLGWIGGVVGLVMSTIVSLYASTIMAKLHEVGGKRHIRYRDLAGFLYGRTAYLLIWALQYANLFLINIGYVIMSGSALKAFYMLFRDDHMLKLPHFIAIAGVACILFAIATPHLSALRVWLGFSTLFMILYLAIAFVLSVQDGVKAPPRDYHIPGSGENKIWAIIGAIGNLFFAFNTGMIPEIQATIRQPVVGNMVKALNFQFTVGVVPMHAVTYIGYWAYGSVVSSYLLNNVHGPAWVLGVAHLSAFFQAIITLHIFASPTYEYLDTKYGVKGSALAPRNILFRLVVRGGYLVMTTFLSALLPFLGNFMSLTGAISTIPLTFILPNHMYIIAKKDKLNSLQKSWHWLNIVVFGCVSVAAFVAALKLTVVQTQTYHVFADL

SEQ ID NO: 8518 - protein, 246 aa, Brucella suis 1330
MRFKDKVVIVTGGASGIGEATARAFIREGAKVVIADFSDHGQQLADERAGAHEQALFIKTDVADTRAVQALIARTVENYGRLDIMFANAGIAADAPIDELDEAAWQKTIDINLTGVYLCDKYAIDQMRSQGGGVIVNCGSIHSHVGKSGVTAYAAAKGGVKLLTQTLAIDYGPQNIRVNAVCPGYIDTPLLKNIPDDKKQALVALHPMGRLGRAEEVANAVLFLASDEASFVNGASLLVDGGYTAQ

SEQ ID NO: 8519 - protein, 651 aa, Chlorobium tepidum TLS
MTNPDSPALSPVERSLAEIRLAELTAAKTCYSSPATWEDEVLYFLMLDRFSDCREHGGFNDVSGAPVVADGTRTTLLFRIEADANNADWQQWFEAGRGWCGGTIAGMRDKLGYLKRLGVTAIWVSPVFRQVTGSDSYHGYGIQNFLDVDPHFGTREELRDFVADAHQLGIRVILDIILNHAGDVFSYHDNQPYFYYQGWQWPVKGYRLNQGDAGSIPFSDGEAHLEISMEAAIWPVEFQSETTWTMKGEIRNWDVFPEYLQGDFCSLKDIDHGWAPDDPAESWDLEKRISLFRPSAALDHLIKVYRFWMAYADIDGFRLDTVKHMEPGAVRYFASAIHEFAQTLGKENFPIIGEITGGRSYAMQILDVTGLDAALGIGDLPDKLEFLVKGWRSPGNPDTSEQEGYFDLFCNSLLDGKNSHQWYSKHIVTMIDDHDQVGEQRKYHFCGDSPEGRKLLKAALGLNLATEGISCIYYGTEQAFNGADPRSDDHSWGDVFLRECMFGGPFGSLQSTGRHFFNEEHEVYRFAGRLAEFRKSEIALRRGRQYLRKVSATGSEDDFVYPQPVNGEMHWVVAWSRIFAETECLCAINTSLERELTVWAVVDHQLNPPGKTMRCVFSSSPEQEGEEIKAGPVCGSAVKITVPPGGFVIYR

SEQ ID NO: 8520 - protein, 475 aa, Arabidopsis thaliana
MNLQMESVKPLDVVSSGKGKLRRTFAKVINMKKLTGVVPEGNNKVERVKKSQEKVKLDKDLAKNAANLSESFDKLEEEYEKRLAMEALLAKLFATISSIKSGYAQLQYAQSPYDPNGIQKADNLVVAELKTLSELKQSFLKKQLDPNPDRTLVLAEIQELRSVLKTYEIMGKKLECQLKLKDSEIIFLKEKFQESMTQNKLMEKRLNQSGQLCNPLDHNLHLSAVSSTHFVTYLHHTVKSIRGFVKLMVEQMKLAAWDIDMAAELIQPDVLYYKQDHKCFALEHYVCKIMLEAFQLPYFSNESSKKTSREDKAMFFERFTELRSMKPREYLASRPKSRLAKFCRTKYLQLIHPKMEQAFFGHLHQRNQVTAGEFPETSLCTAFLEMAKRVWLLHCLAFSFDPEASIFQVSRGCRFSEVYMKSVSEEAFFSPEQEESSSETEPGVAFTVVPGFRIGKTTIQCEVYLSRSCQRRQSR

SEQ ID NO: 8521 - protein, 537 aa, Leptosphaeria maculans
MSHMDAEDAQFQKEVAEVKQWWNDSRWRYTKRTFTAEEIVSKRGNLKITYPSNSQSKKLWNIVEHRFKNKDVSYTYGCLDPVMVTQMAKYLDTVYVSGWQASSTASSTDEPGPDLADYPYTTVPNKVGHLFMAQLFHDRKQREERLTTPKADRAKVANVDYLRPIIADADTGHGGLTAIMKLTKLFIEKGAAGIHIEDQAPGTKKCGHMAGKVLVPISEHINRLVAIRAQADIMGTDLLAVARTDSEAATLITSTIDPRDHYYIQGCTNPALQPLSELMYAAEQSGKSGSELQAIEDAWVKEANLKLFHEAVVDTINAGVHVNKQELINQFLEQSKGKSNAEARTIAQGLTGVDVYFNWDAARTREGYYRYKGGCQCAINRAIAYAPFCDMIWMESKLPDYAQAKEFADGVHAVWPEQKLAYNLSPSFNWKAAMPRDEQETYIQRLAQLGYCWQFITLAGLHQSALMADTFSKAYSKQGMRAYGEIIQEPEAENKVDVLTHQKWSGANYVDNMLKMVSGGVSSTAAMGKGVTEDQFK

SEQ ID NO: 8522 - protein, 370 aa, Thermotoga maritima MSB8
MRVLGLILAGGKSDRLWPLTKVRASAAVPVFGKYRAIDFTLSNMVNSGIRKVGILTQYNPRSLMDHLGSGKEWDLDRKSGGLFILQPYVGPNREVWYRGTADAIFQNMTILRRGEEDHVLIGSGDHIYKMIYRDLFNYHLKKGADITLVVKELDETYNLSEYGIVQLDDDMRVVEIEEKPAHPKGNIAFLGVYFMNKELLKELLYATVPQGKYDLLLDIVIPNLDRLKVYAYRFDGYWRNVKKGIKEYYRINMDILKKEVRDELFYRNGKVYTKLKDLPPPKFTTTAVVENSLIADGSIVSGTVRNSVIFRNVRIKVGAVVENSIIMENTVVEEGAVLRNVILDKNCIVREGRVIEGDTELPVFEKRAVL

SEQ ID NO: 8523 - protein, 423 aa, Thermotoga maritima MSB8
MGNTVAMILAGGQGTRLGVLTERIAKPAVPFGGKYRLIDFTLSNCVNSGIYRVGVLTQYRPHVLSKHIGIGRPWDLDRKDGGVEILPPYVGRHESDWYKGTANAVYQNLEFLEENDAELVLILSGDHVYAMNYNDLIDYHLLKEADGTIACMEVPIEEASRFGIMITDVDGRIVDFEEKPAKPRSNLASLGIYVFNYEFLKKVLIEDENDPNSSHDFGKDVIPRILRENLGSLYAFRFDGYWRDVGTLRSYWEANLELVLPVPPFNLYDPNWRFFTHTEEMPPAYVAPGSKVSTSLVSEGAEVYGNVFNSVIFQGVKIGRGTVVKNSVIMTRTEIGENCYLENVIIAENVKIGSNVRMGVGEDAESKLDPKVYSGLLTVVGMNSVIPDDMVIGKNCVIGIGVRPEDFKSKTLESGDYVIVREE

SEQ ID NO: 8524 - protein, 358 aa, Glycine max
MATSLTLFKTTFVFFIIFTLLTHQATADCEAESKNSCNNKEKALPLKIIAIFTILASSIIGITLPLVTRSVPALSPENDLFIIVKCFAAGIILGTGFMHVLPDSFAMLWSDCLKEKPWHEFPFSGLVAMFSAIITMMVDSLATSVYTKKCRTTSEVVPGESSLEGGEENLEMGAVNLGHFHGHHHAHHETKMDGKESQLLRYRVVAMVLELGIIVHSVVIGLGMGASNNTCTIRGLIAAMCFHQMFEGMGLGGCILQAEYKFLKKAIMVVFFSITTPFGIALGIAMSTTYKENSPSALITVGLLNASSAGLLIYMALVDLLSADFMSPRLQGSIKLQLKSYVAVFLGAGGMSLMAKWA

SEQ ID NO: 8525 - protein, 487 aa, Brucella suis 1330
MADIYDVIVIGSGPGGYVTAIRAAQLGLKTAIVEREHLGGICLNWGCIPTKALLRSAEILHFGEHAKDYGLKLDGTITPDVKAVVQRSRGVSARLNGGVAFLMKKNKIDVIWGEAKLVKAASGSNPAEISVGKTSKQPMQPQNPVPKGVLGEGSYKAKHIIVATGARPRALPGIEPDGKLIWTYFEAMVPQALPKSMLVMGSGAIGIEFASFYHDMGVDVTVVEVMSQIMPVEDAEISAIARKQLEKRGLKIITDAKVAKVEKGANSVTAHVETKDGKTQTLTVDRMISAVGVQGNIENLGLEALGVKTDRGCIVIDGYGKTNVAGIYAIGDVAGPPMLAHKAEHEGVICVEKIAGLPNVHPLDKGKIPGCTYCNPQVASVGLTEAKAKEQGYDIRVGRYSFSANGKAIALGEDQGLVKTIFDRKTGQLLGAHMVGAEVTELIQGFVIAMNLETTEEELMHSVFPHPTLSETMKESVLDAYGRVLNA

SEQ ID NO: 8526 - protein, 809 aa, Craterostigma plantagineum
MTTHEKAPASPCMRERVEETLADHRDELISLLSRYTSRGKCLLQSHQLMDELEDAIAEDPANKKLSDGCFNEVLSSAQEAIVLPPFVILAVRPRPGVWAYVRVNMQELSIDELTVSEYLCFKEELVDGRGFDPYVLELDFEPFNATFPRPSRSSSIGNGVQFLNRHLSSIMFRNKDSLEPLLDFLRVHSHKGHVMMLNDKIQRVSQLEYSLAGAEEYISKVPPDTPYSELESKLQGMGFERGWGDTARRSLEMMHLLSDILQAPDPSSLESFLGQLPMVFNVVVLSIHGYFAQTDVLGLPDTGGQVVYVLDQVRAMENEMIKRIKNHGLNITPRILIVTRLIPEARGTKCDQRLEKIDGCEHSHILRVPFRTEQGILKQWISRFDVWPYLEKFAEDAGKEIRAEMKAVPDLLIGNYSDGNLVASLLAYKMGVTQCTIAHALEKTKYPDSDIYWKKHEEKYHFSCQFTADLLAMQHSDFIITSTYQEIAGTRNVVGQYESHVAFTMPGLYRVVHGIDVFDPKFNIVSPGADESIYFPYTDKEKRLTNLQASIEKLLFDPEQNEEHIGVLKDRSKPIIFSMARLDRVKNITGLVEMYAKNKKLRELTNLVVVAGYNDVKKSSDREEKDEIEKMHNLIDQYDLNGSLRWISAQSNKARNGELYRYIADKRGIFVQPAFYEAFGLTVVEAMTCGLPAFATLHGGPHEIIEDGVSGFHIDPYHAEKAATRMADFFAKCDDDPSYWVKISEQALQRIRECYTWNIYSERLMTLAGVYSFWKYVSKLERRETRRYLEMFYILKFRNLAKSVPYATE

SEQ ID NO: 8527 - protein, 352 aa, Leptosphaeria maculans
MPPTGSGSSRKISFNVSEQYDIQDVVGEGAYGVVCSALHKPSGQKVAIKKITPFDHSMFCLRTLREMKLLRYFNHENIISILDIQKPRNYETFTEVYLIQELMETDMHRVIRTQELSDDHCQYFIYQTLRALKAMHSANVLHRDLKPSNLLLNANCDLKVCDFGLARSAASTEDNSGFMTEYVATRWYRAPEIMLTFKEYTKAIDVWSVGCILAEMLSGKPLFPGKDYHHQLTLILDVLGTPTMEDYYGIKSRRAREYIRSLPFKKKIPWKAMFPKTNDLALDLLERLLAFNPVKRITVEEALKHPYLEPYHDPDDEPTADPIPEEFFDFDKNKDNLTKEQLKLLIYQEIMR

SEQ ID NO: 8528 - protein, 510 aa, Aeropyrum pernix K1
MQTQPSLGCLCLVLCPGVRMASPEDAISTEDMRAFEINAENLGVSIELLMENAGNAVAGVLECLLGGLQGAKVAVLAGKGGNGGDGIAAARRLAARGARVEIHLTHPRGEVKHPAARTMLKGVEASRVEVLEPGAPGWLDLGGVDAVVDALLGIGVKGGLRGSVKAAAEAYNKAGGLKISVDVPTGVDPDTGDAVEGAVRSDYTVSMHKPKKGLFKGAAPLYAGEVLTAEIGVPWAAEYYAGPGDVAARIPRRPRDAHKGVGGRVLVVGGSSEYVGAPILAALAAYAAGVDLVYLASPFSREAALARPEIVPRRMEEASRVVERVHAVVAGPGMGGEGEDLLWEVLDAARKRGVPAVVDADGLKALARRGDRLWGGAVLTPHRGEAKLLLGGEDLPPLRAAREIAARYGATTIVKAPVDAVCSPEGRCRESPWGAPEMSVGGTGDVLAGVLAGFLARRRALGLDPDPLNTAAAALYTVGKAGEDLATEEGLVSPLRLVEAVKRVVAGSRT

SEQ ID NO: 8529 - protein, 811 aa, Craterostigma plantagineum
  misc_feature (443)..(443): Xaa can be any naturally occurring amino acid
  misc_feature (454)..(454): Xaa can be any naturally occurring amino acid
  unsure (1)..(811): unsure at all Xaa locations
MATPKLTKIPSMRERVEVTLAAHRNELVSLLSRYVAQGKGLLQSHHLIDELENIILDDDAKKKLSDGPFSEVLRSAQEAIVLPPFVALAVRPRPGVWEFVRVNVYQLSVDELTISEYLRFKEELVDGGIDDNFVLELDFEPFNASFPRPTRSSYIGNGVQFLNRHLSSIMFRNKDCLEPLLEFLRAHKHKGHIMMLNDRIQHIPRLESALARAEDHLSKLPPDTPYSEFEYTLQGLGFERGWGDTAERVLEMMHLLSDILQAPDASTLETFLGRIPMVFNVVILSIHGYFGQANVLGLPDTGGQIVYILDQVRALENEMIKRIKAQGLSIIPQILIVTRLIPDAKGTSCNQRLEKISGCEHSHILRVPFRTEHGVLRQWISRFDVWPYLEKFAEDAASEISAELRGVPDLIIGNYSDGNLVASLMAHKMGVTQGTVAHALEKXKYPNSDIYWKXYEDKYHFSCQFTADLLAMNNSDFIITSTYQEIAGTKNSVGQYESHAGFTLPGLYRVVHGIDVFDPKFNIVSPGADDGIYFSYSEKERRLTSYHDCLEKLLFDPQQTEEHIGVLNDQSKPIIFSMARLDKVKNITGLVEMYAKNAKLRELANLVVVAGYNDVKKSSDREEIAEIEKMHSLIKEYKLDGQLRWISSQTNRVRNGELYRYVADTRGIFVQPAFYEAFGLTVVEAMTCGLPTFATSHGGPMEIIEDRISGFHIDPYHPEKAADLMADFFGKCNEDPSYWVKISEAALRRIQERYTWKKYSERLMTLAGVYGFWKHVSKLERRETRRYLEMFYILKFRELVNSVPYAVDGSD

SEQ ID NO: 8530 - protein, 351 aa, Aspergillus oryzae
MPSKITVGVAQARTHNTVTETLSALNRITRDAASRGVHLLLFPEAYLGGYPRTCNFGTAIGARQPHGREQFLNYFHSAVDLGDTPTGAGDDWVQRKLPVAEGKNHRGDGTRETLERIANETGVFIIVGVIERAAGSLYCSALYVDPARGVLGKRRKVMPTGTERLVWAQGSPSTLKAVTTHLNGVPVTMAAAICWENYMPLLRQSLYSQNVNIYLAPTADARDTWLPLMRTVAFESRAYVLSANQCVRYNELPEWVTGQQDEKISTEYVCRGGSSIVDPQGQVLAGPIWEVSADDASDSAADAGGDGLIISEIDVEDCERGRLDMDVAGHYSRSDAFKLTVEGLDLNPPPL

SEQ ID NO: 8531 - protein, 330 aa, Zea mays
MAFLNMEQQTWAFTFGILGNIISLMVFLSPLPTFYRVYRKKSTEGFQSTPYVVTLFSCMLWIFYALLKSGAELLVTINGVGCVIEAAYLATYLVYAPKAARALTAKMLLGLNVGVFGLAALATMVVSSAGLRVRVLGWICVSVALSVFAAPLSIMRQGVRTKSVEFMPFSLSFFLVLSAVIWFAYGALTMDVFVAFPNVLGFVFGVAQMALYMAYRNKEPAAAAAAIAVTVDQEAKLPEHAKEVVVAEARASCGAEVHPIDIDIEATPTPVEEVHEPQVVVVVVVDVEPVTCAGAAEADASGVADGGVPGPMAPPEQLAIKPDMAISVEA

SEQ ID NO: 8532 - protein, 85 aa, Carica papaya
SPKYNVCRQGVSGAESSESSGPKKSMLVVSEFIGCSPSLSGAIRVNPWNVESTAEAMNEAISMADAEKQLRHEKHYRYVSTLLSQ

SEQ ID NO: 8533 - protein, 395 aa, Triticum aestivum
  misc_feature (189)..(189): Xaa can be any naturally occurring amino acid
  misc_feature (195)..(195): Xaa can be any naturally occurring amino acid
  misc_feature (215)..(215): Xaa can be any naturally occurring amino acid
  misc_feature (240)..(240): Xaa can be any naturally occurring amino acid
  misc_feature (268)..(268): Xaa can be any naturally occurring amino acid
  misc_feature (282)..(282): Xaa can be any naturally occurring amino acid
  misc_feature (304)..(304): Xaa can be any naturally occurring amino acid
  misc_feature (319)..(319): Xaa can be any naturally occurring amino acid
  misc_feature (372)..(372): Xaa can be any naturally occurring amino acid
  unsure (1)..(395): unsure at all Xaa locations
HSITSLYKKAGWYRSGIPGISSTHASVATPQIYRKTLLPVLLLLAAAALYPAAADGDEVLALTESTFEKEVGQDRGALVEFYAPWCGHCKKLAPEYEKLAASFKKAKSVLIAKVDCDEHKSVCSKYGVSGYPTIQWFPKGSLEPKKYEGQRTAEALTEYVNSEAATNVKIAAVPSSVVVLTEETLTQLXLDETRXVILPSVSCRSVDYKVLCSAXGECASCFKQDEGVVIAKLGSEKSPXLAEKIGVLVFPPLSFPPQGANNVGEEFXGSGSLDYFFKFHNXEKSELAGNSKGQLTQEVGLWQXFGCSVKRFHSAADDXRKRILSKIEEEAAKLSVPAVKHGKIYVNVQRRATKEFRVQRSITRRNERFMLXESISPSKADEFAIKKNILSAFSS

SEQ ID NO: 8534 - protein, 215 aa, Euphorbia esula
LEVESSDTIDNVKAKIQDKEGIPPDQQRLIFAGKQLEDGRTLADYNIQKESTLHLVLRLRGGMQIFVKTLTGKTITLEVESSDTIDNVKAKIQDKEGIPPDQQRLIFAGKQLEDGRTLADYNIQKESTLHLVLRLRGGMQIFVKTLTGKTITLEVESSDTIDNVKAKIQDKEGIPPDQQRLIFAGKQLEDGRTLADYNIQKESTLHLVLRLRGGN

SEQ ID NO: 8535 - protein, 333 aa, Mycobacterium leprae TN
MFYDDNADLSIIQRRKVGVIGYGSQGYAHSLSLRDSGVQVRVGLPEGSKSRPKAFEQGLDVDTPAEVAKWADVIMLLVPDTAQADVFENDIEPNLQPGDALFFGHGLNIHFELVKPSGDVTVAMVAPKGPGYLVRRQFVDGKGVPCLIAVNQDPTGTGEALALSYAKAIGGTRAGVIKTTFKDETETDLFGEQAVLCGGTEELVKAGFDVMVEAGYPPEMAYFEVLHELKLIVDLMYEGGIARMNYSVSDTAEFGGYLSGPRVIDADTKERMRGILRDIQDGSFVKKLVANVEGGNKQLEVLRKENAEHPIEVTGKKLRDLMSWVDRQSTETA

SEQ ID NO: 8536 - protein, 275 aa, Lycopersicon esculentum
FQDYHGLPEFRKAIAKFMEKTRGGRVRFDPERVVMAGGATGANETIIFCLADPGDAFLVPSPYYPVFNRDLRWRTGVQLIPIHCESSNNFKITSKAVKEAYENAQKSNIKVKGLILTNPSNPLGTTLDKDTLKSVLSFTNQHNIHLVCDEIYAATVFDTPQFVSIAEILDEQEITYCNKDLVHIVYSLSKDMGLPGFRVGIIYSFNDDVVNCARKMSSFGLVSTQTQYFLAAMLSDEKFVDNFLRESAMRLGKRHKGLEVVGIKCLKNNAGLFCW

SEQ ID NO: 8537 - protein, 384 aa, Neisseria meningitidis MC58
MTETTQTPTLKPKKSVALSGVAAGNTALCTVGRTGNDLSYRGYDILDLAQKCEFEEVAHLLIHGHLPNKFELAAYKTKLKSMRGLPIRVIKVLESLPAHTHPMDVMRTGVSMLGCVHPERESHPESEARDIADKLIASLGSILLYWYQYSHNGKRIEVESDEETIGGHFLQLLHGKRPSESHIKAMHVSLILYAEHEFNASTFTARVIAGTGSDMYSSITGAIGALKGPKHGGANEVAYDIQKRYRNADEAEADIRERIGRKEIVIGFGHPVYTISDPRNVVIKEVARGLSKETGDMRLFDIAERLESVMWEEKKMFPNLDWFSAVSYQKLGVPTAMFTPLFVISRTTGWSAHVLEQRKDGKIIRPSANYTGPEDLAFVEIEER

SEQ ID NO: 8538 - protein, 313 aa, Sulfolobus tokodaii str. 7
MMQRSTLPMRDTFGRLLAELGEKNKDIIVITADVGNSTRAMYFREKFPDRYFNVGISEQDMVNFAAGLSVTGFKPIVVGFAMFVMRAWEQIRNSIARMNLDVKIMVTHSGYSDSGDGSSHQALEDIALMRVLPNMKVIIPADSEDVKRSLPVVVNELRGPLYYRMGRDYTPVITEGLDYDFKLGKAYVLRDGEDLAIMGAGVVLADALKAAEELEKMGISAAVINLMSIKPIDEDLIEYYARKTGRIITIEEHSIYGGIGSAVAEVVVKKYPVPMRFIGAITFGRSARSERDLLDFYGINYKSILNAVMELVK

SEQ ID NO: 8539 - protein, 520 aa, Trametes pubescens
MSRFQSLLAFVVASLAAVAHAGIGPVADLTISNAAVSPDGFSRQAVVVNGGTPGPLITGNKGDNFQLNVIDNLTNHTMLKSTSIHWHGFFQKGTNWADGPAFINQCPISSGNSFLYNFQVPDQAGTFWYHSHLSTQYCDGLRGPFVVYDPNDPSADLYDVDNDDTVITLVDWYHVAAKLGPAFPLGADATLINGKGRSPSTTTADLAVISVTAGKRYRFRLVSLSCDPNYVFSIDGHNMTIIETDSINTQPLVVDSIQIFAAQRYSFVLEANQAVDNYWIRANPNFGNVGFTGGINSAILRYDGAAAIEPTTTQTTSTQPLNEVNLHPLVATAVPGSPVAGGVDLAINMAFNFNGTNFFINGASFTPPTVPVLLQIISGAQNAQDLLPSGSVYSLPSNADIEISFPATTAAPGAPHPFHLHGHAFAVVRSAGSTVYNYDNPIFRDVVSTGTPAAGDNVTIRFRTDNPGPWFLHCHIDFHLEAGFAVVFAEDIPDVASANPVPQAWSDLCPIYDALDPSDQ

SEQ ID NO: 8540 - protein, 440 aa, Agrobacterium tumefaciens str. C58
MSDTGGYFPRWRLKTEGRIMPDERLPAGQTAVLGLQHVVAMFGSTVLAPLIMGFDPNVSILFSGISTLIFFIAVGGRVPSYLGSSFAFIGPVLVATGAAAGAASPDIALALGGIIAAGVLYALIGVIVMIVGHNWIEKLMPPVLTGAIVAAIGLVLAPIAIASASGTGPGNPDGDQLSRWIAILTVTSVGAIAVYAPGMTRRLPILLGGAIAYLAYLVLANGFGLGKPVDFAGVAAAAWFGLPAFTTPVFSAPAIALIAPVVVILVAENLGHIKAIGAMTGRNLDPYLGRAFIGDGIATIFSGAFGGTGMTTYAENMGVMAITRIFSTLVFIVAALVAIILGFSPKFGALIQTIPGPVIGGLSVVVFGLIAATAGRIWVENKVDFSEPRNLITVGIALVLGAGNFKLNVAGFTLDGIGTATIGAIAFYHLLGLGRPAQGR

SEQ ID NO: 8541 - protein, 164 aa, Zea mays
SKLAMRALPLTPSRSSSFGAHQTRPSGGGPRSVRAYAKGDEEGDKQSLFGSITEALDFSQVRSEKDAELLYEARESTKGGGRMTREQYGALRRKIGGTYQDFFKSYVEVDGQYVEEGWVDKTCKICKKDTRGEPRQVDKLGRYAHVACLENPKPTNFFAKIFAR

SEQ ID NO: 8542 - protein, 526 aa, Trametes pubescens
MGKFHSFVNLALSLSLSGRVFGAIGPVTDLTISNADVTPDGITRAAVLANSVFPGPLITGNKGDEFQINVIDNLTNETMLKSTTIHWHGIFQAGTNWADGAAFVNQCPIATGNSFLYDFTVPDQAGTFWYHSHLSTQYCDGLRGPLVVYDPDDPNASLYDVDDDTTVITLADWYHTAAKLGPAFPAGPDSVLINGLGRFSGDGGGATNLTVITVTQGKRYRFRLVSISCDPNFTFSINGHNMTIIEVDGVNHESLDVDSIQIFAGQRYSFILNANQTIDNYWIRAIPNVGTTDTTGGVNSAILRYDTAEEIEPTTNATTSVIPLAETDLVPLDNPAAPGDPQVGGVDLAMSLDFSFNGSNFFINNETFVPPTVPVLLQILSGAQDAASLLPNGSVYTLPANSTIEISFPIITTDGASNAPGAPHPFHLHGHTFSVVRSAGSSTFNYANPVRRDTVSTGNSGDNVTIRFTTDNPGPWFLHCHIDFHLEAGFAIVFAEDTADTASVNPVPTAWSDLCPTYDALDSSDL

SEQ ID NO: 8543 - protein, 377 aa, Streptococcus agalactiae A909
MKIDKYTAILGNTVSYPDMHSLTDNRPLASLPFDGKYRLIDFQLSSLANAGVRSIYGIFRGNNVRSVFDHIRSGREWGLGTLLSHYSLGFYDTDDDTRTVNGDYYDQILTYLRRSGSDQTIYMSCDMLCNIDLSQVIHLHNANGAQATVVYKKMPRSAIAEANQVLTIDESDHVVSLGKAVDNDDNQKMSAEIYVIDTPWLIEKMEEEAQNNEPRKLRFLLRDLIVESNALAFEYTGYLSNISSIKSYYDANMDMLTPNKFYSLFFSNQKVYTKVKNEEATYFDKQSNVSNSQLASGSIIKGYLDHSIVSRNCLLEKGTRVVNSIIFPKVKIGEGATIENTIIDKCVKVASGVTLKGSLDKPLVIPKFSEINEDIIQ

SEQ ID NO: 8544 - protein, 579 aa, Schizosaccharomyces pombe
MKVVPSEKIKPNWWRETSVYQIYPASFKDSNGDGFGDLEGIISKVDYLKALNVESIWLCPIYPSPLKDMGYDVSDYKQIDSRYGTLEDLDRLMKALHERDMKLVMDLVLNHTSDQHEWFKESRSSKTNPKRDWYFWKPARYNEKGERLPPNNWRSYFDTSAWEWDEATQEYYLHLWSVGQPDLNWETPKVREAVHDILRFWLDRGVDGFRLDAINMISKDQRFLDAPITDDRYEYQLAYQYYANGPRIHEYLNGIGNILTEYDAFSVGEMPYVLDTNEILHVVGADRRELTMIFQFDFVDLDLDPNQHKYIEGSWELSDLKKSLKKWQSALLSGGGWNASFIENHDQTRTVSRYLSDSPKYRAYSSKLMALFIIFQSGTPLVFQGQELALANIPRDWPIDEYLDVETQNFWKLFMSGNPSQEEIEKTMDIVNKRARDNGRTPMHWDSSPNGGFTKAGVKPWMRVTNDYKEWNAANQVNDPESPYTFWSKALELRKELKDAVVYGSFELISEEDPSIVAFVRESSTYKLIILLNFTGNKVSYDCPLNLTSYEILLDNYKDFICMTSPVTLNPYQAVLLKL

SEQ ID NO: 8545 - protein, 439 aa, Lycopersicon esculentum
MGEEKEVISHVITTPPFEVEVPKTLHQIGQDSWFQVGLVLTTTVNCAYALGYAGTIMVPLGWIGGVTGMVLSTIISLYASTLMAKIHQYGEKRHIRYRDLAGFMYGYRAYAIVWGLQYANLFLINIGFIILGGQALKAFYLLFREDHEMKLPYFIIIAGLACVFFAVSVPHLSALGVWMAVSTFLSIVYFSIAFALCLKDGINAPPRDYSIPGSSSSRTFTTIGAAASLVFVYNTGMIPEIQATVRAPVVDNMLKALYFQFTIGAVPVHAVTYMGYWAYGSKSSSYLLYNVSGPVWLRGLANIAAFFQSIITLHIFASPTYEYLDTKYRISGSVLAFRNLSFRTVVRGGYLAITIFLSALLPFLGDFMSFTGAISTIPLTFILPNHMYIVAMRKQISSLQKSWHWFNIVFFSCLAVAALVAAVRLIAMDSKTYHAFADL

SEQ ID NO: 8546 - protein, 364 aa, Lactococcus lactis subsp. cremoris
AYEKAVKGYITKRKPLGEALDEEIMDELSVKFGIVDDALEDLFKQIQDAGISIVDKDGNPSPLALVTDEIEKEEVSDTAMDEIVTNVRIDDPVRMYLKEIGRYPLISLDEETKLAEAIIAGGEGAEFAKQMLAEANLRLVVSIAKRYSGRGMQFLDLIQEGNMGLMKAVDKFDQTKGFKFSTYATWWIRQAITRAIADQARTIRIPVHMVETINKLIRVQRNLLQELGRDPSPEEIGKELHMAPDKVREVLKIAQEPVSLETPIGEEDDSHLGDFIEDDVIESPVDYTNRILLREQLDEVMDTLTDREENVLRMRFGLDDGRMHTLEDVGKQFKVTRERIRQIEAKAIKKLRHPRRSKPLRDFM

SEQ ID NO: 8547 - protein, 610 aa, Schizosaccharomyces pombe
MQIFVKTLTGKTITLEVESSDTIDNVKSKIQDKEGIPPDQQRLIFAGKQLEDGRTLSDYNIQKESTLHLVLRLRGGMQIFVKTLTGKTITLEVESSDTIDNVKSKIQDKEGIPPDQQRLIFAGKQLEDGRTLSDYNIQKESTLHLVLRLRGGMQIFVKTLTGKTITLEVESSDTIDNVKSKIQDKEGIPPDQQRLIFAGKQLEDGRTLSDYNIQKESTLHLVLRLRGGMQIFVKTLTGKTITLEVESSDTIDNVKSKIQDKEGIPPDQQRLIFAGKQLEDGRTLSDYNIQKESTLHLVLRLRGGMQIFVKTLTGKTITLEVESSDTIDNVKSKIQDKEGIPPDQQRLIFAGKQLEDGRTLSDYNIQKESTLHLVLRLRGGMQIFVKTLTGKTITLEVESSDTIDNVKSKIQDKEGIPPDQQRLIFAGKQLEDGRTLSDYNIQKESTLHLVLRLRGGMQIFVKTLTGKTITLEVESSDTIDNVKSKIQDKEGIPPDQQRLIFAGKQLEDGRTLSDYNIQKESTLHLVLRLRGGMQIFVKTLTGKTITLEVESSDTIDNVKSKIQDKEGIPPDQQRLIFAGKQLEDGRTLSDYNIQKESTLHLVLRLRGGLF

SEQ ID NO: 8548 - protein, 442 aa, Lycopersicon esculentum
MATTSFHHPLLPNVHNDDELAIHIPSSAHQVSNDSWFQVGVVLSTGINSAFALGYAGLIMVPLGWVGGVVGLILSSAISLYASTLIAKLHEYGGRRHIRYRDLAGFMYGQTAYSLVWASQYANLFLINTGYVILGGQALKAFYVLFRDDHQMKLPHFIAVAGLACVLFAIAIPHLSALRIWLGFSTFFSLVYICIVITLSLKDGLEAPPRDYSIPGTKNSKTWATIGAAANLVFAYNTGMLPEIQATVREPVVDNMIKALNFQFTLGVIPMHAVTYIGYWAYGSSASSYLLNNVSGPIWLKGMANIAAFLQSIIALHIFASPTYEFLDTKYGVTGSALACKNLAFRIIVRGGYIAITAFLSALLPFLGDFMNLAGAISTFPLTFILPNHMYIVAKRKKLSFLKKSWHWLNIIFFSCIAVAAFVAALRFITVDSTTYHVFADL

SEQ ID NO: 8549 - protein, 238 aa, Triticum aestivum
MGRGKKDPWAARGSVDPVEEEEAAAVMEVEEEEEVKGDEEEEWNHEEDEAEEEEEEWEQEEEEADEASAAEQPEEQRSPPKLAEGFYEIETIRRRRRRQNQVQYLVKWRGWPESANTWEPEENLKACSDFVEAFEKRQQPRSYGKRKRKRKISTTPVVSPNPSSQGRRGRPRRSDPRSLSQRPVPERKILPPRASSRRGTDNTNRNLVAGSDASVNVAPQQMLGQGATQEGSSNVLSV

SEQ ID NO: 8550 - protein, 605 aa, Fragaria x ananassa
MDTKIGSIDVCKTENHDVGCLPNSTTSTVQDSVPSTCLSSADATLGRHLARRLVQIGITDVFTVPGDFNLTLLDHLIAEPGLTNIGCCNELNAGYAADGYARSRGVGACVVTFTVGGLSVLNAIAGAYSENLPVICIVGGPNSNDYGTNRILHHTIGSPDFSQELRCFQTVTCFQAVVNNLEDAHELIDTAISTALKESKPVYISIGCNLAGIPHPTFSREPVPFSLSPKLSNKWGLEAAVEAAAEFLNKAVKPVMVGGPKLRSAHAGDAFVKLADASGFALAVMPSAKGQVPEHHPHFIGTYWGAVSTAFCAEIVESADAYLFAGPIFNDYSSVGYSLLLKKEKAIIVQPDRVTIGNGPTFGCVLMKDFLVGLAKKLKHNNTAYENYRRIFVPDGHPLKAAPKEPLRVNVLFKHIQKMLSAETAVIAETGDSWFNCQKLKLPPGCGYEFQMQYGSIGWSVGATLGYAQAVPEKRVIAFIGDGSFQVTAQDVSTMIRNGQRTIIFLINNGGYTIEVEIHDGPYNVIKNWNYTGLVDAIHNGEGKCWTTKVRCEEELIEAIETANGPKKDRLCFIEVIVHKDDTSKELLEWGSRVSAANSRPPNPQ

SEQ ID NO: 8551 - protein, 444 aa, Arthrobacter sp. SU
MDLLNEVRKAPMSRLQIRAVAVAIALMLIDGMDVAVAAYAAPALSKSWSLDPVTLGFLLSSGLFGMAAGSLFLTPFSDKIGRRRMMLVALVLVSAGMTLSVFAGDVVQLMAYRVLAGLGIGGMIANLNVFVSEYSSDKRRGSILGLYTSGFAIGATLGGFIAGPLIPQFGWRSVFVVGAAASILMLAVTWRFLPESLDYLISKRPRNALTQVNAILVQMHRPALSALPELPQDQQIGRGIKDLLTGRMAAQTVLLWVGYGLMISAYYFATTWTPKLIATSSGDDSLGVTMGLLVNFGGIIGCFIFSILAVFLRSRHLLLGSLLISALIYVSFGMTFTQTSLAIFIGAVLGLVTAANVAGFYATTPDLFPPAIRGTGIGWMIGIGRLVSFVSPIVVGYLLAGGWKAENIFMLFGLPLVVSALSMAVVWSLSTKTKPSTPVPTIIS

SEQ ID NO: 8552 - protein, 506 aa, Brassica napus
MTSINVKLLYHYVITNLFNLCFFPLTAIVAGKAYRLTIDDLHHLYYSYLQHNLITIAPLFAFTVFGSVLYIATRPKPVYLVEYSCYLPPTHCRSSISKVMDIFYQVRKADPSRNGTCDDSSWLDFLRKIQERSGLGDETHGPEGLLQVPPRKTFAAAREETEQVIIGALENLFKNTNVNPKDIGILVVNSSMFNPTPSLSAMVVNTFKLRSNVRSFNLGGMGCSAGVIAIDLAKDLLHVHKNTYALVVSTENITYNIYAGDNRSMMVSNCLFRVGGAAILLSNKPGDRRRSKYELVHTVRTHTGADGKSFRCVQQGDDENGKIGVSLSKDITDVAGRTVKKNIATLGPLILPLSEKLLFFVTFMGKKLFKDKIKHYYVPDFKLAIDHFCIHAGGRAVIDVLEKNLALAPIDVEASRSTLHRFGNTSSSSIWYELAYIEAKGRMKKGNKVWQIALGSGFKCNSAVWVALNNVKASTNSPWEHCIDRYPVKIDSDSGKSETRVQNGRS

SEQ ID NO: 8553 - protein, 542 aa, Brucella suis 1330
MARYVFITGGVVSSLGKGIAAAALAALLQARGYRVRIRKLDPYLNVDPGTISPYQHGEVFVTDDGAETDLDLGHYERFTGRPANQQDNITTGRIYRNIIEKERRGDYLGATVQVIPHVTDEIKNFVLEGNEDYDFVLCEIGGTVGDIEAMPFLEAIRQLGNELPRGTAVYIHLTLMPYIPAAGELKTKPTQHSVKELRSIGIAPDILLVRADREIPESERRKLSLFCNVRESAVIQALDVATIYDVPIAYHKEGLDSEVLSAFGIDPAPKPRMDRWEEVSHRLHNPEGEVTIAVVGKYTGLKDAYKSLIEALHHGGLANKVKVNLDWIEAQVFESEDPAPYLEKVHGILVPGGFGERGAEGKILAAKFARERKVPYFGICFGMQMACIEAARNLVGIEDASSSEFGPTREPVVGLMTEWLKGNMLEKRAAAGDLGGTMRLGAYEAVLKPDSKIAQIYGSTDIHERHRHRYEVNIDYKDRLEAAGLNFAGMSPDGVLPETVEYADHPWFIGVQYHPELKSRPFEPHPLFASFIEAAIEQSRLV

SEQ ID NO: 8554 - protein, 546 aa, Escherichia coli CFT073
MTPGEVRRLYFIIRTFLSYGLDELIPKMRITLPLRLWRYSLFWMPNRHKDKPLGERLRLALQELGPVWIKFGQMLSTRRDLFPPHIADQLALLQDKVAPFDGKLAKQQIEAAMGGLPVEAWFDDFEIKPLASASIAQVHTARLKSNGKEVVIKVIRPDILPVIKADLKLIYRLARWVPRLLPDGRRLRPTEVVREYEKTLIDELNLLRESANAIQLRRNFEDSPMLYIPEVYPDYCSEGMMVMERIYGIPVSDVATLEKNGTNMKLLAERGVQVFFTQVFRDSFFHADMHPGNIFVSYEHPENPKYIGIDCGIVGSLNKEDKRYLAENFIAFFNRDYRKVAELHVDSGWVPPDTNVEEFEFAIRTVCEPIFEKPLAEISFGHVLLNLFNTARRFNMEVQPQLVLLQKTLLYVEGVGRQLYPQLDLWKTAKPFLESWIKDQVGIPALVRAFKEKAPFWVEKMPELPELVYDSLRQGKYLQHSVDKIARELQSNHVRQGQSRYFLGIGATLVLSGTFLLVSRPEWGLMPGWLMAGGLIAWFVGWRKTR

SEQ ID NO: 8555 - protein, 285 aa, Zea mays
MREKRVYVPDSVRGQDLTEPSYAPVRGDRLTHDIPTVDVLQFYPLTHAWSTALGPSTPALQSVYAAFYQGGLVTENLHSRKMVQPKKFRGVRQRHWGSWVSEIRHPLLKRRVWLGTFETAEEAARAYDEAAVLMSGRNAKTNFPIQRSSTGEPTPAAGRDARSNFSSGSSTTNLSQILSAKLRKCCKAPSPSLTCLRLDPEKSHIGVWQKRAGARADSNWVMTVELNKDAASTDAASQSTSATTAPPATPMDEEERIALQMIEELLSSSSPASPSNGDDQGRFII

SEQ ID NO: 8556 - protein, 352 aa, Neurospora crassa
MTEPARRQTVPLTCHGHSRPVTHLSFSPLEKEDSYYMISSCKDGNPMLRDGQTGDWIGTFLGHKGATWQARLSPDASTAATSSADFSAKIWDTHTGELLYVLKHDHIVRAIAYPYENSGLLATGGYEKKLRIFDLADQRPATSPSGTSPEPVTIDASKAFEIGEGVHKDIIKFIVWARDPNVIITASGDTLRWFDLPSRRCVREAKLEGEIKSCELVSLAPSHSAPTDIGGGLPVLAVAAGKTAYFWGGSRAEDELKRITLPHGIASVGLDLKGRKFVVGEEPGTWARVYTWDEGQEIDVHKGHHGPIWSIAFSPDGNLYATGSEDGTIKMWKNCDGYYGLWRGGVSGSGTD

SEQ ID NO: 8557 - protein, 284 aa, Sinorhizobium meliloti
MTSQSPAVQLSNTSLARRAWEIRRKAVRMGEVQGQGYVGQALGIADVLAVSYFHALTYRRQDPEWEGRDRFLLSIGHYAIALYAALIEAGILPEQELETYGTDDSRLPMSGMAAYTPGMEITGGSLGQGLGIGVGMALGLKAKKNPAFVYNLMSDGELGEGSTWEAAMSAAHHKLGNLICLVDFNDQQADGKSTEMLCSEPLGAKWAAFGWHVQRVDGNDIPALVAAFDAARALEEAMPRVIICDTLMCKGVPFLEQREVTHFVRVDADEWQKALAALDANRPD

SEQ ID NO: 8558 - protein, 198 aa, Gossypium barbadense
MCGGAIISDFVAPKYDRKLTGDDLWSELDIFSDLLGFDNNGKSFVNHQFHNNNNNKLINPKDNQLNKERSETIQKTSQVTKKVEKTQRTRKNFYRGIRQRPWGKWAAEIRDPQKGVRVWLGTYNTAEEATRAYDEAAKRIRGDKAKLNFPQTPTKNQAASPALTLLPPAKKRCIVPGVNSTEFTRLDSPPISLWVLGV

SEQ ID NO: 8559 - protein, 319 aa, Gossypium barbadense
MSNVYLWFMYPYDIKFFFLCSIIEGSNSEKSMQFDGQAEKCAKRKRKNQYRGIRQRPWGKWAAEIRDPRKGVRVWLGTFNTAEEAARAYDAEARRIRGKKAKVNFPNETPRTSPKHAVKTNSQKPLSKSNLSPVQLNLDQNYNYLSQPEQEYFDTMGFVEEKPLVNQFAYVDPVPTSIDAGSNQSDNAPLYFNSDQGSNSINCSDYGWGEQGARTPEISSILEASVVGEEFLEDANPSKKLKPSSDNVMPAEDNSAKTLSDELLALDNQMKYFQMPPFIEGNWDATIDAFLNGDATQDGGNPMDLWNFDDFPTMAEGVF

SEQ ID NO: 8560 - protein, 154 aa, Zea mays
MTKRGLKSRPSSPSYGGGSARNLELVGKSSEDVRSSTRLRLKPLRKPKTSHKQKKKKATKVHEKMPKKPPTAFFFFLEDFRKLYQEENPEVKSMREIGKTCGEKWKTMTYEEKVKYYDIATEKREEFHRAMTEYTKRVESGEFDESETESDFSE

SEQ ID NO: 8561 - protein, 551 aa, Escherichia coli K12
MTHLPHWWQNGVIYQIYPKSFQDTTGSGTGDLRGVIQHLDYLHKLGVDAIWLTPFYVSPQVDNGYDVANYTAIDPTYGTLDDFDELVTQAKSRGIRIILDMVFNHTSTQHAWFREALNKESPYRQFYIWRDGEPETPPNNWRSKFGGSAWRWHAESEQYYLHLFAPEQADLNWENPAVRAELKKVCEFWADRGVDGLRLDVVNLISKDPRFPEDLDGDGRRFYTDGPRAHEFLHEMNRDVFTPRGLMTVGEMSSTSLEHCQRYAALTGSELSMTFNFHHLKVDYPGGEKWTLAKPDFVALKTLFRHWQQGMHNVAWNALFWCNHDQPRIVSRFGDEGEYRVPAAKMLAMVLHGMQGTPYIYQGEEIGMTNPHFTRITDYRDVESLNMFAELRNDGRDADELLAILASKSRDNSRTPMQWSNGDNAGFTAGEPWIGLGDNYQQINVEAALADDSSVFYTYQKLIALRKQEAILTWGNYQDLLPNSPVLWCYRREWKGQTLLVIANLSREIQPWQAGQMRGNWQLVMHNYEEASPQPCAMNLRPFEAVWWLQK

SEQ ID NO: 8562 - protein, 545 aa, Shewanella sp. ANA-3
MAAKEVVFGNDARVKMLAGVNILANAVKVTLGPKGRNVVLDKSFGSPLITKDGVSVAKEIELEDKFENMGAQMVKEVASKANDAAGDGTTTATVLAQAIVTEGLKAVAAGMNPMDLKRGIDKAVAAAVIELKNLSQDCADSKAIAQVGTISANSDESIGQIIATAMEKVGKEGVITVEEGQALENELDVVEGMQFDRGYLSPYFINKPETGSVELDHPFVLLVDKKISNIRELLPILEGLAKTGKPLLIVAEDVEGEALATLVVNNMRGIVKVAAVKAPGFGDRRKAMLQDVAILTGGTVIAEEIGLELEKATLEDLGTAKRVVITKDNTTIIDGNGEQAQIEARVSQIKQQIEESTSDYDKEKLQERMAKLAGGVAVIKVGAATEVEMKEKKARVEDALHATRAAVEEGVVPGGGVALVRVASKIADVEVANEDQKHGVVIALRAMEAPLRQIATNAGEEASVVANTVKNGSGNYGYNAGNDTYGDMLEMGILDPTKVTRSALQFAASIAGLMITTEAMVAELPKADAPDMGGMGGMGGMGGMM

SEQ ID NO: 8563 - protein, 198 aa, Gossypium hirsutum
MSASRFIKCVTVGDGAVGKTCLLISYTSNTFPTDYVPTVFDNFSANVVVDGNTVNLGLWDTAGQEDYNRLRPLSYRGADVFLLAFSLISKASYENVAKKWIPELRHYAPGVPIILVGTKLDLREDKQFFIDHPGAVPITTAQGEELRKLIGAHFYIECSSKTQQNVKAVFDAAIKVVLQPPKKKKKKKRKAQKACSIL

SEQ ID NO: 8564 - protein, 1103 aa, Candida glabrata CBS138
MSAISSNTVSVIKNNQIGPWKLGETLGSGSTGKVLLASNETTKQQAAVKVISKAVFEAMNNSESNGDATNALPYNIEQEIIIMKLLNHPNVLRLFDVWETNSDLYLVLEYAEKGELFNMLVERGPLPENEAVRAFRQIIIGISYCHSLGVVHRDLKPENLLLDNKLNIKIADFGMAALESEDKLLETSCGSPHYAAPEIISGLPYEGFSSDVWSCGVILFALLTGRLPFDEEDGNIRNLLLKVQKGEFEMPDDDEITKEAQDLLARLLTVDPSKRITIREILKHPLLQKYPSIKDSRSIRNLPREDTYLSPLADTNSKIDDAILQNLVILWHGKDAREIAAKLREPGANTEKTLYALLYRFKCDTQREANRARRQSKIVQRNSTIRSTAPESPSKKKTYTPQKKNKRASIIASSSKRPVSVTKTATNITVNSSITGTPKSAKRMSMNNSARKRMSALYGTRDSPTKTSRSRRSSIITKDFLGNRPRDSVISMSHNKRASKSSKRISLVPNLKRQSVTTKLMATYAKLSEDDDWEYIERETKRTSSDFATLIDEIFEYEKYEQIRKEKAELERKVRETKEREERERKERQEKELQERLERERIEKQKEDIARQMDEEISNLKKELVGDQDNEDKFRSVSEPLESKSKKIEDIEEDIDGILRNRKYSLQTRPVSRLDPGIGFIDKPRQSEQHVPETVNLEPELEETEQKILETIRRSKFLGSSFDIKKELENVKRHRQTSQPIEKEMAPPALPETLPKAVEKKNVSMDPSLRKISDIKVPQFTRKSRHFSTSNRRLSVLSMYSTKESYSNLADILKNGPGEKEMIQTAPTPKSADDSDQLFDTIDEADTPASVSREERLYEVAEESENELANKKIDIADLLNSEGSNLKSVEEQEDSMKLPKLPPLFEDGSTKETKEQSKSMIPENMQSSESQKQIEKNNSDEGGSLNPFMTKHRDVSDKGVTKEKPTVTMKTTSEQVSADKKRNMSFLRKLSKGSSSSKDNVDVTLSTSVSSKQLFSGLVNLLKGWTKYGLKGIAIDSTSQTITGKLANDNILSFRSTAFSILIFSQEKGSAVTFRKVSGSGKAVRRLSDEVKKVLSKEGVLRD

SEQ ID NO: 8565 - protein, 665 aa, Shewanella sp. MR-7
MIRHSLLFALVLTASSPLCVSAQTNNSPVSSTASFHLEPLSWWAGMHNPKLQLMLHSDALPADATQLKVEITGQDVVFEGIEQTDNPHYLFINLDLRQAKPQTFDIRILAGDKQLFQLPYTLDARADGSRERQGFSNKDVIYLITPDRFANGNPSNDNQADMLEHAALDNSDGRHGGDIEGIRQHLDYLAKLGVTQLWINPLLENNQAQYSYHGYAITNLYRVDPRFGSNQDYQKLVTEAKQRGLGVIKDVVLNHIGSNHWWLKDLPSSDWLNYPLKPDTTDAKTAPAASSTSPSSTSPSFTSHRRTTVQDPYADTQDKSDFVDGWFVDSMPDLNQRNPKLATYLIQNSIWWVEYAGLSGIREDTYSYADKTFLAQWSKALMAEYPHFNIVGEEWTANPITVSYWQKGKINADGYTSDLPSLMDFPLYEKLVESLNEPEGWDTGFIKLYEMLANDVVYANPSQLVLFEGNHDTNRIYSLLKENLPLYQMALTYVLTAKRIPQLFYGTEVLMTSPTEGRHDGVVRSDFPGGFANNKVSGFSGKGLNAKQQQALAFVRTLLNYRKHSAALQTGDLLHFVPQNGVYVQFRCAAKHPTAGNACYQADADKVMVIYNKNDQAQTLDLSRFRKVLAGNTSANSVFTGDKFKLNQSVTLPHAGVMLLELNHL

SEQ ID NO: 8566 - protein, 644 aa, Ashbya gossypii ATCC 10895
MWGGCSAAGRARASGLLTGPAQLIKKTTGSSSSTQKKKDKETGKKPGSANGAAGAVGGSGGRATVDKKEQKGSGAKQPKAKDAGKSGAGAAPKVKVAAKKEERSYPTMIAAAVSPGSTSGPPSPKEAEAASPNGIDIPRSSHSFERLPTPTKLNPDTDLELIKTPQRHSSSRFEPSRYTQISKLPGFDDVPPEEQISLFIAKVDQCNIMFDFSDPSFDIHGKEIKRITLQELIEFIVTNRFTYTEEMYGHVVNMFKVNLFRPIPPPVNPIGDVYDPDEDEPVNELAWPHMQCVYEFFLRFVESPDFNHQIAKQFIDQEFILKLLELFDSEDIRERDCLKTTLHRIYGKFLSLRSFIRRSINNIFLQFVYETERFNGIAELLEILGSIINGFALPLKEEHKVFLVRILIPLHKVRCLSLYHPQLAYCIVQFLEKEPMLTEEVIMGLLRYWPKVNSTKEIMFLNEIEDIFEVIEPLEFIKVEVPLFVQLAKCISSPHFQVAEKVLSYWNNEYFLNLCIENAEVILPIIFPALYELTSQLDLDSQTDEEGNPNQDPYMLVEQAINSGSWNRAIHAMAFKALKIFLETNPVLYENCNSLYLSSLKESQKRREKREENWNKLQEYVRNLHISSVDNPVAVDRIGTGDLH

SEQ ID NO: 8567 - protein, 449 aa, Listeria innocua Clip11262
MEKHYDYIAIGGGSGGIASINRAAMHGAKCALIEPKFLGGTCVNVGCVPKKVMWYGAQIKEAMDLYADAYGYQVDSSFNFQKLVENREAYIERIRGSYKNGLDNNKVEWIKGYAEFVDEKTLRVNGELVTADHILIATGGEPALPSIPGAEYGITSDGFFALKELPKKVAVVGAGYIAVELAGVLQQFGSDTHLFVRKHAPLRNFDPILTDTLTELIEQSDMTLHKHAVPQKVEKNSDGSLTIFLEDGRTETVDTLIWAIGRKPVIKGLQIEKAGVELVDSGHIAVDKFQNTNVDGIYAVGDVTGHYELTPVAIAAGRRLSERLFNNKKDAHLTYENIPTVVFSHPAIGTVGLTEPEAIEKYGKENIKVYTSSFTSMYTAITDHREPCRMKLICEGKTERVIGLHGIGYGVDEMIQGFAVAINMGATKADFDNTVAIHPTGSEEFVTMK

SEQ ID NO: 8568 - protein, 629 aa, Oryza sativa
MESEMADAAPAPAVAAAATAEPLAAVAEEGEEGGEAAVGSTLTMERVAAAKKFIENHYRSQMKNIQERKERFSVEKCAVNVVWMRRLCLSLSAVDNTLVAYHLFVLSGWRFRLERQLESSQVPREQQINLLKDLERKETEYMRLKRHKICVDDFELLTIIGRGAFGEVRLCREKTSSNIYAMKKLKKSDMVVRGQVEHVRAERNLLAEVASHCIVKLYYSFQDSEYLYLIMEYLPGGDIMTLLMREDTLTEHVARFYIAETILAIESIHKHNYIHRDIKPDNLLLDKNGHMKLSDFGLCKPIDCSKLSTLNEDEPMGDDNLRESMDIDSSFSETTNGRRWRSQHEQLQHWQMNRRKLAFSTVGTPDYIAPEVLLKKGYGMECDWWSLGAIMYEMLVGYPPFYSDDPITTCRKIVHWRNHLKFPEDSKVSPEARDLICRLLCDVDHRIGSAGADQIKAHPWFRGVAWEKLYEMEAAFKPQVNDELDTQNFMKFEEIHYIQIESLGVAEVRDAERSESTTMGGPGRAFVRQSRGGLGRAARLNAEGGLGWVARTRTTAGEMDNAPTRTGSGPSRKMMLNSKDLSFVGYTYKNFDAVKGLKHSGPADMDPSREPNGRDKHMHTVSSGDPMIQ

SEQ ID NO: 8569 - protein, 540 aa, Shewanella sp. MR-7
MSELTWWRGAVIYQIYPRSLLDTNGDGVGDLRGIITKLDYIASLNVDAIWISPFFKSPMADFGYDISDYREVDPLFGSMQDFDELIEKAHQRGIKVIIDQVLSHTSDQHAWFIESRESRTNPKADWYVWADPKEDGTAPNNWLAIFGGCAWEWEPRRQQYYLHNFLRSQPDINFHNPEVRQAVLDNVEFWLKKGVDGFRLDAITFCYHDEQLRDNPAKPKDKRQGRGFSEDNPYAYQYHYYNNDRPQTILFIEELRQLINRYPGAVTLGEVSAEDSLAVMAAYTKGEDRLHMAYSFELLTDDYSAAYIRQTVEALEASIGDGWPCWAIGNHDVQRVASRWGRGKQTHDMVKMLNAMLSSLRGSVCNYQGEELGLTEAPIEYHELQDPFGKTFWPMFKGRDGCRTPMPWEQHADFSGFSQVTPWLPVANAHRALAVDVQEADPASMLQGYRQFLAWRKGYPILIEGEIEFLDAPEPLLVFVRTLGEQKLLVCFNLLDTETQWVLDKLSIQQELTGHGLKTAQRVADTLTFSAYACFYALLN

SEQ ID NO: 8570 - protein, 270 aa, Neisseria meningitidis MC58
MDKIRVAAVQMVSGVSPETNVAAMKRLVARAAEQGADWVLLPEYWVLMGANDTDKLALAEPLGGGRFQTALSETAKECGVVLFGGTVPLQSCEAGKVMNTLLVYGRDGVRTGLYHKMHLFGFSGLGERYAEADTIRAGGDVPHLSAEGVPVAAGICYDVRFPEFFRRQLPFDVLMLPAAFTHTTGKAHWELLLRARAVENQCYVVAAAQGGLHENGRRTFGHSMIVDPWGDVLDVLPEGEGVVTADIDANRLNSVRNRLPALKYRVLDAV

SEQ ID NO: 8571 - protein, 150 aa, Nicotiana tabacum
CGGCEAGSAGKDAFHLRVRVHPFHVLRINKMLSCAGADRLQTGMRGAFGKPQGVCARVAIGQVLLSVRCKDGNANHAQEALRRAKFKFPRRQKIIVSRKWGFTKFSRTDYLKYKSENRIVPDGVNAKLLGCHGRLAARQPGRAFLEAVGN

SEQ ID NO: 8572 - protein, 286 aa, Pseudomonas fluorescens PfO-1
MSLAVIQMVSQSDVLANLRDARRLLEHASNAGAKLAVLPENFAAMGRRDIADIGRAEALGEGPILPWLKQTARDLKLWIVAGTLPLPPVGQPEAKSHACSLLVNDQGEIVARYDKLHLFDVDVADNRGRYRESDDYAYGSGVVVADTPVGRLGLTVCYDLRFPELYSELRAAGAELITAPSAFTAVTGAAHWDVLIRARAIETQCYVLAAAQGGTHPGPRETFGHGAIVDPWGRVLAQQEQGEAVLLAERDSNEQASIRARMPVTGHRRFFSQGAQRPASEHEFKA

SEQ ID NO: 8573 - protein, 515 aa, Edwardsiella tarda
MHIVNGINGLIAKKNVLFFLTSLAISPSVLADTLTRDNGAPVGDNQNSQTAGPIGPVMLQDVQLLQKLQRFDRERVPERVVHARGTGAHGVFTPTADISDLTVAKVFTPGSTTPVFVRFSSVVHGTHSPETLRDPRGFATKFYTAEGNWDLVGNNFPTFFIRDAIKFPDMVHAFKPDPRTNLDNDARRFDFFSHLPESTRTLTLLYSNEGTPLSYRNMDGNSVHAYKLINDKGEVHYVKFHWKTRQGIKNLDPQQVEQIQGKDYSHMTQDLVTAINRGDYPKWDLYIQVLKPADLKNFDFDPLDATKVWPDVPERKIGEMVLNKNPDNVFQETEQVAMAPSNLIPGIEPSEDKLLQGRLFAYADTQFYRIGANGLSLPINKPHSAVNNGNQDGQLNSGHTLDKGVNYQPSRIYPREELVSSRYSQTPLSGTTQQSKIQREQNFKQAGELYRSYSKKEQNDLINSLGTSLASADTVSKNIMLSYFYKADKDYGTRLTSVANGDLPTVKNLADKLQD

SEQ ID NO: 8574 - protein, 239 aa, Oryza sativa
MATEGECAAATIAMHAAVMATKGEHRFSGGDAQSLCLPPLAASFPPPFSLHRHQPPFPLHRCVGEEGSGTGKEVWQRRAMGAASSSSSSSSSSPSPQGQAQAQAQGKPNYSTSLTDEEWRKRLTKDQYYITRQKGTERAFTGEYWNTKTPGIYHCVCCDTPLFESSTKFDSGTGWPSYYQPIGDNVKCKLDMSIIFMPRTEVLCAVCDAHLGHVFDDGPRPTGKRYCINSASLKLKKTQ

SEQ ID NO: 8575 - protein, 391 aa, Triticum aestivum
  misc_feature (84)..(84): Xaa can be any naturally occurring amino acid
  misc_feature (314)..(314): Xaa can be any naturally occurring amino acid
  unsure (1)..(391): unsure at all Xaa locations
MSDNLMEKVNALGERLKITGSEVGKQMQAGMSSMSFKMKELFQAQTPADKIVEDATAETLEGPDWAANLEICDLINTEKVNSVXLIRGIKKRIMLKEARVQFLALFLLETIVKNCEKAFSEVAAERILDEMVRLIDDPQTVVNNRNKALTLIEAWGESGDELRYLPVYEQTYKSLKSRGIRFPGRDNESLAPIFTPPRSVAEAEVAANFSQQIFEDVHVHTYTAEETKEAFDVARNSMELLSTVLSSSPQQDALQDDLTTTLVQQCYQSQHTIQRFIETAGDNEALLFEALSVNDEVLKVLSKYEEMKKPMASXRTEQPVVIPIATEHEDSVTVGHEDALVRKPAAARAMSGGDDDILDDLDEMIFGKKGGSSSQDVSKRQDPKKDDLINF

SEQ ID NO: 8576 - protein, 642 aa, uncultured bacterium 463
MSGIVGLVRYDQQGVTRNQIESLLQQMAYRGPDGMHCWVDGQVGFGHAMLHTTPESLHEVQPLHVPERNLTLVMDGRLDNGLELRGRILSLGMSVPRLTDADLVLAAYLVWGEACVDHLEGDFALVLWDSSSQRLFCARDRIGHRPFYYHHSDGLFAFASELHLLLTLPEVSRRPDTVYRTEHLATEWHSRERTLWADIKRLPAAHILSLRGCELEKKEYWQPDFNAQLYYPSYEDYVEHYREVHDTTVQRMSRSHKPLACTVSGGLDSSAIFATSKWLEGQGRLRAPGVQAYTLDFSHDEDANELAYARAVTDYLGCELNAVLPSDYPLDWYLQRAEHRAEAYCIPTSTMSNKLRQQVASGGNRALIGGLGGDQWLGFGENCYMELLANRQWRSLHSIWREDAKARGAARAGYYIARYGLVPLLPRVIKRPLQRWRDNREHLATGRHWLGPGGADSLERGAQMAWRKPRNGFRWAGQQADWSRLLNGRVANGLEMTQQFTAEAGLELRSPYWSEAMIQLSISLPKHLLYGQLLDRPLHRRAMVGRLPERVLQRDSKAEFSVTYTGIMAQATALVSASMTQSVALGLQEPYIHKAVEAEHAEPVGDECDGLWELCNVLAATQSLPPRGDSDTDPHSVDYASR

SEQ ID NO: 8577 - protein, 332 aa, Nostoc punctiforme PCC 73102
MTLPPNPSLPKSSAMKTAQTATDLVRTYLREIGRVPLLTHEEEIFYGKQVQRSCTLHESRESLATQLGRQPTLEEWAKATKLEPVELNEAIADGEIAKRKMVEANLRLVVSVAKKYIKRNVDLLDLIQEGSIGMQRGVEKFDPTKGYRFSTYAYWWIRQAITRAIAEKARTIRLPIHITEKLNKIKKAQRQLSQKLGRAPTAGELAQELELTPKQVREYLEKARLPLSLDLRLGDNYDTELGEMLEDPGASPEEFVMQSSLSYDLDRLMGDLTPQQREVITLRFGLTDGQALTLAKIGEILNISRERVRQIEREALTKLRKSKANMGEYLAS

SEQ ID NO: 8578 - protein, 296 aa, Rhizobium sp. WSM870
  misc_feature (106)..(106): Xaa can be any naturally occurring amino acid
  misc_feature (281)..(281): Xaa can be any naturally occurring amino acid
  unsure (1)..(296): unsure at all Xaa locations
RGKTQIKEFDAFPTLEQLPLWGFDGSSTQQAEGRSSDCVLKPVAVYPDPVRTNGALVMCEVMMPDGKTPHPSNTRATVLDDESAWFGFEQEYFFYKNGRPLGFPEXGYPAPQGPYYTGVGYKNVGDIARQIVEEHLDICLAAGINHEGINAEVAKGQWEFQVFGKGSKKAADEVWLARYLLLRLTEKYGIDVEFHCKPLGDTDWNGSGMHANFSTAYLREVGGKDYFEALMAAFEKNLHDHINVYGPDNHLRLTGKHETAPWDKFSYGVADRGASIRVPHXFVNNGYRGYLEDRRP

SEQ ID NO: 8579 - protein, 421 aa, Thermococcus kodakarensis KOD1
MVEIDPFEMAVQQLERAAQFMDISEEALEWLKRPMRIVEVSVPVEMDDGSVKVFTGFRVQHNWARGPTKGGIRWHPAETLSTVKALATWMTWKVAVVDLPYGGGKGGIIVDPKKLSEREQERLARSYIRAVYDVIGPCTDIPAPDVYTNPKIMAWMMDEYETIMRRKGPAFGVITGKPPGVGGIVARMDATARGAAFTIREAAKALGWDDLKGKTIAIQGYGNAGYYLHKIMSEEFGMKVVAVSDSKGGIYNPDGLPPADEVLKWKKEHGSVKDMPGTQNITNEELLELEVDILAPSAIEGVITKENADNVKAKIVAEVANGPVTPEADEILHEKGILQIPDFLCNTGGVTVSYFEWVQNINGFYWTVEETRKRLDDKMTKAFWDVFNTHKEKNIHMRDAAYVVAVSRVYEAMKHRGWVKK

SEQ ID NO: 8580 - protein, 160 aa, Casuarina glauca
MSTLEGRGFTEEQEALVVKSWSAMKPNAGELGLKFFLKIFEIAPSAQKLFSFLKDSNVPLERNPKLKSHAMSVFLMTCESAVQLRKAGKVTVRESSLKKLGASHFKHGVADEHFEVTKFALLETIKEAVPETWSPEMKNAWGEAYDKLVAAIKLEMKPSS

SEQ ID NO: 8581 - protein, 272 aa, Leptospirillum ferrooxidans
GPQDRKNTPKMAKSNAHCGPKHSPLLFLGTFILWLGWFGFNPGSTLMATTPSVGYFAYIAMTTNLAAAAGALAAMFTAWKILGAPDMSMVANGAIAALVAITASCAFVDPWASVVIGAVAGVIAVVGVLAIDRIHIDDPVGAVSVHGMAGIWGTLSNGLFATPDRVKLLAVGTPGLFYGGGFHQLLVQAEGVSASLAYVFFVSLLVFYVIKVTIGLRVSEHDEVSGLDISEHKMWGYPEMFSGGFGGGTAPGELAGRSEMSMSAAKPVTQRT

SEQ ID NO: 8582 - protein, 430 aa, Oryza sativa (indica cultivar-group)
AAAGAKEDVKEDGAAAAAAAADYDGSPPPPRGKKKKDDEERSSSLPEEKDAKNGGGDEVLSAVTTEDSSAGAAKSCSPSAEGHSKRKPSSSSSSAAAGKNSHGKRKVKVDWTPELHRRFVQAVEQLGIDKAVPSRILELMGIECLTRHNIASHLQKYRSHRKHLMAREAEAASWTQKRQMYTAAAAAAAVAAGGGPRKDAAAATAAVAPWVMPTIGFPPPHAAAMVPPPPHPPPFCRPPLHVWGHPTAGVEPTTAAAPPPPSPHAQPPLLPVWPRHLAPPPPPLPAAWAHGHQPAPVDPAAYWQQQYNAARKWGPQAVTPGTPCMPPPLPPAAMLQRFPVPPVPGMVPHPMYRPIPPPSPPQGNKLAALQLQLDAHPSKESIDAAIGDVLVKPWLPLPLGLKPPSLDSVMSELHKQGIPKVPPAASGAAG

SEQ ID NO: 8583 - protein, 416 aa, Neurospora crassa
MASAIVLGATGIIGRELIKELSAHPSQWKSIHALSRSKKEDFGSPSVQQHHIDLLNSAQDMAKDLSAIRDLDAVEHVFFCAWLQKATEKENADVNGAMLQNFLDALEITGAVSKLKRIVLVTGCKQYGVHLGQAKVPMLESDPWLRDESKWPPNFYYRQQDILTAFCGEGSKHPEISWTVTYPNDVIGYASGNFMNLATDIAIYAAVNKELGRDLEFPGNETFYTKFDVFTSSKLHAQFCVWAVQEPKTANEGFNVFNGDVQSWQDLWPRVAKHFGMKVKADQFASPAPKDLANLVQLTEKAPQPVTMLAKELGLEGAKSIPPSQLEQRISLVKWSKTEEVKQAWNRLAEREGLQKDALEKATWAFTDFILGRNYDVVGSMSKAREAGWTGYMDTWKSLVDTFGELEEARVIPKTH

SEQ ID NO: 8584 - protein, 132 aa, Brassica napus
VAKEAVLKKLGKVKGRTLVECETYRFRGHSLADPDELRDAAEKAKYAARDPITALKKYLIENKLANEAELKSIEKKIDELVEEAVEFADVSPQPGRSQLLENVFADPKGFGIGPDGRYRCEDPKFTEGTAQV

SEQ ID NO: 8585 - protein, 430 aa, Brucella suis 1330
MSDKTASFTLDGKTFDLPVRKGTVGPDVVDIGPLYKNSHAFTYDPGFTSTASCESKITYIDGDEGVLLYRGYPIDQLAEHGDFLETCYLLLYGELPTATQKADFDYRVTRHTMLHEQMTKFFTGFRRDAHPMAVMVGCLGAMSAFYHDSTDITDPHQRMVASIRLIAKVPTLAAMAYKYHIGQPFVYPKNDLDFASNFLHMCFTVPCEEYKVNPVLARAMDRIFILHADHEQNASTSTVRLAGSSGANPFACIAAGVACLWGPAHGGANEAALNMLSEIGSVDRIPEYIARAKDKNDPFRLMGFGHRVYKNYDPRAKIMQKTCHEVLGELGIKDDPLLDVAMELERIALTDEYFIEKKLYPNIDFYSGITLKALGFPTEMFTVLFALARTVGWVAQWKEMIEDPQQKIGRPRQLYTGATERDYVPLAKRK

SEQ ID NO: 8586 - protein, 1146 aa, Ashbya gossypii ATCC 10895
MEFERQENTSLPRASIQAIGALSVATDDLPKKHIDYPTREPGKYPLRADEESKIGYASYDSEKPSEGADVSCTNESSGDAEHASDRPAESNADKTASEVKSANAGEGFASDRVPDSREGEKLKGKRLNSDLQPTTAVDSSHADGLTNFPLVQEQEVAKNEPPTTPGPPKGTDSIGLAAREVSQASHGGEKEDLKPDGSAYMEVAGSGDAPITPTPNSTPLKNIPKPAGSIGTDDTRLMASDMEQGQDQQELLNRLQRPSMSYGPNTRRRSSLILKEHDSKTPDIRAASTLQTTELKLELPENLDHEDFSKLFKLDAKNDDDLFSAEDLLAHGIGSQRRSSEDDAAATRHKLDIEQSPRGSVSLTPEILDNKHMCTKTEDTNTSNEEGLSPRQHVAAKKTGDSSQQLSISNNSMANPHTVKSSTHDGSVKFNYTTHLENTPASIIQGKNHLFYARRHNSLTPMVSQPTNKHSPATFKPSPESERQTSTDINAGNHTEHSDGHILPAGQFMTSSHGSNLAEEQSKISAYACLDFQNFTFYVQTLQVIIGRRSENDFAHKVDVNLGPSKSISRRHAKIFYNFGTERFELSIMGKNGAFVDDTFVERGITVPLRNKSKIQIGQIPFQFVLPEQEGKEKHVIPSKIKDTPTVKTESVKDPLDSQIKAPDISVTSKKKEKKPSKPPKPPKKVYSLEEIPPEYRTKPTCSYSNLITTCLRKYSSPKGMSLSEIYAGIRELYPYYKYCPDGWQSSVRHNLSLNKSFRKVSKEGKGWLWGLDEEYIAEREKQRKKQAEAQAAKAKAAELKQLQLQARKQATVSNNLASFTKQPNISQTLAANRSEKRILQDDNQRTMKYLQQQLILLTKDRKGLEKPVMAQILTQALAMTINQVTQAAKNKGITGNPLTALIDKNPQHLNLILTAAVNAATVKVTDGKVKKLVNMSPVSQVSAQNPALIAKQGSSKRASPPALRNILQKPPTPSIANPTSSSTLKAGEPFDPTSLSKFFQPKQPVRLSVAGTPGHAGSRSNNGNLLPRKRSASDTESSDDDSDTSVNEDSSDEDSGDSSDDNTGSSDSGTAGDDTSSSSTSDNGDDDDDDDDDDDDDDDDDDDDDDDDDDDDEDDDDDDEDDDDDDQSSNIIDYRRGYDYTVPNS

SEQ ID NO: 8587 - protein, 737 aa, Arabidopsis thaliana
  misc_feature (424)..(424): Xaa can be any naturally occurring amino acid
  unsure (1)..(737): unsure at all Xaa locations
MASTSSLALSQALLTRAISHNGSENCVSIPAFSALKSTSPRTSGTISSRRRNASTISHSLRPLVRAAAVEAIVTSSDSSLVDKSVNTIRFLAIDAVEKAKSGHPGLPMGCAPMSHILYDEVMKYNPKNPYWFNRDRFVLSAGHGCMLQYALLHLAGYDSVREEDLKSFRQWGSKTPGHPENFETPGVEATTGPLGQGIANAVGLALAEKHLAARFNKPDNEIVDHYTYSILGDGCQMEGISNEVCSLAGHWGLGKLIAFYDDNHISIDGDTDIAFTESVDKRFEALGWHVIWVKNGNNGYDEIRAAIREAKAVTDKPTLIKVTTTIGYGSPNKANSYSVHGAALGEKEVEATRNNLGWPYEPFHVPEDVKSHWSRHTPEGAALEADWNAKFAAYEKKYPEEAAELKSIISGELPVGWEKALPTXPGDATRNLSQQCLNALAKAVPGFLGGSADLASSNMTMLKAFGNFQKATPEERNLRFGVREHGMGAICNGIALHSPGFIPYCATFFVFTDYMRAAMRISALSEAGVIYVMTHDSIGLGEDGPTHQPIEHLSSFRAMPNIMMFRPADGNETAGAYKIAVTKRKTPSVLALSRQKLPQLPGTSIESVEKGGYTISDNSTGNKPDVILIGTGSELEIAAQAAEKLREQGKSVRVVSFVCWELFDEQSDAYKESVLPSDVSARVSIEAGSTFGWGKIVGGKGKSIGIDTFGASAPAGKLYKEFGITIEAMVEAAKSLI

SEQ ID NO: 8588 - protein, 488 aa, Listeria innocua Clip11262
MSIKETSLPKVQTKLFINGKWIDGDNKETKDIVNPANGEVIAKIAQAGPKETKQAIKAAKDAFPDWAKMELADRVKLLHNIADLMEERADTLAKIMTLEQGKPLKESKGEVLTGAENFRFAAEEARRLYGETIPAPNNHAFIVKKQPIGVVAAITPWNFPGGMVTRKLAPALATGNTIVLKPSGDTPLSALAIFEIFEEAGLPKGVANIVMGSSKEIGETLTDSDDVRKLTFTGSTKVGQTLFKQSADTLKKISLELGGHAPFIVFADANLEAAVDDLITAKFRNNGQVCVSPNRIFVAKEIKEKFTKTLVAKVEKLKVGNGLDDVNVGPLIREDAIDKIDKQLKNATDKGAKVLTGGERLTGSDYDKGNFYKPTVLDNVTREMDIFYEETFGPVIPLIVFENEDEAIEMANDSEFGLASYFYTKDLARVEKVGAALEYGMVGANEIAISNPETPFGGVKHSGFGRENGHYGMEEYIQVKFINLKYRD

SEQ ID NO: 8589 - protein, 655 aa, Burkholderia multivorans
MCGIDGFLNSVAFDEETARGTLARMTASLAHRGPDAQGLWVDPAAGIALGHRRLAIVDLSVHGRQPMASACGRYVMVFNGEIYNHRELRAQLERVGRAPAWRGHSDTEVLLAAFAAWGVDATLRRATGMFALALWNRESRVLTLARDRIGEKPLYYGRIGDALVFASELKALRAYPGFGGEIDRDALCLYLRHSAVPAPHTIYRGIRKLPPGSWIQFEHAQDTPRIRTYWALEHAIDAGHHEPFAGTAAEAVDRLDTVLRQAVARQMEADVPLGAFLSGGVDSSAIVALMQAQSAAPVDTFTIGFHEAGYDEAGYAKAVARHLGTRHTELYVTADHALDVVPKLPAIYDEPFSDASQIPTFLVAELTRRHVKVSLSGDGGDELFGGYTRYFLTPRLWRKLHRVPAAVRTRIAGALHALRPDHADQLAAVAQGAWGAGELRDSPTRIGDRLHKLGHVMTADSRIGLYRLLMSSVHHPERIALAGHEPPTPLDTVSAWPAHLSFAEQAMAIDTLTYLPTDILTKVDRAAMAVSLETRMPFLDHHVVEFAWRLPASLRLPEGQSKALLRRLLDRYVPTELIDRPKQGFCAPIDHWLRGALRDWADALLQPSRLRDEGFFDAAAVERLWRQHQTGRMNWQHQLWTVLMFQAWLDAQRAA

SEQ ID NO: 8590 - protein, 333 aa, Oryza sativa
MSMMSFLSMVEAELPPGFRFHPRDDELICDYLAPKVAGKVGFSGRRPPMVDVDLNKVEPWDLPEVASVGGKEWYFFSLRDRKYATGQRTNRATVSGYWKATGKDRVVARRGALVGMRKTLVFYQGRAPKGRKTEWVMHEYRMEGVHDQQASSFSSKEDWVLCRVICKRKSGGGATSKSRSLTTTTTTIVHDTSTPTSSPPLPPLMDTTLAQLQASMNTSSSSAIAAVAALEQVPCFSSFSNSIASNNNNSNSATVNAQQCYLPIVTGSNNNGMSYLDHGLPEFGSFLDTQSCDKKMLKAVLSQLNSIGGEVLPGLPPPSEMAAAVSSSWMNHF

SEQ ID NO: 8591 - protein, 557 aa, Triticum baeoticum
MDSARSWFQKFQPRDKSKSPAVPASHGKDPGKPPVDDAPSSATKQKVAAAKQYIENHYKTQMKSLQDRKERRWMLERKLQDAEVPAEEQNNILKHLEKKETEYMRLQRHKMGVEDFELLTIIGRGAFGEVRLCREKTSKSVYAMKKLKKSEMLRRGQVEHVKAERNLLAEVDSAYIVKLYYSFQDDEFLYLIMEYLPGGDMMTLLMRKDTLTEDEAKFYIAETVLAIESIHKHNYIHRDIKPDNLLLDLSGHLKLSDFGLCKPLDSSNFPNLNEPDYTPGKGAKPLPDNTSRLTNSSAPKRTQQEQLSHWQKNRRMLAYSTVGTPDYIAPEVLLKKGYGMECDWWSLGAIMYEMLVGYPPFYSEDPMSTCRKIVNWRSHLKFPEEAKLSSETKDLISKLLCNVEQRLGTKGAHEIKAHTWFRGVQWEKLYQMKAAFIPEVNGELDTQNFEKFEETGAQVQSSSKAGPWRKMLPSKDANFVGYTYKNFEIVNDDEVAGIAELKKKSSKSKRPTIKTLFESMDEDEPVHGSFLNMLPHKEGQPSSHSSAPPEQYQPRRK

SEQ ID NO: 8592 - protein, 480 aa, Aeropyrum pernix K1
MSWWKLDREALDRKRTWVTQGPIVKVILALATPIVAARLLAATQESVDAIFLGRVSTEDLAAPAAASPLLWLFAGLGIGINTTLSALVSQAIGARDYASAQRYASKLLGATLMLGAASALAIILTAETVFILQGFQGRSLEVALAYTLVEAVGMPFMLALFYFNAVMAASGDTRTPFKVSALSSILNVILDPILIFGLILLPPLGAVGAAVATVLARAAAVSIAFYLLLRGAPGFRVKPSMPDRQLIGHILRIGGPVSLQRLVVSMGFLVMMGIVARLGAPVVAAYNVSLVIIHIVQSATFGFNIATATVVGQNLGASNISRAVRAAYTGVALVFGLLSIGAVAIVGGRSMLVSLFTSIEEVQFYAERMISIVALGMPFLGAFFTAMGVARGSGRTAFISALGIARLWLLRIPAAYTLVYIYSLGDMGVWLAMTLSNIIAGTLAIAWVAGRTWAKPIVKRVPPEPLGEKPPAIPEPAINR

SEQ ID NO: 8593 - protein, 564 aa, Mesembryanthemum crystallinum
MRERGMDSARSWLHKYQPRDKLRSSTKKKDSMMGGRDDSAPTSDEETPSNVTKQRVAAAKQYIEKHYKEQMKSLQERKERRSILERKLHDADVSEEDQNNLLKFLEKKETEYMRLQRHKMGADDFELLTMIGKGAFGEVRVCREKTTGHVYAMKKLKKSEMLRRGQVEHVKAERNLLAEVDSNCIVKLYCSFQDEEYLYLIMEYLPGGDMMTLLMRKDTLTEDEARFYVAETILAIESIHKHNYIHRDIKPDNLLLDKFGHLRLSDFGLCKPLDCSTLEEKDFEVNNGNGGSPSNEGSTKPRRTQQEQLQHWQKNRRMLAYSTVGTPDYIAPEVLLKKGYGMECDWWSLGAIMYEMLVGYPPFYSDDPMSTCRKIVNWRTHLKFPEEAKLSPEAKDLISKLLCNVTQRLGSNGAHEIKLHPWFNGIDWERIYQMEAAFIPEVNDELDTQNFEKFEEADNSSQSTSKAGPWRKMLSSKDLNFVGYTYKNFEIVNDYQVPGIAELKKKDTKPKRPSIKSLFEDESSDSSEAATSGDQSVQGSFLNLLPPQLEVSQTQTEVPPPKFT

SEQ ID NO: 8594 - protein, 568 aa, Candida glabrata CBS138
MLRAVARSQVRSLRNARLYSSFKELKFGVEGRAALLRGVETLADAVSATLGPKGRNVLIEQPFGAPKITKDGVTVARSITLEDKFENMGAKLLQEVASKTNEAAGDGTTSATVLGRAIFTESVKNVAAGCNPMDLRRGSQAAVEKVIQFLTENKKEITTSEEIAQVATISANGDAHVGKLLASAMEKVGKEGVITIREGRTLEDELEVTEGMRFDRGFISPYFITDAKSGKVEFEKPLLLLSEKKISSIQDILPALELSNQSRRPLLIIAEDVDGEALAACILNKLRGQVKVCAVKAPGFGDNRKNILGDVAILTGSTVFTEELDLKPEQATMEHLGSCDSITITKEDTVILNGNGSKDSIQERIEQIKNSIDVTTTNSYEKEKLQERLAKLSGGVAVIRVGGASEVEVGEKKDRYDDALNATRAAVEEGILPGGGTALVKASRVLDEVKTENFDQKLGVDIIRKAITRPAKQIIENAGEEGSVIVGKLVDEFGEDFAKGYDSAKGEFTDMLAAGIIDPFKVVRSGLVDASGVASLLATTEVAIVDAPEPAPAAGAPGGGMPGMPGMM

SEQ ID NO: 8595 - protein, 385 aa, Methanocaldococcus jannaschii DSM 2661
MKIDAVKKLLMIPGPTMVPPEVLNAMALPVIGHRTKDYSNLLEDTIEKLKKVFITENDTFLITGSGTAAMDMAISNIIKRGDKVLNIVTGNFGERFANIVKAYKGEAIRLDVEWGDMAEPEAVKEILDKYDDIKAVTVVHNETSTGARNPIKEIGEVVKDYDALYIVDTVSSLGGDYVNVDKFHIDICVTGSQKCLAAPPGLAAITVSEKAWEVIKKNDDKVGFYLDLLAYKKYYEEKKQTPYTPSVNLTYALNVALDLVLEEGIENRVKRHERLAKATRAGLEAMGIELFAKERARSVTVTSAKYPEGIEDSKFRGILSNKYNIVVAGGQKHLAGKIFRIGHMGICGEKEVLATLACVELALKELGFEVKESGVEVAKEVLLKE

SEQ ID NO: 8596 - protein, 188 aa, Schizosaccharomyces pombe
IKGTFWDALTRRIDASVLDVICRDTKDRSGSHVNRIYVPKAEQEMYEYYVRAAKERPYLNLQVEYLPEEITPEWVRDVNDKPGLLALAMEKYQDDEGNTHLRGVPFVVPGGRFNELYGWDSYFESLGLLVDDRVDLAKGMVENFIFEITYYGKILNANRTYYLLRSQPPFLTDMALRVYERIKNEEGS

SEQ ID NO: 8597 - protein, 382 aa, Chromobacterium violaceum ATCC 12472
MTEVVLTGKPKKSVALSGVAAGNTALCTVGRSGNDLHYRGYDILDLAGHCEFEEVAHLLVHGKLPNKAELAGYKKKLKSLRGLPASVKAALEALPAAAHPMDVMRSGVSALGCALPEKDDHNLAGARDIADRLMASMGSMLLYWYHYSHNGKRIEVETDDDSIGGHFLHLLHGVKPSYEWVRAMHTSLNLYAEHEFNASTFTARVIAGTGSDMHSAITGAIGALRGPKHGGANEVAFEIQQRYENPDEAEADIRARVERKEVVIGFGHPVYTISDPRNKVIKEVARELSRSNSDMKMFDIAERLESVMWDVKKMFPNLDWFSAVSYHAMGVPTAMFTPLFVISRTSGWAAHVIEQRQDGKIIRPSANYIGPEDQAFVPLEKR

SEQ ID NO: 8598 - protein, 84 aa, Triticum aestivum
MASPRRMGMAAVPAVLLILLLLVATEMGTTKTAEARTCESQSHKFKGPCFSDSNCATVCRTENFPRGQCNTHHVERKCYCERDC

SEQ ID NO: 8599 - protein, 388 aa, Vigna radiata var. radiata
YFDGWKAYDENPYDELTNSSGVIQMGLAENQVSFDLLEKYLEEHPEASTWGSGFRENALFQDYHGLRSFRTAMASFMEQIRGGRAKFDPDRVVLTAGATAANELLTFILANPGDALLVPTPYYPGFDRDLRWRTGVNIVPIHCDSSNNFQITPQALEAAYNEAEDDNTKVRGVLITNPSNPLGATVQRSILEYLLDFVTEKNIHLVSDEIYSGSVFSSSEFVSVAEILEARQYKEAERVHIVYSLSKDLGLPGFRVGTIYSYNDSVVTTARRMSSFTLISSQTQHLLACMLSDKKFTENYIGTNRERLRKRYQMIIEGLRSVGIECLKGNAGLFCWMNLSPLLEKPNKEGELELWNAFLHEVKLNISPGSSCRCSEPGWFRVCFANMD

SEQ ID NO: 8600 - protein, 470 aa, Chromobacterium violaceum ATCC 12472
MSVKKLIVSAMLAASVLTAAAPAAMAADLPDFAQIVEAEGKAVVNISTTSTVKEMVSGLPEGMEGDPFFEFFRRFAPPQQREHQESSLGSGFIISRDGYVLTNAHVVARADKITVKLNDKREFQARVIGSDARSDVALLKIDAQNLPVVRMGDPKSLKVGQWVLAIGSPFGFENTATSGIVSGKNRMLPDESAVQFIQTDAAVNPGNSGGPLFNLKGEVVGVNSQIYSRSGGFMGISFAIPIDTAMNVADQLKAKGKVTRSRIGVVVQELSKELAASFGLAKPSGVLINALDPKGPAQKAGLKAGDIVLRINGQAVENGGDMQRLISDLPPGKAITLDVWRSRAQTSVRVVPDELVEEDARVAKREYRKPGAEAEQNLAQIGLRLQELSPVQLQRAGIDYGLLVRGANGAAMRAGIQPGDIIVGIGSDPLKNFAQLKNALNQAKKGGAVALQVMRQGVTMFVPLTVDEAK

SEQ ID NO: 8601 - protein, 127 aa, Leptospirillum ferrooxidans
MAYSDKVIDHYNNPRNMGSFDKSDENVGTGIVGAPECGDVMKLQLKINDDGIIEEAKFKTFGCGSAIASSSLATEWVKGKTIDEALKIKNTDIVQELNLPPVKIHCSVLAEDAIKGAIQDYQEKKNR

SEQ ID NO: 8602 - protein, 95 aa, Francisella tularensis subsp. tularensis SCHU S4
MNIRPLQDRVLVRRAEEEKKSAGGIILTGSAQEKPSQGEVVAVGNGKKLDNGTTLPMDVKVGDKVLFGKYSGSEVKVGDETLLMMREEDIMGIIA

SEQ ID NO: 8603 - protein, 284 aa, Brassica napus
  misc_feature (92)..(92): Xaa can be any naturally occurring amino acid
  misc_feature (260)..(260): Xaa can be any naturally occurring amino acid
  unsure (1)..(284): unsure at all Xaa locations
FGTRRRKLNLPPSPARPYPIIGHLHLLKLPLQRSFLSLSKSLGGASIFSLRLGTRLVYVVSSHSVAEECFTKNDVVFANRPEFLFAKHIGYXNSSTMVSAAYGDSWRNLRRIGAIEIFSSIRVDSFLSIRKDEIRRLILCLSKNSLQEPAKVELGSLFMGLTINNIIRMLAGKRYYGDGTEDDDESKHVRDLIAEVIAAGGAGNAADYFPILWWLTDYEKRVKKLCGRVDEFLQSLVDEKRAEKVKGNTMIDRLLSLQEXQPEYYTDVIIKGIIEVMILAGTDT

SEQ ID NO: 8604 - protein, 234 aa, Bordetella pertussis Tohama I
MHTINAVLLDLDGTLLDSVPDLAIAANAIRRDLGMAQLPEALVATFVGKGVDNLVRRALAGSLDGAAPDEALFARGRLSFFKHYHAVNGAHATVFDGVKAGLAAMREQGLPLAVVTNKPTEFTLPLLERTGLAGFFRLVVCGDTCARRKPDPDQVLHACDRLGVAPAQAVTIGDSVNDALAGRRAGTAVLAVPYGYNEGMDVRSLDVDGIVDTLVDAAHWISQRNAKPQRTTAA

SEQ ID NO: 8605 - protein, 382 aa, Aeropyrum pernix K1
MARLLMIPGPTPVDPEVLLAMARPVISHTSPDFDEIHGETVSMLQKLFRTSGKVFLLPGSGSLGMEFAVRSVAGRGSRALVLKAGYFGGYFERILRSLGASVTVVESPVGRGFTGADVEEALDRAGDVDVVFVQHVETSTSVANPVREIAGVVKKNGARLVVDGIASVGGMDLRLDEWGVDVALTGSQKALSTPPGLAIVAFSSEYSVELEKREPSGIYFDFLSLSREMESTRNYHITPAVNLVFALNASLKRILGEGLENRFERHRVLARAFTRAMEALGLRLVAEEPFRAWTVTAVYLPQGIDWSRFYSVMRKRGVEVAGGLGGLKGKIFRVGHMGEVDANDLIATIAAIERSLVELGYREARLGQGLEAAQKELSSLGL

SEQ ID NO: 8606 - protein, 547 aa, Glycine max
  misc_feature (325)..(325): Xaa can be any naturally occurring amino acid
  misc_feature (341)..(341): Xaa can be any naturally occurring amino acid
  unsure (1)..(547): unsure at all Xaa locations
MAASAGGQITLSSTVQLHGVACSRNWKLVKFCNGEVMGRKLVLKSAYGGSTKDVRHHQQQQHICMSLTADVSTESKLRDLDMERRNPRTVLAVILGGGAGTRLFPLTKRRAKPAVPIGGAYRLIDVPMSNCINSGINKVYILTQFNSASLNRHIARAYNSGNGVTFGDGYVEVLAATQTPGEAGKKWFQGTADAVRQFHWLFEDPRSKDIEDVLILSGDHLYRMDYMDFVQNHRESGADITLSCLPMDDSRASDFGLMRIDNKGRILSFSEKPKGEELKAMQVDTTVLGLSKDEAQKKPYIASMGVYVFKKEILLNLLRNMHREXLILFQSLFFKCYKLIXFRWRFPTANDFGSEVIPASAREFYMKAYLFNDYWEDIGTIRSFFEANLALTEHPPRFSFYDAAKPMYTSRRNLPPSKIDNSKIVDSIISHGSFLNNSFIEHSVVGIRSRINSNVHLKDTVMLGADYYETDAEVVALLAEGRVPIGIGENTKIKDCIIDKNARIGKNVVIANSEGIQEADRSSEGFYIRSGVTIVLKNSVIEDGFII

SEQ ID NO: 8607 - protein, 375 aa, Oryza sativa
  misc_feature (281)..(281): Xaa can be any naturally occurring amino acid
  misc_feature (288)..(288): Xaa can be any naturally occurring amino acid
  unsure (1)..(375): unsure at all Xaa locations
MDHRLLLLGLLLLSPAVAAASVPGEEEPLIRQVVGGGDDNELELNAERHFASFVQRFGKSYRDADEHAYRLSVFKANLRRARRHQLLDPSAEHGVTKFSDLTPAEFRRAYLGLRTSRRAFLRGLGGSAHEAPVLPTDGLPDDFDWRDHGAVGPVKNQGSCGSCWSFSASGALEGANYLATGKMDVLSEQQMVDCDHECDSSEPDSCDAGCNGGLMTNAFSYLLKSGGLESEKDYPYTGRDGTCKFDKSKIVTSVQNFSVVSVDEDQIAANLVKHGPLAIGXINAAYMXQTYIGGVSCPYICGRHLDHGVLLVGYGASGFAPIRLKDKAYWIIKNSWGENWGEHGYYKICRGSNVRNKCGVDSMVSTVSAIHTSKE

SEQ ID NO: 8608 - protein, 401 aa, Rhodobacter capsulatus
  misc_feature (248)..(248): Xaa can be any naturally occurring amino acid
  unsure (1)..(401): unsure at all Xaa locations
MDYNLALDKAIQKLHDEGRYRTFIDIEREKGAFPKAQWNRPDGGKQDITVWCGNDYLGMGQHPVVLAAMHEALEAVGAGSGGTRNISGTTAYHRRLEAEIAGLHQKEAALVFSSAYNANDATLSTLRVLFPGLIIYSDSLNHASMIEGIKRNAGPKRIFRHNDVAHLRELIAADDPAAPKLIAFESVYSMDGDFGPIKEICDIAEEFGALTYIDEVHAVGMYGPRGAGVAERDGLMHRIDIFNGTLAXAYGVFGGYIAASARMVDAVRSYAPGFIFSTSLPPAIAAGAQASIAFLKTAEGQKLRDAQQMHAKVLKMRLKALGMPIIDHGSHIVPVVIGDPVHTKAVSDMLLSDYGVYVQPINFPTVPRGTERLRFTPSPVHDLKQIDGLVHAMDLLWARCA

SEQ ID NO: 8609 - protein, 217 aa, Methanocaldococcus jannaschii DSM 2661
MKFFLDTANVEEIKKYAELGLVDGVTTNPTLVAKEGRDFYEVVKEICEIVEGPVSAEVISTDAEGMVKEARELAKLADNIVIKIPMTKDGMKAVKILSAEGIKTNVTLVFSPLQALVAAKAGATYVSPFVGRLDDIGHVGMKLIEDVVKIYKNYDIKTEVIVASVRHPWHVLEAAKIGADIATMPPAVMDKLFNHPLTDIGLERFLKDWDEYLKSRK

SEQ ID NO: 8610 - protein, 655 aa, Burkholderia cepacia
MCGIDGFLNSVACDEETARGTLARMTASLAHRGPDGQGIWVDPEAGIALGHRRLAIVDLSVHGRQPMASACGRYVMVFNGEIYNHRELRAELERAGRAPAWRGHSDSEVLIAAIVAWGVDATLRRATGMFAFALWNRASRVLTLARDRIGEKPLYYGRIGDALVFASELKALRGYPGFDGAIDRDALCLYLRQSSVPAPHTIYRGIHKLPPGTYIQFEHARDTPRLRAYWTLEQVIEDGRAQPFEGSADDAVGQLDAVLRQAVARQMEADVPLGAFLSGGIDSSTIVALMQAQSSTPVDTFTIGFHEAGYDEAGYAKAVARHLGTRHTELYVTADHALGVVPKLPSIYDEPFSDASQIPTFLVSELTRRHVKVSLSGDGGDELFGGYTRYFLTPRLWRKLHRVPGAVRARIAAALHALRPDHADQLAAVAQGAWGGVEARESAARIGDRLHKLGHVMTAESRIGLYRLLMSSVHHPERLALSGQEPATPLDTVSAWPAHLSFAEQAMAIDTLTYLPTDILAKVDRAAMAVSLETRMPFLDHHVVEFAWRVPAHVRLPEGQSKALLRRLLDRYVPSALIDRPKQGFCAPVDHWLRGALRDWAEALLRPSRLREEGYFDADAVERLWRQHVTGRMNWQHQLWTVLMFQAWLEAQRAA

SEQ ID NO: 8611 - protein, 229 aa, Triticum aestivum
LYRTSLYKKAGWYRSGIPGISSTHASAAFEYHGTDPRFNRVFNEGMKNHSIIITKKLLESYKGFEGLGTLVDVGGGVGATVAAITAHYPTIKGINFDLPHVISEAPPFPGVTHVGGDMFQKVPSGDAILMKWILHDWSDEHCATLLKNCYDALPAHGKVVLVECILPVNPEATPKAQGVFHVDMIMLAHNPGGRERYEREFEALAKGAGFAGMKTTYIYANAWGIEVTK

SEQ ID NO: 8612 - protein, 692 aa, Arabidopsis thaliana
MMQKFWDSAMALSPNEDGDETRSEEESMKLSSEIEVTKSFSYPNTFAFKLQDKKGRMHRFMCETQSLTTLITAILQRMGDDIEPDNLPQIMYEDEDNDKVVLASDNDLGAAVEHAKSIGWKGLKLHLDYTEERGHRRGLSSEDMDYDQSNSWAAAYKTVAAGAALAAGLGVLRLTMMTLWRHKLELLVNDRWLVFVCAMWVQSVAGVGYLFGGSMSPAIKTSLGYNQKQIALLGVAKNLGDAIGFVSGALSEVSPSWVVLLVGATQNLFGYGVVWLVVTGQLPNLPLWMLFVAIFVGTNGETYYNTASLVSCIHNFPESRGPVVGILKGFSGLSGAILTQVYLMFNPSHDSSVILMVALGPPVVVLALLFIVRPVERSCRTNLRSDDLRFLAIYGFCVVLAVYLLGLLVLQSVFDMTQTIITTSGAILVIFMVVPVLVPFSSVFISGNNVTSVKPEEGTSNVDQHEARTLIERSDRPPEKKRAPCIGEDFTLLQALGQADFWLIFMSLVLGVGSGITIIDNLGQICYSLGYSNTKIFVSLISISNFLGRVAGGYFSELIIRKLSLPRTLAMSVVQAIMSLGLIYYAIDWPGKIYVVTIVIGMGYGAHWAIAPASVSDIFGLKSFGSLYNFQITALPIGSFVFSGVIASNIYDYYARKQAGPTTETESLVCTGSDEEVLLEASSPSLKDLKIV

SEQ ID NO: 8613 - protein, 443 aa, Pseudomonas putida KT2440
MTLRKIAGLGALLSLVMPGLALAEEAAPALNSGDTAWMLTATALVLFMTIPGLALFYGGMVRSKNVLSVMMQCFAITGLMSILWVVYGYSMAFDTAGMEKGVLNFNSFVGGFSKAFLSGVTPDSLTSATALFPEAVFITFQMTFAIITPALIVGAFAERMKFSAMLVFMGIWFTLVYAPIAHMVWSGDGALMWDWGVLDFAGGTVVHINAGIAGLVCCLVLGKRKGYPTTPMAPHNLGYTLMGAAMLWIGWFGFNAGSAAAANGTAGMAMLVTQIATAAAALGWMFAEWVGHGKPSALGIASGVVAGLVAITPAAGTVGPIGALIIGLVSGVLCYFCATTLKRKLGYDDSLDAFGVHGVGGIIGAILTGVFAAPALGGFGTVTDIGMQVWIQAKGVIFTVVYTAIVTYVILKVLDVVMGLRVNEEEESVGLDLAQHNERGYNL

SEQ ID NO: 8614 - protein, 121 aa, Brassica napus
  misc_feature (9)..(9): Xaa can be any naturally occurring amino acid
  misc_feature (15)..(15): Xaa can be any naturally occurring amino acid
  misc_feature (19)..(19): Xaa can be any naturally occurring amino acid
  misc_feature (23)..(23): Xaa can be any naturally occurring amino acid
  misc_feature (28)..(28): Xaa can be any naturally occurring amino acid
  misc_feature (30)..(30): Xaa can be any naturally occurring amino acid
  misc_feature (34)..(34): Xaa can be any naturally occurring amino acid
  misc_feature (36)..(36): Xaa can be any naturally occurring amino acid
  misc_feature (38)..(38): Xaa can be any naturally occurring amino acid
  misc_feature (42)..(42): Xaa can be any naturally occurring amino acid
  misc_feature (54)..(54): Xaa can be any naturally occurring amino acid
  misc_feature (56)..(56): Xaa can be any naturally occurring amino acid
  misc_feature (58)..(58): Xaa can be any naturally occurring amino acid
  misc_feature (60)..(60): Xaa can be any naturally occurring amino acid
  misc_feature (63)..(63): Xaa can be any naturally occurring amino acid
  misc_feature (68)..(68): Xaa can be any naturally occurring amino acid
  misc_feature (74)..(74): Xaa can be any naturally occurring amino acid
  misc_feature (86)..(86): Xaa can be any naturally occurring amino acid
  misc_feature (90)..(90): Xaa can be any naturally occurring amino acid
  misc_feature (95)..(95): Xaa can be any naturally occurring amino acid
  misc_feature (110)..(111): Xaa can be any naturally occurring amino acid
  misc_feature (113)..(114): Xaa can be any naturally occurring amino acid
  misc_feature (116)..(116): Xaa can be any naturally occurring amino acid
  misc_feature (118)..(118): Xaa can be any naturally occurring amino acid
  misc_feature (120)..(120): Xaa can be any naturally occurring amino acid
  unsure (1)..(121): unsure at all Xaa locations
LALIPYCAXFFVFTXYLRXAMRXSGLSXAXAIYXMXHXSIGXGEDGPTHQPVEXLXSXRXMPXTLMFXPADGNXTAGAYKIAVTKXKTPXILALXRQKLPQLPGTSIEGXXKXXYXIXDXS

SEQ ID NO: 8615 - protein, 440 aa, Prochlorococcus marinus str. MIT 9312
MDNKQINFFKSKDLNTVLKPFKKGSVVKIDSFDIRENQNELNIGLFGWYAICPSKELKINTLHYFSLYDEPLILYRDENENVRCIKNICPHRGASFYGGTLSNGVITCPYHGAKFSPEGSCQNLDRITCSHIVDNNYDNYAKKIHLSQYKALEKDEYIFVHFTKKSETDLNNISEDLPISNYELSNNGFSHDDYVSEEVLVDFKCDWSRIIENHLDILHLFWVHGDTIPDKDVNKNVLVSFKQKINITPKYIESIYFYKNNPSKEFIRIKYIAPGRILIYKGNPSESRYLQVLDHIPLGNNKARVIVRHYRKFLKNKLLNNLILFKETQRKIFYKIFNEDYMILKTQTYNHKYGFIKKDEIKLLGEDRIINYFWKWYKKSEEKDSPWKNINKTENLTVYDNVILKYPPEIKNLEVINNIDIIRKTLVRFAAPLLIFMLII

SEQ ID NO: 8616 - protein, 343 aa, Escherichia coli K12
MQVKTQSCVVAGKKTVAVTEQTIDWNNNGTLVQITRGGICGSDLHYYQEGKVGNFMIKAPMVLGHEVIGKVIHSDSSELHEGQTVAINPSKPCGHCKYCIEHNENQCTDMRFFGSAMYFPHVDGGFTRYKMVETSQCVPYPAKADEKVMAFAEPLAVAIHAAHQAGELQGKRVFISGVGPIGCLIVSAVKTLGAAEIVCADVSPRSLSLGKEMGADVLVNPQNDDMDHWKAEKGYFDVSFEVSGHPSSVNTCLEVTRARGVMVQVGMGGAMAEFPMMTLIGKEISLRGSFRFTSEFNTAVSWLANGVINPLPLLSAEYPFTDLEEALRFAGDKTQAAKVQLVF

SEQ ID NO: 8617 - protein, 630 aa, Neisseria meningitidis MC58
MPILTIREVCNINHWGIGYYDVDDSGEIIVRPNPSQHNQTVSLQKLTEAVQQKHQARLPVLFCFPQILEHRLRDINRAFQTAREECGYKGGYCLVYPIKVNQHRRVIESLMSSGQPHGLEAGSKAELMAVLAHAGNRQTLIVCNGYKDREYIRFALMGEKLGHQVYLVIEKLSEIQMVLEEAEKLGIKPRLGVRARLASQGSGKWQSSGGEKSKFGLSASQVLQLVDILKQKNRLDCLQLLHFHLGSQLGNIRDVATGVHESARFYVELHKLGVNIRCFDVGGGLGVDYEGNRTQSDCSVNYSLNEYAATVVWGISQACLEHGLPHPTIITESGRGITAHHAVLVANVIGVERYKPRRLDAPSPEAPRVLHSMWETWTDISASREKRSLRSWIHEGQFDLADVHNQYNVGLLSLAQRAWAEQLYLNICHEVGELFNEKHRSHRTIIDELQERFADKLYVNFSLFQSLPDAWGIDQLFPVCPITGLNEPIARRAVLLDITCDSDGTIDHYIDGDGIAGTMPMPDYPEEEPPLLGFFMVGAYQEILGNMHNLFGDTATADVVVGEDGQFTVIDYDEGNTVADMLEYVYQDPKELMKRYREQIEHSDLPASQAMSFLKELEAGLNGYTYLEDE

SEQ ID NO: 8618 - protein, 322 aa, Streptococcus agalactiae A909
MVTLSKEQHLDMFLKMQRIRDVDMKFNKLVRRGFVQGMTHFSVGEEAASVGAIQDLTDSDIIFSNHRGHGQTIAKGIDIGGMFAELAGKATGTSKGRGGSMHLANLEKGNYGTNGIVGGGYALAVGAALTQQYEGTDNIVITFSGDSATNEGSFHESVNLAAVWNLPVIFFIINNRYGISTDITYSTKIPHLYMRADAYGIPGHYVEDGNDLMAVYEKMHEVINYVRSGNGPAIVEVESYRWFGHSTADAGVYRTKEEVDSWKAKDPVKRYRAYLIENEIATEEELAAIEAQVIKEVEEGVKFAEESPFPDMSVAFEDVFVD

SEQ ID NO: 8619 - protein, 424 aa, Arabidopsis thaliana
MATVPEIKIMRSESLGHRSDVSSPEAKLGMRVEDLWDEQKPQLSPNEKLNACFESIPVSAFPLSSDSQDIEIRSDTSLAEAVQTLSKFKVLSAPVVDVDAPEDASWIDRYIGIVEFPGIVVWLLHQLEPPSPRSPAVAASNGFSHDFTTDVLDNGDSAVTSGNFFEVLTSSELYENTKVRDISGTFRWAPFLALQKENSFLTMLLLLSKYKMKSIPVVDLGVAKIENIITQSGVIHMLAECAGLLWFEDWGIKTLSEVGLPIMSKDHIIKIYEDEPVLQAFKLMRRKRIGGIPVIERNSEKPVGNISLRDVQFLLTAPEIYHDYRSITTKNFLVSVREHLEKCGDTSAPIMSGVIACTKNHTLKELILMLDAEKIHRIYVVDEFGNLEGLITLRDIIARLVHEPSGYFGDFFDGVMPLPENYRV

SEQ ID NO: 8620 - protein, 527 aa, Zea mays
  misc_feature (14)..(14): Xaa can be any naturally occurring amino acid
  unsure (1)..(527): unsure at all Xaa locations
MDLPPLSHQALFAXAVRSADAPAVRALLVDAEASATSLAALAAAQTDAGETALYVAAEAGSEEVVRLLLPLYDFEAATVRSRLDLDAFHVAAKQGHTGVVKEFLGRWPGLCSVCDSSNTSPLYSAAVKDHLDVVNAILDTDDSCIKIVRKNGKTSLHTAARIGYHRIVKALIERDPGIVPINDRKGQTALHMAVKGKNTDVVEELLMADVSILNVRDKKGNTALHIATRKWRPQMVQLLLSYESLEVNAINSQNETAMDLADKVPYGESKTEIIEWLTEAGAKNARNVGKIDEASELRRTVSDIKHNVQAQLSENAKTNKRVTGIRKELQKLHREAIQNTINSVTLVATLIASIAFVAIFNLPGQYFQDVNSGGDIGEAEIAKLTGFRVFCLLNATALFISLAVVVVQITLVAWETGAQKQVIKIVNKLMWTACLSTGVAFISLAYVVVGPQHAWMAFTASAIGGPIMIGTFLFLAYLLLRPRFKFGEDRQRRIKRASGSKSFSWSIHDGFSDLEAFSDHEKRIYAL

SEQ ID NO: 8621 - protein, 151 aa, Brassica napus
  misc_feature (61)..(61): Xaa can be any naturally occurring amino acid
  misc_feature (142)..(142): Xaa can be any naturally occurring amino acid
  misc_feature (148)..(148): Xaa can be any naturally occurring amino acid
  unsure (1)..(151): unsure at all Xaa locations
LEASPRLETFILEIRQPCMEHESVLWNAPQLRRLPQQCHTSLKSVTIVGFSSAKSLVELTXHIVENATSLERLTLDTSHGCQSSGGCSVNIPQRRYYTESGALEAASPYMCIPMGEDIIMETVKARLAIRVHVTGKVPSRVXLEVVEXCSW

SEQ ID NO: 8622 - protein, 155 aa, Zea mays
  misc_feature (62)..(62): Xaa can be any naturally occurring amino acid
  unsure (1)..(155): unsure at all Xaa locations
MASAEGERWVGLATDFSQGSRAALQWAATNLLRAGDHLLLLHVIKEPDYEQSEAILWESTGXPKYGAKPDMETLDLLNTTATQKEPLIMVVVKVLWGDPREKLCQVIHDTPLSCLVIGSRGLGKLKRVLLGSVSDYVVNNATCPVTVVKSSSTEG

SEQ ID NO: 8623 - protein, 358 aa, Solanum abutiloides
WDTSVAIEVKVGDSIEIVRFFHCYKRGVDRVFVDHPMFLEKVWGKTGSKIYGPKAGKDYLDNELRFSLLCQAALEAPRVLNLNCSKYFSGPYGENVLFIANDWHTALIPCYLKSMYQSRGIYLNAKVAFCIHNIVYQGRFAFSDFPLLNLPDEFRGSFDFIDGHEKPVKGRKINWMKAGILESHRVVTVSPYYAQELVSAVDKGVELDNVLRKTSITGIVNGMDTQEWNPATDKYTDVKYDITTVMDAKPLLKESLQAAVGLPVDRKIPLIGFIGRLEEQKGSDILVAAIHKFIGLDVQIVVLGTGKKKFEQEIEQLEVLYPNKAKGVAKFNVPLAHMITAGADFMLVPSRFEPCGLI

SEQ ID NO: 8624 - protein, 536 aa, Onion yellows phytoplasma OY-M
MSKKILYGKEARKALLQGVDAIANTVKVTLGPKGRNVILEKAYDSPAIVNDGVSIAKEIELKNPYQNMGAKLVYEVASKTNDKAGDGTTTATVLAQSMIHRGFDAIDAGANPVLVKEGIELAALTVAKKLLAKSKKVDAQEDIQNVAAVSSGSQEIGKIIAQAMQKVGKDGVINVDESKGFETELEVVEGLQYDKGYASPYFVSDRESMTVQLENALVLVTDHKISTVQEIVPILEEVVKASRPLLIVAEAVENEVLGVLVANKLRGTFNVVVTNAPGFGDNQKEMLQDIAVLTKANFVSKELNMKLADLKMDDLGNINKAIIKKDNTTLISNSKSPELEKRIQVLKTQIKNATSDYETKNLQERLAKLSGGVALIKVGAATDTELKDKKLRIEDALNATKAAITEGIVVGGGKALVEVYQELKDTLVSDNKEVQQGIDVVVQSLLVPTYQIAYNAGFSGKDVVKQQLLQPLNFGFNAKEGKYVCLLKEGIIDPTKVTRQAVLNAASISALMITTEAAVVSLKENKDNNFDLGTQE

SEQ ID NO: 8625 - protein, 383 aa, Neurospora crassa
MATDGKSNLSFVLNKPLDVCFQDKPVPKINSPHDVLVAVNYTGICGSDVHYWLHGAIGHFVVKDPMVLGHESAGTIVAVGDAVKTLSVGDRVALEPGYPCRRCVHCLSGHYNLCPEMRFAATPPYDGTLTGFWTAPADFCYKLPETVSLQEGALIEPLAVAVHITKQAKIQPGQTVVVMGAGPVGLLCAAVAKAYGASKVVSVDIVPSKLEFAKSFAATHTYLSQRVSPEENARNIIAAADLGEGADAVIDASGAEPSIQAALHVVRQGGHYVQGGMGKDNITFPIMALCIKEVTASGSFRYGSGDYRLAIQLVEQGKVDVKKLVNGVVPFKNAEEAFKKVKEGEVIKILIAGPNEDVEGSLDTTVDEKKLNEAKACGGSGCC

SEQ ID NO: 8626 - protein, 261 aa, Pinus radiata
MGRGRVQLRRIENKINRQVTFSKRRNGLLKKAYELSVLCDAEVALIIFSTRGKLYEFASSSMNKTLERYEKCSYAMQDTTGVSDREAQNWHQEVTKLKGKVELLQRSQRHLLGEDLGPLNVKELQQLERQLEVALTHLRSRKTQVMLDQIEELRQRERLLHEVNKSLQKKLSETEGRDVITGIEQTSNTNTGTNGPWDSSITNTAYALSHPQQDSNSSLHHVDCEPTLQIGYQPVAPESIVPPHQPPHNQTPNQYMQGWWV

SEQ ID NO: 8627 - protein, 533 aa, Parachlorella kessleri
MAGGGVVVVSGRGLSTGDYRGGLTVYVVMVAFMAACGGLLLGYDNGVTGGVVSLEAFEKFFPDVWAKKQEVHEDSPYCTYDNAKLQLFVSSLFLAGLVSCLFASWITRNWGRKVTMGIGGAFFVAGGLVNAFAQDMAMLIVGRVLLGFGVGLGSQVVPQYLSEVAPFSHRGMLNIGYQLFVTIGILIAGLVNYAVRDWENGWRLSLGLAAAPGAILFLGSLVLPESPNFLVEKGKTEKGREVLQKLRGTSEVDAEFADIVAAVEIARPITMRQSWASLFTRRYMPQLLTSFVIQFFQQFTGINAIIFYVPVLFSSLGSANSAALLNTVVVGAVNVGSTLIAVMFSDKFGRRFLLIEGGIQCCLAMLTTGVVLAIEFAKYGTDPLPKAVASGILAVICIFISGFAWSWGPMGWLIPSEIFTLETRPAGTAVAVVGNFLFSFVIGQAFVSMLCAMEYGVFLFFAGWLVIMVLCAIFLLPETKGVPIERVQALYARHWFWNRVMGPAAAEVIAEDEKRVAAASAIIKEEELSKAMK

SEQ ID NO: 8628 - protein, 458 aa, Mesorhizobium loti MAFF303099
MTAKTFDAIIIGAGQAGTPLAGRLNAAGMSVALIERKLVGGTCVNTGCIPTKTMVASAYAAHLARRATDYGVTLGGPVGVDYKAIKARKDKVSGASRTGLESWIAGMDKCTLYRGHARFESANTVRVGDDLLTADKIFLNTGGRASVPDLPGIHDIDYLTNSSMMDLEVLPRHLIVVGGSYISLEFAQMFRRFGSEITVIEKSPRLTGREDEDVSATILSILENEGITVHVGADDIGFAKQGDDIAVTFSAGKPPAVGSHVLLALGRTLNTDDLGLDRAGVAVDKRGAIIVDDQLRTSVPGIWAMGDCNGKGAFTHTSYNDYEIVAANLLDNDPRKVSDRIEAYALYIDPPLGRCGMTEAAVKKSGRRALVGQRPMTRVGRAVEKGETQGFMKILVDADTRQILGCSVLGPGGDEAVHCVLDLMYAKAPVDTLARATHIHPTVSELLPTIAQELKPLA

SEQ ID NO: 8629 - protein, 401 aa, Rhodobacter capsulatus
MDYNLALDKAIQKLHDEGRYRTFIDIEREKGAFPKAQWNRPDGGKQDITVWCGNDYLGMGQHPVVLAAMHEALEAVGAGSGGTRNISGTTAYHRRLEAEIAGLHQKEAALVFSSAYNANDATLSTLRVLFPGLIIYSDSLNHASMIEGIKRNAGPKRIFRHNDVAHLRELIAADDPAAPKLIAFESVYSMDGDFGPIKEICDIAEEFGALTYIDEVHAVGMYGPRGAGVAERDGLMHRIDIFNGTLAKAYGVFGGYIAASARMVDAVRSYAPGFIFSTSLPPAIAAGAQASIAFLKTAEGQKLRDAQQMHAKVLKMRLKALGMPIIDHGSHIVPVVIGDPVHTKAVSDMLLSDYGVYVQPINFPTVPRGTERLRFTPSPVHDLKQIDGLVHAMDLLWARCA

SEQ ID NO: 8630 - protein, 3282 aa, Arabidopsis thaliana
MSRLSFRPRPLDIHKKLPILKSFKDFEDEDNPSSITRNSQLLRISAVEVVDNEVQPPVPSKKLISEIPTPQYLVVDTYERDYSRTFNQPASYLRARGARAELGEFVEYDLDNDDDDWLYEYNKETMILSPEMLEIVIFKLEVLDHKARERAGVITPTLGLPVPVLLQPDAAGEALKYLSIKYGVFHAIYSYWKNKREIWQKPILRRLQPPPPVNDTNPYNVFRPREKAHRLHARRMQQRENNAQSFEKLRQVRRNLDQAKTILEALIKREEKKRDFMASEVSLQRIQLKYKNETELLEDSLALAGFPLSTAYRFGSSEDEFMDSDDPTTTQTCTRPSFTPHRRFTDSNLARAQAGSIKQEARRLGWLHKLNPNEPVMLFTKALVPDKLAAAGIIPPSDARSGRARFQGRMGRGGRIAFSGQGLQGSHLCGLQSRAISYGSNKDDEEAEQLAKEISKDWSTVFERSMNTLFLTEMVRGLSLTLKYFFDPKVTINYPFEKGPLSPRFRGEHALRRYPTGEERCIACKLCEAVCPAQAITIEAEEREDGSRRTTSDCSELYRYDIDMTKCIYCGFCQEACPVDAIVEGPNFEFATETHEELLYDKEKLLENGDRWETEIAENLRKRFRLLLLQIKMLQPLHCYCYLYFLSSYRWQNQIWLCFRFELDRAGFHVTLAPMDNDVFQIRRSMRDAIFVQLEKRNPLPNDDASKGKHLDAAKRLEEGLFKMAMTKEEYLNPSTLESRLTSLIKGRQLNKYKHQHADSSTLGTTITPTPGVSAEPTMDNENRDQCETEIAENLKSERMYLRHFSLAVGLSTLVPPINFDRGHLTVLGVLSCYTEITCKNNKEQEMNFRSFGFSGTEELCSAYLRDNMNVQAHMSGQRSGQVPNQGTVPQNNGNSQMQNLVGSNGAATAVTGAGAATGSGTGVRPSRNIVGAMDHDIMKLRQYMQTLVFNMLQQRQPSPADAASKAKYMDVARRLEEGLFKMAVTKEDYMNRSTLESRITSLIKGRQINNYNQRHANSSSVGTMIPTPGLSQTAGNPNLMVTSSVDATIVGNTNITSTALNTGNPLIAGGMHGGNMSNGYQHSSRNFSLGSGGSMTSMGAQRSTAQMIPTPGFVNSVTNNNSGGFSAEPTIVPQSQQQQQRQHTGGQNSHMLSNHMAAGVRPDMQSKPSGAANSSVNGDVGANEKIVDSGSSYTNASKKLQQGNFSLLSFCPDDLISGQHIESTFHISGEGYSTTNPDPFDGAITSAGTGTKAHNINTASFQPVSRVNSSLSHQQQFQQPPNRFQQQPNQIQQQQQQFLNQRKLKQQTPQQHRLISNDGLGKTQVDSDMVTKVKCEPGMENKSQAPQSQASERFQLSQLQNQYQNSGEDCQADAQLLPVESQSDICTSLPQNSQQIQQMMHPQNIGSDSSNSFSNLAVGVKSESSPQGQWPSKSQENTLMSNAISSGKHIQEDFRQRITGMDEAQPNNLTEGSVIGQNHTSTISESHNLQNSIGTTCRYGNVSHDPKFKNQQRWLLFLRHARSCKPPGGRCQDQNCVTVQKLWSHMDNCADPQCLYPRCRHTKALIGHYKNCKDPRCPVCVPVKTYQQQANVRALARLKNESSAVGSVNRSVVSNDSLSANAGAVSGTPRCADTLDNLQPSLKRLKVEQSFQPVVPKTESCKSSIVSTTEADLSQDAERKDHRPLKSETMEVKVEIPDNSVQAGFGIKETKSEPFENVPKPKPVSEPGKHGLSGDSPKQENIKMKKEPGWPKKEPGCPKKEELVESPELTSKSRKPKIKGVSLTELFTPEQVREHIRGLRQWVGQSKAKAEKNQAMENSMSENSCQLCAVEKLTFEPPPIYCTPCGARIKRNAMYYTVGGGETRHYFCIPCYNESRGDTILAEGTSMPKAKLEKKKNDEEIEESWVQCDKCQAWQHQICALFNGRRNDGGQAEYTCPYCYVIDVEQNERKPLLQSAVLGAKDLPRTILSDHIEQRLFKRLKQERTERARVQGTSYDEIPTVESLVVRVVSSVDKKLEVKSRFLEIFREDNFPTEFPYKSKVVLLFQKIEGVEVCLFGMYVQEFGSECSNPNQRRVYLSYLDSVKYFRPDIKSANGEALRTFVYHEILIGYLEYCKLRGFTSCYIWACPPLKGEDYILYCHPEIQKTPKSDKLRECFRRKILYILQFAPGLHRYLAMLRKAAKEGIVAETTNLYDHFFLQTGECRAKVTAARLPYFDGDYWPGAAEDIISQMSQEDDGRKGNKKGILKKPITKRALKASGQSDFSGNASKDLLLMHKLGETIHPMKEDFIMVHLQHSCTHCCTLMVTGNRWVCSQCKDFQLCDGCYEAEQKREDRERHPVNQKDKHNIFPVEIADIPTDTKDRDEILESEFFDTRQAFLSLCQGNHYQYDTLRRAKHSSMMVLYHLHNPTAPAFVTTCNVCHLDIESGLGWRCEVCPDYDVCNACYKKEGCINHPHKLTTHPSLADQNAQNKEARQLRVLQLRKMLDLLVHASQCRSPVCLYPNCRKVKGLFRHGLRCKVRASGGCVLCKKMWYLLQLHARACKESECDVPRCGDLKEHLRRLQQQSDSRRRAAVMEMMRQRAAEVAGTSGSKQKWKCNLLPKVKKIKETGVYDLHLKKQSSKMVGSIVGSNMAATDARFLSSNFGNSFSINTRIHRFHDRSQIVIPRAQSSSSPSPSPPSDKKKTKTRPGTITTKESEETVAKKLDVAPPSPQSPPSPPTLKLDDVNPVGLGRRSRQIFDEVWRKFSGLGQMSRTTRPDEQETLDSLLIREGPMCEFAVPGAQNVTVLVVGATSRIGRIVVRKLMLRGYTVKALVRKQDEEVMSMLPRSVDIVVGDVGEPSTLKSAVESCSKIIYCATARSTITADLTRVDHLGVYNLTKAFQDYNNRLAQLRAGKSSKSKLLLAKFKSAESLDGWEIRQGTYFQDTTASKYDGGMDAKFEFTETERAEFSGYVFTRGGYVELSKKLSLPLGTTLDRYEGLVLSVGGNGRSYVVILEAGPSSDMSQSKQYFARISTKAGFCRVYKASSVLLISLTPFPLFFWLKLWFLGQVRVPFSAFRPVNPEDPPLDPFLVHTLTIRFEPKRQRPVDGLAGAQQDLRSFSLVFEYIKALPAGQETDFILVSCTGSGVEANRREQVLKAKRAGEDSLRRSGLGYTIIRPGPLKEEPGGQRALIFDQGNRISQVISITKNKLKPPSKSSLMEPLITSQCAIFFQFQGISCADVADICVKALHDSTARNKSFDVCHEYVAEQGIELYELVAHLPDKANNYLTPALSVLEKNT

SEQ ID NO: 8631 - protein, 467 aa, Sinorhizobium meliloti
MNQYDLIVVGSGPAGRRGAIQAAKLGKKVLVIEQGKRVGGVSVHTGTIPSKTLRETALNLTGWRERGFYGRSYRVKQEISAEDLRRRLIITLNHEVEVLEHQFARNRVQHIRGRASFVGPTTLEISKDDDESMLVSGTSILLAVGTKPFRPDYMPFDGRTVVDSDELLDIRELPRSLVVIGAGVIGIEYATIFSALDIQVTVIDPKTTMLDFIDREIVEDFTYQLRDRAMKLNLGQKAEKVERLDNGKVLLTLDNGRKITTEMVLFAAGRMGATDALNLPAAGLEADARGRLKVNPETFQTTVPNIYAAGDVVGFPSLASTSMEQGRVAARVAVGAIAKEPQKYFPYGIYAVPEISTCGLSEEEVKERGIPYECGIARFRETSRGHIMGLDSGLLKMIFSLRTRRLLGVHIIGEGATELVHIGQAVLNLKGTVEYFVENTFNYPTLAEAYKIAGLDAWNRMGEIKAE

SEQ ID NO: 8632 - protein, 791 aa, Aegilops tauschii
MTMMAMAKAPCLCARPSLAARARRPGPGPAPRLRRWRPNATAGKGVGEVCAAVVEAATKAEDEDDDEEEAVAEDRYALGGACRVLAGMPAPLGATALAGGVNFAVYSGGATAAALCLFTPEDLKADRVTEEVSLDPLMNRTGNVWHVFIEGELHDMLYGYRFDGTFAPHCGHYLDISNVVVDPYAKAVISRGEYGVPARGNNCWPQMAGMIPLPYSTFDWEGDLPLRYPQKDLVIYEMHLRGFTKHDSSNVEHPGTFIGAVSKLDYLKELGVNCIELMPCHEFNELEYSTSSSKMNFWGYSTINFFSPMTRYTSGGIKNCGRDAINEFKTFVREAHKRGIEVILDVVFNHTAEGNENGPILSFRGVDNTTYYMLAPKGEFYNYSGCGNTFNCNHPVVRQFIVDCLRYWVMEMHVDGFRFDLASIMTRGSSLWDPVNVYGAPIEGDMITTGTPLVTPPLIDMISNDPILGGVKLIAEAWDAGGLYQVGQFPHWNVWSEWNGKYRDIVRQFIKGTDGFAGGFAECLCGSPHLYQAGGRKPWHSINFVCAHDGFTLGDLVTYNNKYNLPNGENNRDGENHNLSWNCGEEGEFARLSVKRLRKRQMRNFFVCLMVSQGVPMFYMGDEYGHTKGGNNNTYCHDSYVNYFRWDKKEQYSDLQRFCCLMTKFRKECEGLGLEDFPTAERLQWHGHQPGKPDWSENSRFVAFSMKDERQGEIYVAFNTSHLPAVVELPERAGRRWEPVVDTGKPAPYDFLTDDLPDRALTIHQFSHFLNSNLYPMLSYSSVILVLRPDV

SEQ ID NO: 8633 - protein, 791 aa, Triticum aestivum
MTMMAMAKAPCLCARPSLAARARRPGPGPAPRLRRWRPNATAGKGVGEVCAAVVEAATKAEDEDDDEEEAVAEDRYALGGACRVLAGMPAPLGATALAGGVNFAVYSGGATAAALCLFTPEDLKADRVTEEVSLDPLMNRTGNVWHVFIEGELHDMLYGYRFDGTFAPHCGHYLDISNVVVDPYAKAVISRGEYGVPARGNNCWPQMAGMIPLPYSTFDWEGDLPLRYPQKDLVIYEMHLRGFTKHDSSNVEHPGTFIGAVSKLDYLKELGVNCIELMPCHEFNELEYSTSSSKMNFWGYSTINFFSPMTRYTSGGIKNCGRDAINEFKTFVREAHKRGIEVILDVVFNHTAEGNENGPILSFRGVDNTTYYMLAPKGEFYNYSGCGNTFNCNHPVVRQFIVDCLRYWVMEMHVDGFRFDLASIMTRGSSLWDPVNVYGAPIEGDMITTGTPLVTPPLIDMISNDPILGGVKLIAEAWDAGGLYQVGQFPHWNVWSEWNGKYRDIVRQFIKGTDGFAGGFAECLCGSPHLYQAGGRKPWHSINFVCAHDGFTLGDLVTYNNKYNLPNGENNRDGENHNLSWNCGEEGEFARLSVKRLRKRQMRNFFVCLMVSQGVPMFYMGDEYGHTKGGNNNTYCHDSYVNYFRWDKKEQYSDLHRFCCLMTKFRKECDGLGLEDFPTAERLQWHGHQPGKPDWSENSRFVAFSMKDERQGEIYVAFNTSHLPAVVELPERAGRRWEPVVDTGKPAPYDFLTDDLPDRALTIHQFSHFLNSNLYPMLSYSSVILVLRPDV

SEQ ID NO: 8634 - protein, 342 aa, Arabidopsis thaliana
MMLLVHTRRKLESLSGFNSITSFGDLGESVCGPAGRLVVDVMLVLSQSGFCVSYLIFVATTMANLLSRGTEHILGLDAASIYLWGCFPFQLGLNSIPSLTHLAPLSIFADIVDVAATLVVMVQDVFIFLKRRPPLRVFGGVSVFFYGLGVAVYAFEGIGMVLPLELEAKYKDKFGRALGLAMGLISIMYGAFGLLGYMAYGEETKDIITTNLGTGVVSTLVQLGLAINLFFTFPLMMQPVYEVVERRLCSSRYSVWVRWATVLVVTLVALLVPNFADFLSLVGSSVCVVLGFVLPSLFHLQAFKNELSITRIVVDVLVFLIGVMIAITGTWTAVHEILTSKA

SEQ ID NO: 8635 - protein, 280 aa, Shewanella sp. ANA-3
MTQTNATTSNQAPLTAMPMLGTGTFRLKDNAAFDAVLMALEEGSRHIDTAQIYGNEQAVGDAINTSGIPREELFITTKVWTENLTKERFETSVIDSLTALQTKYLDLLLIHWPLNSDEPSMVEYLSELKAVLDKGLTRRIGVSNFTNAQLAQAIAILGEGVIYTNQVEVHPYLINRKVTDFCRQHNVLVTGYMPFAYGAVLQDETIVNLASVHQATPAQIVLAWLRQLGFATIPSSTKRDNVRSNLAAASINLTPAEIEQINQLDRNHRVANPDFAPHWD

SEQ ID NO: 8636 - protein, 380 aa, Neisseria meningitidis MC58
MKVFKQQLEQLGAQNQYRSIPDLIHQGRYITRENRKMLNMSSNDYLGLASDENLRRSFLQQYGGNFPSFTSSSSRLLTGNFPIYTDLEELVAQRFQRESALLFNSGYHANLGILPALTTTKSLILADKFVHASMIDGIRLSRCAFFRYRHNDYEHLKNLLEKNVGKFDRTFIVTESVFSMDGDVADLKQLVQLKKQFPNTYLYVDEAHAIGVYGQNGLGIAERDNLIAEIDLLVGTFGKALASVGAYAVCNQVLKECLINQMRPLIFSTALPPFNVAWTYFIFERLPQFSKERSHLEQLSAFLRREVAHRTQIMPSQTCIVPYILGGNEATLAKAEYLQRQGYYCLPIRPSTVPKNTSRIRLSLTADMTTDEVRQFAACL

SEQ ID NO: 8637 - protein, 139 aa, Glycine max
  misc_feature (5)..(8): Xaa can be any naturally occurring amino acid
  misc_feature (10)..(10): Xaa can be any naturally occurring amino acid
  misc_feature (19)..(19): Xaa can be any naturally occurring amino acid
  unsure (1)..(139): unsure at all Xaa locations
LQELXXXXVXLQNLIQRNXQLYSSGNPPSGGVSLPFILVQTRPHATVEVEISEDMQLVHFDFNSTPFELHDDNYVLKAMKFGERPLEDNMTHNLTDGGEGSSMSGLCQPQAPTILNVSNRPPTSPPLPGILKARVKQEH

SEQ ID NO: 8638 - protein, 504 aa, Arabidopsis thaliana
MVVINSLRRLARTTQVHLHSRYATCMSGNSTSRRIFTTEAAPEKKNTVGSKGHDMLAPFTAGWQSADLDPLVIAKSEGSYVYDDTGKKYLDSLAGLWCTALGGNEPRLVSAAVEQLNTLPFYHSFWNRTTKPSLDLAKVLLEMFTANKMAKAFFTSGGSDANDTQVKLVWYYNNALGRPEKKKFIARKKSYHGSTLISASLSGLPPLHQNFDLPAPFVLHTDCPHYWRFHLPGETEEEFSTRLAKNLEDLIIKEGPETIGAFIAEPVMGAGGVIPPPATYFEKVQAVVKKYDILFIADEVICAFGRLGTMFGCDKYNIKPDLVTLAKALSSAYMPIGAILMSQEVADVINSHSSKLGVFSHGFTYSGHPVSCAVAIEALKIYKERNIPEYVAKVAPRFQDGVKAFASGSPIIGETRGTGLILGTEFVDNKSPNEPFPPEWGVGAFFGAECQKHGMLVRVAGDGILMSPPLIISPEEIDELISIYGKALKATEEKVKELKAQHKK

SEQ ID NO: 8639 - protein, 499 aa, Cicer arietinum
MEYNFLTYIIFLSLFLITTKLLFSKRKFKKLPPCPPSIPIIGNLHQVKQPIHHTFYNLSKKYGPIFTLKFGSQPVVVVSSASLVEECFTKNDIIFANRIHSAKTKYLGYNNTNMVSTSYGDLWRNLRRISSIEILSTHRLNSFSEIRKDETMRLIGKLAKKSHKDFTKVELRSLFGELTFNTIMRMVCGKRFYGEESDGTNAEEAKKFRDMMNEMQEFGLGSNLGDFVPLFKLFDFSGGHKKLKKVGEKMDALFQGLVDEHRNNKDKNLNTMIDHLLSLQESQPDYYSDQIIKGLIMALIVAGTETSSVTLEWAMSNLLNHPEILEKAKIELDNHIGQEHLIEEAEATKLQYLQNIISETLRLHPPVTMLLPHLSSHDCTIGGYDVPRNTMLMVNAWAIHRDPNLWADPMSFKPERFENGQGDIGGFIPFGMGRRACPGSGLALRTLGLTLGSLIQCFEWKRIGKEEVDMSEGSGTVVPKAIPLEAQCKARPIINKIFN

SEQ ID NO: 8640 - protein, 757 aa, Pasteurella multocida subsp. multocida str. Pm70
MTTFHVAGFPRVGAKRELKFAQERYWRGEIAEQDLLEIAQKLREINWKHQAAANADFVAVADFTFYDHILDLQVATGAIPARFGFDSQNLSLNEYFQLARGNQTQFAIEMTKWFDTNYHYLVPEFTKNTEFKANPAHYVQQIREAKALGFKFKPTIVGPLTFLWLGKEKGEAFNRFELLAKLVPVYVEILNALVAEGAEWIQIDEPALAVDLPTEWIEAYKAVYTTLKEKVKAKLLLATYFGSVAEHAPLLKGLPVDGLHIDLVRAPAQLAAFEDYNKVLSVGVIDGRNIWRANLNQVLDVVEPLKAKFGENLWIAPSCSLLHTPYDLEVETQLKANKPELYSWLAFTLQKVQELRVIKTALEQGRGAVQAELDASQAAADARANSKEIHRPEVAERLANLPTDADKRKSPFAERIAKQNAWLNLPLLPTTNIGSFPQTVEIRQARAKFKKGELSVADYEAAMKKEIEFVVRRQEELDLDVLVHGEAERNDMVEYFGELLDGFAFTKFGWVQSYGSRCVKPPVIYGDVVRPEPMTVRWSQYAQSLTNKVMKGMLTGPVTILQWSFVRNDIPRSTVCKQIGVALSDEVLDLEKAGIKVIQIDEPAIREGLPLKRADWDAYLQWAGEAFRLSYMGVQDDTQIHTHMCYSEFNDILPAIAGLDADVITIETSRSDMELLTAFGDFKYPNDIGPGVYDIHSPRVPKAEEIERLLRKALNVVPKERLWVNPDCGLKTRGWPETIAQLEVMMEVTKKLRAELN

SEQ ID NO: 8641 - protein, 355 aa, Glycine max
MAPSFDCVSSLLCAEDNSIFDENDYGGSVEVLEDAWQDPRYRRNLSQSENLDVPNGFFPLQSDECLRLMVEKEWDHLPNGDYVNRLRSGDLDFGARKEAIDWIEKVQQHFGFGPLCAYLSINYLDRFLSAYELPKHRAWTMQLLAVGCLSLAAKMEETDVPFSLDLQVGESKYIFEAKTIQRMELLVLSTLRWRMQAITPFSFIDHFLYKINDDQSPIGASILQSIQLILSTVRGIDFLEFRPSEIAAAVAISVVGEGQTVHTEKAISVLIQLVEKERVLKCVKMIQELASNSGGSAKGASASVSVPSVPESPLGVLVTACFSYKSDDTNAASYANSSHNISPDAKRRKLNKTFG

SEQ ID NO: 8642 - protein, 241 aa, Triticum aestivum
  misc_feature (183)..(183): Xaa can be any naturally occurring amino acid
  misc_feature (225)..(225): Xaa can be any naturally occurring amino acid
  unsure (1)..(241): unsure at all Xaa locations
MQIFVKTLTGKTITLEVEPSDTIEQVKQKIQDKEGIPPDQQRLIFAGKQLEDGRTLSDYNIQKESTLHLVLRLRGGMQIFVKTLTGKTITLEVEPSDTIEQVKQKIQDKEGIPPDQQRLIFAGKQLEDGRTLSDYNIQKESLLHWLASRLRGGMQIFVQTLTGQTITLEVEPSDTIEQVKQKXQDTNGGGIPPDPTRLVFAGKQPEDGRTLSDYNIQKESTLHLXVLRLGGGMQIFARTWP

SEQ ID NO: 8643 - protein, 330 aa, Arabidopsis thaliana
MGDTSPRTSVSTDGDTDHNNLMFDEGHLGIGASDSSDRSKSKMDQKTLRRLAQNREAARKSRLRKKAYVQQLENSRLKLTQLEQELQRARQQGVFISSSGDQAHSTAGDGAMAFDVEYRRWQEDKNRQMKELSSAIDSHATDSELRIIVDGVIAHYEELYRIKGNAAKSDVFHLLSGMWKTPAERCFLWLGGFRSSELLKLIASQLEPLTEQQSLDINNLQQSSQQAEDALSQGMDNLQQSLADTLSSGTLGSSSSGNVASYMGQMAMAMGKLGTLEGFIRQADNLRLQTYQQMVRLLTTRQSARALLAVHNYTLRLRALSSLWLARPRE

SEQ ID NO: 8644 - protein, 362 aa, Solanum aculeatissimum
WDTSVAVEVKVGDSIEIVRFFHCYKRGVDRVFVDHPMFLEKVWGKTGSKIYGPKAGQDYLDNELRFSLLCQAALEAPRVLNLNCSKYFSGPYGEDVLFIANDWHTALIPCYLKSMYQSRGIYLNAKVAFCIHNIAYQGRFAFSDFPLLNLPDEFRGSFDFIDGHEKPVKGRKINWMKAGILESDRVVTVSPYYAQELVSAVDKGVELDNVLRKTSITGIVNGMDTQEWNPATDKYTDVKYDITTVMDAKPLLKEALQAAVGLPVDRKIPLIGFIGRLEEQKGSDILVAAIHKFIGLDVQIVVLGTGKKKFEQEIEQLEVLYSNKAKGVAKFNVPLAHMITAGADFMLVPSRFEPCGLIQLHA

SEQ ID NO: 8645 - protein, 360 aa, Solanum atropurpureum
WDTSVAIEVKIGDSIEIVRFFHCYKRGVDRVFVDHPMFLEKVWGKTGSKIYGPKAGQDYLDNELRFSLLCQAALEAPRVLNLNCSKYFSGPYGEDVLFIANDWHTALIPCYLKSMYQSRGIYLNAKVAFCIHNIAYQGRFAFSDFPLLNLPDEFRGSFDFIDGHEKPVKGRKINWMKAGILESDRVVTVSPYYAQELVSAVDKGVELDNVLRKTSITGIVNGMDTQEWNPATDKYTDVKYDITTVMDAKPLLKEALQAAVGLPVDRRIPLIGFIGRLEEQKGSDILVAAIHQFIGLDVQIVVLGTGKKKFEQEIEQLEVLYPNKAKGVAKFNVPLAHMITAGADFMLVPSRFEPCGLIQL

SEQ ID NO: 8646 - protein, 359 aa, Nostoc punctiforme PCC 73102
MKKQAVAAGFVLLSFMLPLKASAASFSNFYVFGDSLSDTGNVFAATGGLAAPTTAIPQDPQYFQGRFSNGQVWVDYLGDQLGLTPSPYITLNPAIPNQGINFAVGGASSGQGNAVVPNAPLPGVLEQVGLLTQPILQANQKLDPNALYAVWGGANDYVFGQATNTTQTVQNLSNAVWLLASAGAKNILVFNLPDLGKIPLAFATGSSSNLAALTNEHNQELAQELGKFSNNSDLNLISVDVFSLFNQVEANPGEFGFQNVTNPCVVGNFQTILSVCSQPNDYLFYDSVHPTTGVHKLVADAALAAIEAKSVPEPAINLGILALGAFGALGILKRQQKKAAFMTPVRVVDAQLSHITVEN

SEQ ID NO: 8647 - protein, 362 aa, Solanum aviculare
WDTSVAVEVKVGDSIEIVRFFHCYKRGVDRVFVDHPMFLEKVWGKTGSKIYGPKAGRDYLDNELRFSLLCQAALEAPRVLNLNCSKYFSGPYGEDVLFIANDWHTALIPCYLKSMYQSRGIYLNAKVAFCIHNIAYQGRFAFSDFPLLNLPDEFRGSFDFIDGYEKPVKGRKINWMKAGILESHRVVTVSPYYAQELVSAVDKGVELDNVLRKTCITGIVNGMDTQEWNPATDKYTDVKYDITTVMDAKPLLKEALQAAVGLPVDRKIPLIGFIGRLEEQKGSDILVAAIHKFIGLDVQIVVLGTGKKKFEQEIEQLEVLYPNKAKGVAKFNVPLAHMITAGADFMLVPSRFEPCGLIQLHA

SEQ ID NO: 8648 - protein, 534 aa, Parachlorella kessleri
MAGGGVVVVSGRGLSTGDYRGGLTVYVVMVAFMAACGGLLLGYDNGVTGGVVSLEAFEKKFFPDVWAKKQEVHEDSPYCTYDNAKLQLFVSSLFLAGLVSCLFASWITRNWGRKVTMGIGGAFFVAGGLVNAFAQDMAMLIVGRVLLGFGVGLGSQVVPQYLSEVAPFSHRGMLNIGYQLFVTIGILIAGLVNYAVRDWENGWRLSLGPAAAPGAILFLGSLVLPESPNFLVEKGKTEKGREVLQKLCGTSEVDAEFADIVAAVEIARPITMRQSWASLFTRRYMPQLLTSFVIQFFQQFTGINAIIFYVPVLFSSLGSANSAALLNTVVVGAVNVGSTLIAVMFSDKFGRRFLLIEGGIQCCLAMLTTGVVLAIEFAKYGTDPLPKAVASGILAVICIFISGFAWSWGPMGWLIPSEIFTLETRPAGTAVAVVGNFLFSFVIGQAFVSMLCAMEYGVFLFFAGWLVIMVLCAIFLLPETKGVPIERVQALYARHWFWNRVMGPAAAEVIAEDEKRVAAASAIIKEEELSKAMK

SEQ ID NO: 8649 - protein, 240 aa, Oryza sativa
MGRGKIVIRRIDNSTSRQVTFSKRRNGIFKKAKELAILCDAEVGLMIFSSTGRLYEYSSTSMKSVIDRYGKSKDEQQAVANPNSELKFWQREAASLRQQLHNLQENHRQLMGEDLSGLNVKELQSLENQLEISLRSVRTKKDHVLIDEIHELNRKGSLVHQENMELYKKISLIRQENAELYKKIYETEGPSEVNRDSPTPYNFAVIEKTNVPVQLGLSTLPQHSDAEQSTAPKLGLQLNP

SEQ ID NO: 8650 - protein, 362 aa, Solanum candidum
WDTSVAIEVQVGDSIEIVHFFHCYKRGVDRVFVDHPMFLEKVWGKTGSKIYGPKAGQDYLDNELRFSLLCQAALEAPRVLNLNCSKFFSGPYGEDVLFIANDWHTALIPCYLKSMYQSRGIYLNAKVAFCIHNIAYQGRFAFSDFPLLNLPDEFRGSFDFIDGHETPVKGRKINWMKAGILESDRVVTVSPYYAQELVSAVDKGVELDNVLRKTSITGIVNGMDTQEWNPATDKYTDIKYDITTVMDAKPLLKEALQAAVGLPVDRKIPLIGFIGRLEEQKGSDILVAAIHKFIGLDVQIVVLGTGKKKFEQEIEQLEVLYPNKAKGVAKFNVPLAHMITAGADFMLVPSRFEPCGLIQLHA

SEQ ID NO: 8651 - protein, 540 aa, Parachlorella kessleri
MAGGGPVASTTTNRASQYGYARGGLNWYIFIVALTAGSGGLLFGYDIGVTGGVTSMPEFLQKFFPSIYDRTQQPSDSKDPYCTYDDQKLQLFTSSFFLAGMFVSFFAGSVVRRWGRKPTMLIASVLFLAGAGLNAGAQDLAMLVIGRVLLGFGVGGGNNAVPLYLSECAPPKYRGGLNMMFQLAVTIGIIVAQLVNYGTQTMNNGWRLSLGLAGVPAIILLIGSLLLPETPNSLIERGHRRRGRAVLARLRRTEAVDTEFEDICAAAEESTRYTLRQSWAALFSRQYSPMLIVTSLIAMLQQLTGINAIMFYVPVLFSSFGTARHAALLNTVIIGAVNVAATFVSIFSVDKFGRRGLFLEGGIQMFIGQVVTAAVLGVELNKYGTNLPSSTAAGVLVVICVYVAAFAWSWGPLGWLVPSEIQTLETRGAGMSMAVIVNFLFSFVIGQAFLSMMCAMRWGVFLFFAGWVVIMTFFVYFCLPETKGVPVETVPTMFARHWLWGRVMGEKGRALVAADEARKAGTVAFKVESGSEDGKPASDQ

SEQ ID NO: 8652 - protein, 448 aa, Candida glabrata CBS138
MSRRVVVTGLGCVTPLGKSVKESWHRLLQRDSNGLVKLDQLTKGDFAKWRGIFPPELRVGAVSPIESFEVNSQLFTSQDDRRMSRFIKLATIASYEALVSSGLVNKETKMSEDGRIPIDQHNQGIDPDKVGCLIGSGIGSIEDIYETSVTFDSNTKKNRINPYFVPRILTNMAAGNIAIKFNLRGPTHSVSTACATGNNAIGDGYNMIKLGMQDICLAGASEASVHPLSLAGFLRAKSLSPDGISRPFDEERNGFVLGEGAGIVVLESLESAERRGAPILAEIVGYGLSCDAHHITSPPNDGEGASRAIKMALDLSHGNVNARDIEYVNAHATSTKLGDNTECCAIQNTLIDNVNRQKPLYISSNKGSIGHLLGAAGAAESIFTILSLYNRTIPHTYNLKNVLGNFESSSMRFVKSQPHKVADLEYALCNSFGFGGVNTSLLFRRWHE

SEQ ID NO: 8653 - protein, 327 aa, Saccharomyces cerevisiae
MSSNDSNDTDKQHTRLDPTGVDDAYIPPEQPETKHHRFKISRDTLRNHFIAAVGEFCGTFMFLWCAYVICNVANHDVALVAAPDGSHPGQLIMIAIGFGFSVMFSIWCFAGVSGGALNPAVSLSLCLARAVSPTRCVVMWVSQIVAGMAAGGAASAMTPGEVLFANSLGLGCSRTRGLFLEMFGTAILCLTVLMTAVEKRETNFMAALPIGISLFIAHVALTAYTGTGVNPARSLGAAVAARYFPHYHWIYWIGPLLGSILAWSVWQLLQILDYTTYVTAEKAASTKEKAQKKVKPAVPLLWLKSNFPLLFFISRSLALNVIIFGKN

SEQ ID NO: 8654 - protein, 367 aa, Thermotoga maritima MSB8
MIQKGLEGVKICESSICYLDGINGRLYYRGIPVEELAEKSTFEETAYFLWYGKLPTKSELEEFKRKMADYRELPAEALGILYHLPKNLHYIDVLKIFLSIHGSMDGNDEDLREKAIRVASVFPTILAYYYRYSKGKELIRPRKDLSHVENFYYMMFGERNEKIRLLESAFILLMEQDINASTFAALVIASTLSDLYSCIVGALGALKGPLHGGASEKVPPMLEEIGSEDRVEEFVQKCLKEKRKIMGFGHRVYKTYDPRAVFLKRVLQEHFPDSKLFRIASKLEEYIVSNKIKNIYPNVDLYSSVLFEELGFPRNMFTALFATARVVGWTAHVIEYVSDNKLIRPTSEYVGPMDVEYIPIERRDENG

SEQ ID NO: 8655 - protein, 336 aa, Escherichia coli CFT073
MDKITQVLFSDIGKVTTQYVEVPHQQLKPHEVRIAPVFYGICGSDLHVLKGGHPFAKPPVVPGHEIAARVTEVGSDVKNVQPGDHVVVDPIMACMECRACKAGRFNLCEPPQVAGFRAPGFARSQHIVPARNCHVAPASLPLKVLAFAEPAACARHCVNRMPKASLESVLVIGAGTIGLSIVQALRIMGAGKITVIEPDAAKRALALKLGAAEVWAPGELAADVRFTGAIDVVAAQATLNDACTRVYAGGTVVCMGVPSGPREIPLPMMQRFERDLLNSGMYIPEDFDAVIEWLADGRFDTSELVTDLFAIEDAAAAFERAQQNDSIKVMLQFAPE

SEQ ID NO: 8656 - protein, 448 aa, Francisella tularensis subsp. tularensis SCHU S4
MALHGKKDTIDNLDFFEQSLPKFKLPLNSQDPLEVYQEIKDELMLDGNSKQNLATFCQTEVDDFIHKLMDDCIDKNMIDKDEYPQTAEIESRCVNILANLWNSSAENAIGCSTTGSSEAAMLGGMAMKWRWRDKMKAQGKDYTKPNLVTGPVQVCWHKFARYWDIELREIPMSNESLIMTPEAVLERCDENTIGVVPTLGVTFTGQYEPVEQVCKALDDFERQTGVDIPVHVDAASGGFLAPFVEPELKWDFRLPRVKSINSSGHKFGLSPLGVGWVIWADKKYLPDDLIFNVNYLGGNMPAFALNFSRLGGQIVAQYYNFVRLGFEGYKKVHQLCYDVAEYIAKELRKMEIFEIIHAGEGGIPAVSWSLKATKEYSLFDISEKVRAKGWQIAAYTMPNNREDLVVMRVLVRRGFSYDLAQLMIRDLVAVIDSLEGKLKILKRSSFAH

SEQ ID NO: 8657 - protein, 324 aa, Oryza sativa (japonica cultivar-group)
MELPADGSALARQGSIYSLTFDEFQSALGSAEKDFGSMNMDELLRNIWTAEESQAIAPAAAAASAAAVVGDAQQQQQPIQRQGSLTLPRTLSQKTVDEVWRDIMGLGGSDDEDPAAAAAAAAPAQRQPTLGEMTLEEFLVRAGVVREDMGQTIVLPPQAQALFPGSNVVAPAMQLANGMLPGVVGVAPGAAAAMTVAAPATPVVLNGLGKVEGGDLSSLSPVPYPFDTALRVRKGPTVEKVVERRQRRMIKNRESAARSRARKQAYIMELEAEVAKLKEQKAELQKKQVEMIQKQNDEVMERITQQLGPKAKRFCLRRTLTGPC

SEQ ID NO: 8658 - protein, 259 aa, Ralstonia metallidurans CH34
MENASTAHPFSLTGRVALVTGGAQGLGQAIAAGLAAAGAHVLICARNAARVDEAVAQLRANGLGAEALVLDITDEAAVAAAFDDIVACHGRLDILVNNAGARNRNSMAHLDAADLRQMLETNLVAPYALCRHAAQWMQRGGYGRIVNVTSIAGQVARANDVLYPATKGGLDALTRAMAADLGRQGITVNAIAPGYFATEPNQTMVADKTVAEWLRNRTSLGRWGQPEEVAGAVVFLASPAASYVTGQVLAVDGGYLGHF

SEQ ID NO: 8659 - protein, 192 aa, Pirellula sp. 1
MSRFLLLTLALGCLMNAPQPVSAADSTADHECVLAHEAKTIEGKEVDLHDYEGKVVLIVNVASKCGYTKQYAGLQSLYEAHKDDGLVILGFPCNQFGSQEPGTNADILEFCSARYNVTFPMMGKVDVNGDDASPLYKQLTSVEAKPAGKGPISWNFEKFLIGRDGQVVGRYKSKVAPSDEELVSAIKSALKG

SEQ ID NO: 8660 - protein, 151 aa, Triticum aestivum
MSIVRRSNVFDPFADLWADPFDTFRSIVPAISGGSSETAAFANARVDWKETPEAHVFKVDLPGVKKEEVKVEVEDGNVLVVSGERSREKEDKNDKWHRVERSSGKFVRRFRLPEDAKVEEVKAGLENGVLTVTVPKAEVKKPEVKAIEISG

SEQ ID NO: 8661 - protein, 576 aa, Candida glabrata CBS138
MQSKNRSLAHPNTTKHTQHTTENMPVPNSEANEFQALQARIDADAKEIEQWWSEPRWNKTKRTYSAREIAIRRGTFPPLTYPSSVMAKKVYKVLEKHHKEGTVSRTFGALDPVQVSQMAKFLDTIYVSGWQCSSTASTSNEPGPDLADYPMDTVPNKVEHLFKAQQFHDRKQWENRAKATSQEELDAMGPAIDYMTPIIADADAGHGGLTAVFKLTKMFIERGAAGIHMEDQTSTNKKCGHMAGRCVIPVQEHINRLVTIRMCADIMHSELVIVARTDSEAATLISSTIDTRDHYFVVGATNPDIEPFAEYMDRAIMAGVSGDELQKLEAAWIEKAGLKLFHEAFADEVNKSSVSNKQEIIKKFNDKVGPLTETSHREAKKLAKELLGKDIFFDWDLPRVREGLYRYRGGTQCSVMRARAFAPYADLVWMESNYPDFEQAREFAEGVKAKYPDQWLAYNLSPSFNWPKAMSVDEQATFIERLGQLGYIWQFITLAGLHTTALAIHKFSEDFAREGMKAYAQNVQQIEMDEGVDVLKHQKWSGAEYIDGLLKLAQGGVSATAAMGQGVTEDQFKSNL

SEQ ID NO: 8662 - protein, 496 aa, Arabidopsis thaliana
MSGAITCSAADLSALLGPNATAAADYICGQLGSVNNKFTDAAYAIDNTYLLFSAYLVFAMQLGFAMLCAGSVRAKNTMNIMLTNVLDAAAGGLFYYLFGYAFAFGESSDGFIGRHNFGLQNFPTLTSDYSFFLYQWAFAIAAAGITSGSIAERTKFVAYLIYSSFLTGFVYPVVSHWFWSPDGWASPFRSEDRLFGTGAIDFAGSGVVHMVGGIAGLWGALIEGPRIGRFPDGGHAIALRGHSASLVVLGTFLLWFGWYGFNPGSFTKILIPYNSGSNYGQWSGIGRTAVTTTLSGCTAALTTLFGKRLLSGHWNVTDVCNGLLGGFAAITAGCSVVDPWAAIVCGFVASLVLIGCNKLAELLKYDDPLEAAQLHGGCGAWGLIFVGLFAKEKYINEVYGASPGRHYGLFMGGGGKLLGAQLVQIIVIVGWVSATMGTLFFILKKLNLLRISEQHEMRGMDLAGHGGFAYIYHDNDDDSIGVPGSPVPRAPNPPAV

SEQ ID NO: 8663 - protein, 511 aa, Glycine max
MANIDIEGILKQQQPYDGRVPKTKIVCTLGPASRSVEMTEKLLRAGMNVARFNFSHGTHDYHQETLNNLKTAMHNTGILCAVMLDTKGPEIRTGFLKDGKPIQLKEGQEVTITTDYDIKGDPEMISMSYKKLPVHLKPGNTILCSDGTITLTVLSCDPDAGTVRCRCENTATLGERKNVNLPGVVVDLPTLTEKDKEDILGWGVPNKIDMIALSFVRKGSDLVNVRKVLGPHAKNIQLMSKVENQEGVLNFDEILRETDAFMVARGDLGMEIPVEKIFLAQKMMIYKCNLVGKPVVTATQMLESMIKSPRPTRAEATDVANAVLDGTDCVMLSGESAAGAYPELAVKIMARICIEAESSLDYGAIFKEMIRSTPLPMSPLESLASSAVRTANKAKAKLIVVLTRGGSTAKLVAKYRPAVPILSVVVPVLSTDSFDWTCSDETPARHSLIYRGLIPILGEGSAKATDAESTEVILEAALKSATQRGLCKPGDAVVALHRIGTASVIKICIVK

SEQ ID NO: 8664 - protein, 422 aa, Staphylococcus aureus subsp. aureus MSSA476
MKNLILSVQHLLAMYAGAILVPIIVGTSLKFTPEQIAYLVTVDIFMCGVATFLQANKVTGTGLPIVLGCTFTAVAPMILIGQTKGIDVLYGSLFLSGILVIIIAPFFSHLVKFFPPVVTGSVVTIIGINLMPVAMNYLAGGQGAKDYGDVKNILLGLMTLIIILVLQRFTTGFIKSIAILIGLVLGTIGAGLLGMVDINQVNHAGWLGIPVPFRFSGFSFDVTSTLVFFIVAIVSLIESTGVYHALSEITGKKLERKDFRKGYTAEGLAIVLGSIFNSFPYTAYSQNVGLVSLSGAKKNNVIYGMVVLLLICGCIPKLGALANIIPLPVLGGAMIAMFGMVMAYGVSILGHIDFKNQNNLLIIAVSVGLGTGISAVPQAFKGLGEQFAWLTQNGIVLGAISAIILNFFFNGIKYKQTEENVK

SEQ ID NO: 8665 - protein, 222 aa, Methanocaldococcus jannaschii DSM 2661
MSEKELLVPLDTYLASGIHIGTQQKTKDMEKFIYRVRSDGLYVLDVRKTDERLRIAAKFLARYEPEDILAVSRRIYTMGPLEEFGKYTGIRTVAGRFVPGTLTNPAYKGFMEPEVVFISDPRVDRQALKEATEIGVPIVGLCDTEHLTSFIDLVIPTNNKGKKAVALIYYLLTREYLKNRGVITDDTKLPFTYEEFLEKAANPKYRIIIQPKDKRRRRRRRK

SEQ ID NO: 8666 - protein, 394 aa, Mesorhizobium loti MAFF303099
MTDAFISHLSNELAGLKSAGLYKSERVISSMQSAEIEVGGEKVLNFCANNYLGLADSADLRKAATQALDRYGYGMASVRFICGTQEEHKQLEATISSFLGLEDTILYGSCFDANGGLFETLLGEEDAIISDALNHASIIDGVRLSKAKRFRYANNDMADLEARLKEAKDCRFRLIATDGVFSMDGIIANLKGVCDLADKYDAMVMVDDSHAVGFVGKNGRGSAEHCGVEGRVDIITGTLGKALGGASGGYTSGKSQVVDWLRQRSRPYLFSNTLMPAIAGASIKVFELIRNGDALRERLYANAARFRSQMGKLGFTLAGADHPIIPVMLGDATLAREMAARMLKRGIYVIGFSFPVVPKGQARIRTQMSAAHSTADIDRAVEAFAEVARELSII

SEQ ID NO: 8667 - protein, 152 aa, Pneumocystis carinii f. sp. muris
IDREGNLKLADFGLARAFGVPLRGYTHEVVTLWYRAPEVLLGGRQYATALDIWSIGCTFAEMATKKPLFPGDSEIDEIFRIFRILGTPDENSWPGITSYPDFKATFPKWSPKNLGELITELDGDGIDLLQKCLRYYPAERISAKKALDHPYF

SEQ ID NO: 8668 - protein, 470 aa, Escherichia coli
MPLNKKDTQGKGVKNASTVSEDTASNQEPTLHRGLHNRHIQLIALGGAIGTGLFLGIGPAIQMAGPAVLLGYGVAGIIAFLIMRQLGEMVVEEPVSGSFAHFAYKYWGPFAGFLSGWNYWVMFVLVGMAELTAAGIYMQYWFPDVPTWIWAAAFFIIINAVNLVNVRLYGETEFWFALIKVLAIIGMIGFGLWLLFSGHGGEKASIDNLWRYGGFFATGWNGLILSLAVIMFSFGGLELIGITAAEARDPEKSIPKAVNQVVYRILLFYIGSLVVLLALYPWVEVKSNSSPFVMIFHNLDSNVVASALNFVILVASLSVYNSGVYSNSRMLFGLSVQGNAPKFLTRVSRRGVPINSLMLSGAITSLVVLINYLLPQKAFGLLMALVVATLLLNWIMICLAHLRFRAAMRRQGRETQFKALLYPFGNYLCIAFLGMILLLMCTMDDMRLSAILLPVWIVFLFMAFKTLRRK

SEQ ID NO: 8669 - protein, 394 aa, Fusobacterium nucleatum subsp. nucleatum ATCC 25586
MNVLEEVKKIEQKIIQWRRDLHKIPELNLYLPKTTKYIEEKLKKMGIEYKTLVNGNAIVGLIKGNSEGKTIGLRADMDALPIEEETGLEFSSTHKGCMHACGHDGHTAMLLGAAKILNENRDKFKGNVKLLFQPGEEYPGGALPMIEEGAMENPKIDVVIGLHEGVIDERVGKGKIAYKDGCMMASMDRFLIKVKGKGCHGAYPQMGVDPIVIASEIILSLQKISSREINTNEPIIVSVCRINGGFSQNIIPDMVELEGTVRATNNETRKFIANRIEEIVKGITSANRGSYEIEYNFKYPAVINDKEFNKFFLESAKKIIGEENIFELPTPVMGGEDMAYFLEKAPGTFFFLSNPKVYPDGKVYPHHSPKFDVDENYFHIGVALFVQTVLDYLK

SEQ ID NO: 8670 - protein, 1236 aa, Nocardioides sp. JS614
MRGMSAPADVQAAAAALLGGLGAERRESFALRLDRWWPDLRAAVVELYDDPDAVARRLVAVAAAGHAARSEDLHRLDERRLLEPDWLQHPRMFGYACYTERFGGDLAGLRDRLDHLEDLGVTYLHLMPLLQPREGDNDGGYAVADYRTVRPDLGTTADLADLAGVLRARGISLVVDLVLNHVAREHEWAERARAGEPAYLAYFHHYPDRELPDAYEATLPEVFPDFAPGNFSWDDDLGAWVWTTFNAWQWDLDWANPAVLEEFADIVVTLANLGVEVLRLDAIAFLWKRLGSTCQNEPEVHAITQALRAVARLAAPAVAFKAEAIVGPRDLVQYLGLGAHAGRVSDLAYHNSLMVQVWSMLATQSTTLARHALAALPSAPATSTWITYARCHDDIGWAIDDGDAAAVGLDGPAHRRFLADWYAGDFPGSWADGLVFQHNPETGDKRISGTAASLAGLSEDTDAGLARIFLAHAIVAGWGGIPVVWSGDELGQPNDPDWATEPGHEDDNRWAHRPRLDGAARRTAPRPAHGPGPGLQRARPPVPGPGRPAAAARLRGQRGPPRHRRGRARVRAAAPERRDGDPLQRHDHAAAVPDPPAGGVRHRCAVRRARRAPDHRGRGRPGLAAAVRRLVGGRQHRSPDTSPEALGPGSTLDSRDPVREGGQDLPRPGEPCARPGLGRRRQGRVRLPGRHVRLRQVHLPAAGAARVPRDLRPDLRRRQGDQPARQLEGAADAPPDRHGLPGLPAAAQQDRRGERRVRAAGDRPLALGDQPAGARDAGAGRPGGQGRPDARRALRRRAAAGRGRPGVREPADDPDRRRADRQPGPGHLGRHHEAAGPDQPHRHHRLDGHPRRRHRRPDAQAGHRARRRPGRARPGAGHLRLPALTPSTDCRAPTPERGPRHPHAASLRLLRARPGPAPQPVDAPGGDPDPLRVPHAGGPGGAAQPAGHEGCRPVGLGAADHGVPVQGARRQPGLHQRGHRRAEGPDHQGHRGEPGGRRLPLRDQGGGLREDQGPPRRGQVRGAQPGRNRRRHAGVGLDHARGPRRVRRHRERDRRPRRSVERARPAPDRGPGAPGPAGDAVGRVLDRRVPGGRGAAAGGEHDPARGLRAPPGDRHHAAGRCVHPLHRAAVHHGVIGDRGDRGRGVRRHPRRVHVVRGPRPAGGPGRLHPVDRGRGVHRRSHLGRGARPGPDAAADTRADAQIPQSLTRARYRRGVLFPEHVKADRCVSSPVPHAIA

SEQ ID NO: 8671 - protein, 179 aa, Glycine max
  misc_feature (64)..(64): Xaa can be any naturally occurring amino acid
  unsure (1)..(179): unsure at all Xaa locations
GFGFGDGFGLFGGLGYLAFGEETKDIITTNLGPGVISVLVQLGLCVNLFFTFPIMMNPVNEVKXRRFCGSRYCLWLRWVMVLAISLVALLVPNFAVFLSLVGSSVYVVLSFVLPAMFHCMVFREELGWRCVLWDGAIAVFGFVIAVTGTFTSVMERFFGLPLHHDSAQNNLFGDNHFGC

SEQ ID NO: 8672 - protein, 586 aa, Prochlorococcus marinus str. MIT 9312
MKQIDSEKKLDRSKLYKLLKTIYSSNTTEEINFISNQLLQILDDFSEKSAYEEISDNEKWNESHSVLITYADSIYKNGEKTLITLRDLLTKHFGSLSKVVHILPFLKSTSDGGFAVSSYDSLEEKFGGWDDLKSISKNHVLMADLVLNHVSSSHPWVQQFIKSQEPGISNVFSPEQNLDWSNVVRPRSSSLFSQINTEDGPKQVWTTFGPDQIDLNWHNPKMTLEFLNLIITYLSNGIKWLRLDAVGFIWKESGTTCLHLPKAHSIVTLLRVLLNNLLDDGVLITETNVPQKENLSYLIPDNEAHMAYNFPLPPLLLEAIITSRADILNLWISDWPILPDDTTLFNFTASHDGVGLRALEGLMNEQRIKGLLINCEKRGGLVSHRRLSNGEDKPYELNISWWSAMEDSSRDSNRFQFERFILTQLLVMALKGVPAFYLPALLASENDIKSFSMTGQRRDLNREKFRLDNLLSVLNNPESKANKNLNYLRNAMDIRSQSKQFHPCSGMKCLSKGRSDIVVIKRGNGPESVFAIHNMTDNKINYQLNDNDLPEIIDNDFNMRDFLTATKYNWKNISLDPFQVIWLGGF

SEQ ID NO: 8673 - protein, 160 aa, Dechloromonas aromatica RCB
MSQTLYDFSAQRLNGEPQDFEAYRGKVLLIVNTASECGFTPQYTGLEELYWMFKDRGFVVLGFPCNQFGGQEPGDAEAIGQFCQTRFDVTFPLFAKVDVNGDSAHPLYTWLKHEAAGVLGTEAIKWNFTKFLIDREGKVVHRYAPATRPDELVEAVEAQL

SEQ ID NO: 8674 - protein, 362 aa, Solanum capsicoides
WDTSVAIEVKVGDSIEIVRFFHCYKRGVDRVFVDHPMFLEKVWGKTGSKIYGPKAGQDYLDNELRFSLLCQAALEAPRVLNLNCSKYFSGPYGEDVLFIANDWHTALIPCYLKSMYQSRGIYLNAKVAFCIHNIAYQGRFAFSDFPLLNLPDEFRGSFDFIDGHEKPVKGRKINWMKAGILESDRVVTVSPYYAQELVSAVDKGVELDNVLRKTSITGIVNGMDTQEWNPATDKYTDVKYDITTVMDAKPLLKEALQAAVGLPVDRRIPLIGFIGRLEEQKGSDILVAAIHKFIGLDVQIVVLGTGKKKFEQEIEQLEVLYPNKAKGVAKFNVPLAHMITAGADFMLVPSRFEPCGLIQLHA

SEQ ID NO: 8675 - protein, 744 aa, Zea mays
MATADQSRIFMKDVKRVIIKLGNPIPIYGIERVREKEGIERAERAREKVGTAVVTRHDGRVSTGNFGVLCEQVKEINALGYEVIIVSSGAVGVGKQRLNYRKLVNSSFADMQKPQTELDGKACAAVGQSGLMALYDMLFTQLDVSSSQLLVTDSDFENPNFRERLRETVESLLDLKVVPIFNENDAISTRRQPYEDSSGIFWDNDSLAALLAAELNADLLIMLSDVEGLYSGPPSDPQSKIIHTYVNEKHGKLISFGEKSSVGRGGMQAKVKAALVASNSGTPVVITSGSASGSIIRVLQGEKIGTLFHKDASLWEPSSDVSACEMAVTARECSRRLQNLSSDERNKILLDVADALEKNENLIRTENEADVAAAQDAGYEKFLVDRLTLKPGKISALAKSIRTLARMEDPINQILKRTEIAENLILEKTSCPLGVLLVIFESRPDALVQIASLAIRSGNGLLLKGGKEAMRSNKVLHKVITGAIPSNVGEKLIGLVTSRDEIADLLKLHDVIDLVIPRGSNKLVSQIKTSTKIPVLGHADGICHVYIDKSANMNMAKQIVMDAKIDYPAACNAMETLLVHKDLIKAPGLDDLLLSLKTKGVAIFGGPVAHEVLCIPEANSFHHEYSSMACTIEFVDDVQSAIDHIHCYGSAHTDCIVTTDDKVAETFLRQVDSAAVFHNASTRFSDGARFGLGAEVGISTGRIHARGPVGVEGLLTTRWIMRGSGQVVNGDNDIAYTHKNLPLP

SEQ ID NO: 8676 - protein, 354 aa, Solanum incarceratum
VKVGDSIEIVRFFHCYKRGVDRVFVDHPMFLEKVWGKTGSKIYGPKAGQDYLDNELRFSLLCQAALEAPRVLNLNCSKYFSGPYGEDVLFIANDWHTALIPCYLKSMYQSRGIYLNAKVAFCIHNIAYQGRFAFSDFPLLNLPDEFRGSFDFIDGHEKPVKGRKINWMKAGILESDRVVTVSPYYAQELVSAVDKGVELDNVLRKTSITGIVNGMDTQEWNPATDKYTDVKYDITTVMDAKPLLKEALQAAVGLPVDRKIPLIGFIGRLEEQKGSDILVAAIHKFIGLDVQIVVLGTGKKKFEQEIEQLEVLYPNKAKGVAKFNVPLAHMITAGADFMLVPSRFEPCGLIQLHA

SEQ ID NO: 8677 - protein, 242 aa, Prochlorococcus marinus str. MIT 9312
MFKFLKNIMNNEEPTLNNDINSIHRILKTDITRNPNPQEEEIIFGCGCFWGAEKCFWKLPGVVTTSVGYAGGDKSNPTYYEVCSGLTGHSEVVRVIWNKSEIDISDLLKMFWECHDPTQKNRQGNDMGTQYRSAIYFKKENNKKIIIASKEQYQKELNKKNLGLIETEIKMIDTYFYAEQYHQQYLASPGSRQYCSASPTKVKLGDFPGSKYKLKEHIWENFNWQVDKCVLRSDNNPINNNI

SEQ ID NO: 8678 - protein, 362 aa, Solanum jamaicense
WDTSVAIEVRVGDNIEIVRFFHCYKRGVDRVFVDHPMFLEKVWGKTGSKIYGPKAGQDYLDNELRFSLLCQAALEAPRVLNLNCSKYFSGPYGEDVLFIANDWHTALIPCYLKSMYQSRGIYLNAKVAFCIHNIAYQGRFTFSDFPLLNLPDEFRGSFDFIDGHEKPVKGRKINWMKAGILESDRVVTVSPYYAQELVSAVDKGVELDNVLRKTSITGIVNGMDTQEWNPATDKYTDVKYDITTVMDAKPLLKEALQAAVGLPVDRKIPLIGFIGRLEEQKGSDILVAAIHKFIGLDVQIVVLGTGKKKFEQEIEQLEVSYPNKAKGVAKFNVPLAHMITAGADFMLVPSRFEPCGLIQLHA

SEQ ID NO: 8679 - protein, 376 aa, Ralstonia solanacearum
MPRQKAATSANPTDETIGAVDGPNAPNGRGGRRARSAASAASDDIEVVDALTDEMPASEPADIVDTPDTNDSADEPDEEEEDEEAAPEEDFRTVLQAELAADTVQHYLNRISIKPLLTPAEELHFSTRAKAGEFAARQVMIERNLRLVVSIAKGYLNRGVPLLDLIEEGNLGLMHAIEKFDPERGFRFSTYATWWIRQSIERAIMNQARTVRLPVHVIRELNQVLRAKRHLEKSGIDGRDASIEDIAHLLGKTTEEVQDVLSLNEHTTSLDTPFDLDPGTSLLDFLSDEHGASPDQEVAHRELSQLMKSWLARLSDKHRYVVERRFGLNHIEPATLEELAAEMGLTRERVRQIQQEALVKLKRHFASQGVRKDAVL

SEQ ID NO: 8680 - protein, 441 aa, Haloferax mediterranei
MQTSEPEGSSPNTAEAASQSSEPKPASESALETARRQLYRAADHLDIDPNVVERLKHPEAVHEVTVPIERDDGSVSVYTGYRAQHDSVRGPYKGGLRYHPGVTRDECVGLRMWMTWKTEVRRDGPIFGGAKGGIAVNPKDLTLDEKERLTRRFTQEIRTIIGPMKDIPAPDMGTDPQTMAWVMDAYSMQEGETVPGVVTGKPPIVGGSEGRDTAPGRSVAIIAREAIDYLSWDIEDTTVAVQGFGSVGAPAARLLDDYGANVVAVSDVNGAIYDPDGLDTHAIPTHEEEPEAVMTHDAPETFSNEELLELDVDVLIPAAVGNVLTAENADDVQANLIVEGANGPTTSAADANFAERGVPVIPDILANAGGVTVSYFEWLQDINRRTWSLERVHDELETEMLNAWSVVRDEYESRDVPWRDAAYIVALSRIAAAHDARGLWP

SEQ ID NO: 8681 - protein, 415 aa, Thermotoga maritima MSB8
MDELLEKAKKVREAWDVLRNATTREKNKAIKKIAEKLDERRKEILEANRIDVEKARERGVKESLVDRLALNDKRIDEMIKACETVIGLKDPVGEVIDSWVREDGLRIARVRVPIGPIGIIYESRPNVTVETTILALKSGNTILLRGGSDALNSNKAIVSAIREALKETEIPESSVEFIENTDRSLVLEMIRLREYLSLVIPRGGYGLISFVRDNATVPVLETGVGNCHIFVDESADLKKAVPVIINAKTQRPGTCNAAEKLLVHEKIAKEFLPVIVEELRKHGVEVRGCEKTREIVPDVVPATEDDWPTEYLDLIIAIKVVKNVDEAIEHIKKYSTGHSESILTENYSNAKKFVSEIDAAAVYVNASTRFTDGGQFGFGAEIGISTQRFHARGPVGLRELTTYKFVVLGEYHVRE

SEQ ID NO: 8682 - protein, 362 aa, Solanum luteoalbum
WDTSVAVEVKVADSIEIVRFFHCYKRGVDRVFVDHPIFLEKVWGKTGSKIYGPKAGQDYLDNELRFSLLCQAALEAPRVLNLNCSKYFSGPYGEDVLFIVNDWHTALIPCYLKSMYQSRGIYLNAKVAFCIHNIAYQGRFAFSDFPLLNLPYEFRGSFDFIDGCEKPVKGRKINWMKAGILESHRVVTVSPYYAQELVSAVDKGVELDNVLRKTSITGIVNGMDTQEWNPATDKYTDVKYDITTVMDAKPLLKETLQAAVGLPVDRKIPLIGFIGRLEEQKGSDILVAAIHKFIGLDVQIVVLGTGKKKFEQEIEQLEVLYPNKAKGVAKFNVPLAHMITAGADFMLVPSRFEPCGLIQLHA

SEQ ID NO: 8683 - protein, 353 aa, Thermotoga maritima MSB8
MIMKVVVKVGSNLLVGSSGLRKSYIAELCREVARLKSQGHEISIITSGARAAGFTYLGKGKRTQDLHIKQALCAVGQVQLMKVYENAFDFYGIKIAQILLTRDTFSNRKRYLNLRNTLIGLSEFDVVPIVNENDTVATEEITLGDNDTLAAMFSIAWDADFLVLFTTVDGVIDENGKLVERFDESVKLKDMGKSSWGTGGIRSKIESALMASRCGVKATICSGNDVSNLTRFVKGEPVGTVFEPQGRLKAKKAWIAFLSEPAGKIYVNKGAEEALKSGNSLLPVGVTGVEGTFDVGDVVEIVNEEGELVGRGIVNYSSSDLEKIAGHKSSDLKKILGYEGNKVVVHIDNMWVA

SEQ ID NO: 8684 - protein, 282 aa, Phaeodactylum tricornutum
MKFLSASIALLACATSVEAFNANKAFRFGAKAMPEVSSESATTALSAGGAEKKSYDLDITEIFDGNKKFIETKKAQDAAYFDTLGTVHSPKYLYIGCVDARAPPNMIMGTEAGTMLTVRNIANMVVNNDLAVMSAIQFGINVLKIPHVIVCGHYECGGVRASVANVDHAPPLSIWLRNIRDVYRLHARELDAIKDPEDRHRRLVDLNVIEQCVNLYKTGVIQAKRIESYQEGAPAAIPRVHPIVFDPKTGAIRKLQVDFDKYMSELDAIYDLYELENAKIPA

SEQ ID NO: 8685 - protein, 218 aa, Thermotoga maritima MSB8
MKIFLDTANLEEIKKGVEWGIVDGVTTNPTLISKEGAEFKQRVKEICDLVKGPVSAEVVSLDYEGMVREARELAQISEYVVIKIPMTPDGIKAVKTLSAEGIKTNVTLVFSPAQAILAAKAGATYVSPFVGRMDDLSNDGMRMLGEIVEIYNNYGFETEIIAASIRHPMHVVEAALMGVDIVTMPFAVLEKLFKHPMTDLGIERFMEDWKKYLENLKK

SEQ ID NO: 8686 - protein, 362 aa, Solanum mammosum
WDTSVAIEVKVGDSIEIVRFFHCYKRGVDRVFVDHPMFLEKVWGKTGSKIYGPKAGQDYLDNELRFSLLCQAALEAPRVLNLNCSKYFSGPYGEDVLFIANDWHTALIPCYLKSMYQSRGIYLNAKVAFCIHNIAYQGRFAFSDFPLLNLPDEFRGSFDFIDGHEKPVKGRKINWMKAGILESDRVVTVSPYYAQELVSAVDKGVELDNVLRKTSITGIVNGMDTQEWNPATDKYTDVKYDINTVMDAKPLLKEALQAAVGLPVDRKIPLIGFIGRLEEQKGSDILVSAIHKFIGLDVQIVVLGTGKKTFEQEIEQLEVLYPNKAKGVAKFNVPLAHMITAGADFMLVPSRFEPCGLIQLHA

SEQ ID NO: 8687 - protein, 315 aa, Thermotoga maritima MSB8
MNVLCTGEILIDFISEDKGKNLSQSELFRKKAGGSPLNVAVALKRLGREVSFLGKLGGDQFSEFLLEVMKKEGIDTTHIIFDSSCKTTLAFVARDAQGNPDFVFFREKPADTNLRPEEVNIDPAQFSFLHIGSYSLAVEPSRSAYLKVMETFLEEGKPVSYDPNVRPSLIEDRNTFVKDFLEISSKVDIVKLSDKDLEYIFQEDLETAVDKIPIKENGLLFVTMGERGCLVKFKGEKRMVPSFKVKPVDATGCGDSFTAAVIHKYLEKTPETIEDAVEIGKFANAVAAIVITRVGGVDAMPVLDEVEMFLSNQER

SEQ ID NO: 8688 - protein, 317 aa, Thermotoga maritima MSB8
MKVLLIEKPGVASVVEKEIPVPGEDQTLVKVLACGICGTDYKIFSGGTNANYPVVPGHEIVGVVERSGVFEKGQMVVIDPNRSCGKCDYCRKGMSQFCENLQATGVTEPGGFAEYVLVENSQVYPVRNVPAERAVFAEPLSCVLEGVKMVKHGFYDRILVVGAGSIGVIFGLIFKKIFPGAEIVLAEKDEKRAEYVVQTFGLKVDEPKGEYDLTVECSGTVEGFKTCFEHTGKGGMLLQFSVISKDKMVEISPFEIYRKEMKILGSYLNPFTMKEAVKIIESGEFPFEKLVTDRLDLEGVKEYLSSHKKALMKGIFS

SEQ ID NO: 8689 - protein, 556 aa, Saccharomyces bayanus
MSEITLGKYLFERLKQVNVNTVFGLPGDFNLSLLDKIYEVEGMRWAGNANELNAAYAADGYARIKGMSCIITTFGVGELSALNGIAGSYAEHVGVLHVVGVPSISSQAKQLLLHHTLGNGDFTVFHRMSANISETTAMITDIATAPAEIDRCIRTTYVTQRPVYLGLPANLVDLNVPAKLLQTPIDMSLKPNDAESEKEVIDTILALVKDAKNPVILADACCSRHDVKAETKKLIDLTQFPAFVTPMGKGSISEQHPRYGGVYVGTLSKPEVKEAVESADLILSVGALLSDFNTGSFSYSYKTKNIVEFHSDHMKIRNATFPGVQMKFVLQKLLTNIADAAKGYKPVAVPARTPANAAVPASTPLKQEWMWNQLGNFLQEGDVVIAETGTSAFGINQTTFPNNTYGISQVLWGSIGFTTGATLGAAFAAEEIDPKKRVILFIGDGSLQLTVQEISTMIRWGLKPYLFVLNNDGYTIEKLIHGPKAQYNEIQGWDHLSLLPTFGAKDYETHRVATTGEWDKLTQDKSFNDNSKIRMIEIMLPVFDAPQNLVKQAKLT

SEQ ID NO: 8690 - protein, 391 aa, Synechocystis sp. PCC 6803
MGKNLLEQLRQFTVVVADTGDIQAIETFTPRDSTTNPSLITAAAQMPQYQEIVDSTLLKAKDEAGENASIKDIVRLAFDRLAVAFGLKILQIIPGRVSTEVDARLSYDTEATIAKARYLIGEYAKAGIDKKRILIKIASTWEGIKAAEVLEQEGIHCNLTLLFGLHQAIACAEAKVTLISPFVGRILDWYKKSTGKEYDSHEDPGVQSVTTIYNYYKRFGYKTEVMGASFRNIGEIIELAGCDLLTISPQLLDQLRNTEGDLPRKLDPATVPQDIEKIVMDKATFDKMHAEDPMASEKLAEGIAGFTKALEVLEHLLEERLKVLDGQEHIKHGAEEIFHAYDLDGDGFITREEWAGTDVVFDALDRDHDGKITAAEMSAGLGAAFRLASVG

SEQ ID NO: 8691 - protein, 327 aa, Mesorhizobium loti MAFF303099
MGLLVEGRWQDRWYDTADNGGRFVRTQSQWRDWITVDGAPAEGRTRGFKAEPGRYHLYVSLACPWAHRTLIFRALKRLEGIISVSIVHHFMGPNGWTFLAEDGATGDTLYGLDFLHQIYSKADPAYSGRVTVPVLWDKKEQTIVSNESSEIIRMLNSAFDAWGDASLDFYPEDLRNEIDRVNALVYPTVNNGVYRAGFATTQRAYEEAFGELFAALDRLEERLSKQRYLVSDRITEADWRLFTTLVRFDPVYVGHFKCNLRRIADYPNLSNYLRDLYQLPGVAATVNLHHIKAHYYGSHETINPTRIVPVGPELDYGAPHDRARFAI

SEQ ID NO: 8692 - protein, 214 aa, Synechocystis sp. PCC 6803
MGLAIAVGSFLISPFSKVIPDPVVDINPVSTTARGTEKAVFAGGCFWGLEAMFEEVRGVKDVQTGYSGGTEATANYARVSGGGTDHAESIEIVYDPAQVSYGELLKIFFSVGHDPTQVNRQGVDQGRQYRSAIFATTPEQKQVAQAYIDQLEESQAFDQAIATEVNDFDAFYPAEDYHQDFVQRNPAHPYVLVHDLPKLRKFRQQYSDKLKAQS

SEQ ID NO: 8693 - protein, 260 aa, Magnetospirillum magnetotacticum MS-1
MTLETCIKARTGHVTSCMSCIEILVALYHGGILRVDPTDPKWEGRDRFILSKGQASPALYAILADVGFFDPKELEKFAQAEGIFGVHLQHTVPGVETTAGSLGLGFGSAAGLALAARMDRKNHLVVTLLGDGELYEGSIWETAMFVGHHQLNNLVTIVDRNYLCTTDFTENLIRLEPLGDKWASFGFAVERINGHDTDELMNVLAYARSRRSTKPMVIIADTVKGKGIECMSNEPIWHGAAPTGAMVEKARADLERSFLR

SEQ ID NO: 8694 - protein, 319 aa, Zea mays
MDSTASHEWLAELVGELDSIDAMTMEQLAKSLADELWDQPATTTHHQEQQQVELSDQRQQLTKTTGFPFLGDMSRRSYAEADEGFLPTTAAISAGGNDSLFSFTGGKSKQLSFASREPKHESNGGGTTAAGTPMESSKGGRRASSGVHEHIVAERMRRQKMNHQFAALASMIPDITKTDKVSLLGSTIEYVQHLRGRLKALQEERRQSSSSTGSAAESSPPLDARCCVGSPDDGGGVIPTVEADVRGTTVLLRVVCREKKGALITVLKELEKHGLSVVNTNVLPLAGSSLNITITARIEDGFSTAIELVNALNAALKKN

SEQ ID NO: 8695 - protein, 257 aa, Brassica napus
IQFLLECDEARVDYEDLYAAVMRGDQESCLLYVDKLKQRCVDGFKEGVLSIEQLASVDGLCEWVLKAIGASDPVQTYNINLSVFTSIPDLWGIDQLFPIVPIHKLDQRPGARGVLSDLTCDSDGKIDKFIGGESSLPLHELDGGGGGRYFLGMFLGGAYEEALGGVHNLFGGPSVVRVSQSDGPHSFAVTRAMPGQSSADVLRAVQHEPEIMFQSLKHRAEKLMHTKGGGEDEDDEELNNVVACLDRSFNNMPFLAT

SEQ ID NO: 8696 - protein, 462 aa, Pseudomonas putida KT2440
MHVAPTTELKALLRLAGPLIASQLAHMLMVLTDTLMMARISPQALAGGGLGAASYSFVSIFCLGVIAAVGTLVAIRKGANDIEGATRLAQNGLWLAWALALFAALVLWNLEPVLLLFGQKPENVASAAEFLTLLPLALPGYLTFMALRGFTSALGRSTPVMVISLFGTVLNYLFNVALIEGMFGLPKLGLMGIGLVTAVVSMGMATALALYIRWHPAYTAYPLRKGLSRPSLAALRELWRLGLPIGGTYMVEVGLFAFAALCMGVLGSTELAAHQIALQIVSTAFMVPTGLSYAVTMRVGLYYGAGNLLAARSAGRVGIGFGAMIMFAFATLFLLLPEALVGLFIDRNDPAFAAIFQVAVQLLMVAAWFELFDGMQTIAMGSIRGLKDAKTTFLIGLVCYWLVGAPSAWLFTFTLGGGAVGIWWGLALGLACAAVALTFGFEWRMKRLLGKAGVRTEAAVSA

SEQ ID NO: 8697 - protein, 162 aa, Brassica napus
MASPLLPTSTSPDHLPTGGGDPQLLSSLRVLFSRVLSSARHATSDARPWAELVDRSAFSRPPSLSEAASRVRKNFSYFKSNYITLVAILLAASLLSHPFALFLLASLAASWLFLYVFRPSDQPLVIGGRTFSDLETLGMLCLCTVVVMFMTSVGSLLMSTLA

SEQ ID NO: 8698 - protein, 438 aa, Hypocrea jecorina
MGQTLSEPVVEKTSEKGEDDRLIYGVSAMQGWRISMEDAHTAELNLPPPDNDTKTHPDRLSFFGVFDGHGGDKVALFAGENIHNIVFKQESFKSGDYAQGLKDGFLATDRAILNDPKYEEEVSGCTACVTLIAGNKLYVANAGDSRSVLGIKGRAKPLSNDHKPQLETEKNRITAAGGFVDFGRVNGNLALSRAIGDFEFKKSAELSPENQIVTAFPDVEVHELTEEDEFLVIACDGIWDCQSSQAVVEFVRRGIAAKQDLDKICENMMDNCLASNSETGGVGCDNMTMVIIGFLHGKTKEEWYDEIAKRVANGDGPCAPPEYAEFRGPGVHHNYEDSDSGYDVDADSGGKFSLAGSRGRIIFLGDGTEVLTGSDDTEMFDNADEDKDLASQVPKSSGKTDAKEETEAKPAPEAESSKPADGSEKKQDEKTPEESKKD

SEQ ID NO: 8699 - protein, 542 aa, Methanocaldococcus jannaschii DSM 2661
MAMAGAPIVVLPQNVKRYVGRDAQRMNILAGRIIAETVRTTLGPKGMDKMLVDELGDIVVTNDGVTILKEMSVEHPAAKMLIEVAKTQEKEVGDGTTTAVVIAGELLRKAEELLDQNIHPSVIINGYEMARNKAVEELKSIAKEVKPEDTEMLKKIAMTSITGKGAEKAREQLAEIVVEAVRAVVDEETGKVDKDLIKVEKKEGAPIEETKLIRGVVIDKERVNPQMPKKVENAKIALLNCPIEVKETETDAEIRITDPAKLMEFIEQEEKMIKDMVEKIAATGANVVFCQKGIDDLAQHYLAKKGILAVRRVKKSDMEKLAKATGARIVTKIDDLTPEDLGEAGLVEERKVAGDAMIFVEQCKHPKAVTILARGSTEHVVEEVARAIDDAIGVVKCALEEGKIVAGGGATEIELAKRLRKFAESVAGREQLAVKAFADALEVIPRTLAENSGLDPIDMLVKLRAAHEKEGGEVYGLDVFEGEVVDMLEKGVVEPLKVKTQAIDSATEASVMLLRIDDVIAAEKVKGDEKGGEGGDMGGDEF

SEQ ID NO: 8700 - protein, 300 aa, Triticum aestivum
  misc_feature (226)..(226): Xaa can be any naturally occurring amino acid
  unsure (1)..(300): unsure at all Xaa locations
MDRYEVVRDIGSGNFGVAKLVRDVRTKEHFAVKFIERGHKIDEHVQREIMNHRSLKHPNIIRFKEVVLTPTHLAIVMEYASGGELFARICPPGRFSEDEGRYFFQQLISGVSYCHSMQVCHRDLKLENTLLDGSVAPRLKICDFGYSKSSVLHSQPKSTVGTPAYIAPEVLSRREYDGKVADVRSCGVTLYVMLVGAYPFEDPDEPRNFRKTITVSTHPFPPDLSXKLLHHLLSDASHCVTTKLHCWCLPQRILSVQYSVPDYVRVSMDCIHLLSRIFVGNPQQRITHPRRSRTHPWVPQ

SEQ ID NO: 8701 - protein, 221 aa, Triticum aestivum
  misc_feature (186)..(186): Xaa can be any naturally occurring amino acid
  unsure (1)..(221): unsure at all Xaa locations
MAVWLARRAVRRLASELRSHGPWPWPLSSSTVPVLGVPSGDQSRGFCSVRRFAGDSAAVEEPENGLAAGDLQFVDFPGGKLSFVGEMNFLPESQRERINCYRILDDDGGTIYSSRFQEVSKELALKMYSNMVTLQIMDTIFYEAQRQGRISFYLTSNGEEAINIASAAALSAQDIVLPQYREPGVXLLWRGFTLQEFANQLVWEQSWITVKGRQMPDTLKD

SEQ ID NO: 8702 - protein, 269 aa, Chromobacterium violaceum ATCC 12472
MKQKFVAAAVQMVSGCGLEANLARADQLLGEAAARGAGLAVLPEYFCLMGAKETDKVAIREPFGGGPIQQALSEMARRHGLWLLGGTVPLVCEEEGKVFNSSLLYNPQGEVAARYDKIHLFGFTGQGESYCESNTIRPGVTPTKAETPLGDIAFGICYDLRFPELFRMLAPVDLLILPAAFTATTGEAHWEPLLRARAIENQCYLIASAQGGRHENGRQTHGHSMIIDPWGRILAELPSGEGVITAEIDPEWTDSVRSRLPALAHRVIR

SEQ ID NO: 8703 - protein, 227 aa, Brassica napus
  misc_feature (144)..(144): Xaa can be any naturally occurring amino acid
  misc_feature (196)..(196): Xaa can be any naturally occurring amino acid
  unsure (1)..(227): unsure at all Xaa locations
MIKLWRWYQRCLTVHPVKTQVISSGFLWGFGDVTAQYITHSTAKPPPPLLRLSDKDKEADKDAEFKVNWKRVAITSMFGLGFVGPVGHFWYEGLDKFIKLKLRYVPKSTRFVAAKVAMYGLIFGPIDLLVFFTYMGYATGKNTXEVKEGLKRDFLPALALEGGAWPLLQIANFRYVPVQYQLLYVNIFCLIDSAFXSWVDQQKDAAWKQWFTTPFLTLKERGGTDGV

SEQ ID NO: 8704 - protein, 420 aa, Treponema denticola ATCC 35405
MSHKRIYQVDEKVPAGLFLPLSIQHTFAMFGASVLVPIIFGIDAGIVLFMNGVGTLLFIAITKGKAPAYLGSSFAFLGPAGLIISSMGFQYAQGAFIVTGLLGCLIAFIIYKFGTSWINVILPPAAMGAVVSLIGFELTGLTVRGGTIGANIMTESASRGDIIVFFITIGAAVLGSVLFKGFLSTISILIASIAGYIAAIFFGMVDFSIIREAGLFTLPHFQLPKFDLMAVITMLPVLLVITSEHISHQVVTSNIIGKDLLKNPGLHRSIFADNFSTALSGLVGGVPTTTYGENIGVMAVTGIYSVYVIAGAAIISICMAFISPLAALIRTVPGNVIGGITFLLYGMIGASGIRLLVDSKVDYSKSKNLILTSIVFTTGLSGLSIKFGEIEFKGMVLASLVAVALSLIFFIFEKLGVLEE

SEQ ID NO: 8705 - protein, 497 aa, Arabidopsis thaliana
MIIYILLLLNRTSHHRDSASNSSNHKCQQQKPRKDKQKQVEQNTKKIEEHQIKSESTLLISNHNVNMSSQSNNSESTSTNNSSKPHTGGDIRWDAVNSLKSRGIKLGISDFRVLKRLGYGDIGSVYLVELKGANPTTYFAMKVMDKASLVSRNKLLRAQTEREILSQLDHPFLPTLYSHFETDKFYCLVMEFCSGGNLYSLRQKQPNKCFTEDAARFFASEVLLALEYLHMLGIVYRDLKPENVLVRDDGHIMLSDFDLSLRCSVNPTLVKSFNGGGTTGIIDDNAAVQGCYQPSAFFPRMLQSSKKNRKSKSDFDGSLPELMAEPTNVKSMSFVGTHEYLAPEIIKNEGHGSAVDWWTFGIFIYELLHGATPFKGQGNKATLYNVIGQPLRFPEYSQVSSTAKDLIKGLLVKEPQNRIAYKRGATEIKQHPFFEGVNWALIRGETPPHLPEPVDFSCYVKKEKESLPPAATEKKSKMFDEANKSGSDPDYIVFEYF

SEQ ID NO: 8706 - protein, 219 aa, Chromobacterium violaceum ATCC 12472
MGEVSIQAGVPANVFRTGGRIRLVDRQRLFGHAAVTIWLTGLSGAGKSTIAYELEARLVRGGFSAVVLDGDNLRHGINRNLGFTDADRRENLRRVAEVARLMNDAGLIVICSCISPLRIDREMARDIVGERHFAEVYVSTPLAVCEQRDCKGLYAKARSGQIAHFTGVSSPYEAPEQAALALDTSALSVDECVDRLFGMVLRCCSPAAMEGGIGHEYHI

SEQ ID NO: 8707 - protein, 282 aa, Glycine max
MTGREIFHKMKEKVLGSSDPDSGKGKSKMKKNITHGFHLVKGRSGHAMEDYLVAQFKQVDDNELGLFAIFDGHSGHSVPDYLKSHLFDNILKEPNFWTEPAEAVKRAYGITDSTILDKSGELGRGGSTAVTAILINCQELLVANIGDSRAVLCKNGVAKQLSVDHEPSIESEDIRNRGGFVSNFPGDVPRVDGQLAVSRAFGDKSLKIHLSSEPYVTLEMIEDDAEFLILASDGLWKVMSNQEAVSAIKDVKDARSAAKVLTEEAKIRKSSDDISCVVVKFQ

SEQ ID NO: 8708 - protein, 146 aa, Triticum aestivum
  misc_feature (45)..(45): Xaa can be any naturally occurring amino acid
  misc_feature (59)..(59): Xaa can be any naturally occurring amino acid
  misc_feature (67)..(67): Xaa can be any naturally occurring amino acid
  misc_feature (83)..(83): Xaa can be any naturally occurring amino acid
  misc_feature (110)..(110): Xaa can be any naturally occurring amino acid
  misc_feature (116)..(116): Xaa can be any naturally occurring amino acid
  unsure (1)..(146): unsure at all Xaa locations
MASPSVFAGIAQGPEDPILGVTVAYNKDPSPVKVNLGVGAYRPEXKGKPLVLNVVKARXEQMLIQNXSRVKEYCRSLGLGRFXQLSANLLLVLTSCYSKENKVVHACLSXTGPLRXGGDFLAKDYMNALPHPQPTWGNNQNVTLTG

SEQ ID NO: 8709 - protein, 565 aa, Francisella tularensis subsp. tularensis SCHU S4
MKKYITGEKLFDTSKHATNVAEYIVARLVDLGITHSFCIPGDFSFALDCALINNPKLNNIVNANELNASYAADGYARVKGAAILSTTYAVGELSALNGVMGSKAENLVVFHLVGSPGDGAVGKKRQVYHTLGDGVFGNFFDLSASAACVSAVITPENARREMNRVIAEAFKYRKPAYISVSLDSGNRPVTDITPDDIDCSYLKSESHQLELATNLVLEHLSKAKKVVAIPAIKLDRFGVTEKAINLIEKLNIPFSIMPHDKSVISETHPNYVGFYAGLLSDTNTAEIVEGSDLIINLGDALWSDFNTAGFTNNLDLNKVLNLGPLFVEDNKTYLADVYLSELLDALLEKVESINYRPNYSRMKIQDTTITKEKLTLRALYTQVLKFLENTDSLVVETGSSSLNMPKLPLPEGVKYFNQTLWGSIGWATPAALGVALANPDSRTILITGEGSHQLTLNELGVMGRYKINPIILYINNDGYMIERALELDPNPSYDDIAQLNYTKLPEAFGCNDWLAIRVKTSEELAEALKKAREHQSGVYIEVITGKYDYGNALDFFNNHLKEMYS

SEQ ID NO: 8710 - protein, 477 aa, Klebsiella pneumoniae
MKKTTLAMSALALSLGLALSPLSASAAETASSATNAQQMPSLAPMLEKVMPSVVSINVEGSTTVNTPRMPRNFQQFFGDNSPFCQDGSPFQSSPFCQGGGQGGQPDGGQQQKFMALGSGVIIDAAKGYVVTNNHVVDNATTIKVQLSDGRRFDAKVVGKDPRSDIALIQIQDPKNLTAIKLADSDALRVGDYTVAIGNPFGLGETVTSGIVSALGRSGLNVENYENFIQTDAAINRGNSGGALVNLNGELIGINTAILAPDGGNIGIGFAIPSNMVKNLTEQMVKYGQVKRGELGIMGTELNSELAKAMKVDAQRGAFVSQVMPGSAAAKAGIKAGDVITSLNGKAISSFAALRAQVGTMPIGSKVELGLLRDGKPVTVTVELQQSNQTQVDSSTIFNGIEGAEMSNKGQDKGVVVNNVKAGTPAAQIGLKKGDVIIGANQQPVKNIADLWKIFDAKPSVLALNIQRGDASIYLLLQ

SEQ ID NO: 8711 - protein, 396 aa, Cucurbita moschata
MAELIQDKESAQSAATAAAASSGYERRNEPAHSRKFLDVRSEEELLSCIKKETEAGKLPPNVAAGMEELYQNYRNAVIESGNPKADEIVLSNMTVALDRILLDVEDPFVFSSHHKAIREPFDYYIFGQNYIRPLIDFGNSFVGNLSLFKDIEEKLQQGHNVVLISNHQTEADPAIISLLLEKTNPYIAENTIFVAGDRVLADPLCKPFSIGRNLICVYSKKHMFDIPELTETKRKANTRSLKEMALLLRGGSQLIWIAPSGGRDRPDPSTGEWYPAPFDASSVDNMRRLIQHSDVPGHLFPLALLCHDIMPPPSQVEIEIGEKRVIAFNGAGLSVAPEISFEEIAATHKNPEEVREAYSKALFDSVAMQYNVLKTAISGKQGLGASTADVSLSQPW

SEQ ID NO: 8712 - protein, 542 aa, Aspergillus fumigatus
MIEAKMTPFEFNQHVNADRLARKLSARQVQMIAIGGTIGTGLFLGTGKALATGGPASMLISYAICGGIVFVTMLSLGEMAAFIPIAGSFCTFAGRFVDDALGFALTWNYWFNDAVSTAADVIALQLLLQYWTDNFPGWAISLIFLIFVILLNVMSVRIYGEIEYWLSLLKVITIIIFIILGIVVNCGGNKDHKYIGDKYFYVGDAPFVGGIGGFASVFVTASFAYGGTESIAITAGETKDPAKNLPRVVRNVFWRIVLFYIISIILIGLNVPYNYPNLSKKTTATSPFTIVFMEAGSAVAGSFINAVLMTSVISAANHALFAGSRLLYTLAVDGHAPHFFGHLNRFQIPWVAVLATSLVSGLCFGASYIGAGQLWTWLQNETSIVGVSNQISWVCIGIASLRFRAAIRRQNLEHLLPFKNWTYPVGPIIAVGLNIVLILVQGWSCFSPSFQAVDFVSFYIEIPIMIVMFLAWKLVKQTRFVHLDEMDLVTDRYDLNAEHAESDGNADGDSPSRVGRILHIKQLQSEKGVLGKLKRVGMWLFL

SEQ ID NO: 8713 - protein, 370 aa, Solanum tuberosum
MNSSTYTQFVASKRMGICDPIHQIGMWGDFKGSSFPDTLILEVENCLENEMPIMEKRLENEIEEPSQVTVGMSNRYEPETTKRIDKVRRRLAQNREAARKSRLRKKAYVQQLENSKLKLLQLEQELERNRQQGLYVGDGLDASQIGCSGTANSGIASFEMEYGHWVEEQDRQTDDLRNALNSQMGEIELRILVESCLNHYFDLFRLKATAANADVLYLMSGTWKTSAERFFLWIGGFRPSELLKVLTPHVEPLSDQQIQEVSNLTQSCQQAEDALSQGMVKLHQILAEAVAAGTLGEGIILPQMTATIEKLEALVRFVNQADHLRQETLLQMSCILAAHQSAQGLLALGEYFKRLRALSSLWAGRLSEPA

SEQ ID NO: 8714 - protein, 409 aa, Pyrobaculum aerophilum str. IM2
MSEQTVQVKTTGKILQSPCGPIIHGLEDVLIKSTSISDIDGEKGILWYRGYRIEELARLSTYEEVSYLILYGRLPTKRELEDYINRMKKYRELHPATVEVIRNLAKAHPMFALEAAVAAEGAYDEDNQKLIEALSVGRYKAEEKELAYRIAEKLVAKMPTIVAYHYRFSRGLEVVRPRDDLGHAANFLYMMFGREPDPLASRGIDLYLILHADHEVPASTFAAHVVASTLSDLYSSVAAAIAALKGPLHGGANEMAVRNYLEIGTPAKAKEIVEAATKPGGPKLMGVGHRVYKAYDPRAKIFKEFSRDYVAKFGDPQNLFAIASAIEQEVLSHPYFQQRKLYPNVDFWSGIAFYYMGIPYEYFTPIFAMSRVVGWVAHVLEYWENNRIFRPRACYIGPHDLQYIPLEQR

SEQ ID NO: 8715 - protein, 458 aa, Ralstonia solanacearum
MNALPARADVPVREVIDGSRLSAYQGLVLALCFAAAMLDGFDTAAIGYIAPALREAWHLTPPQLAPAFGAGLFGLMLGSMGLGPVADRFGRKPVLLMSVLVFGVATLACAASDSLNTLVMLRFLTGLGLGGAMPICITLSAEYSPQRHRMLLVTLSWSGFTSGLALGGLVAAEILPVYGWRGVLVAGGVTPLVLLPVLALWMPESVQFLAQRPQCADALRQIVTRIAGHDHGDGVTFIGDRPAQEGAPFPGRNLFSDGMAQRTVLLWAAFFCSLFVFYLLTSWLPVVMRDQGLTLTEAARVGAMVPLGGTIGAIALALLMDRAGSPRALIAAYFCGAIAVAAIGLAIGNVAALTAVVFVVGFGIAGAQNGINLLAAQMYPTEARATGVSWALGVGRGGSITGSLVGGTLMTTVGSVQTLFGIIALPALVASLALFALLLRPAAGQTGAGRPGNGASLV

SEQ ID NO: 8716 - protein, 86 aa, Campylobacter coli RM2228
MNFQPLGKRVLVKRVEETKTTASGIIIPDNAKEKPLMGEVVAVSKEITDIANGDKIVFAKYGGTEIKIDNSEYLVLNLDDILGILK

SEQ ID NO: 8717 - protein, 545 aa, Campylobacter coli RM2228
MAKEIIFSDEARNKLYEGVKKLNDAVKVTMGPRGRNVLIQKSFGAPSITKDGVSVAKEVELKDSLENMGASLVREVASKTADQAGDGTTTATVLAHAIFKEGLRNITAGANPIEVKRGMDKACEAIVAELKKLSREVKDKKEIAQVATISANSDEKIGNLIADAMEKVGKDGVITVEEAKSINDELNVVEGMQFDRGYLSPYFITNAEKMTVELSNPYILLFDKKIANLKDLLPVLEQIQKTGKPLLIIAEDIEGEALATLVVNKLRGVLNISAVKAPGFGDRRKAMLEDIAILTGGEVISEELGRTLESATIQDLGQASSVIIDKDNTTIVNGAGEKANIDARVNQIKAQIAETSSDYDREKLQERLAKLSGGVAVIKVGAATETEMKEKKDRVDDALSATKAAVEEGIVIGGGAALIKAKAKINLDLKGDEAIGAAIVERALRAPLRQIAENAGFDAGVVVNSVENAKDENTGFDAAKGEYVNMLESGIIDPVKVERVALLNAVSVASMLLTTEATISEIKEDKPAMPDMSGMGGMGGMGGMM

SEQ ID NO: 8718 - protein, 400 aa, Vibrio sp. Ex25
EIRTIKLEGGNDVDLVAGQEFTFTTDTSVVGNKDKVAVTYAGFAADLNVGNTILVDDGLIEMEVISKTETEVKCKVLNNGALGENKGVNLPGVSVNLPALSEKDKNDLKFGCEQGVDFVAASFIRKASDVQEIREVLAANGGENIHIISKIENQEGVDNFDEILELSDGIMVARGDLGVEIPAEEVIFAQKMMIEKCNRARKMVITATQMLDSMINNPRPTRAEAGDVANAVMDGTDAVMLSGETAKGKYPVEAVTIMAQIANRTDSALKAELGSRLDSPRLRITEAVCKGAVDTAEKLAAPLIVVATEGGKSARSVRKYFPTANILALTTNKKTAAQLVLTKGVTPVVVDSIESTDAFYVAGKELALESGLGNKGDIVVMVSGALVASGTTNTASVHVL

SEQ ID NO: 8719 - protein, 383 aa, Xanthomonas campestris pv. campestris str. ATCC 33913
MRILVTGGTGYIGSHTCVELARRGHEICIVDNLSNSSERVLDHLAHLIGARPAFHCMDVRAPELAELMQRERIEAVIHFAALKAVGESVREPLRYFNNNVTGTLALLRAMRSAGVANLVFSSSATVYGDENSSPIEEHAPLKAINPYGRTKLMMEEMIGDLSAAWPQFNAALLRYFNPVGAHPSGYLGEDPRGVPNNLMPYIAQVAVGRRDALQVFGDDYPTPDGTGVRDYLHVMDLARAHVDAIEYLHHERQGLVVNLGTGRGHSVLEVAAAFERASGRRIPLQFAPRRDGDVAVYYASTALANRLLGWKAQYDLERMCADTWRWQSLHPEGYAQSRLVRPRATAPMGERVAPLRKLLPGSDGRRRHEPARALLPAHGHSGA

SEQ ID NO: 8720 - protein, 866 aa, Idiomarina loihiensis L2TR
MNSFWTFLQLIFVILQVTSLALYALLPAPWSDTVLVAMILFSLIIGIVIWWWSRRNALTAPFRQPFLSSDSLQLFEQVFNDLPTRVYWRDPELKLLGGNRAFANDFGIDPESLAGKTDAEIDSLASNDVLLERDRKTFSQQAPSVNAEIELKVSGKSQWVEHSSVPLYDDDHNIIGILGSYYDISGIKSVAEEMEKAKETAERANQSKGEFLANMSHEIRTPINAIVGMANLCLKTELTQKQKRYIKVIDSSSQALLGVINDILDFSKIDAGKLTVERIPFDLQDVLTSLADMFAYRAYDKDLEFIINLPANIPTRLIGDPLRLNQVLVNLISNAIKFTEDGEINVAVNLLDSSRDNVLLRISVTDTGIGMDEEQRANLFKAFTQADTSTTRKYGGTGLGLAISRRLILLMGGDIGVTSAAGQGSTFYIEVELPLQTEQDNSHHQYLLQKLKGVRILAIDDNLSTREMLYEMLRSYQVDVKVCRTAEQALQVFQLSVEDNNPYQLVLVDWRLPGMDGLEFCQKITERYAEDIRPKMTLATGYYAEELSEKAKQAGVNDIISKPFTASTLGRSLTSTLFQRELSDADDADSGDGIPESILRAPILVVEDNEINQQVAREILSSHKFKVDIVENGQLAVEAVHNKNYSLVLMDIQMPVMDGLKAAQTIRADFNYQQLPILAMTANAMSGDEERSLAAGMQGHIAKPIDEQQLIKAIIKWAVPGDYTNNQQPEVPPESKQDEVNKPPVRIPQVKGIEFETALKRLQYNVELYLKLVEQLYETYQGSATKVSDFITRGQHESARRYFHSLKGAAANLGFTQLQSKAADLEQFMAEGNIDKVADQITELEKRLRYAHQAAVDLEAIQQHQS

SEQ ID NO: 8721 - protein, 404 aa, Streptococcus pyogenes SSI-1
MLVGLSFQHLFAMFGATVLVPILVGIDPSVALLSSGLGTLAHLSVTKFKIPAYMGSSFAYIAAMQLLMKTNGIGAVAQGAMTGGLVYLIVALIVKVIGNDWIDKILPPIVVGPIVMVIGLSLASTAVNDVMLKNGNYNLTYLVIGLVTLLSVIFFNIYGKGIVAIVPLLLGLLVGYVVALLVGVLTGQEIVDFTNVAQAKWFSIPSVEIPFLTYGVKFYPSAILTMAPIAFVTMTEHFGHIMVLNSLTKRDYFKDPGLEKTLTGDGFAQIIAGFLGAPPVTSYGENIGVMALNKIFSVYVIAGAAVIAALLSFIGKVSALIQSIPTPVIGGISVALFGVIASSGLKILIESKVDMDNKKNLLIASVILVSGIGGLMLQVNGLQISGVAFSTLLGIILYQVLPEK

SEQ ID NO: 8722 - protein, 392 aa, Oryza sativa (japonica cultivar-group)
MSDNLMDKVSAFGERLKITGSEVSKKMTAGMSSMSFKMKEIFQGQTPADKIVEEATSENLDGPDWSANLEICDLINTEKVNSVELIRGIKKRIMLKDARVQYLSLVLLETIVKNCEKAFSEVAAERVLDEMVRLIDDPQTVVNNRNKALMLIEAWGESGDELRYLPVYEETYKSLKSRGVRFPGRDNESLAPIFTPARSVAEAEVDANFSQQTFEDVQVHTYTAEETKEAFDVARNSIELLSTVLSSSPQQDALQDDLTSTLVQQCYQSQHTIQRMIETAGDNEAMLFEALSVNDEIQKVLSKYEQMKKPAASENAEQRPVVIPIATEHEDSATVGNEDALVRKPAGSRARSGGDDDILDDLDEMIFGKKGGSSSQEGPKKQDPKKDDLISF

SEQ ID NO: 8723 - protein, 153 aa, Glycine max
MSLIPSIFGGRRSNVFDPFSLDVWDPFKDFHFPTSLSAENSAFVNTRVDWKETPEAHVFEADIPGLKKEEVKVQIEDDRVLQISGERNLEKEDKNDTWHRVERSSGNFMRRFRLPENAKVEQVKASMENGVLTVTVPKEEVKKPDVKAIEISG

SEQ ID NO: 8724 - protein, 406 aa, Arabidopsis thaliana
MFGPTGGLGMNPSMDDMNLIQQAQRHQLVVSNLGEEIDLEIGPGEDDAAFANNSLIGGPPREPSTGEHDETKHMVLVSDLPSEDQDISKGTPAKRKKKVVKRWREEWADTYKWAYVDMKDGTARIFCSICREYGRKHRRNPYGNEGSRNMQMSALEEHNNSLLHKEALRLQTASKDKIVVDKPIYVKTVMSKSAGSIVEGALKRDPNEIEFVQSVQESVHALERVIAKNSHYVNIMERLLEPERMIVFRVPWIDDRGETHVNRGFRVQFNQALGPCRGGIRFHPSMNLSIAKFLGFQQTLKNALSPYKLGGASGGSDFDPKGKSDNEIMRFCQSFMNEMYRYMGPDKDLPSEEVGVGTREMGYLFGQYRRLAGQFQDRGYIGLLLASELKLVAMAWCTLHDLYLQI

SEQ ID NO: 8725 - protein, 442 aa, Leptospira interrogans serovar lai str. 56601
MYFESKPKIFVIMAGFFDSLKIGFGGASRILNSSFVFSTKTILLLKDLALGDDTFPIRLREAFEELGATYIKLGQLIASAPSLFPDKFVTEMQKCLDQVRPIPYSMITTIIQKELGGTLSDHFLSVEPIPIASASIAQVHSAVTKDGLDVVIKVQRPDIESTLSADLNLIYFVSVLFEKFAPGLSKSGIADMVEQFQTSILEEIDFYKEADNIEEFEKELLSMGETRARVPKVYRELSTKKILTLERFYGAPITDESSVRRYSSDPQKTLTGALEIWFSTLSRSGFFHADVHAGNLMILRDGTVGFIDFGIVGRISPRVWEGLMIFLEGLSLNRTEKIAKGLIQMDSTAKGVDEKKLSKDLEIVFSKMTEMVLKVQMGDLESLDDKKLNAILFEFREISIQNGLKIPKEFGLLIKQILYFDRYVKTMAPDIDLIRDRDKFLI

SEQ ID NO: 8726 - protein, 207 aa, Glycine max
MATLSNSTNIFWQDCQIGRPERQKLLNQKGCVVWITGLSGSGKSTLACSLSRELHSRGKLSYVLDGDNLRHGLNKDLGFKAEDRTENIRRTGEVAKLFADAGLICVASLISPYRRDRDTCRAMLPDANFIEVFMNMPLELCEARDPKGLYKLARAGKIKGFTGIDDPYEPPINCEIEIKQENGNCPTPTMMAGQVVTYLENKGFLES

SEQ ID NO: 8727 - protein, 594 aa, Xanthomonas campestris pv. campestris str. ATCC 33913
MSTAAAAQSELLPARPARFLWHYICQRPWHFGGLLVLIIGAAGCAVAVQYGMKLLVDAMSTDQRTQADVWTPLGLFIGLIAVENLFWRLGGWLGCRTVVASVVDIRVDLFRHLTGHPMRYFTEHFAGALGNRITALGTAAGQIYGGLAWKILPPIVDFIGAIVVLFTVDWRMAATLIGFVAVVAAIITGFGIRGRAKHQSFAAQAARVGGELVDAVSNVWTIKAFAARDRESARLAQEIGHEAVAHRRSWMYVEKARVIHDICLSIMAGGMLIWAISAWRGGAVSAGDVVLVSALTFRILHGSRDLALTLVDTTQQLGAIADTLQIILQPHALPDADAPLALAEGDVRFEGVRFAYPDRPAVIEALDLHIPAGQKVGIVGPSGAGKSTLIALIQRLDDVESGRVLIDGQDIRSVSQDSLRDRIAVVPQETALFNRSIADNIRYGRPEASDAEVHTAARHAFCDGFIRELPQGYNTLVGERGVMLSGGQRQRLGIARAFLKDAPILILDEATSALDTESEAEIQSALDHLMRGRTVLAVAHRLSTVIGFDRIVVLQDGRIVEDGSPAELRGRGGVFDSLWQRQAAGFEQPVAEDA

SEQ ID NO: 8728 - protein, 398 aa, Glycine max
MSLILQTPPSTTLSSASPIHRTITRYTTFSFSLRPPTTLHFNPHRSLPLIRASNSSINAASTTELDAVSAFSEIVPDTVVFDDFEKFPPTAATVSSSLLLGICGLPDTIFRNAVEMALADSECYGLENPNARLSCFVNKAFANIGSDMAKLVPGRVSTEVDARLAYDTHAIIRKVHDLLKLYNDSNVPPQRLLFKIPSTWQGIEAARLLESEGIQTHLTFVYSFAQAAAAAQAGASVIQIFVGRIRDWARNHSGDTEIESAQLRGEDPGLALVTKAYNYIHKYGHKSKLMAAAVRNKQDLFSLLGVDYIIAPLKVLQSLKESVASPDEKYSFVRRLSPQSAAKYTFSDEELVRWDEDSLSKAMGPAAVQLLAAGLDGHADQAKRVEELFGKIWPPPNV

SEQ ID NO: 8729 - protein, 318 aa, Salmonella enterica subsp. enterica serovar Paratyphi A str.
MTPIAVTLLTGFLGAGKTTLLRHILNEQHGFKIAVIENEFGEVSVDDQLIGDRATQIKTLTNGCICCTRSNELEDALLDLLDSRDRGDIAFDRLVIECTGMADPGPIIQTFFSHDVLCERYLLDGVIALVDAVHANEQMNQFTIAQSQIGYADRILLTKTDVAGDSEKLRERLARINARAPVYTVVHGDIDLSQLFNTSGFMLEENVLASQPRFHFIADKQNDVSSIVVELDYPVDISEVSRVMENLLLESADKLLRYKGMLWIDGEPNRLLFQGVQRLYSADWDRPWGDETPHSTLVFIGIQLPEDEIRAAFAGLRK

SEQ ID NO: 8730 - protein, 548 aa, Cryptococcus neoformans var. neoformans B-3501A
MSVDQINPGQAVYAQDEFSRTDDRSLLYGRKVRTHGLEAIRSHILAARSVTNIIKTSLGPRGLDKILISPDGEITVTNDGATILGQMEVEHQIAKLLVEVSKSQDDEIGDGTTGVVVLAGALLSSALSLLDRGIHPIRIADGYEKACEIAVAELDRVADTIEFSKDDVSNLMKTAKTSLGSKIVSIAHDKFASIAVEAVLSVADLERRDVDFELIKVDGKVGGSLEDTSLVKGVVIDKDMSHPQMPSVVRDAKIAILTCPFEPPRPKTKHKLDIESVEEYKKLREYEKEKFLDMIKKVKDTGANLVICQWGFDDEANHLLMQNELPAVRWVGGPEIELIAIATNGRIVPRFEDLTADKLGHAGVVRELTFGTTRDKMLVIEECANSRAVTVFVRGSNKMIIDEAKRALHDAICVARNLVRDNRVVYGGGAAEICASVAVSKRADEIPTIEQYAMRAFANALDAIPLALAENSGLSPIDTLADVKSRQVTEGNPRLGIDCLGRAENDMKKQHVYDPLISKRQQFLLATQVVRMILRVDDVIDASAFGDE

SEQ ID NO: 8731 - protein, 588 aa, Clostridium tetani E88
MNILERRILMDTLKKFTVYYKPYKGMFFIDMFCALTLSMIDLIFPLIVRYLLNDIYVNKSSSEIIYFVGLIGLGLLIMYVVRYFCQYYISSWGHIMGARMEADMREDIFLHLQKQSFSYYDNTNTGQLMSRIVNDLFDISELAHHGPEDLFISLLKILGSFIILMNINVKITSVLFFITLFMIYFSYFYNKKMKYIFKKNRVKIASVNSQIQDSLSGVRVVKSFSNEELEVEKFKKGNNEYLRTKEKGYFIMGKFFSGNGFFQGMLYLSVILVGGILIGTGKAQASDLVVYILYINIFLNPIEKLVNFTEQFQKGITGFERFLEILDSEPEIEDKLNAIELKKPKGEIEFKDVTFSYDERSTVLEGINIKIENGKTVALVGSSGSGKTTLCNLIPRFYELDSGFIKIDNKNIRDITLRSLRDSIGVVQQDVYMFAGTIKENIAYGKPEATDEEIYMAAKRANAHDFIMNLEKGYDTFVGERGVKLSGGQKQRVSIARVFLKNPPILILDEATSALDNVSEKYVQQSLDELAKNRTTLVIAHRLSTIKNADEILVLTEDGIQEKGTHEELIEKKGIYESLYNMQFKEVL

SEQ ID NO: 8732 - protein, 544 aa, Neisseria gonorrhoeae FA 1090
MTKFIFVTGGVVSSLGKGIAAASIAAILESRGLNVTMLKLDPYINVDPGTMSPFQHGEVFVTDDGAETDLDLGHYERFIDSTMTRRNSFSTGQVYENVIAKERRGDYLGGTVQVIPHITDEIKRRIHEGAAGYDVAIVEIGGTVGDIESLPFLEAIRQMRSQLGRNNTLFAHLSYVPYIAAAGEIKTKPTQHTVKEMLSIGLQPDILICRMDRKMPADERRKIALFCNVEERAIVGSYDVDSIYECPEMLHDQGIDNIITEQLQLNVQQADLTAWKKIVHAVKNPKHTVKIAMVGKYVDLTESYKSLIEALKHAGIHTETDVQITFVDSESIEKNKGDVSVLKDMDAILVPGGFGSRGVEGKIAAVRYARENNVPYLGICLGMQIALIEYARDVAGLKGANSTEFDLKCAAPVVALIDEWQTADGSVETRDESADLGGTMRLGAQEVELKAGSLAVKIYGSGHIRERHRHRYEVNNNYVSALEQAGLVIGGVSAGRERLVETIELPNHPWFFACQFHPEFTSNPRKGHPLFTAFVKAALNNKKA

SEQ ID NO: 8733 - protein, 596 aa, Treponema denticola ATCC 35405
MHKKSTFLKFAAYYKPYKFLFFFDLFCALIVSAVDLVFPQVIRYLTRVIPKIRSGEVLLFSDKTIFSFDVQASAIIYLGLIISAILLGLYIIRYFTQYFITSWGHIMGARMERDMRNDLFNHMQRLSFSYYDKNKTGDMISRIVSDLFDISELAHHGPENLFISFLKIIGSFSLLCFINVRLTLILASVTSLMFIFTFFQNKKMRKIFMLNRKTIAGINSQVQDTLSGIRVVQSFANEELESKKFDIANEAFVHSKYINYRQMGQFVGINGLLQGLFFIVTVLAGSFFVAKNELTIPDLTIYVLYINIYIAPINVLINFTEMFQKGAAGFKRFLQIIETAPDITEKEDAVELKDVKGNIKYENVDFSYNETTTILKNISIDIPAGKTLALVGPSGGGKTTICSLLPRFYDVVNGKISIDGKDIRDLTLKSLRANIGIVQQDVYLFGGTIKENIAYGKPKASDEEIIEAAKNAHIHDFIMSLEDGYDSYVGERGVMLSGGQKQRISIARVFLKNPPILILDEATSALDTENEILIQKAIEELSEERTTIVIAHRLSTIRNADRILVVTDEGIMESGTHEELLSLNGIYANLRKLDEF

SEQ ID NO: 8734 - protein, 784 aa, Bacillus cereus ATCC 14579
MKGVILAGGKGRRLRPLTCNTPKPMLPLLEKPVLEYNIELLRQHGIREIAITVQYMSTTIKQYFGDGSKWGVNLYYFEDSPPLGTAGSIKQAEQFLDETFVVISGDALTDFQLSEGIRFHEQKKRMVTMFVKEVENPLSFGLVVMNKDQEVTRYIEKPGWNEVVSNVVNTGIYIMEPEIFSYIPPRQFFDFSHDVFPLLANKNVLFAYLSEGYWLDIGTFNQYRQAQFDLLTKKLQVPIPYTEVLPMVWMGEGVTIGKGTKIHGPSFIGEGAKIGTGAVIEPYSIIGKNSIVSNYSHLQKSIVFANTHIGKYCELLETTIGERTIVEDDVTLFQKSVVADHCHIGRSTVIKQKGKLWPYKAIDSHSIVGAAGIQESEMSAGWLQKSRIVGRGNVEITPQFIVKIAMAYGSLFKKGESILIGSQENIETTSYKNLFLHAIHGIGIHTMECKEMNESLFQYSVHHLQCAGGVFIQVENENEIVIKLYGQAGMPLTYKQQKEIEQVYMSELFYYVHEKEMGRNKLVHVSMNEYIEVILEHIDIEKIQMQKFHLLINKRNDTLQHLLMLFLQRLGCTVTWIYASEQKDHVKALMKSSKANMALMFSEQGNHFELYDKHSNIYQGTDLEEVDIPDFLLESTGNIYPMSLKLGECYLLFYTQDERKSFQVRWKRDILYRIGKLFELIALQGKTFLSIVEQSPPLYLLYDEVVCSWNEKGEIMRKLLDDIERKGEGIFEGVQFKYTEKEWSYIVSDTKQPKFLVYSHARNPVIARENMKNLIEKIRQYQKV

SEQ ID NO: 8735 - protein, 413 aa, Haemophilus somnus 129PT
MTNQNIPVEISGKIKQAFIGLQMLFVAFGALVLVPLITGLDANTALLTAGIGTLLFQLCTGKKVPIFLASSFAFIAPIQYGVASWGIPATMGGLACAGLVYVALSLLVKLRGAGALQKIFPPVVVGPVIIIIGLGLAPVAVDMATGKGSNYEYGDAVLVSMITLLTTLIVAVFAKGMMKLIPIMFGIAVGYILSLFMGLIDFSPIAKASWFSLPNLTTPEFKLEAILYLLPIAIAPAVEHIGGIMAISSVTGKDFLKNPGLHRTLLGDGLATSAASLLGGPPNTTYAEVTGAVMLTRNFNPTIMTWAAVWAIAISFCGKVGAFLSTIPTFVMGGIMMLVFGSIAVVGMSTLIRGKVDVTEARNLCIISVVMTFGIGGMFVNLGELSLKGISLCAVVAIILNLILPSAKNQIED

SEQ ID NO: 8736 - protein, 354 aa, Glycine max
TRPGEDVVLLDRASRATRGKRLTKLLDDEIQEDELFWNQDALKEDEEDDNYQEEPEIADEFDSDFDQDEPVPEEEEDPNKNDDDERMHKKKRLIFPGKTLAKKKKKKKTISKLESSPKENEDEEHSGKVVEDEGGERMIRKSTRTSVIVRQAERDAIRAALQATIKPVKRKKEGEEKRMTQEEMLLEAAQTEIMNLRNLERVLAREEEVKRRAIVHKTVFNGPQIRYISKNGTSYLEFIKGSSFHSDIPTAPVQYPEQPVCPITGLPAKYRDPKTGQPYATKEAFKIIRERFLNESTNSRKDMSMGGLYDSVSGCGFSIKRKRSIMPDKNVNPDGRSLARFRRIPDFEDEDYSD

SEQ ID NO: 8737 - protein, 449 aa, Haemophilus somnus 129PT
MSAIVSLEDFLAKVEQRDGHQPEFLQAVREVFTSIWPFLEKNPKYRSEALLERLVEPERAFQFRVAWTDDKGQVQVNRAFRVQFNSAIGPFKGGMRFHPSVNLSILKFLGFEQIFKNALTTLPMGGGKGGSDFDPKGKSDAEVMRFCQALMAELYRHVGADTDVPAGDIGVGGREVGYLAGYMKKLSNQAACVFTGRGLSFGGSLIRPEATGYGLVYFAQAMLAEKGQSFAGKTVVVSGSGNVAQYAIEKALQLGAKVVTCSDSSGYVYDPEGFTQEKLTALLDIKNVKRGRVKDYAEQFGLQYVEGARPWGVKADIALPCATQNELELSDAQQLIANGVQLVAEGANMPTTIEATDAFLEAGVLFGPGKAANAGGVATSGLEMAQSSQRLYWTAEEVDEKLHRIMLDIHANCKKYGTVEGQENINYVVGANVAGFVKVADAMLAQGVY

SEQ ID NO: 8738 - protein, 343 aa, Listeria monocytogenes EGD-e
MKAVVKTNPGYDQMELKDVEEPQVYGDKVKIKVAFTGICGSDIHTFKGEYKNPTTPVTLGHEFSGVVVEVGPDVTSIKVGDRVTSETTFETCGECIYCKEHDYNLCSNRRGIGTQANGSFAEFVLSREESCHVLDERISLEAAALTEPLACCVHSALEKTTIRPDDTVLVFGPGPIGLLLAQVVKAQGATVIMAGITKDSDRLRLAKELGMDRIVDTLKEDLAEVVLGMTGGYGAERVFDCSGAVPAVNQGLPLTKKKGDFVQVGLFAEKKNAIDEESIIQREIAYIGSRSQKPSSWILALDLLANGKIDTDKMITKVYGLDDWREAFEAVMAGNEIKVLVKS

SEQ ID NO: 8739 - protein, 496 aa, Pseudomonas putida KT2440
MLYFQPNCTGRYANAAQEYAVTLYLNLAEILGARIKQGLYRPGQRLPSVRALSEEHGVSLSTVQQAYRMLEDSGMVSPRPKSGYFVSDQRQLPALPAVSRPAQRPVDISQWEQVLELVRSTPRQDVVQLGRGMPDIDSPTLKPLLRSLAQLSRRQDMPGLYYDNIHGNLALREQVARLMLDSGCRLGPADLVITTGCHEALSCSIRAVCEPGDIVAVDSPSFHGAMQTLKGLGMKALEIPTDPVTGISLEALELALEQWPIKLIQITPSCNNPLGYIMPEARKKALLSLAQRYDVAILEDDVYGDLAYTYPRPRTLKSFDDDGRVLLCSSFSKTLAPGLRIGWVAPGRYLERVLHMKYISTGSTASQPQLAIADFIAAGHYQPHVRRMRSQYQRGRDLMGDWVTRYFPAGTRVSRPQGGFMLWVELPEHLDTLRLNRALLEQGVQVAVGSIFSASGKFRHCLRMNFAARPTPQIEASVRKVGETALRLLDDESADA

SEQ ID NO: 8740 - protein, 350 aa, Listeria monocytogenes EGD-e
MRAAVLYENNVIKAEQIDEATCGKDQVRVEVKAVGICGSDIHKMQTRWKYPLPAVMGHEFAGVITEIGSEVTNVAMGDRVAGIPLEPCMECNYCKAGDFALCDNYRMVGSHFHGGFAENVVMKADNVISIGDLDFEEGAMIEPLAVSMHGVLGIQPRLGDTVIVFGIGTIGILVVQCLLLAGVKDIIAVDISDKKLADAREFGCKYTINPKNEDLKERVFAYTNGLGADIALECAGSKITQEQCLLVTKKKGKVGFLGIAYADVLLHEEAFENIFRRELTLKGFWNSYSAPFPGEEWRTSIEFVKQGRIKLKPLISHRYKLEETKEAFDMILSREHDYNKVMILPQKGDD

SEQ ID NO: 8741 - protein, 387 aa, Xanthomonas campestris pv. campestris str. ATCC 33913
MLALNYHGSRDVRVETVPDPLLVERDDLILRVTATAICGSDLHLYHGKIPDLRPGDILGHEFMGIVEEVGPDVTAVRPGDRVVIPFVVACGQCFHCLLQEFSACETTNTGKGAALNHKDMRPPAALFGFSHLYGGLSGGQAEYVRVPKANVGPLVVPDALHDEQVLFLSDILPTGYQAVVDAGVKQRSTVAIFGAGPVGLMAAACCRMLGAERVFMVDRHAYRLDFASRTYGVIPINFDEIDDPADIIVSQTDGRGVDASIEAVGFEAEGSALETALTTLKLEGSSGVALRQCIAATRRCGTVSVPGVYAGFIHAFMFGDAFDKGLTFKMGQTHVQKHMPYLLERIGNGELKPSAIISHRLPLAEAARGYEVFDKKQDDCRKVVLTP

SEQ ID NO: 8742 - protein, 349 aa, Idiomarina loihiensis L2TR
MTTTARWLPDFMENQRLLLAWPYRSDVWRKHADPARDALIKLIKQLPDNTPVSLVVPASISDSVPEALKSVQRIELDYDDIWLRDTTPLWQLNSDGQLAALSFDFDGWGGVQNVIAADKAFSQSLCSRLMCPVTNSLLIAEGGAFTHNGQGDWLIGLACIKQRNPAMTEPQIKSLLGQLLPGQRLHFFDGGLVADETGGHIDNMALFVDANTVLYAATDNTAHPDYKTCQALKKQLDKLPAYIQTIPLPLPPPQLPAREERAGVELTSSSLKRTVELPLLCSYVNVLQTSKLVVVPQFGLTTDAQAVRTVREALPERKVIAIDAREFVLGGGGLHCISHNLPKFKTDEL

SEQ ID NO: 8743 - protein, 633 aa, Sinorhizobium meliloti 1021
MSYVQSIPPHDIEAHLAEHDNKSILRFITCGSVDDGKSTLIGRLLYDAKLVFEDQLANLGRVGSPGAANGKEIDLALLLDGLEAEREQGITIDVAYRYFATSKRKFIVADTPGHEEYTRNMVTGASTADLAIILIDSRQGILQQTRRHSYIASLLGIRHVVLAVNKIDLVDFQQQVYEEIVADYMAFAKELGFASIRPIPISARDGDNVISASANTPWYRGAALLEYLETVELDPTDQAKPFRFPVQMVMRPNADFRGYAGQISCGRISVGDPVVVAKTGQRTSVKAIVTYDGELATAGEGEAVTLVLSDEVDASRGNMLVAPGARPFVADQFQAHVIWFDANPMMPGRSYILRTETDSVSATVTTLKHQVNINSFIREAAKSLQMNEVGVCNISTQAPIAFDAYKDNRATGNFIIVDRVTNATVGAGLIDFPLRRADNVHWHALEVNKSARSAMKNQLPAVLWFTGLSGSGKSTIANELDRILHAQGKHTYLLDGDNVRHGLNRDLGFTEEDRVENIRRVAEVAKLMADAGLIVLVSFISPFRDERRMARELMEEGEFIEIFVDTPLDECARRDPKGLYEKALAGKIANFTGVSSPYEPPENPELHIRTVGHEPTDLALAIEEFLDRRMEDK

SEQ ID NO: 8744 - protein, 415 aa, Streptococcus agalactiae A909
MSPLNINKNNWRALIAAIVASGTDDLNIMFLAFSMSTIITDLHLSAAQAGWIGTITNLGMLVGGLIFGLLADRYNKFKVFKWTILIFSIATGLVFFTTNLSYLYIMRFIAGIGVGGEYGIAIAIMAGIVPANKMGRISSLNGIAGQVGSISSALLAGWLAPALGWRGLFLFGLLPIVLVLWMQFAIDDKDILDQYNTDADDEPLDISIKALFDTPVLATQSLALMVMTTVQIAGFFGMMNWLPTIIQTNLNVSVKNSSLWMIATILGMCLGMLVFGQLLDKFGPRLVYGCFLLSSAICVYLFQFATTMPSMIIGGAVVGFFVNGMFAGYGAMITRLYPHHIRSTANNLILNVGRAIGGFSSVIIGMILDVSNVSMVMLFLASLYIVSFLSMLSIKQLKHQKYHTNLTQLDVKPTD

SEQ ID NO: 8745 - protein, 639 aa, Chrysanthemum x morifolium
MDSCDCFETQWPADELLVKYQYISDFFIAFAYFSIPLELIYFVQKSAFFPYRWVLMQFGAFIVLCGATHFINLWTFSSHSKTVAIVMTVAKLSTAFVSCVTALMLVHIIPDLLSVKTRELFLKQRAEDLDREMGLIIKQEETGRHVRMLTHEIRSTLDRHTILKTTLIELGRTLDLEECVLWMPSTKGMILEVSHSLHNLIPFRSTVPINLPIITEVFNSAEAIRIPHNCPLARIRTPVGSYIPPEVVAVRVPLLHLSNFEIDNWPDNSAKSYAVMVLILPMNGVRKWRDHEMELVTVVADQVAVALSHAAILEESMRARDQLMEQNFALNLARQEAEMAIHARNDFLAVMNHEMRTPMHAIIALSSLLLETELTPDQRAMIETILKSSNLLAALVNDVLDLSRLEDGSLELESEVFNLHGLFKEVVTLINPIASVKNTSMALNCDLDLPAFGIGDEKRLMQIILNVVGNAVKFTKGGHVSIQASILSPEYLQEWRTPEFCPTLTEGLFYLLAQVKDSGSGIKQQDIPHIFTKFSEPRSASNRSGGAGLGLAICKRFVNLMGGHIWIESGGLGKGTTVAFLVKLGLCNYPNDPTMQRLVPRTVPKARPHQGSGELIQHRQLDREGYQGAASFPLYNRSM

SEQ ID NO: 8746 - protein, 639 aa, Chrysanthemum x morifolium
MDSCDCFETQWPADELLVKYQYISDFFIAFAYFSIPLELIYFVQKSAFFPYRWVLMQFGAFIVLCGATHFINLWTFSSHSKTVAIVMTVAKLSTAFVSCVTALMLVHIIPDLLSVKTRELFLKQRAEDLDREMGLIIKQEETGRHVRMLTHEIRSTLDRHTILKTTLIELGRTLDLEECVLWMPSTKGMILEVSHSLHNLIPFRSTVPINLPIITEVFNSAEAIRIPHNCPLARIRTPVGSYIPPEVVAVRVPLLHLSNFEIDNWPDNSAKSYAVMVLILPMNGVRKWRDHEMELVTVVADQVAVALSHAAILEESMRARDQLMEQNFALNLARQEAEMAIHARNDFLAVMNHEMRTPMHAIIALSSLLLETELTPDQRAMIETILKSSNLLAALVNDVLDLSRLEDGSLELESEVFNLHGLFKEVVTLINPIASVKNTSMALNCDLDLPAFGIGDEKRLMQIILNVVGNAVKFTKGGHVSIQASILSPEYLQEWRTPEFCPTLTEGLFYLLVQVKDSGSGIKQQDIPHIFTKFSEPRSASNRSGGAGLGLAICKRFVNLMGGHIWIESGGLGKGTTVAFLVKLGLCNYPNDPTMQQLVPRTVPKARPHQGSGELIQHRQLDREGYQGAASFPLYNRSM

SEQ ID NO: 8747 - protein, 486 aa, Triticum aestivum
MSPASARALTVDSLNPKVLALADHLRGAVAGRAQRMQKELETNPGLYPFDEIIYCNLSNPHYLGQQPIKFFREVLALCDYPHLLNCSVTSSIFSSDAITRAREILDLIPGRAMGGYSHCQGTEGLRNAIAAGIATRDAFPCNAEDIFLTDGAAAPVHMVMHLLIRDEKDGILCPIPSHFLYTSSMALCGATLVPYYLDESGGWAVSISNLKKQLDGARSEGITVRGLVVVNPGNPTGQVLVKENQCEIVEFCRNENLVLLADEVYQENVYTDEKKFISFKKIARSMGFGEEDISLISFHSVSNGYYGECGRRGGYMEVTGFNSEVRKQVYKVASLSSCSNLAGQVLVSLVMNPPKVGDESYTSYREERDRIMLSLSRCAEAMVQAFNSLEGLTCSKAEGAMFVFPSVRLPKRAIAAAEAMNAKPDVFYALRLLENTGIVVLPGSVFGQVPGAWHFRCTILQQEEKVQLIIYRFKAFHKAFMEEFRD

SEQ ID NO: 8748 - protein, 387 aa, Vibrio vulnificus YJ016
MKNVVIVDCLRTPMGRSKGGAFRHTRAEDLSAHLMKGILARNPQVNPSEIEDIYWGCVQQTLEQGFNVARNAALLAGLPIEIGAVTVNRLCGSSMQALHDGARAIMTGDAEICLIGGVEHMGHVPMNHGVDFHPGMSKHVAKAAGMMGLTAEMLGKLHGISREQQDEFAARSHARAHAATLEGRFKNEILPTEGHAADGTLFTLDHDEVIRPETTVEGLSQLRPVFDPANGTVTAGTSSALSDGASAMLIMSEEKANELGVTIRARIKGMAIAGCDPSIMGYGPVPATQKALKRAGLSIEDMDVIELNEAFAAQSLPCAKDLGLLDVMDEKVNLNGGAIALGHPLGCSGARISTTLINLMEAKDAKYGLATMCIGLGQGIATVFERP

SEQ ID NO: 8749 - protein, 619 aa, Oryza sativa (japonica cultivar-group)
MKYVLVTGGVVSGLGKGVTASSIGVVLKSCGLRITSIKIDPYLNTDAGTMSPFEHGEVFVLDDGGEVDLDLGNYERFLDIKLTRDNNITTGKIYQSVLEKERKGEYLGKTVQVVPHITNAIQEWIERVAMVPVDGKEGPADVCVIELGGTIGDIESMPFIEALGQFSYRVAGIIISCWTLLWLSGPGNFCLVHVSLVPVLNVVGEQKTKPTQHSVRGLRGLGLTPNILACRSTKELEENVKEKLSQFCHVPAANIVTLYDVSNIWRIPLLLRDQKAHEAILKVLNLDSFARGPKLDEWVARATLFDALQDTVRIAMVGKYTGLSDSYLSVLKALLHASVDCRRKLLVDWVASTDLEDSTAIEAPDAYKAAWDLLKGANGVLVPGGFGDRGIQGKILAAKYARENNVPYLGICLGMQLAVVEFARSVMNLPEANSTEFDPNAKTPCVIFMPEGSKTHMGGTMRLGSRRTFFEVADCKSAKLYGNVSYVDERHRHRYEVNPDMVPEFENAGLQFVGKDETGRRMEIIEIPNHRYFVGAQFHPEFKSRPSKPSPLFVGLIAASSGQLDRLLQGSCNGHVVSTKHSLSNGAYTSTVHQNGHAKKLANGLSNGTYYPNGNGVHA

SEQ ID NO: 8750 - protein, 218 aa, Francisella tularensis subsp. tularensis SCHU S4
MSIKSLFKSSSLDDYIDTNSVKLDVIAQQLFNKAKNDELSHMLSSPNQLQLLSLLLKIINVKRVLEIGVFRGFSTLVMAQALADDATIEACDIGYEYLKPYEHFWQQAKVEHKINLNIAPALETLDRFLQQQLKFDFVYIDADKPNYINYYEKALALMDSGGLIAIDNVLWSGRVADKSNNEVNTLVIRQLNNLIHDDKRVDACIIPIGDGINLLRKR

SEQ ID NO: 8751 - protein, 572 aa, Yarrowia lipolytica CLIB122
MKYVVVSGGVISGIGKGVLASSTGLLLKTKGLKVTSIKIDPYMNIDAGTMSPLEHGEVFVLNDGGEADLDLGNYERYINVTLTRDHNITTGKIYQHVIERERRGEYLGKTVQIVPHLTNAIQDWIERVAKIPVDDTDEEPDVCIIELGGTVGDIESAPFVEALRQFQFRVGPDNFALIHVSLVPFIHGEQKTKPTQAAIKDLRSLGLTPDIIACRCQAELEASTINKIAMFCNLGPKQVLDVYDVNSTYHVPLLLQKQGIIDLLTRKLALDQISISGRFRDRGNGLLGKWRQLTTQHDRSFETVSIAMVGKYTHLQDSYLSVIKALEHSAMKCHRRLEILWIESSDLESESDEKAKYHQAWTKLCRADGILVPGGFGTRGTEGMIKAANWARENKKPYLGICLGLQIAVIEFARNVCELDGANSEELDPETETKAVVFMPEGDREKLGGTMRLGARTTVFQPGSEKSKIRKLYGSADSVEERHRHRYEVNPELVETFEAAGLKFVGRDTAGQRMQVLELDNHPYYVATQYHPEYLSRVLDPSRPILGLVAAACGKLDEITKGQSAEIASGEF

SEQ ID NO: 8752 - protein, 465 aa, Pseudomonas syringae pv. syringae B728a
MQPETLDNDDLIYGLNDRPKPWTAILAAFQHVLASFVGIITPPLIIGSTLGLTPYMPYLISMALMVSGTGTFIQARRPFGIGAGMICLQGTSFAFLGAVLSAGFLVKQRGGSPEDIMAMIFGVCFFGALVQIALSRCISQLRRVITPLVTGIVITLIGVSLIKVGVTDLGGGFNAPDFGAPVNLALGAFVLAVIIVLNRSNTPWVRLSAIIIGLAVGSLAAWFSGKLVPQALHDLPLISVPVPFRFGFNFDWSAFLPVALIYLISSIETVGDLTANCMLARQPISGPSYLARLKGGVLGDGVSCMIAATFSAFPNTTFAQNNGVIQLTGVASRYVGLYIGAVLFVLGLFPHIGAIVQQIPKPVLGGATLVMFGSVAAAGVRILAQSPLDRRSMLIIATSLGVGLGIAAQPALLHQLPKLVQNLFDSAITSGGITAIVMCLLIPEGKVTAATTDAVTEPEPVEQPR

SEQ ID NO: 8753 - protein, 494 aa, Vibrio vulnificus YJ016
MANYFNTLNLREQLDQLGRCRFMDRSEFATEADYLKGKKVVIVGCGAQGLNQGLNMRDSGLDVAYALRQAAIDEQRQSYKNAKENGFEVGSYETLIPQADLVVNLTPDKQHTNVVETVMPLMKEGAALGYSHGFNVVEEGMQIRKDLTVVMVAPKCPGTEVREEYKRGFGVPTLIAVHPENDPKGEGWDIAKAWAAATGGHRAGCLESSFVAEVKSDLMGEQTILCGMLQAGSIVCYEKMVAEGIDPGYAGKLLQYGWETITEALKFGGITHMMDRLSNPAKIKAFELSEELKDLMRPLYNKHMDDIISGHFSSTMMADWANDDANLLGWRAETGETAFENYPSTDVEISEQEYFDNGILMVAMVRAGVELAFEAMTASGIIDESAYYESLHELPLIANTIARKRLYEMNVVISDTAEYGNYLFANVATPLLREKFMPSVGTDVIGKGLGETSNQVDNATLIAVNETIRNHPVEYIGEELRGYMTDMKRIAVGG

SEQ ID NO: 8754 - protein, 96 aa, Carica papaya
GPLAVAINAAYMQTYIGGVSCPYICSRRLNHGVLLVGYGSAGYAPIRLKEKPYWVIKNSWGENWGENGYYKICRGRNICGVDSMVSTVAAVHTTSQ

SEQ ID NO: 8755 - protein, 448 aa, Pseudomonas syringae pv. syringae B728a
MNMFEVSDVPVTRQLKLDAHWMPYTANRNFQRDPRMVVAAHGSYLTDDKGRKIYDALSGLWTCGAGHTRKEIQEAVSRQLGVLDYSPGFQFGHPLSFQLAEQITDLTPGNLNHVFYTNSGSECADTAVKMVRAYWRLKGQATKTKMIGRARGYHGVNVAGTSLGGVNGNRKMFGQLMDVDHLPHTLLASNAYSKGMPEAGGIALADEMLKLIELHDASNIAAVIVEPMSGSAGVIVPPQGYLKRLREICDQHNILLIFDEVITGFGRTGSMFGADSFGVTPDLMCIAKQITNGAIPMGAVIASSEIYHTFMNQPTPEYAVEFPHGYTYSAHPVACAAGLAALELLQRENLVQQAAAVAPHFERALHGIKGAKNVVDIRNYGLAGAIQLAPRDGDAIVRPFEAGMKLWKAGFYVRFGGDTLQFGPTFNSQAQDLDRLFDAVGETLNLID

SEQ ID NO: 8756 - protein, 269 aa, Francisella tularensis subsp. tularensis SCHU S4
MTNRYTTLFANLEKRNEGAFIPFVTIGDPNKALSFEIIDTLVSSGADALELGIPFSDPLADGPTIQEANIRALESGITPKDCFDILTKIRAKYPHIPIGLLLYANLVYANGIENFYQKCLDAGVDSILIADVPAHESKEFRDIAKKVGIAQIFIAPPDASESTLKQISELGSGYTYLLSRVGVTGTETAANMPVEDVLTKLREYNAPKPVLGFGISKPEQVQQAIKAGAAGAISGSATVKIIQNNISNKQKMLNELTYFVKEMKAATLN

SEQ ID NO: 8757 - protein, 232 aa, Colwellia psychrerythraea 34H
MNKYIAECIGTFWLVLGGCGSAVLAAGFPDVGIGLLGVSFAFGLTVLTMAYAIGHISGCHLNPAVSVGLWAGGRFPANELMPYIIAQVIGAILGAGALYLIASGQPSFDLSAGFASNGYGAHSPGGYSMTAALVAEVVLTMMFIFVIMGATDKRAPAGLAPIAIGLCLTLIHLISIPVTNTSVNPARSTGVALFVGDWAVAQLWLFWVAPIVGGFIGAKLYRLVAKEEQEDS

SEQ ID NO: 8758 - protein, 449 aa, Pseudomonas aeruginosa UCBPP-PA14
MALGSAIGTGLFYGSASAIQMAGPAVLLAYLVAGAAVYMVMRALGEMAVHEPVSGSFGHYASSYLGPLAGFVTGWTYAFEMIIVCLADVTAFGIYMGFWFPDVPRWIWVLSIVLFIGGLNLCHVKVFGELEFWLSLVKVGAIVAMILAGLGIMFFGFSLDGAATSATGVHNLWQHGGFLPNGWAGLVASLSVVVFAFGGIEIIGITAGEAQDPQRVIPRAINAVPLRILLFYVLTLFVLMAIFPWQQIGSNGSPFVQIFDGLGIESAAAILNVVVITAAISAINSDIFGAGRMLYGMARQGQAPVGFSRVSRHGVPWMTVLLMAVALLLGVALNYLIPQSVFLLIASIATFATVWVWLMILLAQVGMRRRMGPRQVAALKFPVPLWPFAPAAAIVFMLFIFVVLGYFPDTRPALWVGAIWIAVLVIAYRRWVRPKGDAAHGVLQAQGGL

SEQ ID NO: 8759 - protein, 340 aa, Bacillus halodurans C-125
MKTLRVAVIGCGSIAQHRHLPEYEQNPHTTIVAVCDPVEERAKKVAKLYGAIAYTDHMQLLEKEEIDLVSVCTPNAYHAPISIDALKAGTHVLCEKPMATSAEECEAMIKAAEEAGMCLMIGHNQRFVSSHEKARQLIATGDIGKIYSFRTTFGHGGPEGWSVDGENSWFFKKDQAFIGAMGDLGVHKADLLRYLLGEEVVEVGAFVTTSAKQGDVDDNAVAILKTESGIVGTLTASWSYVAKEDNSTILYGENAILRLEDDPHYSLIVHYKNGETVKYELGQIQSNDEGGQTDSRVIAHFVNSVLEGKEPPISGKEGYASLNIILAAMEASRTGRTIKL

SEQ ID NO: 8760 - protein, 450 aa, Streptococcus pyogenes SSI-1
MVIPYDYIVIGGGSAGIASANRAAMHGAKVLLAEGKEIGGTCVNLGCVPKKVMWYGAQVADILGTYAKDYGFDFKEKAFDFKQLKANRQAYIDRIHVSYERGFEQNGVNRIYDYAVFKDAHTVEIAGQLYTAPHILIATGGHPVFPDIEGAQYGISSDGFFALDEVPKRTAVVGAGYIAVELAGVLHALGSKTDLFIRHDRPLRSFDKAIVDVLVEEMAVGGPCLHPHSEVAKVVKNTDESLTLYLKDGQEVEVDQLIWAIGRKPNLEGFGLDKTGVTLNDKGYIETDAYENTSVKGIYAVGDVNGKLALTPVAVAAGRRLSERLFNGKTDEKLDYQNVATVIFSHPVIGSVGLSEEAAVKQYGQEAVKTYQSRFTSMFTAITNHRQPCLMKLVTVGDTEKIVGLHGIGYGVDEMIQGFAVAIKMGATKADFDNTVAIHPTGSEEFVTMR

SEQ ID NO: 8761 - protein, 472 aa, Campylobacter coli RM2228
MKKLILSLSLASALFAANINFNETSITSNRVNPAAGDVVLSYHNSIRDAKKSVVNISTSKTITRANRPSPLDDFFNDPYFKQFFDFDFPQRRGGNDKEVVSSLGSGVIISQDGYIVTNNHVVDDADTISVSLPGSDTEYKAKLIGKDPKTDLAVIKIEANNLWAITFTNSDDLMEGDVVFALGNPFGVGFSVTSGIISALNKDNIGLNQYENFIQTDASINPGNSGGALVDSRGFLVGINSAILSRGGGNNGIGFAIPSNMVKDIAKKLIEKGRIDRGFLGVTISALQGDTKKAYKNQDGALITDIQKGSSADEAGLKRGDLVTKVNDKVIKSPSDLKNYIGTLEIGQKISLNFERDGENKRVDFILKGEKENPKAVQNDLIEGMTLRNLDPRFKERLQIPKDVNGVFVESVKDKSRAKDSGFKEGDIIIGVGQSEIKNLKDLEQALRQVKKKEFTKIWVYRNGFATLLILK

SEQ ID NO: 8762 - protein, 335 aa, Bdellovibrio bacteriovorus
MKAPVRVAVTGAAGQIGYALLFRIASGAMLGADQPVILQLLEIPDEKAQKALKGVMMELEDCAFPLLHSMIATGDPAVAFKDADVALLVGARPRGPGMERKDLLTANGQIFTVQGEAIGKYANPNVKVLVVGNPANTNAYIAMKSAMKHGRVKAKNFTAMLRLDHNRALSQLATKTGKPVASFKKVAVWGNHSPTMYPDVRFATADGAKVPELLKLGTAEGDAWNKDTFIPTVGKRGAAIIEARGLSSAASAASAAVDHIRDWWLGTNGEWVTMGIPSDGSYDIPEGIMYGFPVTCKNGEYEIVKGLEIDAFSREKMNNTLKELNEEKDAVASML

SEQ ID NO: 8763 - protein, 299 aa, Campylobacter coli RM2228
MNSLYETLGVSKNASADEIKKAYRRLARQYHPDINKEKGAEEKFKEINAAYEILSDEKKRAQYDQYGDSMFGGQSFHDFSKNTGGVNLDDILKDLFGGGFGGGSSRGSRFNGFSSKGFNTGFGGFGGFEEEDLDSTIELSIPFEKAVVGGEYSFNLQGETIKFKIPHGIKQGEKLRIRNKGKNGRNGTRGDLIVKVKLGESEIYQREDDDLYQKVDISLKTALFGGKVTVNTLKENKKEATITIPANSKNGQKIRLKGYGVQNRKSDIYGDMYLVLNVVLPNTETLDEKLIEMLKEKLS

SEQ ID NO: 8764 - protein, 129 aa, Glycine max
MGRLFVVNLEGKIYSCKHCHTHLALYDDIYSRTFHCRHGKAYLFNNVVNVSVGEMEDRPMMTGLHTVADIFCVGCGSIVGWKYETAYEKNQKYKEGKSVLERYKVSGPDGSNYWISNEAHVGGSDADDA

SEQ ID NO: 8765 - protein, 1008 aa, Magnaporthe grisea 70-15
MLDQIRREAAAKPTKPTSNCLLFTRNLYPSSVVQVITELVFYYAIHAPGSQNPGRSRVLSNKPRQIIEVNDAFTSLCHVLGSQTNLEVVRSRCIRSSSASCIMQLRWTVEFRRGPLVYSRLYLALCAPSSQQSLGCYGGHPRYLSSYLLLWPVAFDVEIKYSLVYLQGFEAGLVLCCNAAAFPADLFINPSSPFRSSPTTSDLHIKRLSRTSNLSDDVSAASKITPKLVCLEVAIADIAKMSHTGRESPSQMPPLGSSPVGSFRGRSLSTSVPRADVTARLASPLPSQFGSPSAALLASSSPRPHAYRQASESGSLTPLAGASATAPGPGISALAAALSNTIGTSPPRFGTPPVRSQSPAASSAAAPMLGSTPPANYGSFDARARLLQSDSSQRDDDEAVAEIVRRHLVQPTDSSEGPDDSSKGKQVVDGSGPGLDDDEFSSLKLQGGDITRPIYRWTEDATNRERIQRSKSFSMPRPDPEHEVLDINNIKVPGGFRRNFLRRAARSPSANPSSMEGGRTSQEPPLVTSNFLEFLSIYGHFAGEELEEDDEVLGPGEYFSSGDDDEDLYTAGEGSDDDRDPMEDSALLTPGRRKRRRKHRGGSGKATPLNAAMVLLKSFVGTGVLFLPRAYLNGGMIFSNLVLLFVAALSYYCFVLLVNTRLKVDGSFGDIGGILYGKWMRLLILTSIVISQVGFVAAYIVFTSENLKAFILAVTDCRTSIDVGYLILMQMVIFLPFSLFRDINKLAFTALIADAFIVIGLAYLFYFDVLTLSTNGLADIIYFNQKDWTLFIGTAIFTFEGIGLIIPIQESMKDPKKFPKVMAVIMVIITTLFTVMGAVSYAAYGSKTETVVLLNLPQDDKMVNVVQFLYSLAILLSTPLQIFPAIRITENGLFTRSGKYNPYIKWQKNIYRFCVVAGCAALAWGGADNLDKFVALVGNFACIPLVYIYPPLLHYRAVAKSNLKRWSDLGLCVFGFVAMAYTTSLTVMAWADSSSEPKPPSYCDSKRH

SEQ ID NO: 8766 - protein, 409 aa, Candida albicans SC5314
MSAKIELVTENVTNGHSGASETIQYTKSQMVGHGSFGVVFQIQLQPSNEIGAVKRVLQDKRFKNRELQIMKLVHHRNIADLKYYFYTNNEKNELYLNLILEFVPETLYKASHYYVSKRLNMPPLEVKLYTYQMFRALNYIHSQGICHRDIKPQNLLINPDTGELKLCDFGSAKILNPSEPNVSYICSRYYRAPELIFGATNYTTKIDVWSAGCVMAELILGQPLFPGESGIDQLVEIIKILGTPSREQIKNMNPNYMEHRFPQIKPIPLQKIFKKMSPDCIQFLIKVLQYSPIDRISCIEGLIDPYFDELRNENTKLPNYRKIFSQQFHSNNSSGFGNAANYQLYNSQPDLRDLPELFDFDDRELSVAPRLNKQLVPNWAYSHLRLNQHINSLDDFSPMSADELKVTLE

SEQ ID NO: 8767 - protein, 242 aa, Zea mays
MAWSTWQLIRFASKHQRLPLGDAAALPASLPRCDVCQERPASGANLGGPAFIFCVEDRALLCRDCDEPIHVPGTLSGNHQRYLATGIRVGFSSVCGASAEGLPPAPPKGSSKPTAVVSAPAAGTTTKTRTVKDALPQEVPSSPFLPPSGWAVEDLLELSDYESSDKKDSSLGLKELEWFEDIDLFHAHSPAKTAMAEFFASPQPVSNAGFYKANGARLFKKSRMEVPDDDDDEDYFIVPDLG

SEQ ID NO: 8768 - protein, 400 aa, Staphylococcus aureus subsp. aureus MSSA476
MAKIPVTVLSGYLGSGKTTLLNHILQNREGRRIAVIVNDMSEVNIDKDLVADGGGLSRTDEKLVELSNGCICCTLRDDLLKEVERLVKKGGIDQIVIESTGISEPVPVAQTFSYIDDELGIDLTAICRLDTMVTVVDANRFVHDINSEDLLMDRDQSVDETDERSIADLLIDQVEFCDVLIINKIDLISEEELAKLEKVLSALQPTAKIIKTINSEVDLKEVLNTQRFDFEKASESAGWIKELESGGHASHTPETEEYGISSFVYKRRLPFHAKRFNDWLETMPNNVVRSKGIVWLAQYNHVACLLSQAGSSCNIHPVTYWVASMSEAQQTQILAERQDVAAEWDPEYGDRHTQFVIIGTDLDEEKLTKELDACLVNAQEIDADWQQFEDPYQWQIRPAR

SEQ ID NO: 8769 - protein, 372 aa, Vibrio sp. Ex25
MKIMFEKVVAAPADPILGLTEEFKKDTRADKINLGVGIYKNEQGETPVLATVKKAEAALVETEKTKSYLTIEGTAEYGIAVQKLLFGSDAEIVNEKRAKTAQAPGGTGALRVAGEFIKRQLGDVKIWISNPTWANHNGVFTAAGIETAQYSYYNAETKDKDFDAMLNDLQSASEGDIVLLHGCCHNPTGIDPTAEEWETLAKLVAEKKLLPLFDFAYQGFAKGVEEDAAGLRTFAKYNKEILVASSFSKNFGLYNERVGAFTLVAESEEVATTAFSQVKAIIRSIYSNPPAHGSAVVTHILGNAEMRAEWEAEVAEMRDRIQEMRELFVATLKSEGVDADFSFIERQNGMFSFSGLSKEQVNRLKEEFGIYI

SEQ ID NO: 8770 - protein, 269 aa, Idiomarina loihiensis L2TR
MSRYESCFAQLKANNQGAFVPFVTLGDPTPGQSVDVIKALIDGGADALELGLPFSDPVADGPMIQRANLRALESGTTFKHILEILKEIRDYSPQIPIGLLVYANLIYAKGVRNFYQQMKDAGVDSVLIADVPTKEAKRFADIAKEIGIEAVFIAPPDASDALLIDIAKQCAGYVYLLSRSGVTGADTQMQAPASELINKLKEAGAPPTLLGFGISQPEHVQRALAAGADGAISGSAVVALIEKNLDNNAQQVADLKAFVKSMKAATQLS

SEQ ID NO: 8771 - protein, 461 aa, Zea mays
MAPANVRAAQAQAQAPSADRRLSTLVGHLLPSSPRRAAADTSATSTLESFPTMASQGSSVFAALEQAPEDPILGVTVAYNKDPSPMKVNLGVGAYRTEEGKPLVLNVVRRAEQMLINNPSRVKEYLPITGLAEFNKLSAKLIFGADSPAIQENRVATVQCLSGTGSLRVGGEFLARHYHERTIYIPQPTWGNHPKVFTLSGLNVRSYRYYDPATCSLHFEGLMEDLGSAPSGSIVLLHACAHNPTGVDPTIEQWEQIRQLMRSKSLLPFFDSAYQGFASGSLDKDAQSVRMFVADGGELLMAQSYAKNMGLYGERVGALSIVCRSADVAVRVESQLKLVIRPMYSNPPLHGASIVATILRDSEMFNEWTLELKAMADRIINMRQQLFNALKSRGTPGDWSHIIKQIGMFTFTGLNSEQVAFMRQEYHIYMTSDGRISMAGLSMRTVPHLADAIHAAVTQLK

SEQ ID NO: 8772 - protein, 86 aa, Glycine max
  misc_feature (39)..(39): Xaa can be any naturally occurring amino acid
  unsure (1)..(86): unsure at all Xaa locations
EIYFNQKTSKVAVVCADNVEARTALFLMELEEKRAIEVXRKSTLRGLCLTFFAGLCFSMFSPACNIAADDLWNTFRKGVPHLTVYT

SEQ ID NO: 8773 - protein, 262 aa, Brassica napus
SGFPGRPTRPRTRGPPTRPKFLNSYLSRELRFKMQIFVKTLTGKTITLEVESSDTIDNVKAKIQDKEGIPPDQQRLIFAGKQLEDGRTLADYNIQKESTLHLVLRLRGGMQIFVKTLTGKTITLEVESSDTIDNVKAKIQDKEGIPPDQQRLIFAGKQLEDGRTLADYNIQKESTLHLVLRLRGGMQIFVKTLTGKTITLEVESSDTIDNVKAKIQDKEGIPPDQQRLIFAGKQLEDGRTLADYNIQKESTLHLVLRLRGGF

SEQ ID NO: 8774 - protein, 394 aa, Prochlorococcus marinus str. MIT 9312
MTEAKLISALNEENLSHFSKTYVPSRLLLGPGPSNAHPEVLNALSLNPIGHLDEAYISLMSDVQKLLRYTWQCNNRLTLPMSGTGSAAMEASIANFIEEGETILIAKKGYFGDRLVDMATRYKAEVSVMEKPWGESFSYEEIKYEIETKKPAIFAIVHAETSSGVLQPLDGIGDVCRKNNSLFLVDAVTSLGALELLIDEWKIDLAYSCSQKGLSCPPGLSPFTMNERAEEKLSSRKTKVPNWYLDLSLLNKYWGSDRVYHHTAPVNMNFAIREGLRLIANEGLENVWNRHNTNARKLWNGLESLGMELHVSKDYRLPTLTTVKIPPAVDGDGFRNHLLRNFGIEIGNGLGELSGKVWRIGLMGFNSSEENVDRLLNLFDTELKKYSIFESSTF

SEQ ID NO: 8775 - protein, 449 aa, Streptococcus agalactiae A909
MSKQYDYIVIGGGSAGSGTANRAAMYGAKVLLIEGGQVGGTCVNLGCVPKKIMWYGAQVSETLHKYSSGYGFEANNLSFNFTTLKANRDAYVQRSRQSYAANFERNGVEKIDGFARFIDNHTIEVNGQQYKAPHITIATGGHPLYPDIIGSELGETSDDFFGWETLPNSILIVGAGYIAAELAGVVNELGVETHLAFRKDHILRGFDDMVTSEVMAEMEKSGISLHANHVPKSLKRDEGGKLIFEAENGKTLVVDRVIWAIGRGPNVDMGLENTDIVLNDKGYIKTDEFENTSVDGVYAIGDVNGKIALTPVAIAAGRRLSERLFNHKDNEKLDYHNVPSVIFTHPVIGTVGLSEAAAIEQFGEDNIKVYTSTFTSMYTAVTTNRQAVKMKLVTLGKEEKVIGLHGVGYGIDEMIQGFSVAIKMGATKADFDDTVAIHPTGSEEFVTMR

SEQ ID NO: 8776 - protein, 353 aa, Nostoc punctiforme PCC 73102
MLLFETVREMGHEQVLFCHGKNPEIKAIIAIHDTTLGPAMGATRLMPYVNEEAALKDALRLSRGMTYKAACANIPAGGGKAVIIANPENKTDDLLRAYGRFVNSLNGRFITGQDVNITPDDVRTISQETNHVVGVSEKSGGPAPITSLGVFLGIKAAVESRWQSKRLDGMKVAVQGLGNVGKNLCRHLHEHDVKLFVSDVDPAKAEEAKRLFGATVVEPTEIYSLDVDIFSPCALGGILNSHTIPFLQAQIIAGAANNQLENEQLHSQMLTRKGILYSPDYVINAGGLINVYNEMIGYDEEKAFKQVHNIYDTLLAIFDIAKEQGVTTNDAAKRLAEDRISNSKRSKSKAIAA

SEQ ID NO: 8777 - protein, 355 aa, Prochlorococcus marinus subsp. marinus str. CCMP1375
MALSYYKEELKKTASSLATSGKGILAVDESTKTIGKRLASINVENTEENRKAYRGLLFTTEGLGEYISGAILFEETLFQAHPDGEPMVKKLEKLGVIPGIKVDKGLRPLAGGNDVETFCSGLDGLVERSSDYYAQGARFAKWRAVLQITNNGSPSKLSIKENAWGLARYARSVQESGLVPIIEPEILMDGSHSINKTAEVQEEVIKEVYMACQLNGVFLEGTLLKPSMTVQGADCKDKADPQKISELTIRTMERCVPASVPGIVFLSGGLSEEAASIYLNLMNKQPRKANWNVGFSYGRALQHSCLKEWGGKNLEAGQKALLARAQANSEASKGIYVAGSQPSSDEALFVAGYKY

SEQ ID NO: 8778 - protein, 346 aa, Arabidopsis thaliana
MAAEDRSEELSSNVENGSCNSNEGINPETSSHWIENVVKVRKPYTVTKQREKWSEEEHDRFLEAIKLYGRGWRQIQEHIGTKTAVQIRSHAQKFFSKMAQEADSRSEGSVKAIVIPPPRPKRKPAHPYPRKSPVPYTQSPPPNLSAMEKGTKSPTSVLSSFGSEDQVNRCSSPNSCTSDIQSIGATSIDKKNNYTTSKQPFKDDSDIGSTPISSITLFGKIVLVAEESHKPSSYNDDDLKQMTCQENHYSGMLVDTNLSLGVWETFCTGSNAFGSVTEASENLEKSAEPISSSWKRLSSLEKQGSCNPVNASGFRPYKRCLSEREVTSSLTLVASDEKKSQRARIC

SEQ ID NO: 8779 - protein, 370 aa, Prochlorococcus marinus subsp. marinus str. CCMP1375
MQSTNINKKSKIGVGLAGLGFGEKVHLPGLFSSQDLEPIALWHPRPDRLNDACKTHDLKGYDNWSALLNNADIDAVIIATPPEPRFKLAYDALQAGKHLLLEKPVALNSEEILELQSLSIKKKLSVAVDFEYRAVPLFMQAKQMIDDDLIGTPWLIKLDWLMSSRADESRAWNWYSEKQSGGGVIGALGTHAFDLLHWFFGPTKNINGLTSTSIQKRPSIKSKKLENVTSEDICLAQLELSNFKSQQPIPAQVTLSAVSRYGRGFWLEIYGNKGTLILGSDNQKDYVHGFGLWFGEKGKKVCPITPVSNLAFDRTWEDGRIAPVARIQNWWAESINKGNPVIPGLTEGLLSQRVCEKVDQSYKSGMRLTI

SEQ ID NO: 8780 - protein, 407 aa, Saccharophagus degradans 2-40
MNPDLSKLQPYPFEKLNALKATVSAPADKSHIALSIGEPKHQPPAFALKALTDNLARFANYPSTKGLPELRTAIANWANTRFNLQRATLDAEANVLPVNGTREALFAFAQACIDSSKADAKVLMPNPFYQIYEGAAFLAGAEPVFLNCLPENGFIPDFDAISEQTWQACQLLFICTPGNPTGAVMSRELLEKLIGLADKHNFIIASDECYSELYFDEANPPTGLLEACESLGKTDFKNCVVFHSLSKRSNLPGLRSGFVAGDAHIIDQFFQYRTYHGCAMSVPCQLASIAAWQDEAHVLENRNLYRQKFDAVIEILKDVLPVSTPDASFYLWPKTPIADTDFAQQLFAQQNVTVLPGRFLARDCDGVNPGENYVRLALVAELEECIEAAHRIKAFVQSLNQTLYTNS

SEQ ID NO: 8781 - protein, 1142 aa, Neurospora crassa
MNDEDKVHDISKKIEREKALINAAQAMRQQTNNEQVRSKLDTQMREGRRNLEFFEEKLRELQMRRLGHGVDNMSLGASPMSGSHRQSVDDFEGYGAPSPPPKEDVRGHSSHQSQGSGPLMPASAPYPGGPPDSNVPRARPNYTRLDLIKFDTPHLGPRIQLMLSQIQFKLNVEEQYLKGIEKMVQLYQMEGDKKSKLDAAAKRVESKQKIVLLKQALKRYEELHIDIDVDGPDDDSINLPALRKPLSGTLSIRILAVKDVDHAPLGRFARSPETFIAVKAEDIVVARTKPSRNDKWEAEFHTFPVDKTNEIEFTVYDKPAEHPVPIAMLWVRISDIVEELRRKKIEAEMTSAGWVSADRVGSRAPPPQFPMGAQSPQFAAPPTSPGSQEQNTMIPPQAPPPSQVVSQPVDGWFNLEPYGQIHLSFNFIKGARPQGMDRLGRKGAVRQRKEEVHEMYGHKFVQKQFYNIMRCALCGDFLKYSAGMQCEDCKYTCHTKCYTSVVTKCISKSNAETDPDEEKINHRIPHRFIPFSNLTANWCCHCGYMLPIGSKKNSRKCSECALTAHAQCVHLVPDFCGMSMAVANQILEGMRTQKKTHKDKASSMSERTLRPGSKTSISSGSIAQASTYSGSTAYTSIASPEATEAAKLMYSQTTPRPGGPDRTSTSSTTASAAAAAAMAPKHSSQPSQAGSIPDFGGSPGYGRPDSRDDEYSAQQQQGYGSPQQRKYNPADYANIDAYSSPQARPQQQQQQQQQTPQQVSPMYQQNPQTPISKPQPVAPSYDNQVVPSASGVPVPTKKPLPSATDPGTGMRIGLDHFNFLAVLGKGNFGKVMLAETKKSRKLYAIKVLKKEFIIENDEVESIRSEKRVFLIANRERHPFLTNLHACFQTETRVYFVMEYISGGDLMLHIQRGMFGTKRAQFYAAEVCLALKYFHENGVIYRDLKLDNILLTLDGHIKIADYGLCKEDMWYGSTTSTFCGTPEFMAPEILLDKKYGRAVDWWAFGVLIYQMLLQQSPFRGEDEDEIYDAILADEPLYPIHMPRDSVSILQKLLTREPDQRLGSGPTDAQEIMSQPFFRNINWDDIYHKRVQPPFLPQIKSATDTSNFDSEFTSVTPVLTPVQSVLSQAMQEEFRGFSYTADFE

SEQ ID NO: 8782 - protein, 337 aa, Neisseria gonorrhoeae FA 1090
MQVYYDKDADLSLIKGKTVAIIGYGSQGHAHAANLKDSGVNVVIGLRHGSSWKKAEAAGHVVKTVAEATKEADVVMLLLPDETMPAVYHAEVAANLKEGATLAFAHGFNVHYNQIVPRADLDVIMVAPKGPGHTVRSEYKRGGGVPSLIAVYQDNSGKAKDIALSYAAANGGTKGGVIETTFREETETDLFGEQAVLCGGVAELIKAGFETLTEAGYAPEMAYFECLHEMKLIVDLIFEGGIANMNYSISNNAEYGEYVTGPEVVNASSKEAMRNALKRIQTGEYAKMFIQEGNVNYASMTARRRLNADHQVEKVGARLRAMMPWITANKLVDQDKN

SEQ ID NO: 8783 - protein, 151 aa, Brassica napus
NSWSSGMEMNSPRCLFGSASLGEIAIFAGGFDSQRKILDSAEMYNSELQTWTTLPMMNKPRKMCSGVFMDGKFYVIGGIGGPDSKLLTCGEEYDLDTKKWTHIPDLSPPRSRADVSSANDAPSLVAVVNNQLYAADHADMEVRKYDKEKKR

SEQ ID NO: 8784 - protein, 429 aa, Bordetella pertussis Tohama I
MSQAPAHSLPSYLDAEHLGPWGIYLQQVDRVTPYLGPLARWVETLKRPKRALIVDVPIEMDNGSIAHFEGYRVQHNTSRGPGKGGVRFHQDVTLSEVMALAAWMSIKNAAVNLPYGGAKGGVRVDPRTLSHSELERMTRRYTSEIGVIIGPSKDIPAPDVNTNAQTMAWMMDTYSMNEGATATGVVTGKPIALGGSLGRVEATGRGVFVVGCEAARDLNLDVSKARIVVQGFGNVGGTAARLFHEAGAKVIAVQDHTGTIHNDGGLDVHKLLAHVGNQGGVAGFTGAQQLADDDFWGLETDFLIPAALEGQINENNAARVRAKVVVEGANGPTTPEADDILRENGVYVVPDVLANAGGVTVSYFEWVQDFSSFFWSEEEINQRLERLMREAYSAVSQVAKEHKVTLRTAAFIVACTRILQARQVRGLYP

SEQ ID NO: 8785 - protein, 206 aa, Oryza sativa
MAEVEAAPIAAAETPEVAAAEGAAAAKAPHKLHRQWAFWYDIQSKPKPGAAWGTSLRKAYTFDTVEEFWGLYDQIFRPSKVTVNADFHLFKVGVEPKWEDPECANGGKWTVPCSRKTTLENMWLETLMALIGEQFDESEEICGVVASVRQRGDKLALWTRTASNEAVQVNIGKKWKEIVDYNDKMVYSFHDDAKREKPSRGGRYNV

SEQ ID NO: 8786 - protein, 528 aa, Magnaporthe grisea 70-15
MATALDHLYIGGRINWLAQLNTAAQPDKNYRRSSIICTIGPKTNSVEAMNDLRKAGMNVVRMNFSHGSYEYHQSVIDNAREAEKQMPGRQLAIALDTKGPEIRTGNTKNDEDLPISAGKELNFTTDEQYATSCDTDNVYVDYKNITKVIEKGRIIYVDDGVLAFEVLDVIDEKTVRVRARNNGFICSKKGVNLPNTDVDLPALSEKDKADLRFGVKNNVDMVFASFIRRGQDIKDIREVLGQDGAHIQIIAKIENRQGLNNFPEILKETDGVMVARGDLGIEIPAAEVFAAQKKMIALCNMAGKPVICATQMLESMIKNPRPTRAEISDVGNAVTDGSDCVMLSGETAKGSYPCEAVREMSDACLKAENTIPYVSHFEEMCGAVHRPVSIVESCAMAAVRASLDINAGGIIVLSTSGVSARLLSKYRPVCPIFMVTRNASASRYSHLYRGVYPFLFPEAKPDFSKVNWQEDVDRRIKWGVKHALDLGVLEKNDSIVVVQGWKGGMGNTNTIRVLKADTESLGIGQADI

SEQ ID NO: 8787 - protein, 505 aa, Burkholderia vietnamiensis G4
MTRSDLPHEARPVVVWFRDDQRLADNPALTHALDTGHPVVCVYVHDAAPKHGRAMGGAQRWWLHESLSKLDDALAAHGGSLILLRGNEHEAITGFAAAIGAAMVVWNRRYAKAQTGTDASIKRDLIDRGIAVSTFNGHLLREPWTVTTREGLPFQVFSAYWRAARRDDFFPPVPLPAPSHIRFFPVPAHATPHVCTLRELELQPSAPDWAGGLRETWQCGEQAASDQLEAFLENSLSDYPTLRDFPAARATSRLSPYLRFGNISVRQVWYATLSAADAMRSARIVRGVDSKDGPLSKFLSEIGWREFSYHLLYHFAPLHQVNFRRQFDSMPWRDDAKSLRKWQTGRTGYPLVDAGMRELWHTGWMHNRVRMVAASFLSKHLLIDWRQGEAWFWDTLVDADEASNPASWQWVSGSGADAAPYFRIFNPVLQAQKFDPHGDYTRRWVPELAQLSADTVHAPWAASREQLQRASVTLGRSYPMPIVDHQCARARALESVKRLDSESHA

SEQ ID NO: 8788 - protein, 42 aa, Triticum aestivum
ILLPPVGVFLRYGIGVEFWICLLLTILGYIPGIIYAVYVLVA

SEQ ID NO: 8789 - protein, 384 aa, Pyrococcus abyssi GE5
MSKFPEKGLPREEVLNLLEDKTKVDLTFSSGKILGSMCTMPHELAIEVFARYIDRNLGDPGLHPGTRKIEEEVIEMLSDLLHLEKGYGHIVSGGTEANILAVRAFRNISDAERPELILPKSAHFSFIKAGEMLGVKLVWAELKQDYAVDVKDVEAKISDNTIGIVGIAGTTGLGVVDDIPALSDLAREYGIPLHVDAAFGGFVIPFAKSLGYDLPDFDFKLKGVESITIDPHKMGMAPIPAGGIIFRRKKYLKAISVLAPYLAGGKVWQATITGTRPGASVLAVWALIKHLGFEGYREIVRKAMELSRWFAEEIKKLNNAWLVREPMLNIVSFQTKNLRKVERELKRRGWGISAHRGYIRIVFMPHVTKEMVEEFLRDLREVLK

SEQ ID NO: 8790 - protein, 714 aa, Arabidopsis thaliana
MASATTLLFHHGSTRVLVARRRCQASVLRPYGGLKPFLSFCSLPNSTAPFRDSLRAKSDGLARAYVTGAPPIVEEPDPKIEESKSEAESKDLISWGLLWSLMSKHKLRLSVCLLTLLGCSTCTLSMPVFSGRFFEVLIGVRPEPLWRLLSKIAVLYSLEPIFTIAFVTNMTAIWENVMAILRAQIFRRVLIQKAEFFDKYKVGELTGLLTSDLGALNSIVNDNISRDRGFRAFTEVFGTICILFTLSPQLAPVLGLLMLAVSVLVAVYKRSTVPVYKSHGLAQATMSDCVSETFSAIRTVRSFSGEKRQMSIFGSQILAYKLSGLKLGTFKSINESITRVAVYISLLALYCLGGSKVKTGELAVGTVVSFIGYTFTLTFAVQGLVNTFGDLRGTFAAIDRINSILNAVDIDEALAYGLERDIHTKKVQDENLKLFLSAGPNVNIRHLDKYYMSNLKSTNNLRTLTWAGDVCLDDVHFAYPLRPDVKVLDGLSLTLNSGTVTALVGSSGAGKSTIVQLLARFYEPTQGRITVGGEDVRMFDKSEWAKVVSIVNQEPVLFSLSVAENIAYGLPNEHVSKDDIIKAAKAANAHDFIISLPQGYDTLVGERGGLLSGGQRQRVAIARSLLKNAPILILDEATSALDAVSERLVQSALNRLMKDRTTLVIAHRLSTVQSANQIAVCSDGKIIELGTHSELVAQKGSYASLVGTQRLAFE

SEQ ID NO: 8791 - protein, 169 aa, Methanothermobacter thermautotrophicus str. Delta H
MMCLSRYEKATFGAGCFWGVEDAFRKVDGVVSTRVGYMGGHLENPTYEDVCTGLTGHAEVVEVTFDPDVVGYSDLLDVFWSIHDPTTLNRQGPDVGEQYRSVIFYHSDEQRRAAIESRRRLEESGRFRDRIVTAIEPAGTFYEAEEYHQQYLEKNPRRRCYLMRLLSTR

SEQ ID NO: 8792 - protein, 119 aa, Glycine max
MEVAMELEDDLFFADLSKEIALLIMDEDEDPLASCPPDSLQAFSGAIHPPPQFAFIFEHALRRESKGTGVFIPQATQPRRKQRKGRANNNSYAKHQKQSQDTRMASQVPNKNSFKSRNG

SEQ ID NO: 8793 - protein, 355 aa, Zea mays
GRVARLPTDLPQGFPEETLDATSPTRATGRQHRHSSVPKVSCWAAAHHQHNSNPQQVQAIGIRIAKTLHAFYQFCRPHTIFGTILGITSVSLLPVKSLDDFTLIAIWGFLEALAAALCMNVYVVGLNKVNKPTLPLSFGEFSMPTAVLLVVAFLVMSISIGIRSKSAPLMCALLVCFLLGSAYPIDVPLLRWKRHAFLAAFCIIFVRPVVVQLAFFAHMQQHVLKRPLAPTRSVVFATCFMCCFAAVIALFKDIPDVDGDRDFGIQSMTVRLGQQRVHRLCINILMTAYAAAILVGASSTNLYQKIVIVSGHGLLASTLWQRAQQFDIENKDCITQFYMFIWKLFYAEYFLIPFV

SEQ ID NO: 8794 - protein, 658 aa, Escherichia coli K12
MSDDMSMGLPSSAGEHGVLRSMQEVAMSSQEASKMLRTYNIAWWGNNYYDVNELGHISVCPDPDVPEARVDLAQLVKTREAQGQRLPALFCFPQILQHRLRSINAAFKRARESYGYNGDYFLVYPIKVNQHRRVIESLIHSGEPLGLEAGSKAELMAVLAHAGMTRSVIVCNGYKDREYIRLALIGEKMGHKVYLVIEKMSEIAIVLDEAERLNVVPRLGVRARLASQGSGKWQSSGGEKSKFGLAATQVLQLVETLREAGRLDSLQLLHFHLGSQMANIRDIATGVRESARFYVELHKLGVNIQCFDVGGGLGVDYEGTRSQSDCSVNYGLNEYANNIIWAIGDACEENGLPHPTVITESGRAVTAHHTVLVSNIIGVERNEYTVPTAPAEDAPRALQSMWETWQEMHEPGTRRSLREWLHDSQMDLHDIHIGYSSGIFSLQERAWAEQLYLSMCHEVQKQLDPQNRAHRPIIDELQERMADKMYVNFSLFQSMPDAWGIDQLFPVLPLEGLDQVPERRAVLLDITCDSDGAIDHYIDGDGIATTMPMPEYDPENPPMLGFFMVGAYQEILGNMHNLFGDTEAVDVFVFPDGSVEVELSDEGDTVADMLQYVQLDPKTLLTQFRDQVKKTDLDAELQQQFLEEFEAGLYGYTYLEDE

SEQ ID NO: 8795 - protein, 453 aa, Arabidopsis thaliana
METVRPMVVAPKGNKLRRKFAKVLNIHKLTGVAPEGEMKKIKFDSKTAKLSESFYKLEEEYERSQGLEALLAKLFATVSSIKAAYAQLQHSQSPYDSIGIQKADNLVVAELKTLSELKQCFMKKQVDPNPERTLVLAEIQELRSLLKTYEIMGKKLESQYKLKDSEIIFLREKLDESMKQNKLTEKRLNQSGQLCNPLDNLHLSALNPTHFVTYLHHTVKSTRGFVKLMIEQMKLAGWDISSAANSIHPGVFYYKQDHKCFTFEHFVSNVMFEAFHLPYFSTSSESRSYKKKKQSNADREMFFERFKELRSMKAKDYLTARPKSRFARFCRAKYLQLIHPKMEQAFFGHLHLRNQVSAGEFPETSLFSGFLEMAKRIWLLHCLALSFEREAEIFRVPKGCRFSEVYMKSVAEEAFFPAAESSPESEPRVAFTVVPGFRIGKTSIQCEVYLSLS

SEQ ID NO: 8796 - protein, 633 aa, Magnaporthe grisea 70-15
MSGTGSRQPLDASAGRDVVYCHACENEWFQDQNGLVCPQCHSEATEIVTPENDPRPVNTHDSRTEPQGHRDRYDDSDPEEEDIEEHSHRAPGGIYFTSRVFRMPVNHGAGTESPHVHPSDGNAVMERFYEMMNRDMGSSAAPGASNSDGTRSATGQGASENSGTRHYTTRTTMFPGGSTSFTITTAPLQRDGNNPPIGEFDAYADPHPRTRRRIVIVMLDSRGADSNASILSTIMGNITNPVGNTPHRGGETSSNDEASGLPPHGFPIAFQQLLGALMTGYGGTRNWGDVVTSQEEFDRIISQMMEANPMSNAAPPASEAAIEKLERKKLDEKMLGTDETVECTICMDDLSLGDEATVLPCKHFFHGECVTIWLKEHNTCPICRTPMEQRSSAERTQAPQNQSSSGPRAARPEPPRGIFPWAFQPSGSGTGSFVNSSSQRPSQSSQQSPIDIQQNDSGHTSHRRELLRSPSTNEERLRAIRDLANSDRHGGSDRPTTPPFAGRRRNSLSPPSPSMQAPWNLSYDPVHDFTSASRDRTRERDGDRSNSQSSSRFTSTNRDQEGHRDRERYRQQTYESSQPPSREQRDQERNDDNGSRRGDPNQTSSGSTFDPFSWIRDRLPGGGNSSGDSHRRG

SEQ ID NO: 8797 - protein, 687 aa, Magnaporthe grisea 70-15
MGYSEVDKKAINTIRVLAADATFNANSGHPGAPMGMAPVAHVLWDKIMKFNPKNPSWLNRDRFVLSNGHGCMLQYALLHLFGYAVSMDDLKKFRQVDSITPGHPEAHDTPGIEVTTGPLGQGICNAVGLAMAQAHTAATFNKDGFNLIDNYTYCFLGDGCLMEGVSSEACSLAGHLQLGNLIAIWDDNHISIDGDTNQAFTEDVAKRYESYGWHVEVVKDGDNDLEGIEAAIKKCQQVKDKPSLIQLRTIIGFGSTQQGTHGVHGSPLKADDLKQLKEKFGFNPDESFAVPQEVYDLYNKKAAEGAALEQEWDQLFAKYGEQYKAEHDDLVRRQTGELPQGWEKNLPTYTPSDPAIASRKLSETVLTKIEAAIPELVGGSADLTGSNLTRWKGAVDFQPPALKLGDSNYAGRYIRYGVREHGMGAIMNGLAAYGTILPFAGTFLNFVSYAAGAVRLSALSQVRMIWVATHDSIGLGEDGPTHQPIETLAHFRALPNCMVWRPADGNETSAAYYVALTSKHTPSIIALSRQNLPQLAGSTIEKAIKGGYVAHEVEGAQVTLVSTGSEVGICIDAVKYLADNHNIKARVVSMPCFEVFDTQSKEYRLSVLPDGIPSMSVEVMSTMGWERYTHEQFGLNRFGASGPYKDVYKKFEFTPEGIAKRAAATVDFWKDVPNVRSPINRAFQQII

SEQ ID NO: 8798 - protein, 550 aa, Oryza sativa
MEEEGRFEAEVAEVEAWWGTDRFRLTKRPYTARDVALLRGTLRQSYASGDMAKKLWRTLRAHQANGTASRTFGALDPVQVAMMAKHLDTVYVSGWQCSSTHTSTNEPGPDLADYPYDTVPNKVEHLFFAQLYHDRKQREARMSMSRAERAHEPYVDYLKPIIADGDTGFGGATATVKLCKLFVERGAAGVHLEDQSSVTKKCGHMAGKVLVAVSEHVNRLVAARLQFDIMGVETVLVARTDAVAATLIQTNVDARDHQFILGATNPRLRNRSLAAVLSDAMSAGKNGRELQAIEDEWLATAQLKTFSDCVRDAIASLNATDADKQRKLQEWSAATSHDKCVPLEQARDIAAGLGVTSLFWDWDLPRTREGFYRFRGSVAAAVVRGRAFAPHADVLWMETSSPNIAECTAFAEGVRAASPGAMLAYNLSPSFNWDASGMTDADMSEFIPRVARLGYVWQFITLAGFHADALVTDTFARDFARRGMLAYVERIQREERSNGVETLQHQKWSGANFYDRVLKTVQGVTEEQFKGSWTGPGSESSSHVLAKSRM

SEQ ID NO: 8799 - protein, 278 aa, Euglena gracilis
MPFDRQPLLSGEKGMPATSLWLVGGAVIAAVCVIVNTSYNGTQLSVTARPIQAAVSQVSMARFAESGVSRGSGNRVSQAVPLMAASVGAESESRRWVASAILFPLSGLFAAVALKMAMMKPKVAAVLPFTSEKDMKVWNPVNNKKFETFSYLPPLSDAQIAKQVDMIIAKGLSPCLEFAAPENSFIANDNTVRFSGTAAGYYDNRYWTMWKLPMFGCTDASQVLREISECRRAYPQCYVRLAAFDSVKQVQVISFVVQRPSGSSSSSWGMASSGGRSW

SEQ ID NO: 8800 - protein, 227 aa, Lactococcus lactis
MVETYKSTSNPMMNRPVVKAELVEWMRSSQTQVTGELAEVLNFAKENNIPVIPHETVLYFQMLLSLLKPKRILEIGTAIGFSALVMAQEVPEAEIVTIDRNPEMIELAKKNLAKYDHRNQIQLKEGDAADVLQELKGPFDLVFMDSAKSKYVEFLPKSLELLSENGLILMDDVFQAGEILLPIMEVKRNQRALERGLRKLFDEVFDNPKYMTSVLPLGDGLLMIKKH

SEQ ID NO: 8801 - protein, 411 aa, Zea mays
MAGGGFVEDMMREQSLLEATCGDLFDHIDDLLDFPNEDSAAAVLLLDAPAPGSPLSARIIDVGRAGNALAPPAAPAQHDASASAFFAAAGNDVFDTKDVVGAHIGSCDDIDMDMAQLEWLSGLFDDASIPHEPPAFPGAAPIIKSSALAAGALLPPDKMEDALLFRSSSPISVLEHGSFNNANGGGGGCSASSESSSASSSSESFSGSGSGSGEGHAWSAPVSPPPVLVIPARARSKRSRPSAFTRAGAEAPTILVPTPMYSSGPSHSDPESIAESSPHPAPPMKKKKKAKKPPAPPAPASSDDNDGDADYEEGGERAEPQGGAVRRCTHCQIEKTPQWRAGPLGPKTLCNACGVRYKSGRLFPEYRPAASPTFVPSIHSNSHKKVVEMRQKAVRSGDPSCDLLQFIRRRD

SEQ ID NO: 8802 - protein, 597 aa, Prochlorococcus marinus str. MIT 9312
MSNIDLKRRTKIVATIGPATQSEEIITNLIKAGVTTFRLNFSHGDHNDHAERIKTIREVSQKLDIDIGILQDLQGPKIRLGRFKDGPVKVKKGDKFTLTSNEVECSNTIANVTYENLSQEVSEGKRILLDDGKIEMIVEKVDTKANLLECLVTVGGVLSNNKGVNFPDVQLSVKALTEKDKEDLKFGLSEGVDWIALSFVRNPSDINEIKDLINKNGHSTPVVAKIEKFEAIDQIDAVLPLCDGVMVARGDLGVEMPAEEVPLLQKDLIRKANSLGIPIITATQMLDSMASNPRPTRAEVSDVANAILDGTDAVMLSNETAVGDYPVEAVQTMATIARRIERDYPLKAIESHLPSTIPNAISGAVSNIARQLDAGAIIPLTKSGSTARNVSKFRPPTPILATTTERSVARRLQLVWGVTPIVVNNDERTAKTFSLAMQIAQEMGILKQGDLVVQTAGTLTGISGSTDLIKVGLVRKILSRGISIGEIGVTGKARKINTKLDLSLICPGEILFVNKELLENVPLSKNIAGIVTNQNVDDVYAFFNKNNKKISTICNVENIDNNQIINGDLVTLQLNEGVIYMGQIEDDEEAIDKYKYV

SEQ ID NO: 8803 - protein, 408 aa, Coccidioides posadasii
MIDIFQRPAAPAIRGMRSRQIHTDSVRYGYEKEHLLLIGDWYHRPSEKVLEWYMRPGSYGNEPVPDSLLVNGAGHFNCSMAVPARPLDCVTRGLTTPELQLDSGVSHRLRIVNTGSLAGFTLHFAHGIVSVIQVDGGIDVEPTKRKAKSAGILYPGQRMDLVIQPPRRRKASSFTVELDPECFNYPNPALTRVQTFPMFDMSKARTRSLFKLNPWTSAADKHIDLAQVTSTKASISTLPAQADKTFVVYTKISRMARNENSPFGYFNHTSWRPQANPPYPLITIDRDSWDENQFSLSTGSKPVWIDFIVNNLDEGPHPFHLHGHTFFILSLFESTIGWGSYNPHQPHLNPSPYPPYDFSKALERDTVQIPRRGHAVLRLRADNPGVWLFHCHILWHLASGMAMLLEVM

SEQ ID NO: 8804 - protein, 468 aa, Pseudomonas aeruginosa UCBPP-PA14
MHSEDQRPNDLIYGLDDRPRPLPAFLAALQHVLASFVGIVTPPLVIGSLLGLGEHLPYLISMALMVSGAGTLIQARRPFGIGAGMICLQGTSFAFLGAVLAAGMLVKQRGGGPEEILAMIFGVCFFGAFVQIVLSRFLGHLRRVITPLVTGIVITLIGVSLIKVGITDLGGGAGATDFGAPANLALGALVLLSIVLLNRSRLPWLRLAAIVIGLALGTLAAWATGLFVPRALPELPLVSLPQPFRFGFAFDWMAFLPVALIYLISSIETVGDLTANCMLSRQPLEGPAYLQRLRGGVLGDGVSCLLAATFSAFPNTTFAQNNGVIQLTGVASRHVGIYIGGVLLALGLFPWIGAILQQIPKPVLGGATLVMFGSVAAAGIRILGQTAMDRRSVLIIAASFGVGLGVAAQPTLLDQMPAVVKTLFDSAITSGGITAILLNLLLPEERVAEAAQASAKGGALARWRKPLG

SEQ ID NO: 8805 - protein, 643 aa, Debaryomyces hansenii CBS767
MLSLRRSALAATKFSNNKRFFTSSCVKLQTIGDNIKGNDLNTAKYMGKQYHVIDHEYDCVVVGAGGAGLRAAFGLAEAGFKTACISKLFPTRSHTVAAQGGINAALGNMHKDDWHWHMYDTVKGSDWLGDQDAIHYMTREAPDSIYELENYGVPFSRNDEGRIYQRAFGGQSKEFGKGGQAYRTCAVADRTGHALLHSLYGQALRHNTHFFIEFMAMDLLMQDGECVGVMAYNQEDGTLHRFRSHKTIMATGGYGRAYFSCTSAHTCTGDGYAMVSRAGLPLEDMEFIQFHPSGIYGSGCLITEGARGEGGFLVNSEGERFMERYAPTAKDLACRDVVSRAITMEINEGRGVGPEKDHMHLQLSHLPPSVLKERLPGISETAHIFAGVDVTKEPIPVLPTVHYNMGGIPTKYNGEVITKGPNGEDKVVPGLLACGEVACASVHGANRLGANSLLDLVVFGRAVSHTIRDSLTPGTPLPPLAADSGKESIENLDKLRTADGSKSTAQIRLEMQKTMQKGCAVFRTQETLDECIEHIGQVDKTFSDVGTTDRSMIWNSDLVETLELQNLLTCATQTAASAAARKESRGAHAREDYPDRDDVNWWKHTLSYQTNFGDDVKLDYRDVIQTTLDESECKPVPPTVRAY

SEQ ID NO: 8806 - protein, 364 aa, Prochlorococcus marinus subsp. marinus str. CCMP1375
MTLWTIKIGTSLLRGNKEFSTNKIIETYCGFIAESKAKGDQVIIVSSGAVGLGCNRLGLKVRPNDLNSLQAAAAVGQGYLMSLYESAMKKYGYNVAQILLTRSDFESKRCFKNASLTIKKLLDWKVLPIINENDSIANEELRYGDNDTLSALVSTAISADQLVLLTDIDKLYSSDPKFDKDAKPITDVHSSNEIIQIQSNSNESNNWGTGGIKTKLTAAQIATKNGITVHLADGREPKILKDILKGSRGGTVFHPNPKPIGTMKSWLAHALYPQGTLHVDDGAYNAIQNKGASLLIVGIINIDGDFAKNQPVKIVNLEGIEIAKGISSISSESIRRFINNRIKSTQYPVVVHRDVLVLSSELLI

SEQ ID NO: 8807 - protein, 484 aa, Magnaporthe grisea 70-15
MNSSGVPNILRPGGSQRNVSNTPLGLADIRPRADSSLSDGIPGSAAYDVANTQSGTSNYMAPWALYAFDWCKYPPQGNGAGKLAIGSYLEDGHNFIQILDTQVVPTPPEAYSQGGSRTCLEFTKVAEATHSYPVTRLLWEPHSPNSQKQSTDLLATSGDHLRLWSLPSDASSSMSNNINRSSRDPAPPTKLTPLALLSNSKTPDHTAPLTSLDWNQVSQNLIITSSIDTTCTIWDIPSLTAKTQLIAHDKEVYDVRFCANSVDVFVSCGQDGSVRMFDLRSLEHSTIIYEPTGKDEKDPSGGRISPTLAQQTMSNPPPLLRLATSPHDTHLLATFAQDSNVIRILDVRQPGQALLELRGHGGSLNCIEWSPLRRGTLASGADDCQVLIWDLLQNQSAAPPLNGAPQPDNVRSPVASWQCDYEIGNLGWTPQLANSENGEWLGVSAGRGIWGLKTIDRSFGGAEPSSLHRMLGDWMAYIGPANRV

SEQ ID NO: 8808 - protein, 375 aa, Bacillus cereus ATCC 14579
MADKPARSKQIETEMTLEQVKEQLTELGKKRGVLTYEEIAERMNGFEIESDQMDEYYEYLGEQGIDLVGDNDNEEGPNNRQISKTEEEFDLNDLSVPPGVKINDPVRMYLKEIGRVDLLSAEEEIRLATRIEEGDEEAKRRLAEANLRLVVSIAKRYVGRGMLFLDLIQEGNMGLIKAVEKFDYRKGFKFSTYATWWIRQAITRAIADQARTIRIPVHMVETINKLIRVQRQLLQDLGREPSPEEIGEEMDLAPEKVREILKIAQEPVSLETPIGEEDDSHLGDFIEDQEATSPADHAAYELLKEQLEDVLDTLTDREENVLRLRFGLDDGRTRTLEEVGKVFGVTRERIRQIEAKALRKLRHPSRSKRLKDFLE

SEQ ID NO: 8809 - protein, 459 aa, Zea mays
MVAAADLEAAERVVAELREACAARLDEVAAAMEAEMRAGLREEGGSKIKMIVSFVDNLPTGNEEGVFYALDLGGTNFRVLRVQLAGKDRRVAKRESKEVSIPPHLMSGNASELFGFIASALAKYVAAAGEGDGRQRELGFTFSFPVRQTSIASGTLIKWTKAFSVDDAVGEDVVAELQTAMEKQGVDMRVAALINDTVGTLAAGRYNDEDVVVGVILGTGSNAAYVEEASAIPKLKLEGGELPKSGNMVINTEWGNFYSPCLPITEYDQALDEESLNPGEQIFEKLVSGMYLGEIVRRVLLKIASQSSILGDVSHTNLKTRFSLRTPDISAMHHDGTPDLRVVAEKLADNLRVRDTSLDTRKMVVEICDIVTGRSARLAAAGIVGILRKIGRAAPGDERRSVVAIDGGLFEHYAEFRKRLEATLVELLGEEASRLVEVKLTKDGSGLGAALIAAAHSQY

SEQ ID NO: 8810 - protein, 317 aa, Arabidopsis thaliana
MGESKRTEKTRVLVVGATGYIGKRIVRACLAEGHETYVLQRPEIGLEIEKVQLFLSFKKLGARIVEGSFSDHQSLVSAVKLVDVVVSAMSGVHFRSHNILVQLKLVEAIKEAGNVKRFLPSEFGMDPPRMGHALPPGRETFDQKMEVRQAIEAAGIPYTYVVGACFAAYFAGNLSQMVTLLPPKEKVNIYGDGNVKVVFADEDDIAKYTAKTLNDPRTLNKTVNIRPPDNVLTQLELVQIWEKLTGKELEKTNIAAQDFLANIEQMEIPHQAGIGHFYHIFYEGCLTDHEVGEDEEASSLYPDVKYKRMDDYLRMFL

SEQ ID NO: 8811 - protein, 324 aa, Hordeum vulgare subsp. vulgare
GSDLLTPGDNKTAHDSYAFLVNWLERFPQYKYRDFYIAGESYAGHYVPQLSQLVHRNNKGVRKPILNFKGFMVGNAVIDDYHDFVGTFEYWWTHGLISDDTYQKLQLACEFDSAEHESEACNKINNVAEAEEGLIDAYSIYTPTCKKTSLHRRRLIKGRRPWLPRGYDPCTEQYSTKYYNLPEVQKAFRANVTGIPYSWTACSDVLSDHWKDSPRSMLPIYRELIAAGIRIWVFSGDADSVVPLTATRYSIDALYLPTVTNWYPWYDEEEVAGWCQVYKGLTLVTIRGAGHEVPLHRPQQALKLFEHFLQDKPMPRPAHSIQSF

SEQ ID NO: 8812 - protein, 1542 aa, Yarrowia lipolytica CLIB122
MPAPSIAKSYSRSMGLNRSDDEQSPPQTYANMPGAFAPPPRGHQSRPSQSSIDLQPTSSYTREGYHDEPSSPKKHHGMRHSLSKRFSGSSKALSSLTGLGRRNSKRRGDSSTGSSAPTSPAMEDYAHSPSHSHAHANTSMQSVTSQQTHLGNVSQQSFATAPGNSTASLSHSGQTSRNVSSGSTVPGAVPQGSYGVPEKPYTPAADRSQTAPDSAGNSSFYNRTLDPGRTLDPGRAGGPVSHAIPAAPAVSSAPAHAAAGAAPSHTPANFPQVATQFGWEQQQPHTSMVENTEHEHVNDQTSQHLANMHLTSDGASSDYEEEQQQQHAGLGLGLHHDPRRMSTAFQNRAEEPNPDEPDQELDDDYEYEDSREILDDTRDYSAQEQYAQGYAQQLEREHQRQQYERQQLERQKFEQEQEQLQHQRQLEQQRKMEQEQEQLQRQQYEQQRQAQLAAHAQAQAQAQQQAQAQAQAQAQAHAQDQAQAQAQAEQHAQPASPLQLQPPTQTQPPVKIHVAPGTHVQQHSQPQLARGYEPQYTNNDSVTAHSSAHTAHNVKPRPQVTIPAASPVSLSGSPVSPRPPIPQTQPVQQQPPAPTHAAPNVPKASSPVATKASSELPKTTEEWKEKGAATAVKTEVTPSGESTTKIIRKGVNDFSFGRPLGEGSYSTVQAAIDRHTLREYAIKVLDKRHIIKEKKVKYVNIEKNTLNRLGDHPGIVRLYYTFQDESSLYFVLDYAANGELLSLIKRTTSLNEECTKYYGAQLLDAIDYMHNKGVVHRDLKPENILLDDKMRIKVTDFGTAKLMEPLKNPDGTVSDKYPEDVKAHSFVGTAEYVSPELLTDKATGKSSDFWAFGCILYQMLAGRPPFKAGNEYQTFQKIVKCQMSYPPGFPFVARDLIKRLLVVNPRQRLKMDQIKSHPFFEGVDWNDRKAIWKGARPKLQPYRPSAKSSNPMARQAAMPPHVPSTQVQPMAPRQIPNYKAMQQQYRARQEAQAKQSAHAAAAALAMKPSAPFAKKDNDLSPTNSGGASKKNGSNTSLHLQTKTSGPRRAGQTGPSSSTERLQSPDKSSPSPTAATPAAAAAASNGATGSAGGGMASRQFRSAAPVTSTMPGGFPNPALAAATMASPPPAEPVTAPAPASAPAVPTLTSSQTAPQAAPQTAPQTQHVQSMVLPEDQALPGHKEVQQQQHVSNTPAPSAVPGIPSVAVPGPSASVPTTSAADTTAASVQPGDTTQTMMDDEEDDEEAEVLHATELSGNPPRTNLDNPPLLPAASQLDAEFAGLMMAHDERILKLGHIYCTATSRKEEDEEKEHHTRLSKFFTGPKKKRRIFLVTTLCRALVVSMDDKRIRVEIDLMSPYVGIRDYPDRKNGGGVFALEVQQRVYYIEDSNGSAEWIRAISKAAEYGEFREIVAAQHNASIANAAAASAITHTSTTTGPGHAAAAAAAARSNPATPNINNGTAAFGSPTNAAQPGSPYFDYVGHSNAMYSSPQQQQLPTAYGSNTYKFQEAPAVPKAPVTSTTSKFLARNEERKQLRRLGNRQPS

SEQ ID NO: 8813 - protein, 391 aa, Listeria monocytogenes str. 4b H7858
MNQKIKQAVLNNEEAMIAFRRDLHMHPELQWQEFRTTDKVAKELDKLGIPYRRTEPTGLIAELKGGKSGKTVALRADMDALPVQELNQDLPYKSTEDGKMHACGHDAHTAMLITAAKALVEIKDELPGTVRFIFQPSEEIAEGAKAMIAQGAMEGVDHVFGIHIWSQTPSGKISCVVGSTFASADIIQIDFKGQGGHGAMPHDTIDAAVIASSFVMNLQSIVSRETDPLDPVVVTIGKMDVGTRYNVIAENARLEGTLRCFNNITRAKVAKSIEHYAKQTAAIYGGKAEMIYKQGTQPVINDEKSALLVQETITESFGEEMLYFERPTTGGEDFSYFQDEAPGSFALVGCGNPEKDTEWAHHHGRFNIDESVMKNGAELYAQFAYNYLNQN

SEQ ID NO: 8814 - protein, 448 aa, Ustilago maydis 521
MREVLSLHVGQAGIQIGNACWELYLAEHGLSPDGRILEGSPSENDDGFSTFFSETGSGKYVPRSIYVDLEPNVVDEVRTGTFRSLFHPETLVTGKEDAANNYARGHYTVGKELIDQTLDRVRKLADACSGLQGFFVFHSFGGGTGSGFGSLLLERLAQDFGKKAKLEFSVYPSPKMSSSVVEPYNSVLTTHTTLENSDCSFMVDNEAIYDICRTKLGIASPGFTNLNRLIAQVVSSITASLRFDGSLNVDLNEFQVNLVPFPRIHFPLATYAPILSAAKAGHEQNSVAEMTFSSFEKGNQMVKADPRDGKFMACCLLYRGDVVPKDVNSAVATIKTKRTIQFVDWCPTGFKIGICNEPPTTVPGGDLAKVSRSLCMLANTTAIAGAWGRLDNKFDLLYSKRAFVHWYVGEGMEEGEFSEAREDLAALEKDYEEVGLDSVDVGEEDLEY

SEQ ID NO: 8815 - protein, 142 aa, Francisella tularensis subsp. tularensis SCHU S4
MSKEIRYNPFELKHSINDLFDNFFSFPKSYQEEKYLENIHLDITEDEAAYNISADLAGIEEKDIDIELDKNKLSIKAKREHLDKDKKHHIQERYYGEFQRSITLPDNIDSDKIEAKYSNGVLSLNIPKKEKDNTTKKISIKS

SEQ ID NO: 8816 - protein, 104 aa, Brassica napus
  misc_feature (10)..(10): Xaa can be any naturally occurring amino acid
  misc_feature (94)..(94): Xaa can be any naturally occurring amino acid
  unsure (1)..(104): unsure at all Xaa locations
MARTSFKMEXDLEKRQSESARIRDKYPDRIPVIVEKAGKTDVPEIDKKKYLVPADLTVGQFVYVVRKRIKLSPEKAIFVFVKNTLPPTASLMSXIYEENKDEDG

SEQ ID NO: 8817 - protein, 1238 aa, Bordetella pertussis Tohama I
MPAPHRLYPRSLICLAQALLAWALLAWAPAQASQELTLVGKAAVPDVEVALDGDDWRWLARKRVLTLGVYAPDIPPFDVTYGERYEGLTADYMAIIAHNLGMQAKVLRYPTREQALSALESGQIDLIGTVNGTDGRQQSLRLSVPYAADHPVIVMPIGARHVPASNLAGQRLAVDINYLPKETLARAYPQATLHYFPSSEQALAAVAYGQADVFIGDALTTSHLVSQSYFNDVRVVAPAHIATGGESFGVRADNTRLLRVVNAVLEAIPPSEHRSLIYRWGLGSSISLDFAHPAYSAREQQWMADHPVVKVAVLNLFAPFTLFRTDEQFGGISAAVLQLLQLRTGLDFEIIGVDTVEELIAKLRSGEADMAGALFVNSARESFLSFSRPYVRNGMVIVTRQDPDAPVDADHLDGRTVALVRNSAAIPLLQRRYPQAKVVTADNPSEAMLMVANGQADAVVQTQISASYYVNRYFAGKLRIASALDLPPAEIALATTRGQTELMSILNKALYSISNDELASIISRWRGSDGDPRTWYAYRNEIYLLIGLGLLSALLFLSWIVYLRRQIRQRKRAERALNDQLEFMRVLIDGTPNPIYVRDKEGRMLLCNDAYLDTFGVTADAVLGKTIPEANVVGDPALAREMHEFLLTRVAAEREPRFEDRDVTLHGRTRHVYQWTIPYGDSLGELKGIIGGWIDITERAELLRKLHDAKESADAANRAKTTFLATMSHEIRTPMNAIIGMLELALLRPTDQEPDRQSIQVAYDSARSLLELIGDILDIAKIEAGKFDLAPVRTALRVLPEGAIRVFDGLARQKGIELVLKTDIVGVDDVLIDPLRMKQVLSNLVGNAIKFTTEGQVVLAVTARPDGDAAHVQFSVSDTGCGISEADQRQLFKPFSQVGGSAEAGPAPGTGLGLSISRRLVELMGGTLVMRSAPGVGTTVSVDLRLTMVEKSVQAAPPAAATAATPSKPQVSLRVLVVDDHKPNLMLLRQQLDYLGQRVIAADSGEAALALWREHAFDVVITDCNMPGISGYELARRIRAAEAAPGYGRTRCILFGFTASAQMDEAQRCRAAGMDDCLFKPIGVDALRQRLNEAVARAALPTPPSPQAAAPATDDATPTAFSAESILALTQNDEALIRQLLEEVIRTNRADVDQLQKLHQQADWPKVSDMAHRLAGGARVVDAKAMIDTVLALEKKAQGQAGPSPEIDGLVRTLAAQSAALETQLRAWLEQRPHQDQP

SEQ ID NO: 8818 - protein, 243 aa, Triticum aestivum
MSAAGDRDLRELAPLEAILFDIDGTLCDSDPFHFLAFRELLQEVGFNNGVPITEEFYSANISGWHNDALAGALFPELDHAKGMEFMDRKEALFRKLAAGELKGLAGLQELCTWIGGRNLKRAAVTNAPRANAELVLSLLGLPSFFPVLVIGSECERAKPSPDPYLKALDLIGASPDHTFIFEDSASGIRAGVAAGVAVVGLTTGNPEKVLRDAGASLLIEDFRDPKLMAVLQELDPAPADKQG

SEQ ID NO: 8819 - protein, 229 aa, Francisella tularensis subsp. tularensis SCHU S4
MIKKIIYSLSILSCSLGFSADSDTKYEKAIFAGGGFWCLESDFEYMQKHQDLSHNGIIKVISGYDGGLQKDPTYKTVSAGITNYKESVEVIYDPTKISYQELVEYFYRRIDPTDFKGQFCDKGKQYQSAIYYNNDKQKQVAEEVTKKLKEEFKKHNQSVYTQILPSTHFYKAESYHQDYHHKNPKRYCYYRTGCGRDLTINKVWQNIDWKYSNVVPFDIPSSYAECLIR

SEQ ID NO: 8820 - protein, 103 aa, Cornopteris decurrenti-alata
RKQLATKAARKSAPATGGVKKPHRFRPGTVALREIRKYQKSTELLIRKLPFQRLVREIAQDFKTDLRFQSSAVLALQEAAEAYLVGLFEDTNLCAIHAKRVTI

SEQ ID NO: 8821 - protein, 367 aa, Aeropyrum pernix K1
MPLGVGESLAPAAEPARPSDSMRHNSRNAPGHITSALAFKEPIAPSRRVHNGSILGAGDITDSDVLPYDGRDYGDPPRLNPLFISIASLPRSLGAFCKCESLNSAEYYVLGLAFSVVVGDGAPIPLASPGPMSPSLATVSSLLEAARGRLHILAGRGLGWHLHSSTTALPILAVLYAYWLPRGRVEGVDRRVILSKGHASLGFYALLEEMGLLERGSVERLFARPGSPLQAHPEAGRTPLTLVSNGSLGQALSVSNGLVIGSRLKGRRVEVAVVLGDGELDEGQVWEAAATAAAMRLWEVVAIVDRNRVQHTGETEAIKPKEPLEDRWRSFGWEAVTVEGRVEEIARALDSRAGDRPTAIIVEAVDA

SEQ ID NO: 8822 - protein, 647 aa, Zea mays
MATMKLGSKPEIFVLQDLTWRCTIELESDVVVEVGEMSFYLHKFPLLSRSGVLQRMISEYQAPADGGGMCTLQLDDIPGGAKAFELAAKFCYDVKIELNALNVVCLRCAAEYLRMTDDYAEGNLITQAECFLVDVLANWKDSIKALETCEGVLPTAEDLHLVSRCITALASKACGSDAAAPVVRNASVDKDALWNGIRSGDTTSSAAAAAAAAGMDWWYEDVSFLSLPMFKRLIQAMEAKGMRDESIAGAIMFYAGRFLPGLKRNTSFSNALASYGADGSGGAGGGMSSRNITPRAASVSAPSEGDQRYFLEEIVALLPTKKGVASTKFLLGMLRTAMLLHASPLCRENLERRIGAQLEDASLDDLLVPNLGYHVETLYDIDCVQRILDYFMSSTDGIGTGYTSPALAEEGGGSLGIPQGATPSSSLSPITMVAKLMDGFLAEVAPDTNLKLPKFQALAAVVPDYARPVDDGIYRAIDIYLKSHPWLSESEREQLCRLLNCQKLSLEACTHAAQNERLPLRVVVQVLFFEQLRLRTSIAGWFFVSDNAAGGDGARPHAGGAIVPKGTAAIAGCPQADADSDVEGDAPDGKETITDVKARVSDLEKECKSMKQEIRRLGKPRRSWSLLTRKCGFGAKVQQAQTAMSGK

SEQ ID NO: 8823 - protein, 372 aa, Pseudomonas syringae pv. syringae B728a
MRSKVTGAQRWVVKIGSALLTADGKGLDRNAMGVWVEQMVALHEAGVELVLVSSGAVAAGMSRLGWTARPSAMHELQAAAAIGQMGLVQAWESSFAEHGRHTAQILLTHDDLSDRKRYLNARSTLRTLVELGVVPVINENDTVVTDEIRFGDNDTLAALVANLVEADLLVILTDRDGMFDADPRNNPEAQLIYEARADDPALDAVAGGTGGALGRGGMQTKLRAARLAARSGAHTVIVGGRIERVLARLKGGERLGTLLSPERGMLAARKQWLAGHLQTRGTLVLDDGAVAALARDQKSLLPVGVKLVQGSFRRGEMVVCVAQDGREIARGLSNYSAIEAQKIIGHSSESIVRELGYMAEPELIHRDNLILV

SEQ ID NO: 8824 - protein, 177 aa, Triticum aestivum
  misc_feature (99)..(99): Xaa can be any naturally occurring amino acid
  misc_feature (108)..(108): Xaa can be any naturally occurring amino acid
  unsure (1)..(177): unsure at all Xaa locations
MAPTVMASSATSVAPFQGLKSTAGLPVSRRSNGASLGSVSNGGRIRCMQVWPIEGIKKFETLSYLPPLSTEALLKQVDYLIRSKWVPCLEFSKVGFIFXREHNASPGXYYDGRYWTMWKLPMSGCTDATQVINEVHEVNKEYPDAYVRIIGFDNMRHVQRVSFIAFKPPGCDESGKA

SEQ ID NO: 8825 - protein, 223 aa, Bacillus halodurans C-125
MIEERLKHYLEKQIPARDQYIEQMEREAHEQQVPIMDLLGMESLLHLLKMAAPARILEIGTAIGYSAIRMAQALPEATIVSIERDERRYEEAHKHVKALGLESRIELLFGDALQLGEKLELYPLFDVLFIDAAKGQYRRFFDMYSPMVRPGGLILSDNVLFRGLVAETDIEHKRHKQLATKIDTYNQWLLEHPQYDTRIFPVGDGIAISIKRETKGDTDDEKA

SEQ ID NO: 8826 - protein, 216 aa, Idiomarina loihiensis L2TR
MADIKHLIANNKEWAEQQVKNDPDFFKRLVGQQSPQYLWIGCSDSRVPANEIVGMAPGELFVHRNVANQVIQTDFNCLSVIQFAIEALKVRHILVVGHYGCGGVKAALESKPHGLVDHWLYPIRDVYREHAEELEQLGETEQIDRLCELNVIEQVKNLAKTNMVQEAWDKGESLTIHGWVYRLDNGLVNDMNVSVSSREGMEQVYHVYHQKLPKGG

SEQ ID NO: 8827 - protein, 443 aa, Pseudomonas putida
MNTDLKQRLDNDPMGRFQYLAIGICIVLNMIDGFDVLVMAFTASSVSAEWTLNGAQVGLLLSAGLFGMAAGSLFLAPWADRFGRRPLILLCLALSGIGMLLSAMSQSPLQLALLRGLTGLGIGGILASSNVIASEYASKRWRGLAVSLQSTGYALGATLGGLLAVWLLGHWGWRSVFLFGGIVTVLVIPLVLLWLPESLDFLLARRPANALARVNRLAARLGQPALAQLPTAMAREQGAARGFRQLLTPAMRRTTLVIWLLFFLVMFGFYFVMSWTPKLLVAAGLSAQQGITGGVLLSVGGILGAALIGGLASRWPLTRVLALFMLITAVLLVLFVVNGASVSAALALGLLIGLFSNGCVAGLYALSPVVYDASVRATGVGWGIGIGRMGAILSPTVAGMLLDGGWQPLHLYGVFASVFVLAAGCLLLLRPAASTARPVLADA

SEQ ID NO: 8828 - protein, 624 aa, Xanthomonas campestris pv. campestris str. ATCC 33913
MANERPAQQSDIKLLISKGLEQGYLTYAEVNDHLPDDLVDPEQIEDIISMINGMGIDVHEVAPDAETLLLNDGNTGNREVDDTAAEEAAAALTALDTEGGRTTDPVRMYMREMGTVELLTREGEIAIAKRIEEGLSQVQAALGTFPLSTELLLSDYEAHKEGKKRLAEIVVGFNDLIEEADAAAAALAAAGPVAVDEDAVDEDADEDGDDDAAEEEAGPTGPDPVEVATRMENLANEYAKFKKAYVKYGAEHKNVAKAREDMAAIFTTLKLPLPLTDALVTQLRGVVNGIKDHERKVLHLATTVARMPRKDFIRSWEGNQTNLEWVEDALKRKQKWSSALRDVKDQIVSEQQGSIEMEKANYLTLAEIKDISRAMAYGEAKARKAKKEMVEANLRLVISIAKKYTNRGLQFLDLIQEGNIGLMKAVDKFEYRRGYKFSTYATWWIRQAITRSIADQARTIRIPVHMIETINKLNRISRQMLQQFGREATPEELAKEMDMPEDKIRKVMKIAKEPISMETPIGDDEDSHLGDFIEDTNVESPIDNTTNINLSETVRDVLAGLTPREAKVLRMRFGIDMNTDHTLEEVGKQFDVTRERIRQIEAKALRKLRHPSRSEQLRSFLDID

SEQ ID NO: 8829 - protein, 369 aa, Streptococcus pyogenes SSI-1
MTKQKEITTFNVQVAEFIRYHKKEGTAIDDDVTEKLVIPFALDADQIDDLLERLTDGGISITDKEGNPSSKYIVEELKPEELTDEELIGSNSAKVNDPVRMYLKEIGVVPLLTSEEEKELAVAVAKGDLMAKQRLAEANLRLVVSIAKRYVGRGMQFLDLIQEGNMGLMKAVDKFDYSKGFKFSTYATWWIRQAITRAIADQARTIRIPVHMVETINKLVREQRNLLQELGQDPTPEQIAERMEMTPDKVREILKIAQEPVSLETPIGEEDDSHLGDFIEDEVIENPVDYTTRVVLREQLDEVLDTLTDREENVLRLRFGLDDGKMRTLEDVGKVFNVTRERIRQIEAKALRKLRHPSRSKQLRDFIED

SEQ ID NO: 8830 - protein, 59 aa, Glycine max
LKASIPTTINSGRGAEFEWAVIALFHLLITSTARVRALREAFYRQNLPYVTNLLATVLV

SEQ ID NO: 8831 - protein, 280 aa, Listeria monocytogenes EGD-e
MTLSFSDTYRLNNGIEMPRHGFGVYKLTDEARMRTALETAVDVGYRLFDTASFYHNEKELGDFFASSGLKRDEFFVTTKMWNTEQGYDETLRAFEKSQKKLQLDQIDLYLVHWPKQDTFFDTWRAVEKLYDEGLVRAIGVSNFEAHHLDRLRTSANVLPVVDQLETHPHFPNHLLHRYLEELHIVHQAWSPLGRGGVLQEQILIDLAEKHGKSPAQIVLRWHLQNNISIIPKSETPSRIRENAAIYDFELSEADMRQVERLNTGERVSHAPDVMYVRSEI

SEQ ID NO: 8832 - protein, 478 aa, Ralstonia eutropha JMP134
MTRSTKIVATIGPASSSLEVLTRMIAAGVDVVRLNFSHGTAQDHIDRATLVREAAQACGREVAIMADLQGPKIRVGKFESGKVTLKPGDPFVLDSSCQLGNQERVGLDYQDLPRDVGPGDLLLLNDGLIVLVVDRVLGTEIFTTVRIGGDLSNNKGINRQGGGLSAPALTAKDMDDIKTAMALGADYVAVSFPKNATDMEMARQLAAVAGQPYGRKARMIAKIERAEAINPGVLEEILQASDGIMVARGDLAVEVGNAAVPALQKRMIKLAREANKLTITATQMMESMIVNPVPTRAEVSDVANAVLDGTDAVMLSAETAAGRYPVETVEAMAAVCIEAEKSEVVQLDTDFLNQTFSRIDQSVAMGALFTAYHLQVKAIAALTDSGATALWMSRHRIHVPIYAMTPNVASQRKMQLYRNVVPLPLDASTDRDTALEQAEELLLAQGVVQRGDFIVLTIGEPMGQPGGTNTLKIVRVGS

SEQ ID NO: 8833 - protein, 316 aa, Arabidopsis thaliana
MATMKIPMTVPSPRVDADQLFKAFKGRGCDTSVIINILAHRNATQRALIEQEYETKFSDDLRKRLHSELHGHLKKAVLLWMPEAVERDASILKRSLRGAVTDHKAIAEIICTRSGSQLRQIKQVYSNTFGVKLEEDIESEASGNHKRVLLAYLNTTRYEGPEIDNASVENDARTLKSAVARKHKSDDQTLIQIFTDRSRTHLVAVRSTYRSMYGKELGKAIRDETRGNFEHVLLTILQCAENSCFYFAKALRKSMKGLGTDDTALIRIVVTRAEVDMQFIITEYRKRYKKTLYNAVHSDTTSHYRTFLLSLLGPNV

SEQ ID NO: 8834 - protein, 508 aa, Haemophilus influenzae R2866
MSSQCPFSHLAATNLTMGNGAPVADNQNSLTAGPRGPLLAQDLWLNEKLADFVREVIPERRMHAKGSGAFGTFTVTHDITKYTRAKIFSEVGKKTEMFARFTTVAGERGAADAERDIRGFALKFYTEEGNWDLVGNNTPVFFLRDPRKFPDLNKAVKRDPRTNMRSATNNWDFWTLLPEALHQVTVVMSDRGIPASYRHMHGFGSHTYSFWNEAGERFWVKFHFRTQQGIKNLTDAEAAEIIANDRESHQRDLYEAIERGDFPKWTLFVQIMPEADAEKVPYHPFDLTKVWPKKDYPLIEVGEFELNRNPENFFADVEQSAFAPSNLVPGIGASPDRMLQARLFNYADAQRYRLGVNYRQIPVNRPRCPVHSNQRDGQGRVDGNYGSLPHYEPNSFSQWQQQPDFAEPPLRINGDAAHWDYRNDDKDYFSQPRALFNLMNAEQKQSLFNNTAAAMGDAPDFIKYRHIRNCHWCDAAYGEGVAKALGLTVEDALKARDTDPALGQGGLL

SEQ ID NO: 8835 - protein, 522 aa, Triticum aestivum
MARGGGNGEVELSVGVGGGGAGAGGADAPAVDISLGRLILAGMVAGGVQYGWALQLSLLTPYVQTLGLSHALTSFMWLCGPIAGLVVQPCVGLYSDKCTSRWGRRRPFILTGCILICIAVVVVGFSADIGAALGDSKEECSLYHGPRWHAAIVYVLGFWLLDFSNNTVQGPARALMADLSAQHGPSAANSIFCSWMALGNILGYSSGSTNNWHKWFPFLRTRACCEACANLKGAFLVAVLFLAFCLVITVIFAKEIPYKAIAPLPTKANGQVEVEPTGPLAVFKGFKNLPPGMPSVLLVTGLTWLSWFPFILYDTDWMGREIYHGDPKGTPDEANAFQAGVRAGAFGLLLNSVVLGFSSFLIEPLCKRLGPRVVWVSSNFLVCLSMAAICIISWWATQDLHGYIQHAITASKEIKIVSLALFAFLGIPLAILYSVPFAVTAQLAANRGGGQGLCTGVLNIAIVIPQVIIAVGAGPWDELFGKGNIPAFGVASAFALIGGIVGIFLLPKISRRQFRAVSGGGH

SEQ ID NO: 8836 - protein, 655 aa, Debaryomyces hansenii CBS767
MSTSRTPIPFSRESLEQVLKRRFFFAPAFEIYGGVSGLYDYGPPGCALQANIMDTWRKHFILEEDMLEVDCTMLTPHEVLKTSGHVDKFADWMCRDLKTGEIFRADHLVEEVLEARLKGDKAARGVAINEGEEEDADKKKRKKKVKEIKSIKLDDEVVKEYENVLAQIDGYSGSQLGELMTKYKINNPATDGPLELPIEFNLMFETAIGPSGQLKGFLRPETAQGQFLNFSKLLDCNNEKMPFASASIGKSFRNEISPRAGLLRVREFLMAEIEHYVDPDNKSHSRFDEIKDLKLKFLPKGVQESGSNELTEKSLGEAVSSGMVDNETLGYFLARIYSFLIKIGVDPSRLRFRQHMSNEMAHYAADCWDAELHTSYGWIECVGCADRSAYDLSVHSARTNEKLVVRQPLPEPVLVEKYEVNIAKKKFGPKFRKDAGTVENWLLARTQCELEDLCKELNENNKIVFKIDSIPNSIELDTEFVKIEKVKRTEHIREFTPNVIEPSFGIGRILYSIFEHQFWARPEDKDRTVLSLPPLVAPTKVLLVPLSSNAELQPIVKKISAFLRKEQVPFKVDDSSASIGKRYARNDELGTPFGITIDFDSVKDESVTLRDRDSTKQVRGSLEDIVEAIKDIAYNNVSWTDGTSKLTPFDSQSEA

SEQ ID NO: 8837 - protein, 353 aa, Hordeum vulgare
MVSAVLRTILVTGGAGYIGSHTVLQLLLQGFRVVVVDSLDNASEEAIRRVRQLANNTNLLEFRKVDLRDKAALEDIFSSQRFEAVIHFAGLKAVGESVEKPLLYYDNNLIGTITLLQVMAAHGCKKLVFSSSATVYGWPKEVPCTEEFPLSATNPYGRTKLVIEDICRDLQRSDPDWKIILLRYFNPVGAHPSGYIGEDPLGVPNNLMPYVQQVAVGRRPALTVYGTDYNTKDGTGVRDYIHVVDLADGHIAALRKLYEDSDRIGCEVYNLGTGKGTSVLEMVAAFEKACGKKIPLVYAGRRAGDAETVYAATAKAEKELKWKAKFGVEEMCRDLWNWASKNPYGYGSSDNGH

SEQ ID NO: 8838 - protein, 437 aa, Petunia x hybrida
MNTNRAVLVPHRGEVGGKQKNGQADGRNNRRVLGDIGNLVTGAPVIEGKPKAQISRPATRSFCAQLLANAQAEKNKVKPLAEVVNKVPAKKKASDKPAVQEAVIVISPDEEVKKKTIEKSPLSKRKAKKTGKTLTSTLTARSKAACGLSNRPKNEIDDIDAADAANHLAVVEYVEDIYNFYKLTEDESRVNNYMEFQPELNHKMRAILVDWLIEVHRKFELMPESLYLTINILDRFLSMKTVPRKELQLVGISAMLIACKYEEIWAPEVNDFMHISDNVYTRDHILQMEKAILGKLEWYLTVPTPYVFLVRYIKAAMPSDDQEIQNMAFFFAELGLMNYTTTISYCPSMLAASAVYAARGTLNKGPLWTPTLQHHTGYSEEQLMECTKQLVSYHKGAAESKLKAIYRKFSSPDRGAVALFPPARNLLPTTTTTTTSS

SEQ ID NO: 8839 - protein, 620 aa, Ustilago maydis 521
MAPSLHRSVGGIRTLGIRSSRPQPEIAISDLLSNSAAAQGIRAALPNSLARTVQSEAAVGRSWFRSSSASQRASSLSDNSDGQAGEPRVARKQRGRRWLRRSGMLVAALGVVYIVDEYINARTAQRNLLTAWTGLQIAMDYKLNFDRNSLESINALHERCADKLMYVCEKNQGLYVKLGQAIGCQAAILPKPYHQLTKLFDNAERLPYEQVRKVLIDELGADPKEVFAEFDEVPVAAASVAQVHRARLKPPPGSAPGTLGPEVAVKVQRPNIRKYAKWDLWSFRVLLKLYERIFELPLSFSGQYISDQIEQETFFDRELANSLRAKTAIETDPVGLVRRTCYVPQFYKQFCTPRVLVMEWIGNTCRMTDRDKLDEWGLSAKQVSRSVCEAFASQIFQHGFVQADGHPSNVLVRQHPNGKKGQHQVVLIDHGLYVELSEDFRRKYAQLWKAIFTLDLKTLDEITVSWGMGQGSSELFASATLLRPWSKPKSKDEANKLGEHAPKTDLELQREIKDKLKIFLEHTELLPKELLFVSRSMRIIQANNQVLGSPVNRLNILAKHAAAALISSTDTPSLYRVFRPIRSNTALKDTSIGQRFSTWIKDRFDFLLCQSSGVGLDGEN

SEQ ID NO: 8840 - protein, 333 aa, Zea mays
MGSQTIASQAGGGGRGMGSSGGAGAAQRGQMQSLARQGSLYNLTLDEVQSHLGEPLHSMNLEELLKSVFPDDLDPDGGTTSQYEQSSGLLRQGSITMPPELSRRTVDEVWKDIQDAPNRNVGESGRRKRERQPTLGEMTLEDFLVKAGVVAEGYLKDLNGIGSVEQVGSTGAAGLTAGAQWLDHYQQRITAIEPHQHRQHSLPGAYIPGQLSLQSLNVGPSAILESYSDGHISSPMMGALSDSPMPGRKRGSPGDVADKLVERRQKRMIKNRESAARSRARKQAYTNELENKVSRLEEENKKLTTLKELENILFSEPLPEPKYQLRRTGSATF

SEQ ID NO: 8841 - protein, 205 aa, Oryza sativa (japonica cultivar-group)
PSQATLVPYAAVESPYPLKGRSASKLPVSAPGRAALPNATPNLNIGIDLWSTPPALAVPAGQGEASPGLALARRDGVAHLDERELKRERRKQSNRESARRSRLRKQQECEELARKVAELTTENSALRSELDQLKKACEDMEAENTRLMGDKAQYKGPTVTTTLGMSIDSSKTQHHDDEGQLHKNTNNNSNGNYVGGSHKPEANSR

SEQ ID NO: 8842 - protein, 451 aa, Vibrio vulnificus YJ016
MATHFDYICIGGGSGGIASANRAAMYGAKVALIEAKDLGGTCVNVGCVPKKVMWHGAQIAEAMSLYAPDYGFDVEVKGFDWSKLVESRQAYIGRIHQSYDRVLGNNKVNVIKGFAKFVDEKTVEVNGEHYTADHILIAVGGRPTIPNIPGAEYGIDSNGFFDLAEQPKRVAVVGAGYIAVEIAGVLNALGTETHLFCRKESPLRSFDPMIIDTLVEVMAAEGPTLHTHSVPKEVVKEADGSLTLHLENGESQNVDQLIWAIGRHPATDAINLSATGVATNERGYIKVDEFQATNVAGIYCVGDIMEGGIELTPVAVKAGRQLSERLFNNKPNAKMDYDLVPTVVFSHPPIGTIGLSEPEAIAQYGKENVKVYTSGFTAMYTAVTQHRQPCKMKLVCAGEDEKVVGLHGIGFAVDEMIQGFGVAMKMGATKADFDSVVAIHPTGSEEFVTMR

SEQ ID NO: 8843 - protein, 590 aa, Bifidobacterium adolescentis
MKGDNMTEVNDPSLWWKQAVVYQVYPRSFKDSRGEGLGQIAGVTEKIGYLKELGVDAIWLSPFYPSQLADGGYDVDDYRNVDPKLGTMDDFDALAKAAHADGIKIVVDIVPNHSSNLHEWFKAALAAKPGSPERDRYIFRDGKGPNGDEPPTNWQNHFGGPAWTRVPDGQWYLHMFTKEQPDWNWKNEDVRADFIKTLRFWLDHGADGFRVDVAHGLAKDLDRDDLDDYVVWCTNDQPEDGSHPVIDRDEVHDIYHEWRKVFNEYDPPAFAVAEAWVRPSRQHLYASPDDLGQIFNFEFAKKDWIRDDMHLAIEEGLESAERSGSTATWVMSNHDVVRHATRYALPQVPTGEYHRLPLDWLLRDGTTYREDRALGTKRARAAIMMEMALPGSAYVYQGEELGLFEVADIPWDELEDPSAWRTSRSASTKGRDGCRVPLPWVAADAPQLDDPNDEFGHGGSFGFSPADAKAEPHLPQPKWYKDFAVDVESADPDSMLNLYRRVLALRHELQTTDLSLEWLPEDQPGKAHDGANGFPGGTIAYRRANGWASITNFGEEPITLPQGEVLLTSGPLTDDGKLPQDTSAWLKLAD

SEQ ID NO: 8844 - protein, 948 aa, Colwellia psychrerythraea 34H
MHKISLKDWVIILTIIPTTLIGFGLASYFSYSRSVELNDFLEQRAKSIIEPIAIASKDPLLSKNRDKLRQLIGFTHRNQSSIVKSIVIFTEDNQVFVTSAYHGDTNLMRLKAGVELPHHTNTETLSDYIIFRTPIIDENYNNQSNANITAMASSEYNYATNNSKPVIIGYIAMQIDKSHLNFQQQSQFIVAFAFALLGSLLSAIFAIRLIKKVTKPINSMVQAIERIREGKLESRVSGQLIGELNFLKNGINAMAQSLDGYQNEMQASIDQATIDLRESLEQFEIQNVELSISKRKAQEANRVKSEFLANMSHELRTPLNGVIGFTRQVLKTPLTENQRDYLQTIDRSANNLLTIINDILDFSKLDAGKMVTENIPFSLRESIDETLTLLAPSAHKKNIELSINLPQELPDSLVGDTMRIKQIITNLVSNAIKFTPQGSVAVDITSEEISQNNIKLKVIVTDTGIGMTTNQQRTIFDAFTQADQSITRLYGGTGLGLVICQRLAQEMNGDIGFSSEKNHGSSFWFTFQCEINAMPLMLELDNQHLANKTVLYFEENNHSREATKNLLKHWKMRVTSVINRHELSQVLSHSSQTQRGFDYALIGHNQTATALSELKKTIAQVQPISSNIHLALNNTSPSLQEALIASGAISCMSKPLSPTTLSRVLQPVMETKAEKLTLNAAMDKVLPIKVLAVDDNEANLKLIKALLLEQVAEVVEADNGMSAVELCKVENFSLIFMDIQMPIMDGISALKEIKQLTNNNNTPIIAVTAHALSGEREKMHQQGFNAYMTKPIDETMLRHIIYEYCDFDHLVNSTVPVISTDVINQVESASKVIDWPLALKRSANKADLAKEMLLGLVESLPETQLSIREAIDVQDIAQIKRLVHKLNGACCYTGTPNLAKITIQLETQLKMGLSTEELEPEFLEFFEHIEQVLFAVPEALKEMSENSH

SEQ ID NO: 8845 - protein, 264 aa, Synechocystis sp. PCC 6803
MNAVAACFNALRQRGECALIPFLTAGDPDLATTAEALRILDRAGADLIELGVPYSDPLADGPVIQAAATRALQKGVKLDDVLAIVREVHQDIAAPIILFTYYNPIFYQGVEVFLDKIKAAGVKGLVVPDLPLEESDRLLEATAERGLELILLVAPTSSPERQTAIAKKSQGFVYLVSVTGVTGVRTEVGSRVEALLAGMRQVTDKPIGVGFGISQPEQAEQVKAWGADAVIVGSAMVKRLAEGTPTEGLQALETFCRELKTAIS

SEQ ID NO: 8846 - protein, 467 aa, Candida glabrata CBS138
MASLFRPPESTRQNARSPRLKLPPLSNVSLAVPGESPTGKLSATSSRGSSATSANMKRPMPPPLPKLDVPLSAASSTEGLVRKMKQLSVEDESPQSGSSRGVERDDTTAVNQSVDSFFSNLISVYDQSSSAITSPKIDEPEDSAVKDALATRVPRSLTQGKDIDELSEEVWHSKNLLAEIETQGVLGEGAGGSVAKCKLRTGKKVFALKTINILNGDPEFQKQLLRELQFNKSFKSEYIVRYFGMFTDEQNSSIYIAMEYMGGKSLEAIYKELLSRGGRISEKVLGKISEAVLRGLSYLHEKKVIHRDIKPQNILLNEDGQVKLCDFGVSGEAVNSLATTFTGTSYYMAPERIQGQPYSVTCDVWSLGLTILEVAQGHFPFGPDKMATTIAPIELLTLILTFTPHLDDEPDKNIKWSRAFKSFIEYCLRKEARARPSPRQMIQHPWIQGQMKKQVDMRKFITKCWQK

SEQ ID NO: 8847 - protein, 568 aa, Magnetococcus sp. MC-1
MRTGGVMYKHDLIIVGAGLAGMRAAVEAVKAGVDVAVISKVHPLRSHSCAAQGGINAAINPKDSWESHAYDTVKGSDFIGDEDAIELMCQEAPNSVLEMDRMGTPFSRLEDGLIAQRPFGAASFDRTCYAADRTGQVLLHTLWEQLVKAGVRVYEECQILKISNVDGRIAGVVAYDIKKGEVFGVQAKVTLLCTGGYGRVFLTSTNATASTGDGMALAYRAGASLCDMEFVQFHPTGLRYSGILVTEGARGEGGYLINKDGDRFMTKYAPNKLELASRDVVSRAEQTEILEGRGVDGAIFLDLRHLGAQKINERLPQVRQLARDLEGVDPVYTPIPVRPTAHYSMGGIRTNKYGETILPGLWAAGESACVSVHGANRLGGNSLLDTIVFGYIAGRELGAKLGSMEMPTLPASEVQAVKDNIAQLVDRPNKGVRPASIRERLGESMNAYVSVFRHPDNIQKAADLIPTLRQDLTTMHLDDKSKVFNVDLLRAMEMQNLVDLAETIIAGAINRTESRGAHSRVDFPERDDENWRKHTITKWDNDAQTTAFSYEAVRTVGKDAYKLAVRSY

SEQ ID NO: 8848 - protein, 546 aa, Staphylococcus aureus subsp. aureus MSSA476
MSKEIDWRKSVVYQIYPKSFNDTTGNGIGDINGIIEKLDYIKLLGVDYIWLTPVYESPMNDNGYDISNYLEINEDFGTMDDFEKLIKVAHQKDLKVMLDIVINHTSTEHEWFKEARKSKDNPYRDYYFFRSSEDGPPTNWHSKFGGNAWKFDSETDEYYLHLFDVSQADLNWDNPEVRQSLYRIVNHWIDFGVDGFRFDVINLISKGEFKDSDKIGKEFYTDGPRVHEFLHELNRQTFGNTDMMTVGEMSSTTIENCIKYTQPERQELNSVFNFHHLKVDYVDGEKWTNAKLDFHKLKKILMQWQRGIYDGGGWNAIFWCNHDQPRVVSRFGDDTSEEMRIQSAKMLAIALHMLQGTPYIYQGEEIGMTDPHFTSIAQYRDVESINAYHQLLSEGHAEADVLTILGQKSRDNSRTPMQWSDDVNAGFTAGKPWIDISENYHQVNVRQALQNKESIFYTYQKLIQLRHTHDIITYGDIVPRFMDHDHLFVYERHYKNQQWLVIANFSASAVDLPEGLAREGRVVIQTGTVENNTISGFGAIVIETNA

SEQ ID NO: 8849 - protein, 195 aa, Schizosaccharomyces pombe
SRPHNTTHYRDPYGKRVGIIGMGAIGKSFAQKILPLGCEIVYHNRNRLEAEEEKRLGASFVSFDELLSSSDVISINCPLTPATHDLISTKEFEKMKDGVYIINTARGAIINEDAFIKAIKSGKVARAGLDVFLNEPTPNKFWLECDKVTIQPHCGVYTNFTVAKTEECVLASIETFLDTGIPTNPVNGPFGMNGC

SEQ ID NO: 8850 - protein, 335 aa, Ralstonia metallidurans CH34
MALRPLKPTSRSSLSLALPLRPEVMKPALLILNHLEPAHLALIAEHYDVRYAPTAAERATEVATNGKTFRAVLTIGSIGLTAKEIDAMPALELVCAMGAGYENIDTAKCRERGIAVGNGAGTNDSCVADHAMALLLASVRRVPAYDRATREGIWRNALPLAPNLSGKRMGIVGLGTIGRRIAQRGLGFDLEIGYHNRRPRTDVPHRYFDSVMSLAEWADYLIIATPGGAETRHMVDTPVLRALGPAGYLVNIARGSVVDTAALAAALRAGELGGAGLDVYESEPAPPVELFDCPNVVLTPHVAGWSPEAIFASVSQFVENARRHFAGEPLVAPVL

SEQ ID NO: 8851 - protein, 508 aa, Haemophilus influenzae 86-028NP
MSSQCPFSHLAATNLTMGNGAPVADNQNSLTAGPRGPLLAQDLWLNEKLADFVREVIPERRMHAKGSGAFGTFTVTHDITKYTRAKIFSEVGKKTEMFARFTTVAGERGAADAERDIRGFALKFYTEEGNWDLVGNNTPVFFLRDPRKFPDLNKAVKRDPRTNMRSATNNWDFWTLLPEALHQVTVVMSDRGIPASYRHMHGFGSHTYSFWNEAGERFWVKFHFHTQQGIKNLTDAEAAAVIASDRESHQRDLYEAIERGDFPKWTLFVQIMPEADAEKVPYHPFDLTKVWPKKDYPLIEVGEFELNRNPENFFADVEQSAFAPSNLVPGIGASPDRMLQARLFNYADAQRYRLGVNYRQIPVNRPRCPVHSNQRDGQGRVDGNYGSLPHYEPNSFSQWQQQPDFAEPPLRINGDAAHWDYRNDDNDYFSQPRALFNLMNADQKQSLFNNTAAAMGDAPDFIKYRHIRNCHWCDAAYGEGVAKALGLTVEDALKARDTDPALGQGGLL

SEQ ID NO: 8852 - protein, 1153 aa, Burkholderia fungorum LB400
MHQTQPQTPPPAAAATQAGASRPPAGGTQRIVKIRRDYNAWVGDETLEDYALRFTPRAFRRWSEFRVANTAIGAVSFLVLEAIGGALVVNYGFTNAICAILAVSLLIFLTGIPISYYAARNGVDMDLLTRGAGFGYLGSTLTSLIYAVFTFVFFALEAAIMSLALELYLKVPLSVAYVISALVIIPVVTFGITFINRLQGWTQPLWLVLLVVPYVVVLWREPHVLAEWVTFSGVSGNGHEFNLVAFGAGCTVVFSLIVQIGEQVDYLRFLPPRTRANRFRWWAALIAAGPGWIVPGAMKMLGGAFLAFLAIQHEIDPVKAVEPTQMYLVAYHYVFHSPEGALAAMTLFVIVSQLKINVTNAYAGSLAWSNFFARLTHSHPGRVVWLVFNVLIALLLVEMGVFEAISKVLALYANVAIAWIGAVVGDLVINKPLGYSPRHVEFKRAHLYDVNPVGVGAMLIASLIAALSHAGVFGTTAEALSSFIALLVAFVCAPLLAIATRGRFYLARDGRDLEEGAILRCVICENTFEREDMAHCPAYAGSICSLCCSLDSRCNDSCKPHARLPAQFGKSMRTLFPRLTLGPAGLRLAQYAGLLIAVVTLLGGVLAVQWYQSVRTLPNLDTTVHDVLLQGYLKAFFALALVGCIAAWWLVLANENRKVTQEESQRQAELLMQEIEAHRKTDAALQRASAAAESANRAKSRYVTGLSHELRTPLNSILGYAQLLLQGTDELPPARRNAVATIYRSGEHLLALVDGLLDVARIEAGKLQLNVTEISLPDFVAQLAAMLEPQATDKGLQFEFQTSGRMADVVRIDEKRVRQILINLIGNAIRFTSHGSVKVRASYAWEAITFEITDTGPGMPASELERLFLPFERGAAAREHDHGAGLGLTICRLLTELMGGNLEVQSEVGKGTRFIVKLFAPEVRAPQLLASGPLNVKGYDGPRRTVLVVDDLAEQRRIVVQTLAPLGFNVVEAASGPEALQWLGTASADLIVMDVSMPDMDGFEASRLIRDNHLSAAPVLILSANAFADDRDKGAAAGCDDYLAKPLYIPLLLDKLAALLQLHWIVEPTEAAAASAVARVDVTASLPATLREKLRAQLEMGYVQGFIEQLDAAEHGAPELAAVLEPLRALARRFRLTELAHLLAPTPQVHPDA

SEQ ID NO: 8853 - protein, 362 aa, Araucaria excelsa
SDSGKDAGRLSAAWQLYKAQEDLIKVAKEFGIKLTMFHGRGGTVGRGGCPTHLAILSQPPDTIHGSLRVTVQGEVIEQSFGEEHLCFRTLQRFAAATLEHGMHPPVSPKPEWRELMDEMGVVATEKYRSIVFKEERFVEYFRSATPELEYGRMNIGSRPSKRKPSGGIESLRAIPWIFAWTQTRFHLPVWLGFGAAFKHVIEKDSKNLHILRQMYNEWPFFRVTIDLVEMVFARGDPGITALYDKLLVSEDLWSFGEKLRANFLETRDLLLKVAGHRDLLEGDPYLKQRLRLRDSYITTLNVCQAYTLKRIRDPNFHVQLRPHLSKESSTNSAAELLKLNTTSEYAPGLEDTLILTMKGIAA

SEQ ID NO: 8854 - protein, 339 aa, Haemophilus influenzae R2866
MLKKLFHSALWGLAAAGVILFAVPRLNNSNIFTTDDIVSFKNAVRIASPAVVNVYNRSFSSSINDNEQLQVNNLGSGVIMSKDGYILTNKHVIQNADQIVVALQNGNIFEASLVGSDNLTDLAVLKIRANNLSTIPQNSNRQAHVGDVVLAIGNPYNLGQSVSQGIISAMGRNAVGDSVGRQNFIQTDASINRGNSGGALINSAGELVGISTLSIGKTANEIAEGLNFAIPIDIANDVLRKIMRDGRVIRGYFGVQSDISSSNEEGIVITGVSPNSPAAKSGIQVGDVILKLNNQEGISAREMMQIIANTKPNSKVLVTILRLGKILQVPVVIEEFPVN

SEQ ID NO: 8855 - protein, 361 aa, Burkholderia fungorum LB400
MHDETLLLPPDTQPDLPDGKPVVLIVDDTPDNLALLSDTLQAAGYAVLVALDGQSALQRLARITPDAVLLDALMPGLDGFETCRRIKADPRNRHLPVIFMTALTDSEHVVQGFRVGGIDYVTKPVKPSEVSARIAAHVQRSRQQRQADRVLEIGMRAALIAAASGEIRWQSDLARQRLAWYGSGRGLMDEADQVANEAANEEDRDCAASALFTPRRVDETALLHHPLSEAGPRLPMVLEQWFVRWIESGCDLQAAFETAADGVRRVVRVLGPATRGEWVILLEEFDDAAHTSALASQFGLTAREAEVLLWLSRGKTNRDIGDILGMAPRTVNKHLEHVFGKLHVETRAAAAAIAAKASTRY

SEQ ID NO: 8856 - protein, 362 aa, Araucaria excelsa
SDSGKDAGRLSAAWQLYKAQEELVQVAKQYGVKLTMFHGKGGTVGRGGGPTHLAILSQPPETINGSLRVTVQGEVIEQSFGEERLCFRTLQRYTAATLEHGMRPPTSPKPEWRAILDEIAVVATEEYRSVVFKEPRFVEYFRLATPLTRYGRMNIGSRPSKRKPSGGIESLRAIPWIFAWTQTRFHLPVWLGFVAAFNHILAKDKKNLQHIRQMYNEWPFFRVTLDLIEMVFAKGDPGIAALYDKLLVSEDLWSFGEKLRANFLETRDLLLKVAGHRDLLEGDPYLKQRLRLRDSYITTLNVCQAYTLKRIRDPNFHVQLRPHLSKESSTNSAAELLKLNTTSEYPPGLEDTLILTMKGIAA

SEQ ID NO: 8857 - protein, 334 aa, Schizosaccharomyces pombe 972h-
MTDVQETQKGALKEIQAFIRSRTSYDVLPTSFRLIVFDVTLFVKTSLSLLTLNNIVSAPLWDSEANKFAGLLTMADFVNVIKYYYQSSSFPEAIAEIDKFRLLGLREVERKIGAIPPETIYVHPMHSLMDACLAMSKSRARRIPLIDVDGETGSEMIVSVLTQYRILKFISMNCKETAMLRVPLNQMTIGTWSNLATASMETKVYDVIKMLAEKNISAVPIVNSEGTLLNVYESVDVMHLIQDGDYSNLDLSVGEALLKRPANFDGVHTCRATDRLDGIFDAIKHSRVHRLFVVDENLKLEGILSLADILNYIIYDKTTTPGVPEQTDNFESAV

SEQ ID NO: 8858 - protein, 362 aa, Araucaria excelsa
SDSGKDAGRLSAAWQLYKAQEELVQVAKQYGVKLTMFHGKGGTVGRGGGPTHLAILSQPPETINGSLRVTVQGEVIEQSFGEERLCFRTLQRYTAATLEHGMRPPTSPKPEWRAILDEIAVVATEEYRSVVFKEPRFVEYFRLATPELEYGRMNIGSRPSKRKPSGGIESLRAIPWIFAWTQTRFHLPVWLGFGAAFKHILRKDKKNLQHIRQMYNEWPFFRVTLDLIEMVFAKGDPGIAALYDKLLVSEDLWSFGEKLRANFLETRDLLLKVAGHRDLLEGDPYLKQRLRLRDSYITTLNVCQAYTLKRIRDPNFHVQLRPHLSKESSTNSAAELLKLNTTSEYPPGLEDTLILTMKGIAA

SEQ ID NO: 8859 - protein, 542 aa, Arabidopsis thaliana
MRPSCASSSSSSASPSLRLSSVTVAVDKATSELLRTPDWTIIIAICDSLNSNRWQCKDAIKAVKRRLQHKSSRVQLLTLTLLEAMLKNCGDFVHSHIAEKHLLEDMVKLVRKKGDFEVRNKLLILLDTWNEAFSGVACKHPHYNWAYQELKRCGVKFPQRSKEAPLMLEPPPPVTQSSSSSSMNLMSIGSFRRLDETMATEIESLSLSSLESMRNVMDLVNDMVQAVNPSDKSALKDELIVDLVEQCRSNQKKLIQMLTTTADEDVLARGLELNDSLQVVLARHDAIASGVSLPLLLQAPEPRETSSSLKTCGAAALESADSESSSSSSSSESETDEVEDVKDDFIQLAKRHALLNALHSDEEEETLLLGNDNEKTAEAEAKTQCKDLALFDTTTTTTTKSEQDIIELLSLTLSTTALPSPQTQPQTQHPSFFADDNILMNSYVVPWAQSQEEPQVPKMTQFAPSGPQFQPWPLQQQQPYSYGYPQPQWSGGQVNSNDTTFWSQGGNENMVFERNLQVSNSFPARATGTSGAATAATVDRQP

SEQ ID NO: 8860 - protein, 470 aa, Saccharophagus degradans 2-40
MTDSALPSGENKSFVILISCIATIGGFLFGFDSGVINGTVDGLVTSFGVTKTAVGVHVAFMLLGCAVGAAAAGRLADLYGRRAMLIVAAILFIVSAWGSGVATGIVEFDIYRLLGGLAVGAASVMAPAYISEVAPARYRGRLTTIQQVAIISGLTAAFLSNYVLAHTAGSSLEPFWMGIATWRWMFWIEIAPAAIFFFALMVIPESPRFLVASGKKDKALTVLTKLYGAQAAPGKVAEIDSSLDHDHKPRLSDLISKVTGKVRPIVWVGIGLATFQQLVGINVIFYYGSILWQSVGFSEDHALLINVVSGAVSIGAVVLSLVLVDKIGRKPLLWIGSAGMAVTLTLTAIAFATGTLDANGDLQLSDNMGILALVAANVYVIFFNMSWGPVMWVMLGEMFPNQIRGSGLAVAGLFQWGSNWAITMSFPALLAGLGLAVTYGFYALCAFISIIFVIKYVNETNGVELEDMEG

SEQ ID NO: 8861 - protein, 732 aa, Oryza sativa
MAFLGWAVDIARDSGASSSVVLTCDGYGSALYFSPWDSVPLPATASPDDGFLLPRFPDVCVQRSQFTNHLAPANGTGGGGSRTGVKEEASEVLSWPPTSKQSVRRLEVAEHWYRLYKTDNQRLSPDSQQVSVLAESHCDLASGNWKEISIHHKKMPSSTTTKTTTPSRDAWIVSARSDPFHLLLEAQAPLGIKADALSQIAAVHQSHRNTSHIRELSLAMDNAYIIAILSVAILFLLHYYLLGRGNGGAARLPPGPPAVPILGHLHLVKKPMHATMSRLAERYGPVFSLRLGSRRAVVVSSPGCARECFTEHDVTFANRPRFESQLLVSFNGAALATASYGAHWRNLRRIVAVQLLSAHRVGLMSGLIAGEVRAMVRRMYRAAAASPAGAARIQLKRRLFEVSLSVLMETIAHTKATRPETDPDTDMSVEAQEFKQVVDEIIPHIGAANLWDYLPALRWFDVFGVRRKILAAVSRRDAFLRRLIDAERRRLDDGDEGEKKSMIAVLLTLQKTEPEVYTDNMITALTANLFGAGTETTSTTSEWAMSLLLNHPDTLKKAQAEIDASVGNSRLITADDVTRLGYLQCIVRETLRLYPAAPMLLPHESSADCKVGGYNIPRGSMLLINAYAIHRDPAVWEEPEKFMPERFEDGGCDGNLLMPFGMGRRRCPGETLALRTVGLVLGTLIQCFDWERVDGVEVDMTEGGGLTIPKVVPLEAMCRPRDAMGGVLRELV

SEQ ID NO: 8862 - protein, 474 aa, Ustilago maydis 521
MGAACCAGAAVAGSAASAGPSTLLDGTVYSFLSAIPIALYHYYPQITLVLMTLVALGASTFYLLIVLLTPVTKSSSRSELTYLSTTSTEPKPLASLLDDLRENEKENGAVQLSVVVPAYNEKERLPVMLEETVEFLDELKKSKRSLVEGLPHEHGKGTFAHGSDLQANGNASTTRVHAALHDALSSYEIIIVDDGSKDDTHQVALDFARSHPSTSAASTIRVVRLVSNRGKGGAVRHGVLHSRGHLILFADADGATSFRDISKLCHTLSCVLTPKGHGVAVGSRAHMVTSDAVVKRSFVRNFLMHSFHLFLILLLRPPTLGGLMKKLTARSETQNKRQAKGCRVVSLPVQPEIKDTQCGFKLFTRPTAQLVFPASHIDGWIFDVELLILAQTSSQLALQASNPDLTLLAAEEVQDNTNALKGLPIPIAEVSVDWQEVTGSKIDLLKDSIRMALDLIVIRANYTLGRWKTPPAAL

SEQ ID NO: 8863 - protein, 282 aa, Brassica napus
MASLRFSVTFPALLSLLLLSLWVVEAYTSRKLISNNEQEGQNISHLFKDGEFEDPTMYMFFKISDLKLGTKLPIYFNKNDLRKVPPLLTRQEADLIPFSESNLDFLLNHFSISKDSPQGKAMKETLKRCDFKAIEGEYKFCGTSLESMLDLAKKTIASNADLKVMTTKVMVPDQNRISYALHNYTFAEVPKELDGIKVLGCHRMPYPYVVYYCHGHKSGTKVFEVNLMSDDGIQLVVGPAVCHMDTSMWNADHVAFKVLKIEPRSAPVCHFFPLDNIVWVSK

SEQ ID NO: 8864 - protein, 846 aa, Arabidopsis thaliana
MALASSKAFSSIFNTLSPINQSKFVLACSGSNHVDVIDRRRRIMIFGSSLALTSSLLGSNQQRLPMESAIALEQFKEKEEELEEEEERNVNLFQKTSPSVVYIEAIELPKTSSGDILTDEENGKIEGTGSGFVWDKLGHIVTNYHVIAKLATDQFGLQRCKVSLVDAKGTRFSKEGKIVGLDPDNDLAVLKIETEGRELNPVVLGTSNDLRVGQSCFAIGNPYGYENTLTIGVVSGLGREIPSPNGKSISEAIQTDADINSGNSGGPLLDSYGHTIGVNTATFTRKGSGMSSGLIETDSEVLNSVYLTMVERKKRKQIQRNNSESNRNQKRRISHDKINRDELVVYRILCPIDVVGGVIGKSGKVINAIRHNTKAKIKVFDQLHGCSQRVITIYCSVKEKQEEIGFTKSENEPLCCAQDALLKVYDAIVASDEENNTKTNVDRDDNKECRLLVPFSQSSSLIGKAGENIKRIRRRTRASVKVVSKDVSDPSHVCAMEYDNVVVISGEPESVKQALFAVSAIMYKINPRENIPLDSTSQDVPAASVIVPSDLSNSVYPQTGFYSNQDHILQQGAGVPSYFNALSVSDFQGYAETAANPVPVFASSLPVTHGFGGSSRSEELVFKVLCPLCNIMRVIGKGGSTIKRIREASGSCIEVNDSRTKCGDDECVIIVTATEILFCCLSTPFVFMQSPDDMKSMAVEAVLLLQEYINDEDAENVKMQLLVSSKVIGCVIGKSGSVINEIRKRTNANICISKGKKDDLVEVSGEVSSVRDALIQIVLRLREDVLGDKDSVATRKPPARTDNCSFLSGSSNAGYTLPSFMSSMASTSGFHGYGSFPVKSCILDFH

SEQ ID NO: 8865 - protein, 359 aa, Zea mays
MAADQQPQLQEEMNDAAGGGLRLPPGFRFHPSDFEIVSFYLTNKVLNTRFTCTAITEADLNKIEPWDLPSKAKMGEKEWYFFYQKDRKYPTGLRANRATEAGYWKATGKDKEVYNAAEGVAVLVGMKKTLVFYRGRAPRGDKTNWVMHEYRLEGSGRLPAGLASATGSAAANAAAALKASAYKQDEWVVCRVFHKTTGIKKTTAAPAYQVAMAGAEMDQNQNNFPGIPFPMPMQFPMLPDFSLDPVPPYYPNAAGAGMSMLPMAAGIGGGAGGFQLNGAALFGNPMAAPQPMSFYHQMGAAGTACAGGFDVSAPESRPSSMVSQKDDQANGAEISSMMSVAGPGPATTTTIEMDGVWKY

SEQ ID NO: 8866 - protein, 661 aa, Candida glabrata CBS138
MATIPKRHTYGGGPEVHYTRNPYSAAPRNSMSSRGKKHVTFGPYIVGSTLGEGEFGKVKLGWTRTPSTGPEQRPAVSKQVAIKLIRRDTIVKNSEKEIKIYREINALKHLTHPNVVRLEEVLQNSKYIGIVLEYASGGEFYKYIQRKRRLKESTACRLFAQLISGVTYMHSKNLVHRDLKLENLLLDKNENLVITDFGFVNEFLPDNEYMKTSCGSPCYAAPELVISTRPYVARKADVWSCGIILYAMLAGYLPWDDDSTNPEGDDIGKLYQYITRTPLKFPEYITPIPRDLLRKILVPDPNKRVNMQYIHRHEWLKPHRPFLAVSTSQWDKLIKNSANVQLDHTKRVSRTSQHFETEQENSSVNQPVRSDMVNKAMDTSNTTDDAQHSIPNRQPLANVFINSRTYSARSASYAPRHSMSDDPNAIESARHAVQNKHESNLATVMGSPNKDKDDTTEDNNLETVARTSSHHRKPRPTSYYPVDINRSANNFSPIVLNLTNSDENDNSKHPYSTSTSNNPVAPTPQRDQSQVVTDEHGLQLEKNRVREQPLTSDKSRMSSLRSNATAKSSDSKKNKRFSLLSFYTNNGSKTSLHNDSKVSVTPSSKEESATVPPSIPSVVHHTDTTENKRNHRASMMGPSAGGDKSTARRVIDFFKRRSMRM

SEQ ID NO: 8867 - protein, 515 aa, Zea mays
MDGLVAPSPSHSGATSGGGASHRKRKLPPSSLSDATGDEDDDTTAPSSPSTAPSSPSRPSSPSSSHSDDDDDDSLHTFNAARLDGAPSGGSASGRPPKPDSSSVSAAAAAAAAAVGGGPKPEPGSANAGDGKEDTKGLFTDNLQTSGAYSAREEGLKREEDSGRLKFLCYSNDGVDEHMIWLVGLKNIFARQLPNMPKEYIVRLVMDRTHKSMMVIRNNIVVGGITYRPYASQRFGEIAFCAITADEQVKGYGTRLMNHLKQHARDADGLTHFLTYADNNAVGYFVKQGFTKEITLDKERWQGYIKDYDGGILMECKIDPKLPYVDVATMIRRQRQAIDEKIRELSNCHIVYSGIDFQKKEAGIPRRLIKPEDIPGLREAGWTPDQLGHSKSRSSFSPDYNTYRQQLTTLMQTALKNLNEHPDAWPFKEPVDSRDVPDYYDIIKDPIDLRTMLRRVDSEQYYVTLEMFVADMKRMFSNARTYNSPDTIYYKCATRLENFFSGRITVLLAQLSTKS

SEQ ID NO: 8868 - protein, 198 aa, Oryza sativa
MGRLFVMHLEGKVYSCKHCHTHLGLSSDIISKSFHCKHGKAYLFNKLKLLAYNTVLRIINTRKYMFVDLWVVEVDLGAIIAKGFKWKSLATVEEAAHEKSQRYKEGKFILERYKVSGPDGSHYFVTHDAHVGGSDVDDLIGYPHHPLVERHVARYNRWKEARYNRWKEHQGEVSVVTVAHDLVKLEENSEIKREGSVS

SEQ ID NO: 8869 - protein, 315 aa, Oryza sativa
  misc_feature (130)..(130): Xaa can be any naturally occurring amino acid
  misc_feature (161)..(161): Xaa can be any naturally occurring amino acid
  misc_feature (217)..(217): Xaa can be any naturally occurring amino acid
  misc_feature (297)..(297): Xaa can be any naturally occurring amino acid
  unsure (1)..(315): unsure at all Xaa locations
RQPPIGFAESRGNSGHNGLGSFYRFSRPHTVIGTALSIVSVSLLAVENLSDVSPLFLTGLLEAVVAALFMNIYIVGLNQLFDIEIDKVNKPTLPLASVEYSPATGVALVSAFAAMSFGLGWAVGSQPLFXAFFISFILVTAYSINLSFLIWKRSAVVAGLXALCVLAVRAVIVQLAFFLHIQTFVFRRPAVFTMPLIFATAFMTFFSVVIALFKVIXLYLSGTKPFGIRSFKETISLYKTIFFCVTIPTASFAETLMSPSPSPPSFYFLFQVVGHAILWNRSRSIDLTSKTAITSFXMFIWKLFYAEYLLIPLVR

SEQ ID NO: 8870 - protein, 258 aa, Xanthomonas campestris pv. campestris str. ATCC 33913
MTAHRWRLDGQTALITGASAGIGLAIARELLGFGADLLMVARDADALAQARDELAEEFPERELHGLAADVSDDEERRAILDWVEDHADGLHLLINNAGGNITRAAIDYTEDEWRGIFETNVFSAFELSRYAHPLLTRHAASAIVNVGSVSGITHVRSGAPYGMTKAALQQMTRNLAVEWAEDGIRVNAVAPWYIRTRRTSGPLSDPDYYEQVIERTPMRRIGEPEEVAAAVGFLCLPAGSYITGECIAVDGGFLRHGF

SEQ ID NO: 8871 - protein, 146 aa, Pisum sativum
MGFTDKQEALVNSSWELFKQNPGYSVLFYNIILKKAPATKGMFSFLKDSAGVVDSPKLQAHAEKVFGMVHDSAVQLRVSGEVVLGDATLGAIHIQKGVVDSHFVVVKEALLETIKEASGEKWSEELSTAWEVAYEGLASAIKKAMS

SEQ ID NO: 8872 - protein, 445 aa, Prochlorococcus marinus subsp. marinus str. CCMP1375
MKDEVLAQLNDLKIGKDTSITSNSHNENSRKKESHAKAKEPSNQLKNGLLGWYAVCSKRELKEDTPYCLTMFNEPLVIYRDKESNLRCVKDLCPHRGASFIGGEVIDGELVCPYHGARFSSNGECTNLNRITCNHIVDDNYNNYASKIHLYQYICKEIGDYIYIYYTGNAKTSLKDFEVTDQLETRFVESYGFDISDYAYEEVIVDFKCDWARIVENHIDILHLFWVHGETIPDNDVNRKVITSFNQEITREKNQIESKYKYKDKGNKEFIRIKFLPPGRVVIYKGDPSDSRYIQILDHIPLSNNQARVIVRHYRKFMKNKFITELLLFKKLQHRVFYKVFAEDYMILRTQTYNNQMGFVEKDNIKLLGEDKMVQYYWDWFKSSNIKDNPWELFPTNTDTNTVHQDIAMLYPPANNTRVKENSRSLFINILIRILIPIGFLVVLI

SEQ ID NO: 8873 - protein, 362 aa, Araucaria excelsa
SDSGKDAGRLSAAWQLYKAQEDLIKVAKEFGIKLTMFHGRGGTVGRGGGPTHLAILSQPPDTIHGSLRVTVQGEVIEQSFGEEHLCFRTLQRFAAATLEHGMHPPVSPKPEWRELMDEMGVVATEEYRSIVFKEERFVEYFRSATPELEYGRMNIGSRPSKRKPSGGIESLRAIPWIFAWTQTRFHLPVWLGFGAAFKHVIEKDSKNLHTLRQMYNEWPFFRVTIDLVEMVFAKGDPGITALYDKLLVSEDLWSFGEKLRANFLETRDLLLKVAGHRDLLEGDPYLKQRLRLRDSYITTLNVCQAYTLKRIRDPNFHVQLRPHLSKESSTNSAAELLKLNTTSEYAPGLEDTLILTMKGIAA

SEQ ID NO: 8874 - protein, 146 aa, Pisum sativum
MGFTEKQEALVNSSWELFKQNPSYSVLFYTIILKKAPAAKGMFSFLKDSAEVVDSPKLQAHAEKVFGMVHDSAIQLRASGEVVVGDATLGAIHIQKGVVDPHFVVVKEALLETIKEASGEKWSEELSTAWEVAYEGLASAIKKAMN

SEQ ID NO: 8875 - protein, 130 aa, Zea mays
  misc_feature (48)..(48): Xaa can be any naturally occurring amino acid
  misc_feature (55)..(55): Xaa can be any naturally occurring amino acid
  misc_feature (80)..(80): Xaa can be any naturally occurring amino acid
  misc_feature (92)..(92): Xaa can be any naturally occurring amino acid
  misc_feature (98)..(98): Xaa can be any naturally occurring amino acid
  misc_feature (105)..(105): Xaa can be any naturally occurring amino acid
  unsure (1)..(130): unsure at all Xaa locations
QVVQDIAKDCNDAPERSIITLCLTDMVRGLMLTLKYFFQRNVTINYPXEKAALEXRFRGECALRRYESGEEGCIACELCXAICPAQEITIDXEEREDXSRRTTRXYDIDVTKCILLWGSANRLDQSMLLL

SEQ ID NO: 8876 - protein, 363 aa, Ananas comosus
SDSGKDAGRLSAAWQLYKAQEELVQVAKQYGVKLTMFHGKGGTVGRGGGPTHLAILSQPPETINGSLRVTVQGEVIEQSFGEERLCFKTLQRYTAATLEHGMRPPTSPKPEWRAILDEIAVVATEEYRSVVFKEPRFVEYFRLATPELEYGRMNIGSRPSKRKPSGGIESLRAIPWIFAWTQTRFHLPVWLGFGAAFKHILRKDRRNLRILKEMYNEWPFFRVTLDLLEMVFAKGDPGIAALYDKLLVSDELKPFGEQLRANYEETKQLLLKVAGHTDLLEGDPYLKQRIRLREAYITTLNVCQAYTKKRIRDPNFKVDVRPPLSKEILDSNKQAELVKLNPASEYAPGLEDTLILTMKGIAA

SEQ ID NO: 8877 - protein, 533 aa, Lentinula edodes
MLPFVSLLAAELVCLVYGAEVIRDTTTYGQTVSENLFIVNKQLAPDGFQRSTVLAGLTPSTGSFPGPLISGNKGVRFNLNVTDQLTDPSMVRSTTVHWHGLFQKTTNYADGVAFVSQCPIAANHSFLYDFQVPDQAGTFWYHSHISVQYCDGLRGPLVIYDPQDPQAYLYDVDDETTVLTIADWFHNTSTELIAAAVAPPADATLINGKGRYLGGPAVPLAVINVQQGKRYRFRMISIACDAYHNFSIDGHRLTVIEVDGENHEPATVDNIQIFPGQRYSFVLTATQPVDNYWVRALSSSGVGFSGFTGGLNSGILRYQGAPDADPTTTNSTGVVLTESMLHPLENPGAPGLPFPGGADEVLNLTLGFNLPATFFMNDTQYIPPTVPVLLQILSGAQSPQDLLPPGSVYTLPINKTIEINFFGNATPGGPHPFHLHGHSFDVVRSADNTTYNYKNPVRRDVTAVAIGNQTTIRFVTDNPGPWFLHCHIDLHLEFGLAVVMAEAPSLVKATDVTTPAWDELCPIYDSLTPAQLP

SEQ ID NO: 8878 - protein, 238 aa, Ananas comosus
SDSGKDAGRLSAAWQLYKAQEELVQVAKQYGVKLTMFHGKGGTVGRGGGPTLFAILSQPPETINGSLRVTVQGEVIEQSFGEERLCFKTLQRYTAATLEHGMCPPTSPKPEWRAILDEIAVVATEEYRSVVFKEPRFVEYFRLATPELEYGRMNIGSRPSKRKPSGGIESLRAIPWIFAWTQTRFHLPVWLGFGAAFKHILRKDRRNLRILKEMYNEWPFFRVTLDLLEMVFAKGDPG

SEQ ID NO: 8879 - protein, 362 aa, Debaryomyces hansenii CBS767
MLKNKTQKELLQLCRTIIQPLAPNFHKGQSGKIAVIGGSEDYTGAPFFASHSSALLGADLSHIICEKMASPVLKLYSPDLMVHPYLYELQSPEMKEHLSKSEVDALLRLTVEDVVVKDQRQLDEIIEDVILPKIVGLLERIDIVVIGPGFGRDPLMLKTLVKIIEQLKVMNKPMILDADALYLLSIDPLLVKNYSKAIITPNVVEFDRLAKKLNVKFSINETDVSNLIESSINLSQKLGNVTVIQKNFKEIMVRDGEYLINELEGSNRRVGGQGDTLTGAIATFVNWSNNYNDGLWDPTSKKDKLSSEDLNLLACFAASSTVRLAASKAFAKYGRSMQTSNVHEFLGKAYDELFENDNYIKL

SEQ ID NO: 8880 - protein, 595 aa, Neurospora crassa
MRFLPLLGGLLPLLGLVGAAPSCNHECNRACWTSRFNVNTDYENEWPVTGVTRKFDFEITEVDEWVGPDGHIKKGAMLINGGYPGPLIKADWGDRIEVTVTNKLKTNGTSMHWHGFHQLNSNNQDGVAGVTECLIVPGASKVYSFLATQHGTSWYHSHISSQYANGIVGPIQINGPSSYPYDTDLGVFPISDWYYDSAEHIVDRMMDPNDPFLKGVPGSPPPSNNILFNGMNIAPNGTGGEYARLKFTKNKRHRLRLVNTSADNTFVVSIVGHNMTVIETDFVPVEPYAVHQLYLTVGQRYDVVIKADQEVDNYWINATLSSTPLCGVSLNPYPAAIVSYEGSDESRLPTNRGPRAIDQFCEDDVSSKPLTSRTAPKADFSDTKVDTLSVTLDVKEVNKGISKVLWSVDGSAIDVQWDKPTLEYVVEGNFTFPRQANIIQLPEAVKWSFWVIQNNSPSPHPMHLHGHDFLILGRSRFPANPLVDPGQPILFDPVVDGPHLKFDNPTRRDTTVVPSFGWLVIAFEAGRNPGSWVFHCHIPWHMSQGLSVQFLERVDRINDGAIPNLMPDLQEKCDEWRRYADNDPEFRMKKVDSGI

SEQ ID NO: 8881 - protein, 363 aa, Ananas comosus
SDSGKDAGRLSAAWQLYKAQEELVQVAKQYGVKLTMFHGKGGTVGRGGGPTHLAILSQPPETINGSLRVTVQGEVIEQSFGEERLCFKTLQRYTAATLEHGMRPPTSPKPEWRAILDEIAVVATEEYRSVVFKEPRFVEYFRLATPELEYGRMNIGSRPSKRKPSGGIESLRAIPWIFAWTQTRFHLPVWLGFGAAFKHILRKDRRNLRILKEMYNEWPFFRVTLDLLEMVFAKGDPGIAALYDKLLVSDELKPFGEQLRANYEETKQLLLKAAGHTDLLEGDPYLKQRIRLREAYITTLNVCQAYTLKRIRDPNFKVDVRPPLSKEILDSNKQAELVKLNPASEYAPGLEDTLILTMKGIAA

SEQ ID NO: 8882 - protein, 363 aa, Ananas comosus
SDSGKDAGRLSAAWQLYKAQEELVQVAKQYGVKLTMFHGKGGTVGRGGGPTHLAILSQPPETINGSLRVTVQGEVIEQSFGEERLCFRTLQRYTAATLEHGMRPPTSPKPEWRAILDEIAVVATEEYRSVVFKEPRFVEYFGRATLELEYGRMNIGSRPSKRKPSGGIESLRAIPWIFAWTQTRFHLPVWLGFGAAFKHILRKDRRNLRILKEMYNEWPFFRVTLDLLEMVFAKGDPGIAALYDKLLVSDELKPFGEQLRANYEETKQLLLKVAGHTDLLEGDPYLKQRIRLREAYITTLNVCQAYTQRRIRDPNFKVDVRPPLSKETLDSNKQAELVKLNPASEYAPGLEDTLILTMKGIAA

SEQ ID NO: 8883 - protein, 416 aa, Psychrobacter arcticus 273-4
MTHRLLVNDKLPAKVVGMAIVASSAFYVGCASTENTSTVKDIAIDNPYALTDPNLAVATVAGGCFWCVEAGYEKIPGVVEVVSGYTGGKSENPTYSTVSAGGTGHTEAAQVYYDPTKITYNGIVQALWRIADPTDDKGQFVDRGTQYRPAIFYSSEQEKQIAEAAKQSLQASGVYKKPVVIEIMPVSEFYPAEEYHQDYYKKNPLRYKAYTFNSGRYQFIESVYGKKYELDFSQFKPTATSAKSVMSNISSAAVKPATVKASTGFDPDTFIKPTQAALKKSLSDIQYNVTQKDSTERAFDNEYWDNKEPGLYVDVVSGEPLYSSRDQYNSGTGWPSFTRPLNTSLVVEKADRGIFGTRTEIRSRYADSHIGHVFDDGPAPTGKRYCMNSAAMRFIPLAQMEAAGYGKWINDVKSGS

SEQ ID NO: 8884 - protein, 453 aa, Oryza sativa
LPPYSTMGKEKTHINIVVIGHVDSGKSTTTGHLIYKLGGIDKRVIERFEKEAAEMNKRSFKYAWVLDKLKAERERGITIDIALWKFETTKYYCTVIDAPGHRDFIKNMITGTSQADCAVLIIDSTTGGFEAGISKDGQTREHALLAFTLGVKQMICCCNKMDATTPKYSKARYDEIVKEVSSYLKKVGYNPDKIPFVPISGFEGDNMIERSTNLDWYKGPTLLEALDQINEPKRPSDKPLRLPLQDVYKIGGIGTVPVGRVETGVLKPGMVVTFGPSGLTTEVKSVEMHHEALQEALPGDNVGFNVKNVAVKDLKRGYVASNSKDDPAKEAASFTSQVIIMNHPGQIGNGYAPVLDCHTSHIAVKFAELVTKIDRRSGKELEKEPKFLKNGDAGMVKMIPTKPMVVETFSEYPPLGRFAVRDMRQTVAVGVIKNVEKKDPTGAKVTKAAAKKK

SEQ ID NO: 8885 - protein, 481 aa, Saccharophagus degradans 2-40
MKIHNMKNFINGEYIASQADGAIDVLSPSTGKKVGDIPAGCVEDAQLALDTANAAQKLWAKKTNRERAKILRVFAANIRAAADDLAKLLVSEQGKLLSVAQMEVEATATFIEYACDNALTIEGDILPSDNPNEKIYIHKVPRGVVVAITAWNFPLALAGRKIGPALVTGNAIVVKPTQETPLATLALGELANAAGIPAGVLNIVNGRGSVVGQHLCESPITRLITMTGSTPAGQRIYRTSADHLTPVMLELGGKAPFIVMEDANLESAVEAAFTTRYANCGQVCTCAERLYVHESIYPAFMDKLLEKVKAIKVGDPMAADTDMGPKVNQSEIENIDALVKKGIEQGATLLHGGKRAHVPGFEGGNWYEPTLLGDVQQSNILVHEETFGPILPVVKINSIEQAIEYTNDSEYGLSTYLFTQNLKYIHQYIAEVEAGEVYVNRGIGEQHQGFHNGWKLSGAGGEDGRYGLEQYLEKKTVYFAE

SEQ ID NO: 8886 - protein, 165 aa, Zea mays
MSAAAGPVYEADAEAVVRRITPPLDRARHKGQAGKIAIIGGCREYTGAPYFAAISALKVGADLSHVFCTKDAATVIKSYSPELIVHPILEESYSVRDDERESVSSSILTEVIKWVERFDCIVVGPGLGRDSFLMDCVSNIMRHARQANIPIVVDGDGLFLITNNI

SEQ ID NO: 8887 - protein, 514 aa, Petroselinum crispum
MSSSLGDLLAQPNNDDFGSNWGFENQKTKSFANQSLPFSPPPVSPSSYFSFLDSPIQNNNYTIVSSSGNGTMNAQSFKEENQNFSDFSFPAQTRPASSTSSSLIPANTNLVEDSLKRKQGGWNFEEPAKKNDFLMDNASVTSDIATLQRISPEMTMNQANMQSNAALQSNLNNYAQSSQSSQTNRDQSKLDDGYNWRKYGQKQVKGSENPRSYYKCTYLNCPTKKKVETTFDGHITEIVYKGNHNHPKPQSTKRSSSQSYQNSIGTMPESSLLENGRSEPVTTPENSSLSFGEDDLFEQGSMNKPGDDDGNEPDSKRWKGEYESNEPMSSLGSRTVREPRIVVQTTSDIDILDDGYRWRKYGQKVVKGNPNPRSYYKCTQVGCPVRKHVERASHDLRAVITTYEGKHNHDVPAPRGSGSYPAVNRPSDNTTSAPTAIRPTTNYLNPLQNPRAQPANGQAPFTLEMLQRPRSYEFSGFTNTSNTYAINQNQQASGQFSTAKDEPDVDSFFDSFLA

SEQ ID NO: 8888 - protein, 386 aa, Digitalis lanata
MKNIPFSTMRNFMVYVVVLMEVSGRSSEAKCDFNAIFNFGDSNSDTGGFWAAFPAENPPNGMTYFKRPAGRVTDGRLIIDFLAQGIGIPFLSPYLLSIGSDFRHGANFATAASTVLLPRTSLFVTGVSPFSLGIQLNQMKQFKLQVDRLHHSPGKLNLPAPNIFRKSLYTLYIGQNDFTGNLGSLGISGVKKKIIPQVVSQISSTIKKLYELGGRTFLVLNLAPIGCYPLFLVDLPHNSSDIDSFGCMISYNKAVVEYNYMLKEALAQTRKDIQDADVIYTDIHSVMLQLFQHPTSNGLKYGTKACCGYGGGAFNFNQQVFCSYSKLINGKNVTANACKDPQNYVSWDGIHATEAPNKHVAHAILEGSHFDPPFSLHKLCDIQPIG

SEQ ID NO: 8889 - protein, 349 aa, Colwellia psychrerythraea 34H
MSRALLFLSIFFLSGCGTPIQAFQVKENSIQTLYKKVNPSVVELHVQSLADPKIGQVAYKAKTANSLGSGALVSSEGRILTAAHVVDKATAIEVEFADGTKTTGHVVWVEPLIDLAMIQAGEVPSTAKPLKLAKSNDYQIGEQVIIIGAPFGVSHSLSVGYLSGIRDGNAIPGRTLVPRLLQTDASINQGNSGGPMFNLNGEIVGIVSHILSKSGGSNGLGFVVSVDTVRHIIDSDPGTFSGFIPLLLNKKQSYAINNTAGHGMLIQHVIPGTLADKLGFKGGNLSVVIGRSPILLGGDILLEVGGRAIIDLASAVQIKKHLATFEKGDRVTFKYLRNGQKKETYWIVE

SEQ ID NO: 8890 - protein, 291 aa, Candida albicans SC5314
MIRSYIRNIILAILSPLLTTPPPLILPPPYEKIIQEITTVLSINNYDDGSLAPIILRLAWHCCATYDVTTNTGGSNGATMRFVPEITDEGNYGLDIARAALEPIKQRYPAISYADLWTLAGKVAIEYMGGPTIIWKSGRVDYTNDRCTPSNGLLPFADKDANHIRKTFTRLGYNDQQTVALIGAHGVGRCHKRFSGWEGKWTRTPKTFSNQFYVVLLNETWSQGEVPETGKTQYFNADKSLIMLNTDMELIRDKSYLHWVEIYAKDEPKFFHDFSSAFAKLLELGIKRETL

SEQ ID NO: 8891 - protein, 446 aa, Thermoproteus tenax
MFTKIVATLGPSTDRLPDITALLSKVHGVRINMSHASPSEVEARVNAVRKYEETSGRYIAIIADLRGPSVRTGLMRPLQITAGARVSFKLAEKGDGFVPVPRREFFEVIEEGDEVLMLDGKLVLRIISAAQTSAEAESLSSGVISSNKAIVVKGKEYHIEQPVEEDIRALQTLSRFRDDVDYVALSLVRDGADVRKMRSVVEEAGLTSGIMAKIETKSAVDKIEEIINAADYIVIARGDLALHYGLEYIPKVQRLLVERSLSAGRPVAVATQLLDSMQTNTTPTRAEVNDVYTTASLGVDSLWLTNETASGEHPLEAVDWLRRIVSQVEFGRLKAASPADARDRFAKAVVDMAEDMGGEIAVYSMTGTLAKRIAKFRPMTTVYVGVNERRLARMLELREDVGAHMGPRACGRAGAYLRGGPREAPLQILRQSLDSHVWAQRRHTYY

SEQ ID NO: 8892 - protein, 141 aa, Canavalia gladiata
MPKVKADAKAADNRLKRKGAGAGRKQSKKAAKDPNKPKRPPSAFFVFMSEFREQYKKEHPTNKSVAVVGKAGGDKWKSLSDAEKAPFVARAEKKKEEYDKSILAYNRKLEGKNPSEEEKSDKSKSEVNDEDEDEEEDQDDE

SEQ ID NO: 8893 - protein, 54 aa, Oryza sativa
MASATFLEVLLAIFLPPVGVFLRYGLGIEFWIDLLLTILGYIPGIIYAVYVLVA

SEQ ID NO: 8894 - protein, 145 aa, Candida glabrata CBS138
MFLRSTRLMRPFTRMYHPKVIEHYTNPRNVGSMDKTLRNVGTGVVGAPACGDVIKLQIQVNDNTGVIEEAKFKTFGCGSAIASSSYLTELVQGITIEDAEKIKNIEIAKELSLPPVKLHCSMLAEDAIKAAVRDYKTKRSSTTLH

SEQ ID NO: 8895 - protein, 415 aa, Oryza sativa
MAASEQRVVAVIMVGGPTKGTRFRPLSLNVPKPLFPLAGQPMVHHPISACRRIPNLAQIYLVGFYEEREFALYVSSISNELRVPVRYLREDKPHGSAGGLYSFRDYIMEDSPSHIVLLNCDVCSSFPLPDMLEAHKKYGGMGTLLVNKVSAESANQFGELVADPETNELLHYTEKPETFVSDLINCGVYIFTPNIFNAIEDVLKQKKDRANLRRVSSFEALHSATKALPADYVRLDQDILSPLAGKKELYTYQTLDFWEQIKTPGMSLRCSGLYLSQFRHTSPHLLASGDGKRSATIIGDVYIHPSAKVHPTAKIGPNVSISANARIGAGARLIHCIILDDVEIMENAVVIHSIVGWKSTVGKWSRVQGEGDHNAKLGITILGEAVDVEDEVVVVNSIVLPNKTLNVSVQEEIIL

SEQ ID NO: 8896 - protein, 458 aa, Xanthomonas campestris pv. campestris str. ATCC 33913
MSVPHSSPSATPRFAAEVRTTGLLALPLVLGHVSTGLIGFVDNVIAGHHGTATLAAVTIGTSLLWLPMLVPIGTLISLTASVSQLVGAGREREIGPLFRQALWLSLGLGALMFGFLTAVPPLLPTFGIAPDIVPGATDFLHAVRWGGPALTFYFCMRYLSEGMHWTLPTMLLGFGGLLVLAPLGYVLTYGKFGFAEHGAQGLGMASAITMWVQAIAFALYLWRSRRFAHLELFTHLEGPRWRAIGELLRTGLPIGITVLMEGGLFIVTALLIGRLGSTEAAAHQIAINVSQLCFMIPMGVAEATTVRVGHAVGRGDPLGMRRAAWAGYAIVLGTQAVSASILLLGHDAIVGVYTNDAAVAALASVLLLFAATFQFPDGIQVLSAGALRGLKDTRVPMFLAMFSYWGLGMPLGAGLGLGLGWGPQGMWIGLILGLTAAAILMGLRFRQTSRRLTAGAAP

SEQ ID NO: 8897 - protein, 328 aa, Xylella fastidiosa
MKSLVRVAVTGAAGQIGYSLLFRIAAGEMFGKDRPVILQMLELPDEKAQAALKGVMMELEDCAFPLLAGMVGTDNPDIAFKDADVALLVGSRPRGPGMERKDLLMENAKIFTAQGAALNKVARRDVKVLVVGNPANTNAYIAMKSAPDLNPKHFTAMLRLDHNRALSQLSTKLSKPVANIEKLIVWGNHSPTMYPDYRFATADGTPIIEAINDQAWNANSFIPTVSKRGAAIIEVRGLSSAASAANAAIDHMRDWLLGSNGKWITMGVPSDGSYGIPEGMIFGFPVTTTNGEYSIVKDLPIDTFSKTYIDKTLAELEEERASIAHLLR

SEQ ID NO: 8898 - protein, 104 aa, uncultured Frankia sp.
IWIHGTEPDPLMRSKTRIVKDGKEPEIWGFDGSSTNQAPGSNSDCVLRPVFITPDPIRGGDNKLVLCEVELTDFTPHPTNTRAFARAVAEKYADMGPHFGIEQG

SEQ ID NO: 8899 - protein, 202 aa, Xanthomonas campestris pv. campestris str. ATCC 33913
MWGRRNSSNVRKVLWCLEEAGVAYTSIEVGGAFGGNDTPAYRALNPNGLVPALQDGALVLWESNAIVRYLAARHAPALYPHSPATRALGDRWMDWTTSTFAGVFRDLFWGVVRTPQAERDATRIATALQRSGELLAVADAALAQQPYLSGDDFAMGDIPLGSFIYAWFEMPIERPELPHLHAWYQRLRARPAYQRGVMTPLT

SEQ ID NO: 8900 - protein, 451 aa, Gibberella fujikuroi
MSHLPQEPEFEQAYGELASALENSSLFNEHPEYRTALAVAAIPERVIQFRVVWNDDKGNLQVNRGYRVQFNGALGPYKGGLRFHPSVNLSILKFLGFEQIFKNALTGLNMGGGKGGADFDPKGKSDAEIRRFCQAFMTELSKHIGAETDVPAGDIGVGGREIGYLFGAYRKFANRWEGVLTGKGLSWGGSLIRPEATGYGLVYYVEYMLKHANRGTFEGKRVALSGSGNVAQYAALKIIELGGSVVSLSDSKGALVAKEGSSFTPEQIHNIAALKIKHQALTTFEHDGQFTWIEGARPWVHVGKVDIALPSATQNEVSKEEAQALVDAGAFIVAEGSNMGCTAEAIDVFEAHRKEKGAEALWYAPGKASNCGGVAVSGLEMAQNSQRIQWTEKEVDDRLKAIMKDAFVAGLETAQKYVEAKEGELPSLIAGSNIAGFIKVAEAMHDQGDWF

SEQ ID NO: 8901 - protein, 340 aa, Haemophilus influenzae 86-028NP
MLKKLFHSALWGLAAAGVILFAVPRLNNSNIFTSDDIISFKNAVRIASPAVVNVYNRSFSSASINDNDQLQVNNLGSGVIMSKDGYILTNKHVIQNADQIVVALQNGNIFEASLVGSDDLTDLAVLKIRADNLSTIPQNSARQAHVGDVVLAIGNPYNLGQSVSQGIISAIGRNAVGDSVGRQNFIQTDASINRGNSGGALINSAGELVGISTLSIGKTANEIAEGLNFAIPIDIANDVLRKIMRDGRVIRGYFGVQSDISSSSEEGIVITDVSPNSPAAKSGIQVGDVILKLNNQEGISAREMMQIIANTKPNSKVLVTILRLGKILQIPVVIEEFPVN

SEQ ID NO: 8902 - protein, 524 aa, Brucella melitensis 16M
MAIAPKAGFARTLFATVALGAMSVAGTVSMGTPPALAAQGPASVADLAEGLLDAVVNISTSQTVKDDGEGDGPVPMPQVPEGSPFQEFFKDFFNDKDGAQGDDSRKVQSLGSGFIIDAEKGYIVTNNHVIADADEIEVNFNDGSKLKAELVGKDTKTDLAILKVDPSKHKLKAVHFGNSEKARIGDWVLAIGNPFGLGGTVTAGIISARKRDINSGPYDDFIQTDAAINRGNSGGPLFDMDGKVIGINTAIISPSGGSIGIGFAIPAEMAAGVIDQLKEFGEVRRGWLGVRLQPVTEDIAQSLGLKETKGALIAGLIENSGVDNKAIEAGDVVIRFDGKPVDTARDLPRLVAERPVGKEVEIVVIRQGAEKTLKVKLGCLVEDDKSTEPAVEDQVPAPDDGEQPGARQETPDKSDKPKKEHKSDAAPSVLGMKLSKLDDDIRGEFGIAEDVEGVAILYVAPGTAAGEKRIETGDVIVDIGQVTVKTPEDVKKRIDALRREGRKNALLMLASRSGELRFVTIRID

SEQ ID NO: 8903 - protein, 146 aa, Pisum sativum
MGFTEKQEALVNSSWELFKQNPSYSVLFYTIILKKAPAAKGMFSFLKDSAEVVDSPKLQAHAEKVFGMVHDSAIQLRASGEVVLGDATLGAIHIQKGVVDPHFVVVKEALLETIKEASGEKWSEELSTAWEVAYEGLASAIKKAMN

SEQ ID NO: 8904 - protein, 523 aa, Oryza sativa
MALLALNRLISIRRERRRRRNKARSKRFPLGLSALHLSEGGSITKSVRRKYSPCQQDDSQGGKMMTNSGVTLPEDIWSYILSLMPMRDAARAACLFRAFLRSWRCHPNLTFNEDALGLNDNACETDFTSKVDHILKNHSGIGVKRFKLSIHCKLDNCDYVDSWLQFAITPGIEEITVMLSGNKPQFNFPCSLFSDKIAYSIRCLELGNCAFHPTIELGPLRNLKRLHLSCVRISGDELACLLSNSFVLEQLELKYCKKIVSLKMPCVLQRLNCLNVLECKRVQVIESKAPNLSSFSFSGNKVKLSLVESSQVKNLYMCSSNIICYARSDLPSIVPNVETLAVASHCEMVDTPMLPTKLLYLKHLTISLFAWTFSRAYDYFSLVSFFDASPLLEVFVLDIYQESMEHESIFESSSHLRQMPEYHHEHLKSVTISGFCSAKSLVELTCHIVENTTSLERLELDTTHGNARCSEDSSDECFPVSQGVLTESPRAVLAIRGYIEGKIPTNVKLNVLEPCSRCHAGGG

SEQ ID NO: 8905 - protein, 146 aa, Pisum sativum
MGFTEKQEALVNSSWELFKQNPSYSVLFYTIILKKAPAAKGMFSFLKDSAEVVDSPKLQAHAEKVFGMVHDSAIQLRASGEVVLGDVTLGAIHIQKGVIDPHFVVVKEALLDTIKEASGEKWSEELSTAWEIAYEGLASAIKKAMN

SEQ ID NO: 8906 - protein, 454 aa, Haemophilus influenzae 86-028NP
MTMITPVQAILASNQHFLDRQDVMESNVRSYPRKLPFAYAKAQGCWVTDVEGNEYLDFLAGAGTLALGHNHPILMQAIKDVLDSGLPLHTLDLTTPLKDAFSEELLSFFPKDKYILQFTGPSGADANEAAIKLAKTYTGRGNIIAFSGGFHGMTQGALALTGNLGAKNAVENLMPGVQFMPYPHEYRCPFGIGGEAGAKAVEHYFENFIEDVESGVVKPAAVILEAIQGEGGVVPAPISFLQKVREVTQKHGILMIVDEVQAGFCRSGRMFAFEHAGIEPDIIVMSKAVGGSLPLAVLAIRKEFDAWQPAGHTGTFRGNQLAMATGYASLKIMRDENLAQNAQERGEYLTNALRELSKEYPCIGNVRGRGLMMGIDIVDERQAKDAIGAYPRDCELAAAIQKACFKNKLLLERGGRGGNVVRVLCAVNINQSECEEFIKRFKQSVVDALKVVRS

SEQ ID NO: 8907 - protein, 308 aa, Sorghum bicolor
MEINIVDKYEKLEKVGEGTYGKVYKAQDKATGQLVALKKTRLEMDEEGIPPTALREISLLNLLSHSIYVVRLLAVEQAAKNGKPVLYLVFEFLDTDLKKYLDVYRRGPAARPLPATLIKNFLYQLCKGVAHCHGHGVLHRDLKPQNLLVDKDKGILKIADLGLGRAFTVPMKSYTHEIVTLWYRAPEVLLGATHYSTGVDMWSVGCIFAEMARRQALFPGDSELQQLLHIFRLLGTPSEEQWPGVSELRDWHEFPQWKPQSLARVVPTLEPEGVDLLSKMLQLDPSNRISAIAAMEHPYFDSLDKSQF

SEQ ID NO: 8908 - protein, 245 aa, Eucalyptus globulus
MGRGRVQLKRIENKINRQVTFSKRRCGLLKKAHEISVLCDADVALIVFSTKGKLFEYATDCCMERILERYERYSYAESQVLTNNAETNGNWTLEHAKLKARMEILQKNQKNLMGEELDSLSLKELQNLEHQLDTALKNIRSRKIQLMCESISELQRKDKALQEQNNMLAKKVKEKEKALAQQTQWDNPQDDGLTSSSVILSQSLQPLNIGGPYHPSGIEEGAALGPPQHRNATLFPSWMLSHLQE

SEQ ID NO: 8909 - protein, 339 aa, Aloe vera
SDSGKDAGRLSAAWQLYKAQEDMMKVAKKYGVKLTMFHGRGGTVGRGGGPTHLAILSQPPGTINGSIRVTIQGEVIEQSCGEERLCFKTLLDEMAVVATKEYRSIVFQEPRFVEYFRLATPETEYGKMNIGGRPSKRKPSGGIESLRAIPWIFAWTQTRFHLPVWLGVGAAFKHIMEKDKKNFQTLREMYNVWPFFRVTIDLLEMVFAKGNPDIAALYDKLLVSEDLQPFGERLRNNYVETKSLLLQVAGHKDLLEGDPYLKQRLRLRNAYITTLNVCQAYTLKRIRDPTYNVNLRPRLSKDVTERRKPAAEFLTLNPTSEYAPGLEDTLILTMKGIAA

SEQ ID NO: 8910 - protein, 364 aa, Aloe vera
SDSGKDAGRLSAAWQLYKAQEDMMKVAKKYGVKLTMFHGRGGTVGRRGGPTHLAILSQPPGTINGSIRVTIQGEVIEQSFGEERLCFKTLQRYTAATLEHGMNPAISPKPEWRALLDEMAVVATKEYRSIVFQEPRFVEYFRLATPETEYGKMNIGSRPSKRKPSGGIESLRAIPWIFAWTQTRFHLPVWLGVGAAFKHVMEKDKKNFQTLREMYNVWPFFRVTIDLLEMVFAKGNPDIAALYDKLLVSEDLQPFGERLRNNYVETKSLLLQVAGHKDLLEGDPYLKQRLRLRNAYITTLNVCQAYTLKRIRDPTYNVNLRPRLSKDVTERRKPAAEFLTLNPTSEYAPGLEDTLILTMKGIAA

SEQ ID NO: 8911 - protein, 178 aa, Clostridium perfringens str. 13
MLYDFKVKDIEGNEVSLGEYKGKVLLIVNTATGCGFTPQYEGLEVLYKKYHDKGFEILDFPCNQFFEQAPGSNEEIVGFCKLNYGTTFKTFAKVEVNGENACELYKFLKKEAPMAKEDETSLGFYDKLKGLGFTTEGEEIKWNFTKFLIDKNGEVVARFAPTFEPEKLDELIEELLEE

SEQ ID NO: 8912 - protein, 340 aa, Burkholderia fungorum LB400
MTTKGTILVTGGAGFIGSHTCVELLNGGYDVVVIDNLVNSNRESLRRVEKITGKAVTFYEADARDEAALNRIFDAHPITGAIHFAALKAVGESVAKPIEYYSNNVGSLLTLLGVMRERNVKQFVFSSSATVYGVPKSSPIDESFPLSATNPYGQSKLIAEQVLRDLEVADPSWRIATLRYFNPVGAHESGLIGEDPAGIPNNLMPYVAQVAVGKLEKLRVFGGDYDTPDGTGVRDYIHVVDLARGHLAALDALVTRDASFVVNLGTGQGYSVIDVVKAFEKAAGRPVPYEIVARRPGDVASCFADPAAAEKIIGWRAQFGIERMCADHWRWQSTNPQGFA

SEQ ID NO: 8913 - protein, 560 aa, Anaplasma marginale str. St. Maries
MSIRDGCSARFIFVTGGVVSSLGKGLAAASIGALLQARGFRVRLRKLDPYLNVDPGTMSPAQHGEVFVTDDGGETDLDLGNYERFTGVNTTKEDNITAGRIYQQLLAKERRGDYLGHTVQVIPHVTDLIISFILSNDDGADFIICEIGGTVGDIESQPFLESIRQVSYRLSKNFTIFVHLTLVPCVGSAGELKTKPTQHSVKELSSLGIQPDIILYRSAEPLPQYQSAKIANFCNVSADNVIPALDVESMYKLPVMYHAHKLDTQILSHFGMGAPEPDLTKWANVLTMVNNARNVVTIAIIGKYTKFLDAYTSLTEALDHAGMHSGIKIQVKWVDSRLPVRESDLHDVDGVLIPGGFGDDGVDGKVLAIGYARANGIPMLGICMGMQLAAIEFALNVAKLEDANSTEFNQACKNPIVVELPWLQKGEGEYLLGGSMRLGSCTYRLSADSRVASVYGSTVINERCRHRYCINPQYKNVLEEHGLSFTGMSDSHGLVEVLELQSHPWFIGVQFHPEFKSSPFAPHPLFTSFVQNVLQIKQRGFMHKSVSAAAILVPGSSVVS

SEQ ID NO: 8914 - protein, 361 aa, Arabidopsis thaliana
MAENLACGETSESWIIDNDDDDINYGGGFTNEIDYNHQLFAKDDNFGGNGSIPMMGSSSSSLSEDRIKEMLVREIEFCPGTDYVKRLLSGDLDLSVRNQALDWILKVCAHYHFGHLCICLSMNYLDRFLTSYELPKDKDWAAQLLAVSCLSLASKMEETDVPHIVDLQVEDPKFVFEAKTIKRMELLVVTTLNWRLQALTPFSFIDYFVDKISGHVSENLIYRSSRFILNTTKAIEFLDFRPSEIAAAAAVSVSISGETECIDEEKALSSLIYVKQERVKRCLNLMRSLTGEENVRGTSLSQEQARVAVRAVPASPVGVLEATCLSYRSEERTVESCTNSSQSSPDNNNNNNNSNKRRRKQ

SEQ ID NO: 8915 - protein, 78 aa, Zea mays
  misc_feature (27)..(27): Xaa can be any naturally occurring amino acid
  unsure (1)..(78): unsure at all Xaa locations
ILAEKGVVVLPDIYANSGGVVISYFNXEWVQNIQGFMWAEEKVDDELEKDMSSAFQHMKAMCKSLVLPKCAVTLELRV

SEQ ID NO: 8916 - protein, 241 aa, Debaryomyces hansenii CBS767
MSHKSIIADFLLFDLDGTLVNSTLAVEKTWIEQCNNHNSTNEVPIDAEILLNSAHGTRTAETIKRWFPYLQNDKESINLFEKAIVTNYGHLAEEVKGATHLIDSINKFGSNQWAIITSGTKDLAYGWFEKLFVNSGKPKVFITANDVSQGKPNPEGYLEAFSQLKETNKLVGHEFSAVVFEDAPVGIQAGIAAGFHVIGIATTFDKDTLINAGSSFVVEDLSKIHITKTTSTSFQLDLDIL

SEQ ID NO: 8917 - protein, 317 aa, Oryza sativa
  misc_feature (157)..(157): Xaa can be any naturally occurring amino acid
  unsure (1)..(317): unsure at all Xaa locations
MAVHPLLRLLLLRPPPPPPPPPPNSPPFATTRRASSASAAAAAALLLLAASPRPRPARADPGGGGGEDIDEARVVRLFQEASPSVVFIKDLVVGRTPGRGGGQAVEAEDGEEGGATVEGTGSGFVWDTAGHIVTNYHVVAKLAGDGSAFHRCKCFLXVLLEDSSGNSYLKEGRLVGCDPSYDLAVLKVDVDGDKLRPALIGTSKGLRVGQSCFAIGNPYGYEHTLTTGVVSGLGREIPSPNGRPIRGAIQTDAAINSGNSGGPLIDSYGHVIGVNTATFTRKGTGISSGVNFAIPIDTVVQSVPNLIVYGTSVSNRF

SEQ ID NO: 8918 - protein, 472 aa, Vigna radiata
MKFLSTKATCNSHGQDSSYFLGWQEYEKNPYDEVLNPEGIIQMGLAENQLSFDLLESWLAKNPDVAGFKSDGKSIFRELALFQDYHGLPSFKKALVDFMAEIRGNKVTFDPNHIVLTAGSTSANQTLMFCLAELGDAFLLPTPYYPGFDRDLKWRTGVEIVPIQCTSSNNFQITEAALKQAYQEAKKRNLRVKGVLVTNPSNPLGTTMSRSELNLLVDFIKDKNMHLISDEIYSGTVYNSPGFVSIMEILKDRNDLKDCGANVWDRVHIVYSLSKDLGLPGFRVGAIYSENEVVVAAATKMSSFGLVSSQTQYLLSAMLGDKKFTKNYISENLKRLKRRQRNLVSGLQKAGISCLKTNNAGLFCWVDMRHLLHSNTFEAEMELWKKILYEVRLNISPGSSCHCTEPGWFRMCFANMSEETLNLAMKRLKTFVQESNHDNGCTAKRVQSSRRKSLSNWVFRLSSREHREQEQR

SEQ ID NO: 8919 - protein, 136 aa, Triticum aestivum
GLGRSPRPTTGATDGVLAQMRELKAWFEVHTLFHFYWASILVRYDANAVTAPGGAPRVNLVEFAHVVESEGVTHHNFLGGLCSLKKSPPTPSLLTRRLRLSLEEILEYFGRRYSTKGKIRARCLLFFSLCQIFHWY

SEQ ID NO: 8920 - protein, 255 aa, Bordetella pertussis Tohama I
MTQRLSGRIAIVTGAGSGIGEATARLMAREGAVVVVADKAIEVAERVAQAIVAEGGRAEARQADVGEAQSVRALVDAVAARWERIDVLVNNAGYGIAATVVDTDEADWSALMRVNVDGVFLGCKYVIPIMQRQGAGVIVNTASAGALVGLRQRAAYCASKGAVAALTRAMALDHATEGIRINCVAPGTIESPYFREIYARSDDPEALRASLAARQPMNRLGQPEEVARAIVFLASDDASFATGSTLVLDGGLTAA

SEQ ID NO: 8921 - protein, 495 aa, Psychrobacter arcticus 273-4
MIQFCTLIAHLPCIVGTSPTNQYQLDEMTTSMANNTSKSSNNKQSIDNLKTSGFDRRMSIAKTSLNIGRRWAGNSVSGMFLNKEARTARNQIFMEEQAHYLAEELGKLKGSVVKIGQMLAIYGEHILPPEITRALQTLNDDTATLAWPKIEQTLRQLLGNKLHELQVDPVPIGTASLAQVHRATVIATGEQVVLKIQYPGVSDAINSDLALFKSLLKVSSIVPQTRSLDAWFEEIRDLLHHEVDYEAEAATTERFYDRLLDDIRYVVPKINRTYSTKGLLCMSYEPGISVVSDALQLLPLERRNAIGQAAIEIMIQEIFVWGEMQTDPNFGNYLVRVARDENEVDKLILLDFGAIRQFDNNLLTIAHHLLRAGYYHDHQSMMSAMTGYNFFDTMSDKVRSDIASLFLLATEPFSDPIINTDMPVNCLDKQQRYIWANSKLHTRLSNDATQAMQSFEFNLPPKEFMFISRKFIGAYTFLTVLDARTDSNNLVKPFL

SEQ ID NO: 8922 - protein, 139 aa, Schizosaccharomyces pombe
QKQPHIFQNAKKGAGRRWYKDVGLGFKTPAEAIYGEYVDKKCPFVGQVSIRGRILTGTVVSTKMHRTIIIRREYLHFIPKYNRYEKRHKNLAAHVSPAFRINEGDVVTVGQCRPLSKTVRFNVLRVVKHTEGPKQFGKF

SEQ ID NO: 8923 - protein, 341 aa, Arabidopsis thaliana
  misc_feature (120)..(120): Xaa can be any naturally occurring amino acid
  misc_feature (142)..(142): Xaa can be any naturally occurring amino acid
  unsure (1)..(341): unsure at all Xaa locations
GVKLTMFNGRGGTVGRGGGPTHLAILSQPPDTIHGQLRVTVQGEVIEQSFGEEHLCFRTLQRFTAATLEHGMNPPVSPKPEWRVLMDEMAIIATEEYRSVVFKEPRFVEYFRLATPELEXYGRMNIGSRPSKRKPSGGIESXLRAIPWIFAWTQTRFHLPVWLGFGGAFKRVIQKDSKNLNMLKEMYNQWPFFRVTIDLVEMVFAKGDPGIAALYDRLLVSEELQPFGEQLRVNYQETRRLLLQVAGHKDILEGDPYLRQRLQLRDPYITTLNVCQAYTLKQIRDPSFHVKVRPHLSKDYMESSPAAELVKLNPKSEYAPGLEDTVILTMKGIAAGMQNTG

SEQ ID NO: 8924 - protein, 322 aa, Arabidopsis thaliana
MNGGGKLVCVTGASGYIASWIVKLLLLRGYTVKATVRDLTDRKKTEHLLALDGAKERLKLFKADLLEESSFEQAIEGCDAVFHTASPVFFTVKDPQTELIDPALKGTMNVLNTCKETPSVRRVILTSSTAAVLFRQPPVEASDVVDETFFSDPSLCRETKNWYPLSKILAENAAWEFAKDNGIDMVVLNPGFIFGPLLQPTLNFSVELIVDFINGKNPFNSRFYRFVDVRDVALAHIKALETPSANGRYIIDGPIMSVSDIIDILRELLPDLCIADTNEESVMNEMLCKVCVEKVKNLGVEFTPMKSSLRDTIVSLKEKCLL

SEQ ID NO: 8925 - protein, 326 aa, Rickettsia typhi str. Wilmington
MNIKPKKYKPIKEEYIKSFKDMLLLRRFEEKCGQLYGMGEIGGFCHLYIGQEAVISAVELIKKKGDSTITSYRDHAHIILAGTEPKYVLAELMGRATGCSKGKGGSMHLFDIPNKFYGGHGIVGAQVPIGTGLAFAEKYNGTNNICFTFLGDGAVNQGQVYEAFNMASLWGLPVVYIIENNEYSMGTSVSRSTFMRDLYKKGESFGIRGFQLDGMDFEEMYNGTKQVAEYVRENSFPVILEVKTYRYRGHSMSDPAKYRSKEEVAKYKERDTLVRIRQIILDNKYATEEDLKAIERSVQEVIKVAVEFSENSPLPSEDELYTDIYV

SEQ ID NO: 8926 - protein, 325 aa, Arabidopsis thaliana
MADGGKMVCVTGASGYVASWIVKLLLLRGYTVRATVRDPSDEKKTEHLLALDGAKEKLKLFKADLLEEGSFEQAIEGCDAVFHTASPVSLTVTDPQGLQIELIDPAVKGTLNVLKTCAKVSSVKRVIVTSSMAAVLFREPTLGPNDLVDESCFSDPNFCTEKKLWYALSKTLAEDEAWRFAKEKGLDLVVINPGLVLGPLLKPSLTFSVNVIVELITGKDNFINKDFRLVDVRDVALAHIKAFETPSANGRYIIEGPVVTINDIEKILREFFPDLNLGNKGEASEIIPVIYKLCVEKVKSLGIEFTPTEATLRDTILSLKEKCLV

SEQ ID NO: 8927 - protein, 212 aa, Glycine max
  misc_feature (159)..(159): Xaa can be any naturally occurring amino acid
  unsure (1)..(212): unsure at all Xaa locations
MEGRTGLLFLVVLGAAWACDSRELTNSGTSELSIKPDVCALCEEYITKALDYLYENKTETEIINILHNTCHQLPSFKQKCVALVDFYAPLFFSEVATIQPGEFCHKVNLCQKIAYIALKVQDDSCEFCQDTVSTLLEKLKESDTKLEIIETLLKVCNSXEKYANKCKRMVFEYGPLIFDHAEKILETTDICNIIHACKSSDVAGQQAFLSVS

SEQ ID NO: 8928 - protein, 488 aa, Mycobacterium tuberculosis H37Rv
MRAEIGPDFRPHYTFGDAYPASERAHVNWELSAPVWHTAQMGSTTHREVAKLDRVPLPVEAARVAATGWQVTRTAVRFIGRLPRKGPWQQKVIKELPQTFADLGPTYVKFGQIIASSPGAFGESLSREFRGLLDRVPPAKTDEVHKLFVEELGDEPARLFASFEEEPFASASIAQVHYATLRSGEEVVVKIQRPGIRRRVAADLQILKRFAQTVELAKLGRRLSAQDVVADFADNLAEELDFRLEAQSMEAWVSHLHASPLGKNIRVPQVHWDFTTERVLTMERVHGIRIDNAAAIRKAGFDGVELVKALLFSVFEGGLRHGLFHGDLHAGNLYVDEAGRIVFFDFGIMGRIDPRTRWLLRELVYALLVKKDHAAAGKIVVLMGAVGTMKPETQAAKDLERFATPLTMQSLGDMSYADIGRQLSALADAYDVKLPRELVLIGKQFLYVERYMKLLAPRWQMMSDPQLTGYFANFMVEVSREHQSDIEV

SEQ ID NO: 8929 - protein, 560 aa, Listeria monocytogenes EGD-e
MQTELVNQIEVKLRKIYQAAYQPAYLEKMLACAENYSNNTRGSIDTISEKNVYLIAYGDSIFEKNKHPLQTLNEFLQEYAQDAITDVHLLPIFPSTSDDGFSVTDYKQIDEQLGDWDDVQKMSENFRVMLDFVANHMSKSSDWFKRFSDNEAPYNQFFIEKDSQFDYKNVTRPRTSPLFHKYENGKELWTTFSEDQLDLNVRNIDCLVALTDVLLFYASKQATSIRLDAIGFLWKTSGTTCMHLPETHEIISLWRLLIDELYPNLQIITETNVPHEENISYFGDGKNEANMVYQFPLPPLVLHTFTCHDTTKLSKWAKSISQVSDTATYFNFLASHDGIGMRPATGILSDEEINSLVQKAVQNGGQVSYKDNADGTQSVYELNINYGEALQNLDEDTTEELVTKKIIAAHSILLTLQGVPAIYYHSLLGSKNDLVGYEESGINRRINREKLEKNQLVHELKTDTYRKTIFTSLKKLVQIRRNHTAFSPFATQEILDLGPDVFAIKRESEGECIYGIINVTSHDISKKVAFSGTNLLANQPVTSELELTAYEVVWIKKAVQ

SEQ ID NO: 8930 - protein, 359 aa, Lycopersicon esculentum
MVFPLDSQLQNPISALLDGLYCEEDRFLDDDLGEWSSLDVGNENVKKTLPLLECDMFWEHDELATLLSKENEFHLGFQSLISDGSLMGARKEALDWMLRVIAYYGFTATTAVLAVNYFDRFVSGWCFQKDKPWMSQLAAVACLSIAAKVEETQVPLLLDLQVADSRFVFEAKTIQRMELLVLSTLKWKMNLVTPLSFIDHIMRRFGFMSNLHMDFLKKCERLILDIITDSRLLHYPPSVIATASMFYVINDIEPSNAMEYQNQLMSVLKVRKDIFEECHDLILELMDTACYKLCQSLKRKHHSVPGSPSGVIDAYFSSESSNESWSVASSISSSPEPQYKRNKTQDQRMTLAPLGSNLH

SEQ ID NO: 8931 - protein, 2518 aa, Polyangium cellulosum
ILGSDARLASALEAAGAHVTRHRDPGAWIDAIRGGGAPEVVAVLACTTRPDAPSGALAATHGAAADALAALQAWLAEERLASCALVVLTERAVATRPDEDVLDLVHAPVWGLVRAAQVENPDRALILVDVDADDASLPALPALVAAAVARAADASEPQLALREGRRLVPRLGRLGGDDALVPPSAAAYRLHVAAKGTLESLALVPHEEATRPLAEGQIRVAVRAAGLNFRDALDALGMYPGDPGPLGAEGAGVVLEVGPGVTELAPGDRVMGLLSAAFGPIALADHRMVSRIPAGLSFVEAASIPVVFLTAYYGLVDLGRLRPGERVLVHAAAGGVGIAAVQLARHLGAEVFATASPPKWATLRALGLDDDHIASSRSGDFEAHFRRTSGGRGVDVVLDSLARELVDASLRLVALAPDGRFVEMGKSDVRDPLAVAASHPSVAYRAFDLAEAGPERIQAMLAELVALFERGVLRVPPITPCDLRRAPQAFRALAQARLVGKVVLTIPRALDPRGSVLVTGGTGTLGALVARHLVQRHGVRSLVLSSRRGPAAPGADDLRRELEAAGASVAIVACDAGDRLALERLLAGIPADRPLTAVVHAAGTLDDGVLTSLTPERLRSVMSAKVDAAAHLDELTRPLDLSAFVLFASLSGVLGSPGQANYAAANTFLDALAHQRRSRGLPAVSLDWGYWAERTGLTAHLGDTDLQRMARGGLRPLTTDDGLALFDAALAHVDAALVAAPFDPVALRAHAVAPILRGLVRAGAARRKLANNAASAAPLAQRLAGLAPKERERAMIDVVRPEIGVVLGLPPSRHLDGDRPLKELGLDSLMAVELRNRLAAIVGTRLPATLLFDYPTPTALARFLATALVGRGDAAAAPSAARAASAGASDDAIAIVAMACRFPGGVLTPEDLFRLLREGGDAISAFPENRGWDLDALSDGAARQGGFLHDADLFDAEFFGISPRETLALDPQQRLLLEMTWEALERAGIIPASLHGSKSGVFVGVFGSDYVARLLHGPSGAQAMESLRGYIGTGSASSVASGRIAYALGLEGPAISVDTACSSSLVALHLACHAIRRGECSLALAGGVTVMATPGIFGEFSAQHAGAPDGRCKSFSADANGAGWSEGAGIVLLERLSDARKNGHPVLAIVRGSAVNQDGKSQGLTAPNGPAQERVIRDALASAGLAPADVDAVEAHGTGTTLGDPIEARALFATYGAAHAKERPLWLGSLKSNLGHTQAAAGIGGVIKMVLALQSGVLPRTLHAASPSQHIDWSSGAIRLLTEEVPWKPGGSPRRAAVSSFGISGTNAHVVLEEAPRAAAGDDQAAEPARAPLAPPVPVLLSAKSDAALRAQAGKLHAHLAEHEDVALVDVAASLATTRSHFERRAAVVADDRAALLSALAALAEGRAGAGTVAGEALPPGKVAFVFPGQGSQWPSMARALLASSPAFRAEIEACERALAPHVDWSLLAVLGGDEAHAAPMLERVDVVQPVLFAVMIALAATWRAAGVTPDAVVGHSQGEIAAAYVAGALSLEDAARVVALRSRAITKLAGRGAMAAVELTTADLEARLAPFGGRLAIAAINSPHAALVSGDPDAIDELVAELSGAQLFARKVRVDYASHSAHVEAIERTLLEALDGIAPRPATVPLYSAVTGERLDGEALGAAHWYRNLRHTVRFEHATRALLDDGHRFFVEVSPHPVLTVALRDTIDASGHDAVACASLRRDEGDLARFNLSLAELHTRGLAVDWRAFFAPFAPRTVALPTYAFQRERFWLDAPKASGVIPAAASPAEARFWSAVEDGDVATVTDALDVGDDERRAALATLLPTLATWRRARRAQSTIDAWRYRVAWRALTAPPKGDIAGTWLVVAPEVAGALADGVARALEARGARGVLVPVDAEDAARTPLAGRLRAVAGGQAIRGVISFAALDERPAPLEPSVPLGLAVSLGLVQALGDAAIDAPLWLVTRGAVAVGASERVTRPLQAMTWGLGRVVALEHPERWGGLVDLGEESAPDANGARDANVHDRLANLVARRDDEDQLALRAAGTYVRRLVRAPHDGARPPAFAPRGAALVTGGTGALGAHVARWLARIGAEHIVLASRRGAAAPGAAALAEELSALGARVTLAACDVADREAVAALVRDVEAGGATVRAVFHAGGAMHEAPVAAMRVEELADAIAAKARGAQHLHDVFAQRPLDAFVLFSSGAGVWGGGRQGAYAAANAFLDALAEARRADGLAATSIAWGAWAGGGMLATDAERRLKHRGVAPMDPELAVAALAHALDHAETCLAVADVDWARFAPSFASARPRPLLDELAEARSALDALREPPDDARTAAGPEPASTLRTTLAALPEGERHRHLLALVRTETAAVLGHADASRVEPNRGFFDLGLDSLMSVELRRRVQRATGIKLPATLAFDHPTPSALASKVLAAIVLHDATPRASPAAELERLEGMLSAIYADEALRDDLTARLRAFLDKRAVRTERPDDAAFAEKLGSASADELIRLIDQKLGDRIDVDRY

SEQ ID NO: 8932 - protein, 587 aa, Arabidopsis thaliana
MSMIDEPLYPIAVLIDELKNDDIQLRLNSIRRLSTIARALGEERTRKELIPFLSENNDDDDEVLLAMAEELGVFIPYVGGVEYAHVLLPPLETLSTVEETCVREKAVESLCRVGSQMRESDLVDHFISLVKRLAAGEWFTARVSACGVFHIAYPSAPDMLKTELRSLYTQLCQDDMPMVRRAAATNLGKFAATVESAHLKTDVMSMFEDLTQDDQDSVRLLAVEGCAALGKLLEPQDCVQHILPVIVNFSQDKSWRVRYMVANQLYELCEAVGPEPTRTELVPAYVRLLRDNEAEVRIAAAGKVTKFCRILNPEIAIQHILPCVKELSSDSSQHVRSALASVIMGMAPVLGKDATIEHLLPIFLSLLKDEFPDVRLNIISKLDQVNQVIGIDLLSQSLLPAIVELAEDRHWRVRLAIIEYIPLLASQLGVGFFDDKLGALCMQWLQDKVHSIRDAAANNLKRLAEEFGPEWAMQHIVPQVLEMVNNPHYLYRMTILRAVSLLAPVMGSEITCSKLLPVVMTASKDRVPNIKFNVAKVLQSLIPIVDQSVVEKTIRPGLVELSEDPDVDVRFFANQALQSIDNVMMSS

SEQ ID NO: 8933 - protein, 339 aa, Brucella melitensis 16M
MRVYYDRDADVNLIKSKKVVIVGYGSQGRAHALNLKDSGAANVRVALREGSATVQKAQADGFEVMNVADAAKWADLMMMATPDELQADIYRDHIHNNLRDGAAIAFAHGLNVHCGLIEPKKTVDVMMIAPKGPGHTVRGEYQKGGGVPCLIAIHQDASGNAHDLALSYASGVGGGRSGVIETTFKEECETDLFGEQAVLCGGVVELIRTGFEVLVEAGYAPEMAYFECLNEMKLIVDLIYEGGIANMNYSISNTAEWGEYVTGPRIITAETKAEMKRVLKDIQTGKFTSDWMQEWKAGAARFKGIRRLNDAHQIEEVGGKLRAMMPWIEKNKLVDKARN

SEQ ID NO: 8934 - protein, 540 aa, Oryza sativa
MACLAPQLKWPLSTRAAAFREHGGAGIGGFRTVRLHCAVSTTALVEAESSDSLAPGARRLVVYDGAVAPPPLPGGFGEAILNQEAVVAAAAAEAVALARAAAEVAGEVVRMSQTEQRHRPDFVTTHDTEDNYLAREILRAEAGLGARYADACLSEDAGFSSIFSDESEVDDDEQCVQGVAVKSVRQSERRARRVRAAMKAAKSFSGRNPVAASSSARKKRLKGCRSPLGCFYKMTGRRLLTAKQEVEFSQGIQDLLKLEAIQKELAHYNGGEPTFSQWAEAAGTDENTLRKRLNYGISCKNTMVKSNVRLVISIAREFEGPGMEFSDLIQEGIQGLVRGAEKFDASKGFRFSTYSHWWIKQAIRKSVLEQTQIIRLPAHMAEASSRVKECRRRLRRQLKRLPTNEEIASDTGMPLRRVEAAMSLPKYTVSLTSKVGCTDMTYQEITPDTSTETAEEMLHRWLMKEDVDRALDGLSPRERQVIRYRFGMDDGRLRTLHDIGRLMGVSRERIRQIELVAFRKLRGRKKVQSLQHYLQPVESW

SEQ ID NO: 8935 - protein, 456 aa, Polyangium cellulosum
MISISKSKQKLLPPGPRSPMALQTLQWLKNPVPFLEACGARYGEMFTLKLPTQWPVVVVQHPEAVKEVFALDSNAGHAGEANNILKPFLGKYSLLVLDGEEHMRQRKMMMPAFHGERMEAYGHAMIDAAHASIDAWPVGSPFGVHAPMQAITLQVILRTVVGMTDGPLLAELEALYPQVIDAASAPAMHFELFRKDLGPWSPWGKFKRRSARGKEIMIHEIRRAREKGTAGRTDVLAMIIDAKDENGELLTEDEIHGELMTLLVAGHETTATALCWALRWLLRDAALTRRVAEEAAEVADDPVKIAKSELLDRVVKEALRLQPIGPVVARVLKQPLTIQGRELPADVMVAPCVQLLHHRPSLYPEPTRFDPDRYATFTPKPWEFIPFGGGLRKCIGAAFSMYEMKMVLATAFSRLSMELATDDIKIIRRGVTLAPSGGLPLVIRKKSPRATKPIAA

SEQ ID NO: 8936 - protein, 159 aa, Burkholderia sp. 383
MSTLYSFSAETLAGAPASLDAYRGKVLLIVNTASECGFTPQYAGLQKLYDQYAARGFYVLGFPCNQFGKQEPGDAAQIGAFCERNYGVTFPMFAKIDVKGDHAHPLYRYLTDEAPGILGLKAIKWNFTKFLVDREGRIVKRYAPSTKPDEIAADIDKLL

SEQ ID NO: 8937 - protein, 174 aa, Triticum aestivum
MAPAVMASSATTVAPFQGLKSTAGLPVSRRSSGSLGSVSNGGRIRCMQVWPIEGIKKFETLSYLPPLSTEALLKQVDYLIRSKWVPCLEFSKVGFVFREHNSSPGYYDGRYWTMWKLPMFGCTDATQVLNEVEEVKKEYPDAYVRVIGFDNLRQVQCVSFIAFRPPGCEESGKA

SEQ ID NO: 8938 - protein, 538 aa, Staphylococcus aureus subsp. aureus COL
MVKQLKFSEDARQAMLRGVDQLANAVKVTIGPKGRNVVLDKEFTAPLITNDGVTIAKEIELEDPYENMGAKLVQEVANKTNEIAGDGTTTATVLAQAMIQEGLKNVTSGANPVGLRQGIDKAVKVAVEALHENSQKVENKNEIAQVGAISAADEEIGRYISEAMEKVGNDGVITIEESNGLNTELEVVEGMQFDRGYQSPYMVTDSDKMVAELERPYILVTDKKISSFQDILPLLEQVVQSNRPILIVADEVEGDALTNIVLNRMRGTFTAVAVKAPGFGDRRKAMLEDLAILTGAQVITDDLGLDLKDASIDMLGTASKVEVTKDNTTVVDGDGDENSIDARVSQLKSQIEETESDFDREKLQERLAKLAGGVAVIKVGAASETELKERKLRIEDALNSTRAAVEEGIVAGGGTALVNVYQKVSEIEAEGDIETGVNIVLKALTAPVRQIAENAGLEGSVIVERLKNAEPGVGFNAATNEWVNMLEEGIVDPTKVTRSALQHAASVAAMFLTTEAVVASIPEKNNDQPNMGGMPGMM

SEQ ID NO: 8939 - protein, 128 aa, Wolbachia endosymbiont of Drosophila melanogaster
MKKVKTVSKSKKEFITGVVHIRATFNNTFVNVTDVHGNTLCQTSVGACGFSGSRKSTPYAAGKAAESAAKNAMERFGMKVVSVIIRGPGFGTEAAVKAFQSCGLTVTSIADKTAIPHNGCRLRKKRRV

SEQ ID NO: 8940 - protein, 115 aa, Actinidia eriantha
MVPKPLSLLFLLLALSAAVVGGRKLVAPGGWRPIENLNSAEVQDVAQFAVSEHNKQANDELQYQSVVRGYTQVVSGTNYRLVIAAKDGAVVGNYEAVVWDKPWMHFRNLTSFRKV

SEQ ID NO: 8941 - protein, 386 aa, Digitalis grandiflora
MKTIPFSTLRNFMVYVVVLMGVSVRMSEAKCDFKAIFNFGDSNSDTGGFWAAFPAENPPNGMTYFKRPAGRAADGRLIIDFLAQGIGIPFLSPYLLPIGSDFRHGANFATSGSTVLLPRTSLFVTGVSPFSLGIQLNQMKQFKLQVDRLHHSSGKLNLPAPDIFRKSLYTLYIGQNDFTGNLGSLGISGVKKRIIPQVVSQISSTIKKLYELGGRTFLVLNLAPIGCYPLFLVDLPHNSSDIDSFGCLISYNKAVVEYNYMLKEALAQTRKDIQDADVIYTDIHSVMLQLFQHPTSNGLKYGTKACCGYGGGSFNFNQQVFCSYSKLINGKNVTANACKDPQNYVSWDGIHATEAANKHVARAILEGSHFDPPFSFHKLCDIQPIG

SEQ ID NO: 8942 - protein, 341 aa, Streptomyces coelicolor A3(2)
MSGDDGTPGNSGYGKKAFKRSRSHFADRITADGRDGWPVEAGRYRLVVSRACPWASRALVSRRLLGLEDALSLAVADPVQDDRSWRFTLDPDGRDPVLGIRYLGEAYDRRETGYPGGVSVPAVVDVPSGALVTNDYQQITLDLATEWTALHRPGAPDLYPRALRDEIDEVMAGVYEDVNNGVYRAGFATGQEEYEAACAGVFRRLEQLTPRLERQRYLVGDTITEADIRLFTTLVRFDAVYHGHFKCNRWKLTENPVLWAYVRDLFQTPGFGDTVDFDHIKRHYYQVHTGINPTGIVPLGPDLAGWLTPHHRQELGGRPFGEGTPPEPVRAEEEVPARGRP

SEQ ID NO: 8943 - protein, 475 aa, Triticum aestivum
MAGGFRVLHLVRPFLAFLPEVQSADRKIPFREKVIYTVISLFIFLVCSQLPLYGIHSTTGADPFYWMRVILASNRGTVMELGITPIVTSGMVMQLLVGSKIIEVDNSVREDRALLNGAQKLLGILIAIGEAVAYVLSGMYGSVSQLGTGNAILIILQLFFAGIIVICLDELLQKGYGLGSGISLFIATNICENIIWKAFSPTTINSGRGAEFEGAVIALFHLLITRSDKVRALREAFYRQNLPNVTNLLATVLVFLIVIYFQGFRVVLPVRSKNARGQQGSYPIKLFYTSNMPIILHSALITNLYFISQLLYRKYSGNFLVNLLGIWKESEYSGHSIPVGGLAYYVTAPSSMADILANPFHALFYVVFMLSACALFSKTWIEVSGSSAKDVAKQLKEQQMVMPGHRESNLQKELNKYIPTAAAFGGVCIGALTVLADFMGAIGSGTGILLADSIIYQYFETFEKERATELGFFGF

SEQ ID NO: 8944 - protein, 159 aa, Glycine max
  misc_feature (152)..(152): Xaa can be any naturally occurring amino acid
  unsure (1)..(159): unsure at all Xaa locations
MLGMKRHRDNEGSESLDLAKCLVLFSCPIESNKAQQKGFGAVEFECKTCSRKFSSFQALGGHRASHKRQKLEGEELKEQAKTLSLWNKPKMHECSICGLEFSLGQALGGHMRKHRAALNEGFPIIPSIDQVIAKIPVLKRSNSTRVMCLDLXVTPVENE

SEQ ID NO: 8945 - protein, 423 aa, Streptomyces coelicolor
MTRRRVAVTGIGVVAPGGIGTPQFWRLLSEGRTATRRISLFDPSGLRSQIAAECDFEPSDHGLGLATAQRCDRYVQFALVAASEAVRDANLDMNREDPWRAGATLGTAVGGTTRLEHDYVLVSERGSRWDVDDRRSEPHLERAFTPATLSSAVAEEFGVRGPVQTVSTGCTSGLDAVGYAYHAVAEGRVDVCLAGAADSPISPITMACFDAIKATSPNNDDPAHASRPFDADRNGFVMGEGAAVLVLEDLEHARARGADVYCEVSGYATFGNAYHMTGLTKEGLEMARAIDTALDMAELDGSAIDYVNAHGSGTQQNDRHETAAVKRSLGEHAYATPMSSIKSMVGHSLGAIGSIELAACVLAMAHQVVPPTANYTTPDPECDLDYVPREARERTLRHVLSVGSGFGGFQSAVVLSGSEGGLR

SEQ ID NO: 8946 - protein, 405 aa, Trichodesmium erythraeum IMS101
MVSTIPNSNSLIESQLRPEIRKMQPLLVEWRRHLHQRPELGFKEHLTAKFIAQKLQEWGIEHQTGIANTGIVATINSNKPGRVLAIRADLDALPIQELNDVPYRSIHNGVMHACGHDGHTAIALGTAHYLATHPENFSGIVKIIFQPAEEGPGGSKPMIEAGVLKNPDVDAIIGLHLWNNLPLGTLGVRSGALMAASERFNCTILGKGGHGAMPHQTIDSIVVAAQVINALQTIVSRNISPIDSAVVTIGQLNAGRAFNVIANTARMAGTVRYFNLDYQNYFSKQMEQIISGICASYGANYELNYQPLYPPLINNPKVTDIVRSVAELIVETPAGVIPECQTMGAEDMSFFLQEVPGCYFFLGSANSEKGLAYPHHHPRFDFDETALGIGVEMFIRCTEKFSIQE

SEQ ID NO: 8947 - protein, 214 aa, Listeria monocytogenes EGD-e
MRFFIDTANVEEIKKANRMGFISGVTTNPSLVAKEGRDFNEVIQEITSIVDGPISGEVVSLEADEMIAEGRVIAKIHPNMVVKIPMTGEGLAAVKVLTEEGIKTNVTLVFSATQALLAARAGATYVSPFLGRLDDIGDDGLVLIRDIADIFEIHGIPTEIISASVRHPIHVIECAKAGADIATVPFKVFEQMLKHPLTDSGIDKFLADWEAAKK

SEQ ID NO: 8948 - protein, 1343 aa, Trichodesmium erythraeum IMS101
MINWGPYLESVCREYDRWWEVYTLTDVAGKKPHEQGQNIFPSFDLGLMVQRVKSEEKQGKDPQEKIERLTVLEGLRKYAANHVLLVGRPGSGKSTALARLLLEEAHKVWSGENGQIPILIELRYSKSSVLSRIQAFIDKHNHNTYIDEETLKSLLLQGKFLLLFDGFNEMASEEARQQVRMFRQDYPETAMVFSTRDLSLGGDLRIEKKLEMQPLTESQMQDFVCAYLPEQGENLWGQLQGRLRELGETPMFLLMLCSVFDYNKVIPAHLGLVFRGFTQTYSGRIKQDVLVDESSRRWWDRLLQELAWVMTTGGSKTEMMVAIPRKKAEDVLADFLRGQVVAPTDCAMGWLEDLLEYHLIQVGDDGQISFRHQLLQEYYAAERLSSQLSGLSDYELQWDYLNYLKWTEVVALMLGLVEDEVLAVRVVRLALEVDWFLGARLVGEVKEKFQEAAFAEVDGLELPGLAKVVLAGLTMSEVTVPRLVQFLEHSDKYMRGSAAHALGKIASEKAIEELIPLLKDSDEYVRWSAAYALGEIGSETAIEGLIPLLKDSDSFVCWSAANAMGKIGSQKAIEGLIPLLKDSDSFVRYAAAEALGKIDSEKAIEGLIPLLKDSDPNVNFSARSALSQIGSEKAIEQLIPLLKDSDEYVRYAAAEALGKIGSEKAIEQLIPLLKDSDSSVRSRAVYVLGKIGSEKAIEGLIPLLKDSDEFVRYSAVYVLGEIGSEKAIEQLIPLLKDSNSSVNFSAAEALGKIGSEKAIEGLIPLLKDSDEFVRYTAAEALGKIGSEKAIEQLIPLLKDSDPNVRRNAAEALGEIGSETVIEQLIPLLKYSDPNVRYTAAEALGKIGSEKAIEQLIPLLKDSDPNVRYTAAEALGKIGSEKAIEQLIPLLKDSDPNVRRNAAYALGEIGSEKAIEGLIPLLKDSDSFVRSRAAYVLGEIGSEKAIEQLIPLLKDSDYWVRDHVAEALGKIGSENTIIKLTKKLQNDSFVKQDLYKIIKIIQTIQQRLQYYKPTPKIPMSKSLSHNYALLIGVGDYKYPDWSLPVTVKDVQAIKSFLTNPDLCSYIDDENHLRLLCNEQATKQNILNNINWLQEQAKNDPEATILVYYSGHGWLDKSTEKYYLIPHDTSPIKLQKTQKTALPATDFNNALQEISAQKLLVIIDSCHAQGMATAKETDQLDLPENFSQTALPKNLIEDLKKGTGRAVFTSSTGYQLSWIRSDQTMSIYTYHLLEALQGGDNKPGDKYVTLSNLMHHVGKTVPQSAQQQGGEQTPIFDFSQTEDFPVALLRGGKGLPAEGKEKIQLEAQENIRNAITVQQGNAAGGDVKNQVFIDKIEGGGGITFS

SEQ ID NO: 8949 - protein, 367 aa, Triticum aestivum
  misc_feature (183)..(183): Xaa can be any naturally occurring amino acid
  misc_feature (225)..(225): Xaa can be any naturally occurring amino acid
  unsure (1)..(367): unsure at all Xaa locations
MADHAADEEEPPVLLDRAARATRGKRITKLVEEEVELDEAFWGQEALKEDEEDDNYQEEQDAGDVFDSDFDEDEPQPDDDPEKEVSERLPIKKRLFFPGKTMKKMKAKKKKKKNKVIKLEDDEGIDDKNPDKTTSSKQSDVPDEWESEKTIRKSTRTSVIVRQAEREAIRAEKQATAKPIKKXKEGEEKRMTQEEMLLEAAETEIMNMRNLERVLAREEEVKKKXAVVQKAVYEGPTLRFHSRDGESRLEFINGASFGSELCTTSTPYPEKSVCVVTGLPAKYRDPKTGLPYATMAAFKIIRESFLKEEPDKKRPNMSNMGELFESVAGEHSTPKKKRIESRSPISGDLRHGGRFRRIPALDVMDED

SEQ ID NO: 8950 - protein, 460 aa, Pseudomonas aeruginosa UCBPP-PA14
MTAQLNPQRDTRDYQQLDAAHHIHAFLDQKALNREGPRVMVRGDGLQLWDNDGKRYLDGMSGLWCTNLGYGRQDLAAAASRQLEQLPYYNMFFHTTHPAVVELSEMLFSLLPDHYSHAIYTNSGSEANEVLIRTVRRYWQILGKPQKKIMIGRWNGYHGSTLGSTALGGMKFMHEMGGMLPDFAHIDEPYWYANGGELSPAEFGRRAALQLEEKILELGAENVAAFVAEPFQGAGGMIFPPQSYWPEIQRICRQYDVLLCADEVIGGFGRTGEWFAHEHFGFQPDTLSIAKGLTSGYIPMGGLVLGKRIAEVLVEQGGVFAHGLTYSGHPVAAAVAIANLKALRDEGVVTRVREETGPYLQRCLREVFGDHPLVGEVQGAGFVAALQFAEDKATRKRFANENDLAWRCRTIGFEEGVIIRSTLGRMIMAPALVAGRAEIDELIDKTRIAVDRTAREIGVL

SEQ ID NO: 8951 - protein, 312 aa, Triticum aestivum
  misc_feature (223)..(223): Xaa can be any naturally occurring amino acid
  unsure (1)..(312): unsure at all Xaa locations
MALQPLLRLLLRPAPPPPPPTRRTPHLPAPSPTRRGTAAALLLLATVAAPPPRPARAEDDVDEPHVVRLFEEATPSVVFIKDLLVAPPPRRRGRDGGGAQPVEDEEGGATVEGTGSGFVWDSLGHIVTNYHVVAKLAGDGSESHRCKARLEDSTGTSYSKEGRLIGYDPTYDLAVLKVDVDGDRLRPALLGTSQGLRVGQSCFAIGNPLGYEHTLTTGYPIGXLVDWGREIPSPNGRVIRGAIQTDAAINAGNSGGPLIDSYGHVIGVNTATFTRKGSGISSGVNFAIPIDTVVRSVPNLIVYGTDVSNRFY

SEQ ID NO: 8952 - protein, 237 aa, Glycine max
MDLYGSFSTPSDCLHIDDFLDFSNITTDTHHHLPPPQNSPLISHDDANLFFNFPSVPTDEAAELEWLSQFVDDDATSFHSFPATASIGSHSTSFLSNNNNRNDNNEYPKSSLSSNIPCSSAVAGKSRARREGSVTGDGGVRRCSHCASEKTPQWRAGPLGPKTLCNACGVRFKSGRLVPEYRPAASPTFVLTQHSNSHRKVMELRRQKELLRHQQQQQLQQEQCHRHTHNHHDFKVC

SEQ ID NO: 8953 - protein, 353 aa, Lycopersicon esculentum
MSSSIALRQARHLTTTAAAVASSPSTITISISKAKSKLKVEHDPDKAFEIYSSVYDRYVSSMSSRYAQEFTVKRLAKSHRFSDIENFLESHKNRPKIFIHNSFLWCRRHLLDEISVKYGFLPDKVSYDILIRSYCEMRSSKMAIKILKVIEEKSVEITTITFTTILHSFYKKGKNDEAEKVWNEMVNKGCGPDVGAYNVKIINIQGERQRLAPLSQHGRSNNTNTQILNRGPVSHTLSFICPTMPSVKPLATAAGALRARVSSGLRTRGGHGPNPFTTAGHQDRPNGYLFNRVPPPPGQSRKWEDWELPCYITSFFTIVILGVGLNAKPDLTLETWAHQEALKRLELESADAE

SEQ ID NO: 8954 - protein, 594 aa, Prochlorococcus marinus subsp. marinus str. CCMP1375
MTTIDLKRRTKIVATIGPATESPEKITELIKAGATTFRLNFSHGDHEEHAKRIKTIRSVASDLGVNIGILQDLQGPKIRLGRFKEGPVNLKTGDVFALTSENKDCNQEIANVTYENLVNEVEKGKRILLDDGRVEMIVENVDKKNKSLICKVTVGGILSNNKGVNFPDVQLSINALTEKDKIDLSFGLKQGVDWVALSFVRNPADIQEIKELIRRHGYTTPIVAKIEKFEAIDQIDSILSLCDGVMVARGDLGVEMDAEEVPLLQKELIKKANSLGIPIITATQMLDSMASSPRPTRAEVSDVANAILDGTDAVMLSNETAVGDYPIEAVETMAKIARRIERDYPQRALESHLPSTIPNAISAAVSTIARQLNAAAILPLTKSGATAHNVSKFRPATPILAITSEISVARRLQLVWGVSPLLIDAQKSTSKTFGIAMEQAMDMKLLKPGDQVVETAGTLTGISGSTDLIKVGIVSKIVASGKTKPIVKEGTISGKLRVINKATDLSDLKSGEILVLAENVQYNLDTKTHISAMIFEGEYSLINTNNQIEDNNIIPAIYNVEGACTKFKNGEIVTLDLKDGNIIKGLAQDLKTYN

SEQ ID NO: 8955 - protein, 638 aa, Debaryomyces hansenii CBS767
MIITFLHSNLIMLRRYFGTSATRFQTIGNIKGTQLNATKYLSKDYHVIDHQYDCLVVGAGGAGLRAAYGLSEAGYKTACISKLFPTRSHTVAAQGGINAALGNMHKDDWHWHMYDTVKGSDWLGDQDAIHYMTKEAPASIYELENYGVPFSRNEEGRIYQRAFGGQAKEFGKGGQAYRTCAVADRTGHSLLHTLYGQSLRNDTHFFIEFFAMDLMMQDGECIGVIAYNQEDGTIHRFQAHKTIIATGGYGRTYFSCTSAHTCTGDGFAMVSRAGLPLEDMEFVQFHPSGIYGSGCLITEGARGEGGFLLNSEGERFMERYAPHAKDLASRDVVSRAMTLEINEGRGVGKEKDHIYLQLSHLPPSVLKERLPGISETAHIFAGVDVTKEPIPILPTVHYNMGGIPTNYKTEVLKKGADGKDEIVPGLFACGEAACASVHGANRLGANSLLDLVVFGRAVGHTISEQLTPGTPFKPLDEHMGKESIENLHHLRTADGSQTTASIRAEMQKTMQKGCAVFRTQDLLDQCVEDIDKIDKTFEHVKTTDRSMIWNSDLVETMELQNLLTCATQTAYSAAARKESRGAHARDDYPNRDDENWRKHTLSYQKNFGDKVELDYRDVVRTTLDESDCKPVPPAVRVY

SEQ ID NO: 8956 - protein, 380 aa, Picea abies
NNVNPIKEVQDSPKEPNPITEQISVHADCKQTVEKPNENEIVVSANKAAVASLKQQSTLQSPRISRQPKTSLNQGNPVPLAKLHEDAGRSSSLDFVNIDSEYKDPQMCTAYVTDIYANMRVVELKRRPLPNFMETIQRDINANMRSVLIDWLVEVSEEYKLVPDTLYLTISYIDRFLSANVVNRQRLQLLGVSCMLVASKYEEICAPPVEEFCYITDNTYKKEEVLDMEINVLNRLQYDLTNTKPLRPFSGVSFEQLKHPVRFQACIWEFMGNYLAELTLVEYDFLKYLPSLIAAAAVFLARMTLDPMVHPWNSTLQHYTGYKVSDMRDCICAIHDLQLNRKGCTLAAIRDKYNQPKFKCVANLFPPPVISPQFFIDNEV

SEQ ID NO: 8957 - protein, 175 aa, Triticum aestivum
MAPTVMASLATSVAPFQGLKSTAGLPVSRRSNGASLGSVSNGGRIRCMQVWPIEGFKKFETLSYLPPISTEALLKQVDYLIRSKWVPCLEFSKVGFIFREHNASPGYYDGRYWTMWKLPMFGCTDATQVINEVEEVKKEYPDAYVRIIGFDNMRQVQCVRFIAFKPPGCEESGKA

SEQ ID NO: 8958 - protein, 298 aa, Bifidobacterium longum NCC2705
MTTPIVLSLGELLWDMLPSGKRAGGAPVNFAYHAMKNGTEGWAISAVGEDELGDELIAKANEAGINTVIQRNAWPTSTVEVALKNGIPEYTIVKGVAWDHILYTRQLIDVVSKADAVCFGTLALRSPESHATITELLKHTKPGAMKFFDINLRGDHYSKDLIEELLKAATVFKINDEELLLLRDMFDIRGTSGEDASRWFIEEFGLDYVILTAGSAYSTIISRKGEVSTLDTPHVEVNDTVGAGDSFSGTFTARILLGDTLAEAHRKAVNTAAYVCTQAGAWPQYPAEMPDYLAEIGK

SEQ ID NO: 8959 - protein, 481 aa, Triticum aestivum
  misc_feature (425)..(425): Xaa can be any naturally occurring amino acid
  unsure (1)..(481): unsure at all Xaa locations
MVFSQTSSLAVKLAQGPKLFTTKTILPMDPPGVVSSENAEYDFSDVFGSSPVETATELCVVDPDSPAAPIESPEEVYNDPAVIFKRSHSLVGPSSLVSCSLGLGKLTLNIADGSSELVGHTTEEKELNLEQFSDEEFGDAVTEDEGVGLDDFEILKLVGQGAFGKVFQVRKKGTSEIYAMKVMRKDKILEKNHSEYMKAERDILTKVDHPYVVQLRYSFQTKYRLYLVLDFVNGGHLFFQLYKQGLFREELARIYTAEIISAVAHLHANGIMHRDLKPENILLDAEGHAMLTDFGLAKEFRENTRSNSMCGTLEYMAPEIIQGQGHDKAADWWSVGILLFEMLTGKPPFVGNRDKVQQKIVKEKLKLPPFLTSEAHSLLKGLLHKEAGKRLGTGPGGSDEIKKHKWFKPINWRKLDAREIQPSFXDVAGLTCTHCRTNTPVLDSPAATPVTAGGGQGNFAGFTYVRPAPFLHDLKPPSSSS

SEQ ID NO: 8960 - protein, 441 aa, Streptomyces coelicolor A3(2)
MNAEELGLPRSRQANERLHALVPGGAHTYAKGDDQYPENLAPVISHGRGAHVWDVDGNRYVEYGSGLRSVSLGHAHPRVTEAVRRELDRGSNFVRPSIVEVDAAERFLATVPTAEMVKFAKNGSDATTAAVRLARAATGRPRVAVCADHPFFSVDDWFIGTTPMSAGIPAATNELTVAFPYGDLAATEDLLARHEGEVACLILEPATHTEPPPGYLAGLRELADRHGCVLVFDEMITGFRWSEAGAQGLYGVVPDLSTFGKALGNGFAVAALAGRRELMELGGLRHSGDRVFLLSTTHGAETHALAAAMAVQGTYVEEGVTARLHALGDRLAAGVREAAASMGVGDHVVVRGRASNLVFATLDENGQPSQRYRTLFLRQLLAGGVLAPSFVVSSALGDADLDHTVDVVAEACAVYRKALDAADPTPWMAGRPVKPVFRRLV

SEQ ID NO: 8961 - protein, 613 aa, Arabidopsis thaliana
MRMFSLQKMAMAFTLLFFACLCSFVSPDAQGDALFALRISLRALPNQLSDWNQNQVNPCTWSQVICDDKNFVTSLTLSDMNFSGTLSSRVGILENLKTLTLKGNGITGEIPEDFGNLTSLTSLDLEDNQLTGRIPSTIGNLKKLQFLTLSRNKLNGTIPESLTGLPNLLNLLLDSNSLSGQIPQSLFEIPKYNFTSNNLNCGGRQPHPCVSAVAHSGDSSKPKTGIIAGVVAGVTVVLFGILLFLFCKDRHKGYRRDVFVDVAGEVDRRIAFGQLKRFAWRELQLATDNFSEKNVLGQGGFGKVYKGVLPDNTKVAVKRLTDFESPGGDAAFQREVEMISVAVHRNLLRLIGFCTTQTERLLVYPFMQNLSLAHRLREIKAGDPVLDWETRKRIALGAARGFEYLHEHCNPKIIHRDVKAANVLLDEDFEAVVGDFGLAKLVDVRRTNVTTQVRGTMGHIAPEYLSTGKSSERTDVFGYGIMLLELVTGQRAIDFSRLEEEDDVLLLDHVKKLEREKRLGAIVDKNLDGEYIKEEVGMMIQVALLCTQGSPEDRPVMSEVVRMLEGEGLAERWEEWQNVEVTRRHEFERLQRRFDWGEDSMHNQDAIELSGGR

SEQ ID NO: 8962 - protein, 1137 aa, Burkholderia vietnamiensis G4
MMKREDSLDDVRRAQFASVAPAGTARARRARRREPALSTDDPLWYKDAIIYQVHVKSFYDSNNDGIGDFPGLIMKLDYIAELGVDTIWLLPFYPSPRRDDGYDIADYRGVHPDYGTLADVRRFIREAHARGIRVIAELVINHTSDQHPWFQRARRAKPGSTHRDYYVWSDTDTKYAGTRIIFLDTETSNWTHDPVAGQYYWHRFYSHQPDLNFDNPAVVREVIQVMRFWLDLGIDGLRLDAVPYLVEREGTNNENLPETHAILKRIRATIDAEYPNRMLLAEANQWPEDVQEYFGNEDECHMAFHFPLMPRIYMSIASEDRFPILDIMRQTPALAPSNQWAVFLRNHDELTLEMVTDSERDLLWQTYASDRRARLNLGIRRRLAPLMERDRRRIELINSLLLSMPGTPVIYYGDELGMGDNIHLGDRDGVRTPMQWSSDRNGGFSRADPELLVLPPVMGSLYGYDAINVEAQTRDPHSLLNWTRRILATRRATQVFGRGTIRFLRPENRKVLAYLRELDGHEPVLCVANLSRASQAVELDLSEFAGRVPIEMTSDSPFPPIGQLTYLLTFPPYGFLWFVLSEHGREPSWRQPQAEPLPEYVTIVMRRGEQRPDVGQLHTLAHDALSSWLTRRRWFASKDRKIGDARLNVVTPMPDEPFQYAEAWVTTHGGDVERYVVPLAAAWGGETSNPLFAQLALARVRRGHTVGYLTDAFALPAFGRGMLRMLRDGATVPTSDGGRLEFLPEQALAALDPGDDAEVRWLAAEQSNSSLVIGDAIVLKLVRKVAHGVHPEAEMSRYLTRIGYANTATLAGEVVHVDPDGTPHTVAILQRYVDNQGDAWTRSFDFLKRAIDELALPAVGDGEPAERDGEPDALLGYAAFAGVVGTRLGELHVALAQPSDDAAFAPERATPEHVDGWCVDAIASFGHALDVLATRLDALDPSARDAAETLLASRDAAVQALGALVPRTLDAVCTRIHGDFHLGQVLDVQGDALLIDFEGEPARALERRRAKSHPLRDVAGLLRSLSYVSATAQFAIEKVPPQAAGRKRALFDRFGQAAADRFVECYRAAAEHAPERFVDPRYADRLLALFLIDKASYELCYEAANRPDWLGVPVGGLAALVERLLDAHAASDHGGTR

SEQ ID NO: 8963 - protein, 492 aa, Xanthomonas campestris pv. campestris str. ATCC 33913
MKAKPTLSFWQIWNMCFGFLGIQFGFALQNANASRIFQTLGAQVDDVPGLWIAAPLTGLIVQPIIGYLSDRTWTGWGRRRPYFMIGAVFTTLALLVMPNAPVLWIAAGTLWVLDASINISMEPFRALVGDQLPAEQRPSGYAMQSFFIGVGAIVASFLPWLLTRWGVDNTAPAGELPDSVRYAFYLGAAVLFLSISWTVLRTREYSPAELAAFEPAPAPAAAQLAATDQPSLQASVLWCLGGLLLAAAIAWQHGDRMLYVLAGLCIAYGVLLALARVLPRGGMLVAIMHDLRHMPQTMRRLAWVQFFSWFALFAMWIYTTAAVPQVHFGARDTVSAAYNDGANWVGVLFGAYNGFAALAATVIPLMVRAIGLRWSHLCNLWLGAAGLLSMLFIRDPYWLLLSMLGVGFAWASILSLPYALLSDSVPAAKMGVYMGIFNFFIVIPQLVAASALGFVLRVWLGGQPIYALAIGGLSLIVAGVCVVRVPSAQGGQ

SEQ ID NO: 8964 - protein, 361 aa, Zea mays
MEAMDVKYKPVMFPNGAAFKKAKPAAVAPAGEPLYRECLKNHAASLGGHAVDGCGEFMPSPGANPADPTSLKCAACGCHRNFHRRTVEGSPPQPAPAPLALPPPPPPPPSVLHGQTHRGGEDTPEDRHPGVVDADDPDSDSEGSEYDEERSVSPPPPHHVPAPVAQQPPPPSYFPAAAPHQHMLLSLGPGAAVAAAAQRLAPAQLTPSSAPPPGGAMPRKRFRTKFTAEQKQRMQELSERLGWRLQKRDEAVVDEWCRDMGVGKGVFKVWMHNNKHNFLGGHSARRSASASSGAAALLQTPGANAGAAAPSFNPSRLTPPPPVLTSSPTGFNINGAASSSPPTVTADHTDNANGASSPHSA

SEQ ID NO: 8965 - protein, 880 aa, Arabidopsis thaliana
MGKILHLLLLLLKVSVLEFIISVSAFTSPASQPSLSPVYTSMASFSPGIHMGKGQEHKLDAHKKLLIALIITSSSLGLILVSCLCFWVYWSKKSPKNTKNSGESRISLSKKGFVQSFDYKTLEKATGGFKDGNLIGRGGFGDVYKACLGNNTLAAVKKIENVSQEAKREFQNEVDLLSKIHHPNIISLFGYGNELSSSFIVYELMESGSLDTQLHGPSRGSALTWHMRMKIALDTARAVEYLHERCRPPVIHRDLKSSNILLDSSFNAKINIQISDFGLAVMVGAHGKNNIKLSGTLGYVAPEYLLDGKLTDKSDVYAFGVVLLELLLGRRPVEKLSSVQCQSLVTWAMPQLTDRSKLPKIVDPVIKDTMDHKHLYQVAAVAVLCVQPEPSYRPLITDVLHSLVPLVPVELGGTLRDSMASLMLSLGSTSLLPREINKDKLKLGTSASNPFLKAKSFSRVTMTVAVKPSRFEGITMAPPDPILGVSEAFKADTNGMKLNLGVGAYRTEELQPYVLNVVKKAENLMLERGDNKEYLPIEGLAAFNKATAELLFGAGHPVIKEQRVATIQGLSGTGSLRLAAALIERYFPGAKVVISSPTWGNHKNIFNDAKVPWSEYRYYDPKTIGLDFEGMIADIKEAPEGSFILLHGCAHNPTGIDPTPEQWVKIADVIQEKNHIPFFDVAYQGFASGSLDEDAASVRLFAERGMEFFVAQSYSKNLGLYAERIGAINVVCSSADAATRVKSQLKRIARPMYSNPPVHGARIVANVVGDVTMFSEWKAEMEMMAGRIKTVRQELYDSLVSKDKSGKDWSFILKQIGMFSFTGLNKAQSDNMTDKWHVYMTKDGRISLAGLSLAKCEYLADAIIDSYHNALLYWETPIEL

SEQ ID NO: 8966 - protein, 143 aa, Solanum tuberosum
MAPKTGGKKPAEKKPVEEKKAEEVPAEKKPKAGKKLPKDAAVDKKKKRTKKSVETYKIYIFKVLKQVHPDIGISSKSMGIMNSFINDIFEKLAQEASRLARINKKPTITSREIQTAVRLVLPGELAKHAVSEGTKAVTKFTSN

SEQ ID NO: 8967 - protein, 485 aa, Oryza sativa
  misc_feature (147)..(147): Xaa can be any naturally occurring amino acid
  unsure (1)..(485): unsure at all Xaa locations
MAGGFRVLHLVRPFLAFLPEVQSADRKIPFREKVIYTVISLFIFLVCSQLPLYGIHSTTGADPFYWMRVILASNRGTVMELGITPIVTSGMVMQLLVGSKIIEVDNSVREDRALLNGAQKLLGILIAIGEAVAYVLSGMYGSVSQLXIGNAILIILQLFFAGIIVICLDELLQKGYGLGSGISLFIATNICLLLVNLLLHSENIIWKAFSPTTINSGRGAEFEGAVIALFHLLITRTDKVRALREAFYRQNLPNVTNLLATVLVFLIVIYFQGFRVVLPVRSKNARGQQGSYPIKLFYTSNMPIILHSALITNLYFISQLLYRRYSGNFLVNLLGKWKESEYSGHSVPVGGLAYYVTAPSSLADVLANPFHALFYVVFMLSACALFSKTWIEVSGSSAKDVAKQLKEQPMVMPGHRESNLQKELNRYIPTAAAFGGVCIGALTVLADFMGAIGSGTGILLAVTIIYPYFETFEKERATELGFFGF

SEQ ID NO: 8968 - protein, 478 aa, Arabidopsis thaliana
CFNFFMDEEDLSSSSSHHNHHNHNNPNTYYSPFTTPTQYHPATSSTPSSTAAAAALASPYSSSGHHNDPSAFSIPQTPPSFDFSANAKWADSVLLEAARAFSDKDTARAQQILWTLNELSSPYGDTEQKLASYFLQALFNRMTGSGERCYRTMVTAAATEKTCSFESTRKTVLKFQEVSSWATFGHVAANGAILEAVDGEAKIHIVDISSTFCTQWPTLLEALATRSDDTPHLRLTTVVVANKFVNDQTASHRMMKEIGNRMEKFARLMGVPFKFNIIHHVGDLSEFDLNELDVKPDEVLAINCVGAMHGIASRGSPRDAVISSFRRLRPRIVTVVEEEADLVGEEEGGFDDEFLRGFGECLRWFRVCFESWEESFPRTSNERLMLERAAGRAIVDLVACEPSDSTERRETARKWSRRMRNSGFGAVGYSDEVADDVRALLRRYKEGVWSMVQCPDAAGIFLCWRDQPVVWASAWRPT

SEQ ID NO: 8969 - protein, 538 aa, Xanthomonas campestris pv. campestris str. ATCC 33913
MSQTPWWRGAVIYQIYPRSFLDSNGDGVGDLPGIIAKLDYIAGLGVDAIWISPFFKSPMADFGYDIADYRAVDPLFGSLVDFDRLLEKAHGLGLKVMIDQVLSHSSIAHVWFQESRQDRSNPKADWYVWADPREDGTPPNNWLSLFGGVAWQWEPRREQYYLHNFLVDQPDLNFHNAEVQQATLDNVRFWLDRGVDGFRLDAINFCFHDAQLRDNPAKPADKRVGRGFSADNPYAYQYHYFNNTQPENLAFLERLRGLLDLYPNAVSLGEISSEDSLATTAEYTAQGRLHMGYSFELLVQDYSAAYIRDTVSRLEATMLEGWPCWAISNHDVVRAVTRWGGAHATPAFARMVVALLCSLRGSICLYQGEELGLSEAEVAFEDLQDPYGITFWPTFKGRDGCRTPMPWTDAPSAGFTSGKPWLPLAASHRAAAVSVQQDDAHSVLSAVRDFLAWRKEMPALREGSIAFYDTAEPVLMFRREHAGQVVLLAFNLSADPADLALPAGEWEQVDVPGVELGAMDGGHLRLAGHAVVAAVGRG

SEQ ID NO: 8970 - protein, 811 aa, GIBBERELLA ZEAE PH-1
MLSTLFLAVAAPALATAFNAPNVPVGTDDSSPDGLIRFPLKVSTGAPVVKGVTKRQNEVALESQQNGFFYSIDVTLGTPGQKVTVNLDTGSAELWVNPVCEKAQQPAFCKQFGHFGESSTFVDLNTTGGVVYGTGYAYWNYGYDNVVVGSAAIRNQVFGVAYDSSFTGVGIMGAGPDLNGWDAPYPLVIDSMVKQGLIKSRALSLDIRTINSDRGAVIFGGIDTAKYTGRLQKLPIIPAASSPDGLTRYWVSLDGISLVQEDGTVDSAFSGSTPQPVLLDSGYTVSALPGSIFNKIVAAFPTAKSNGGAYVDVDCSVADIKGSVDFKFGDKTIKVPYADFIWHNDDRCVLGVFQDDEFPVLGDTFLRAAYVVYDWDNRNVWIANNEDCGTNLVAIGTGPDAVPDLVGQCGSDSETTTSASETASATETETETETASATESEAVTATTEDVTSAETDTTTGYFPTTRYSNSTASVTGKGTSTTKKATGGSGESYELPSYTDSSASTTITSTVVTSKVYTVTACPPSVTNCPVGQVTTETITSLTTYCPGSDDSSSHSTTVEGEGATHPTGAVHLTSYVTATNMHTITSCPGEGACHTSVITEIVHNTQIASPEEPTGIFTIPEAIQCGAGNFGCKEATTKGYRTVTITPVVKAPKPTPVPGYCATCGPLKGHGHHNDDDKETATGGYTAPGKQTGGYDQPTQAHPGQDYPRPTGGDSPKPTGDSHNPTGDSDKPSGDAPKPNPLEELHTYRPTNVFPQIPSSVATVVKPTGTPQAGGPSEPAGTPPVVINGASGWNVPVVAAVVVGAFVAAL

SEQ ID NO: 8971 - protein, 261 aa, Triticum aestivum
MAPPRGGAAAAATAALDLTGVHILEASSVPPLPERGGNAVQRKGAVDPDKDRKKEKAAAPRITGWGLREYSKIVCEKVEAKGRTTYNEVADEIYSELKSMAHIGQGFDEKNIRRRVYDAFNVLIALRVIAKEKKEIRWMGLSNYRYEKIKKLEEVRKELTNKIRNKKALLQEIEKQFDDLQNIKLRNQTLESSAENVNGIRLPFVLVKTSRKARVEIEISDDSKFAHFEFNGAPFTLHDDLSILEGIRRNSIGRAGRATLH

SEQ ID NO: 8972 - protein, 204 aa, Magnetospirillum magnetotacticum MS-1
MVPVPETLETNPINPYGRSKLMSEWMLADAAAAHGFSYGILRYFNVAGADPRGRTGQSTPNATHLIKVATQAALGQRSHLEVFGTDYPTRDGSCLRDYIQVSDLAEAHMVVLNHLRGGGESLTLNCGYGRGYSVLEVVEVVKRISGRDFEVRLSPRRPGDPAQIIAGADRIRNELGWVPKHDDLDAIVAQAFAWEDSLAKRNRR

SEQ ID NO: 8973 - protein, 657 aa, Trichodesmium erythraeum IMS101
MTKSTKSPTSPETWQMSDRERANLKKVTLYDSIQSLSEIWPRVAQYFGPITALHDPHAQPEVKLTYKELNEQIQKFAAGLQALEVVSKENGTSLPTRVALFADNSPRWMIADQGIITAGGADVVRSGTTDIEELIYILKDSGSISLVLENLALLERLSDRLQDLPIHLIILLSEEDANSYKSLPVVKFSQVIAKGEERPLQPTNQNLETLATLIYTSGTTGKPKGVMVTHGNLLYQINFLGTVVQPSPGEFTLSILPTWHSFGRTAEYLFLSQGCTQIYTNKRYLKKDLQEHKPHYLMSVPRIWELIYEGVQRQLREQPANKQKLARFFLDISERYIQACRVTQELVLELNSPSELEKLMATWQSWLLWPIHALGTKIVYQKIRQATGGRLKFAVSGGGSLGMHLENFFEIIGIDLLVGYGLTETSPVLTVRHYWENLRGSSGRPLPGTEIKIVNPETYETLGFGEKGLVLARGPQIMVGYYQNPEATKKAIDSEGWLNTGDIGWINPRNDLILTGRAKDTIVLTNGENIEPQPIENACTRSQYIDQIMLVGQDQKYLGALIVPNFEAVELWATQSQLSESQPKIDWKSQALQELFRQELNQEVKNRPGYRPDDRIGPFRLILDPFTIENGMMTQTMKIKRPVVTDHYRDLINEMFN

SEQ ID NO: 8974 - protein, 455 aa, Cucumis melo
DFSFHVRKCQPELIAPANPTPYEFKQLSDVDDQQSLRLQLPFVNIYPHNPSLEGRDPVKVIKEAIGKALVFYYPLAGRLREGPGRKLFVECTGEGILFIEADADVSLEEFWDTLPYSLSSMQNNIIHNALNSDEVLNSPLLLIQVTRLKCGGFIFGLCFNHTMADGFGIVQFMKATAEIARGAFAPSILPVWQRALLTARDPPRITFRHYEYDQVVDMKSGLIPVNSKIDQLFFFSQLQISTLRQTLPAHLHDCPSFEVLTAYVWRLRTIALQFKPEEEVRFLCVMNLRSKIDIPLGYYGNAVVVPAVITTAAKLCGNPLGYAVDLIRKAKAKATMEYIKSTVDLMVIKGRPYFTVVGSFMMSDLTRIGVENVDFGWGKAIFGGPTTTGARITRGLVSFCVPFMNRNGEKGTALSLCLPPPAMERFRANVHASLQVKQVVDAVDSHMQTIQSASK

SEQ ID NO: 8975 - protein, 378 aa, GIBBERELLA ZEAE PH-1
MGSYSPTSRFKDLDTIPLDPHYALKETFQADPDPRKVILGSGLYRDDDSKPWVLPVVKKVLFGPQSLNESRLVSIQTISGTGANFLGARFLAETLKPSAVWLSDPSWVNHANIWGLVNVNVKRYPYWNAKTKSLDFNNMIEKLQTDAIAGDVILLHACAHNPTGVDPNKEQWRKIADVCERKQLFPLFDCAYQGFATGNLDDDAWAIRHFIDRGTMELAVCQSFSKNMGLYGERVGALHMFCATSTDAEKVRGHLCRLQRGQISQPPTNGARIAATILSDSKLFQDWVTDLGEMSSRIKEMRKSLYDNLMILDTPGKWDHIVSQIGMFSYTGLTPEQVASIQQDSHVYILKSGRISVAGLNSKNVDKSVVEFAIVGMK

SEQ ID NO: 8976 - protein, 82 aa, Triticum aestivum
  misc_feature (60)..(60): Xaa can be any naturally occurring amino acid
  unsure (1)..(82): unsure at all Xaa locations
MSCCGGNCACTSGCNCGSGCGGCKMFPDVETAGVASVKPTVLAAPATKASAGGFEAAAEXGGCDCNTCNCGTSCGCSCCSCN

SEQ ID NO: 8977 - protein, 519 aa, Lycopersicon esculentum
MPADPDNSSAMNDSTGSGEASVSSSGNQVVPLKESAKKKRNLPGMPDPDAEVIALSPTTLLATNRFVCEICSKGFQRDQNLQLHRRGHNLPWKLRQRSSNEVKKRVYVCPESSCVHHDPSRALGDLTGIKKHFCRKHGEKKWKCDKCSKKYAVQSDLKAHSKICGTREYKCDCGTLFSRAFCDALAQESAKTLPEKPPSTNEEPKTQAVASSSPPPSPPAPPPATESQPPPPPPAAPKSLMTPTVPPSTAVMSFASSVQNRELRENPVTNSAGAATKQVVEEAAVVASLTGNCSSSCSNGSSSSNVFGSLFASSTASGSLPSQAPVFSDIFRAMAPEHTLEMAPPSSTEPISLGLAMSHSSSIFRPAGQERRQYAPAPQPAMSATALLQKAAQMGAAATSSSFLRGIGVMSSTSSSNGHQEWSGRPSDANGASLAAGLGLGLPCDAGSGLKELMLGTPSVFGPKHPTLDLLGLGMAASVGPSPGLSALLTSMGSNLDMVTSAGSFGSADFSGKDLGRNS

SEQ ID NO: 8978 - protein, 465 aa, Parachlamydia sp. UWE25
MEEIKTDIVIIGSGPAGQKAAIQAAKLGKNVIVIEKEPELGGACLYSGTIPSKTFREAVVDLTRFHDRHFAGKDYILPNVTIDELNVRLHTVINEERNIITRQFKKNSIRVIQGSARFENQHTLIVVDNDFRLKYQIKATSFIIATGSNPRNPPDVPFDQQVILDSTTLLGIGRVPKSMIVLGGGIIGSEYASFFAALGTEVTVIDRKDHMLPLLDAEIGIHLQTALTDIGLKFLGKKEPVEISRVEDHAYVKFKDGSSLEADVLLYALGRLANIEALHVENTGIIVDAKGYIPVNALFQTVIPHIYAVGDVIGGPCLASTSMEQGRLAARHACGVQTHHFPTFYPVGIYTIPEISSCGYTEEELKAWGFHYEVGRAHYYEIARSHIAGSNTGLFKILFHAETLEILGVHVIGRNATEVIHIGQMGISFRAHIDYFIDHVFNYPTYAEGYRVAALNGVNKIKFKK

SEQ ID NO: 8979 - protein, 958 aa, Zea mays
MEETGNINSIATDGQQIAQMTQNESITIGPVIPHTSSLSDGANAEGDANMVVDKDGPVVIVPKVGMSFASENDAYEMYNTYAGIVGFSIRKSVIKRRADKTIYNRVIVCSSQGHAEMGSSNATTRTGCKALVKFNVSREGIWTLQKVELDHNHILATPKKKHMLRSQRHVIDADRHLIAQIREAGMKPTQVYEFMKQFYGGADKVPFLRMDCNNEIGRERKKYLESNDAQTLLEYLKNKQIEDPAFFYAMEIDRQDGRIANFFWADGQSIMDYACFGDAISFDTTFQTNKFEMPFAPLLGTNHHKQTIIFGAALLFNETIESFVWLFQTFLKAMSGKHPSTIFTDQDAAMAGAIAYVFPNTCHRLCLWHIYLNAAKHLGHVIHKYPEFLYAFKRCVYEDRSEEYFTKKWNELLTKYGLEENSWMDQLYGLRRKWAAVYRNSFTADMTTTQRSEGMNNVFKKRFRRKLGLSELLVECDKVSASLRENELDEDFKSLSKVPVIYVPELPLLKSALESYTRRMYTEFETEFKKQFEYSCKLLQTEGSISTFTVTHMHSDYGATTILNIADMTITCSCRKFESIGILCKHAFKVFNMNDVFILPSQYILNRWTKYAKRGHYVQKKGRPNENLKARAARISRIATSLALKCATSEPLLDDLERALENLESMADDSLNKMRKNEDSFVGLNDHDICTENSVISFRVPHVVKGPKSKRAKNVVEKNTRKKKKSHQEKASCLLIAAISDAVGEETRNIGDNSGGNVALPNISTNNAINFPIIVQGEYTSLLLGLDQDASAARKLQFDTGANDTTMRYPENFFPLWDPFEGFFPFGSGDVRSLVPSLPRTSSETAAFAGARIDWKETPEAHVFKADVPGLRKEEVKVEVEDGNVLQISGERNKEHEEKNDRWHRVERSSGKFLRRFRLPDNAKADQIKASMENGVLTVTVPKEEAKKADVKNVQITG

SEQ ID NO: 8980 - protein, 109 aa, Glycine max
  misc_feature (24)..(24): Xaa can be any naturally occurring amino acid
  misc_feature (29)..(29): Xaa can be any naturally occurring amino acid
  misc_feature (92)..(92): Xaa can be any naturally occurring amino acid
  unsure (1)..(109): unsure at all Xaa locations
IGLVADHGVRESLIRRFSDNGLNXYLVYXNTVESMTWIISKTRSTYGLLRGCNDLYQYEKKESEKAYSACYYACIEIVYECYEDITSSCYRXSVVLFGRLYYEKDGLPA

SEQ ID NO: 8981 - protein, 495 aa, Taxus wallichiana var. chinensis
MDAMDLTVAKFKEFTQLQSSAILLTAVSGIIVIVILLLRSKRRSSLKLPPGKLGLPLIGESLSFQWALRSNTLEQFVDKRVKKYGNVFKTSLLGQPTVVLCGAAGNRLILSNQEKLLSRTVSDRVAKLTGDNSISVIVGDSHRIIRAAVAGFLGPAGLQIHIGEMSAHIRNHINQVWKGKDEVNVLSLARELVFATSASLFLNINDREEQHQLHKTPETILAGYFSVPINFPGFAFRKALEGNSKRRKHFSVLLEKRRRDLSLGLASRNQDLLSVLLTFKDDKGNPLTDEDDLDNISALIDGSYESTSSQMAVLLKLLSAHPQCYEKVVQEQLEIASHKKEGEEITWKDVKAMRYTWQVMQETLRMFAPVFGPRGKAITDIHYDGYTIPKGWQLSWATYSTHQNDTYFNEPDKFMPSRFDEEGGRLAPYTFVPFGGGRRTCLGWEFAKTEILLFVHHFVKTFSAYTPIDPHESIRGRPLPPVPANGFPIKLISRS

SEQ ID NO: 8982 - protein, 436 aa, Lycopersicon esculentum
MSSRLSRPFKSSPFRFVPVLSRYIVEREEPIIRPGNFGLVHPVPVNASRFGPICASFSLRLSRIQIVLLSLSKPFLDYSRGYLHIQLIDPMGAGEESTPTKTSKPPLTQHPLMPPYGTPVPYPALYPPAGVYAHPNIATPAPNSVPANPEADGKGPEGKDRNSSKKLKVCSGGKAGDNGKVTSGSGNDGATQRSDYESYFCKNSSLWIIHASDCFIFFVNSDESRSEGTSDTNDENDNNEFAANKKGSFDQMLADGASAQNNPAKENHPTSIHGNPVTMPATNLNIGMDVWNASAAGPGAIKIQQNATGPVIGHEGRMNDQWIQEERELKRQKRKQSNRESARRSRLRKQLFVKIKLEQEVMAECEELQRRVEALSHENHSLKDELQRLSEECEKLTSENNLIKEELTLLCGPDVVSKLERNDNVTRIQSNVEEAS

SEQ ID NO: 8983 - protein, 344 aa, Lactococcus lactis
MAVTMYYEDDVEVSALAGKQIAVIGYGSQGHAHAQNLRDSGHNVIIGVRHGKSFDKAKEDGFETFEVGEAVAKADVIMVLAPDELQQSIYEEDIKPNLKAGSALGFAHGFNIHFGYIKVPEDVDVFMVAPKAPGHLVRRTYTEGFGTPALFVSHQNASGHAREIAMDWAKGIGCARVGIIETTFKEETEEDLFGEQAVLCGGLTALVEAGFETLTEAGYAGELAYFEVLHEMKLIVDLMYEGGFTKMRQSISNTAEFGDYVTGPRIITDEVKKNMKLVLADIQSGKFAQDFVDDFKAGRPKLIAYREAAKNLEIEKIGAEHVKQCHSHNLVMTMPLKSISNFSY

SEQ ID NO: 8984 - protein, 276 aa, Arabidopsis thaliana
MSFSADALEGGLSSLKLAADKYRSILNDEKTGNIRWRYGGPPIFDTVNKLFEEERTHVQWRYDNPPDFNSVNQLFEEGQTKVWPEGSLEETVQNAIKSWEMEFSHKIRLQDFKTINPEKFKLFVNGREGLSAEETLRLGSYNALLKNSLPEEFQYYKPEEESFESSHDAFRSALPRGFAWEILSVYSGPPVIAFKFRHWGYFEGTFKGHAPTGEMVQFLGLGVLKVDESLRAEEIEIYYDPGELFGGLLKGPPISETKTTDSGDNTAEKQSCPFTH

SEQ ID NO: 8985 - protein, 181 aa, Brassica napus
  misc_feature (11)..(11): Xaa can be any naturally occurring amino acid
  unsure (1)..(181): unsure at all Xaa locations
GAACVRVANEXGKGDAAAVRFSIKVILTVSTIMGMIFSVLCLAFCGQISYLFTNSKEVSKAVDDLSMILSVSILLNSIQPVLSGVAVGAGMQSIVAVVNFVSYYAVGIPLGLILTYVFHLGVKGLWSGMSAGIAIQTAILCYIIYRTDWESEVKKPSERMKAWSIQPSHEESNPIREDERK

SEQ ID NO: 8986 - protein, 540 aa, Symbiobacterium thermophilum IAM 14863
MVRSPLLDVWETSLVGRLAAWFLGVWEASLTGRALAALGAFCARVFAGSLIGRFWYSDWPRSGDGDGPVSRALGGLRRLAEAVGRAAGPWLRGLWETSLLVALGGRVARAVGGLLAGSHLWGLFWGYAGDVAPAPAEAEDRPTSPVVYLLGLLLGLLPLVPHTLSGLSTAAMIAGVWSLAGLAVLVRFARGEFDWRAPSALLPLSFLLLVVGAAAVQSLAPAASFRNLIIWLTAGLLFWLVADQVRTSRDAAALLGPVLAGAMLMTLWAVYQVFRPPQVEESWVDPEQAGQVIRVFASMGNPNYLAEYMTLLLPPAIGLWLQNPRRQLPLALPVAMMLLTLLLTGSRGGWLATAGALGLFVLLRFRRWTVFLALGGLALLLAAPDAILTRLLSAFSLADTSNQYRVNIWIGVLAMLREHWVLGVGAGAEAFAKGYQAFMLSEARAAHAHNVPLEIFAEMGILGLIAAVWALLAALRRPFVVGADRQSSYILAAVPCALTGLLVHGLVDYVWYNPKILFAFWALAGLGAGLAAGHREERAT

SEQ ID NO: 8987 - protein, 793 aa, Asparagus officinalis
MLLCGPIAGFITLELSHALSSLMLLCGPIAGFIVQPCVGFYSDKCQSRFGRRRPFILVGCLFICLAVIVIGFSSDIGYALGDTKEDCSVYHGPRRKAAVIFVGGFWVLDFANNAVQGPARALMADLSGRFGYNATNAFFAFWMAFGNILGYASGSTGEWHNWLPFLNTSACCDACANLKGAFLVAVVFLLLSMLVTLIVAKEVPLSSIPGKGEEEHRAEFLDIFRSIKNLPPGMPSVLLITGLTCLSWFPFILVDTEWMGREVFHGNPKGTPSQIDAFDRGVRTSVFGIMKDLPKVLNLTLNPSPSPFDVIVVLGSGTWDQHFGKGNISAFALASAFAFVCGCLGLFMLPKLSRSTFKTPYRAGGNQSSDTHEDIGRGVEGDDGDDDGRLSGDDSDNAPSVGSDLYKDEEDKEELEKMSELDREMILAERSTKIDDYMLKKKARETSSKVEMKTRKESPPPLRGRPSLRSDKPALNELRAKRYPNAKSELYAHQMHVHGNKKAQDGGVVQEVKKGLSLRNPSLNPLPNSTLVLFPSFVVAVGRGPRIGTNRAEALTGALLGALCTLHTSHVHLSYEVRLFDDVRSFDEVRLSYEVRLFDKVRLSYEVRLFDEVRLFDEVRSIDEVRISYEVRLFDYDRSFDEVHLSYEVRLFDDVRLSYEVRLFDDIRLSNERPWAALGCGWKLSRECGIRTSVWNMNVGIPTRVWNTNVRLTCAAAVETVPVRTLKPKGFELKGSEIEEIFYLDRKILQIEEILTVLGWYTPEYCTAIPESSLALGSLHRWPNISVSQTHNS

SEQ ID NO: 8988 - protein, 509 aa, Medicago sativa
MTMAGPGQLNVIESPSRGSRSVDCFEKLEQIGEGTYGMVYMAREIETGEIVALKKIRMDNEREGFPITAIREIKILKKLHHENVIKLKEIVTSPGPEKDDQGRPDGNKYKGGIYMVFEYMDHDLTGLADRPGMRFTVPQIKCYMRQLLTGLHYCHVNQVLHRDIKGSNLLIDNEGNLKLADFGLARSFSNEHNANLTNRVITLWYRPPELLLGTTRYGPAVDMWSVGCIFAELLHGKPIFPGKDEPEQLNKIFELCGAPDEVNWPGVTKTPWYNQFKPSRPMKRRLREVFRHFDRHALELLEKMLTLDPAQRIPAKDALDAEYFWTDPLPCDPKSLPKYESSHEFQTKKKRQQQRQNEENAKRLKMQNPQQHTRLPPIQQGGHAQMRQGPNHLIHGSQPAGAAGPSHHYGKPRGPSGGPGRYPPGGNPSGGYNHPNRGGQGGGAGYGSGPYPPQGRGAPYGSSGMPAGTGGGPRGGGGFGAPNYPQGGPPYGGSAAGRGNRNQQYGWQQ

SEQ ID NO: 8989 - protein, 370 aa, Arabidopsis thaliana
MGKGGMSQGEGSKVEEENMAAWLVGINTLKIQPFLLPSVDLCSFKGPHDVRVRMKAVGICGSDVHYLKTMRCADFVVKEPMVIGHECAGIIEEVGEEVKHLVVGDRVALEPGISCWRCNLCREGRYNLCPEMKFFATPPVHGSLANQVVHPADLCFKLPENVSLEEGAMCEPLSVGVHACRRAEVGPETNVLVMGAGPIGLVTMLAARAFSVPRIVIVDVDENRLAVAKQLGADEIVQVTTNLEDVGSEVEQIQKAMGSNIDVTFDCAGFNKTMSTALAATRCGGKVCLVGMGHGIMTVPLTPAAAREVDVVGVFRYKNTWPLCLEFLTSGKIDVKPLITHRFGFSQKEVEDAFETSARGSNAIKVMFNL

SEQ ID NO: 8990 - protein, 386 aa, Digitalis subalpina
MKNIPFSTMRNFMVYVVVLMEVSVRSSEAKCDFKAIFNFGDSNSDTGGFWAAFPAENPPNGMTYFKTPAGRATDGRLIIDFLAQAIGIPFLSPYLLSIGSDFRHGANFATAASTVLLPRTSLFVTGVSPFSLGIQLNQTKQFKLQVDRLHHSSAKLNLPPPDIFRKSLYTLYIGQNDFTGNLGSLGISGVKKKIIPQVVSQISSTIKNLYELGGRTFLVLNLAPIGCYPLFLVDLPHNSSDIDSFGCMISYNKAVVEYNYMLKEALAQTRKDIQEADIIYTDIHYVMLQLFQHPTSNGLKYGTKACCGYGGGAFNFNQQVFCSYSKLINGKNVTANACKDPQNYVSWDGIHATEAANKHVADAILEGSHFDPPFSLHKLCDIQPIG

SEQ ID NO: 8991 - protein, 248 aa, Daucus carota
MVKLAIGSVGDSFSAVSLKSYLAEFIATLLFVFAGVGSAIAYGHLTADAALDPAGLVAIAIAHAFALFVGVSMAANISGGHLNPAVTLGLAIGGNITIITGLFYWIAQCLGSTVACFLLKFVTAGKAIPTHGVGAGLGAAEGVVFEIVITFALVYTVYATAADPKKGSLGTIAPIAIGFIVGANILAAGPFSGGSMNPARSFGPAVASFDFSGHWIYWVGPLIGGGLAGLVYGDVFIGSYAPIAEDYA

SEQ ID NO: 8992 - protein, 504 aa, Nitrosomonas europaea ATCC 19718
MRFFRLLKIILIAFRFGLDEILFTQVRLRILKVFSALLPFRSRLQLPRAVRLRLALETLGPIFIKFGQMLSTRRDLLAQDFAEELALLQDRVPPFPSEQAVQILETVYGRPVHEVFLEFDIKPVASASVAQVHYAVLHDGTRAAVKILRPTIAPVIAHDVALMETGAWLLESIWPDGKRLKLREVVAEFARHLGDELDLIREAANCSQLRRNFLDSPLLLVPEVYWDYCHTEVMVMERVVGTPISHVASLRTQGIDIPQLARMGVEIFFTQVFRDGYFHADMHPGNIFVGSDGRYIAVDFGIMGSLSDQDKNYLAQNFLAFFRRDYRRVAQTHIEAGWAPRNTRVDDFESAIRAVCEPIFDRPLKEIYFGRVLLRLFQASRQFNVEIQPQLVLLQKTLLNIEGLGRDLDPDLDLWKTAKPFLENWMAEQVGLRGLVTHLQKEATNWAVILPQFPRLLHYNLSQERAQNLEDRLAQLVAQEKRQSRLLMLLALLLAGLLLAQIYL

SEQ ID NO: 8993 - protein, 536 aa, Zea mays
ANANATRLSLTSMMDLAAYIAILSLVFLFLLRRVHGLARRDGKSRSMRRPPPSPPGAVPFLGHLHLIKKPFHATLSGLAQRHGPVFTLRLGSRDAAVVTSPACARECFTEHDVTFANRSLLPSQRLVTFDGAALGTASYGPRWRDLRRVAVVQLLSAHRVGCMSGVICGEVRAMVRRLHRAAAAAAGAGARVELKRRLFELSLSVLMEAIAETKAARRDPEPEPDADGTTDMSPEAQEFKRVIDEVFPYVSSVLWDYLPVLRWFDVAGVRSRILAAVSRRDAFLRRLIDAERRRMADGVCGEKKSLIAVLLALQKLEPEVYTDTVITAFCSKNLFGAGTETTSTTVEWAMSLLLNNPGTLEKAREEIDAAVGHSRLLNAGDLPRLGYLRCIIAETLRLYPAAPLLLPHESSADCKVGGYDVPRGTALLVNVYAIHRDPAVWEEPGRFVPERFEGGKAEGLFVAPFGMGRRKCPGERLALQTVGVALGSLIQCFHWSRVDGVEVDMSEGSGLTMPKAVPLEALCTTREAMYDVLQKL

SEQ ID NO: 8994 - protein, 438 aa, GIBBERELLA ZEAE PH-1
MDSARPVCGSDGPGEEYPLGMHIGGLFAVLSVSCLGAGFPVAAKRIKWLKMPPKVFFACKHFGTGVLVATAFVHLLPTAFGSLTNPCLPELFTDIYPAMPGVIMMTSMFLLFMVELYLNAKTGGHSHGGPTGTTITAPPPPRPQRPQRPFPQDENHGHARNDSFNSDYSDDEVTYEKAMAREMYEKEQRPHAYSKDDSNSTMPAWFVVFYEQYVRQRSEMIEMIKESQYSQAAIDSKPHAEVSESYFDEENNSIDQETFKRMSMNITLLEGGILFHSVFVGMTIAMTTDGLLVFLIAIMFHQMFEGLGLGSRIAAVPYPKGSVRPWLLVFAFGCTAPIGQAIGIASRNSYDPESEMGLIMVGVFNSISSGLLIYAALINLLAEDFLSEEAQHLMKKKDQIFALCWIFLGAFDNDDDCNIAVFFWLRNALADEDGIATV

SEQ ID NO: 8995 - protein, 165 aa, Triticum aestivum
MVSIMTRTRSLTVLELRLWWPCETMQQEGIRVMEEGKQATMSVGNKVKVPENGMSIHQPVIVPSARKYWTDREHMLFLQGLGVYGRGKWKEISKDFVTTKTLVQVSSHAQKYFRRVKKGEQERQRYSINDLELKIVKPWTIGNNSSAYRSPIFDDADNHNQSFDM

SEQ ID NO: 8996 - protein, 1238 aa, Bordetella parapertussis
MPAPHRLYPRSLICLAQALLVWALLAWAPAQASQELTLVGKAAVPDVEIALDGDDWRWLARKRVLTLGVYAPDIPPFDVTYDERYEGLTADYMAIIAHNLGVQAKVLRYPTREQAVGALESGQIDLIGTVNGIEGRLQSLRLSVPYAADHPVLVMPIGARRAPPADLAGQRLAVDANYLPRETLQQAYPQATLHYFPSSEQALAAVAYGQADVFIGDALTTSHLVSQSYFNDVRVVAPAQIVTGGESFGVRADNTRLLRVVNAVLEAIPASERRSLIYRWGLGSSISLDFARPAYSAREQQWMANHPVVKVAVLNLFAPFTLFRTDEQFGGISAAVLQLLQLRTGLDFQIIGVDTVEELIAKLRSGEADMAGALFVNAARESVLSFSRPYVRNGMVIVTRQDPAAPADADHLDGRTIAMVRNSAAIPLLQQRYPQAKVVTADNPTEAMLLVADGQADAVVQTQISASYYVNRYFAGKLRIASALDLPPAEIALATARGQTELISILNKALYSISNDELASIVSRWRGSDGDPRTWYAYRNEIYLLIGLGLLSALLFLSWIVYLRRQIRQRKRAERALNDQLEFMRVLIDGTPNPIYVRDKEGRMLLCNDAYLDTFGVTADAVLGKTIPEANVVGDPALAREMHEFLLTRMAAEREPRFEDRDVTLHGRTRHVYQWTVPYGDSLGELKGIIGGWIDITERAELLRELHDAKESADAANRAKTTFLATMSHEIRTPMNAIIGMLELALLRPADQEPDRQSIQVAYDSARSLLELIGDILDIAKIEAGKFDLAPVRTALRALPEGAIRLFDGLARQKGIELVLKTDIVGVDDVLIDPLRMKQVLSNLVGNAIKFTTEGQVVLTVTARPDGEAAHVQFSVSDTGCGISEADQRQLFKPFSQVGGSAEAGPAPGTGLGLSISRRLVELMGGTLVMRSAPGVGTTVSVDLRLTMIEKSAQATPPAAAAQATPSKPQVSLRVLVVDDHKPNLMLLRQQLDYLGQRVVAADSGEAALALWHEHAFDVVITDCNMPGINGYELARRIRAAEAAPGYGRTRCILFGFTASAQMDEAHACRAAGMDDCLFKPIGVDALRQRLNEAAARAALPTPPSPQAAAPATHDATPAAFSAESILALTQNDEALIRQLLEEVIRTNRADVDQLQKLHQQADWPKVSDMAHRLAGGARVVDAKAMIDTALALEKKAQGQAGPSPEIDGLVRTLAAQSAALETQLRAWLEQRPHQGQP

SEQ ID NO: 8997 - protein, 829 aa, Deinococcus radiodurans R1
MALNNDVNRLGRILGQVLKEQEGEAFFNLVEQTRTLVREVRAGGDPAQLNALLGSLSENDASNLARAFTWYFQLVNIAEEYERVRVLQSRSGVRSQSLAQALADLREQGLSAEDVENLLARVNLELTFTAHPTEMRRRTVRSHLEHIARELPDLGRESAQERVAAHVEALWRTPELRRLKPTVLDEVKGGLNYISTIAQALPKLERDLSDAFQATYGRETAAHVPLRFSSWMGGDRDGNPFVTPEATREALQLHRERARELLLAALRQAYTDLSQEEEEDAAEGTYRTELRALHNAVRDGEPVELLPRLEALNARLHADGQERTAWQLLMPLLSVARVFGQHLVSLDIREHSGQTGAAVAELLKAAGVEADYLGLSEDAKLELLTRELRSHRPLWPAGATFTETLEAVIGPIREVQAAARRVGPLAFGHYVISMSESVSDILEPLILAREVGFRVLPVPLFETLDDLQHAPRIVTDLLALPEYRAVLGDDMQEIMIGYSDSNKDAGFLAANWALHEAQRTISDVCRRAGVRWRFFHGRGTSIGRGGGPASRAILGQPAGTIDAGVRITEQGEALADKYSHPVLARRNLEQALYGVLLAAARPVGDPPADFMAAMTRAAEASATAYRDFVHDPDFLPFFERVTPIHEISRLNIASRPVRRPGAPTLGNLRAIPWVMSWTQNRANLPGWYGLAEGLAEIGPELAAKMYAEWPFFHSMLDNAQMSLAKSDPLVFAEYLTLLEGASTRLADHLRESYARTVAAVESVIGGELMLGEQRLKESIALRNPYIDPIHRLQVELLRRSRSHEGGLDEYERPLLLTLQGIAAGVRNTG

SEQ ID NO: 8998 - protein, 281 aa, Pyrus communis
MAKDVEVAEHGEFAAKDYHDPPPTPLFDAEELTKWSFYRALIAEFIATLLFLYITVLTVIGYKSQSEADQCGGVGILGIAWAFGGMIFVLVYCTAGISGGHINPAVTFGLFLARKVSLIRAVLYIIAQCLGAICGVGLVKAFQKSYYVKYGGGANELSAGYNKGTGLGAEIIGTFVLVYTVFSATDPKRNARDSHVPVLAPLPIGFAVFIVHLATIPITGTGINPARSLGAAVIYNKDKAWDDQWIFWLGPFIGAAIAAFYHQYILRAGAIKALGSFRSNA

SEQ ID NO: 8999 - protein, 189 aa, Zea mays
  misc_feature (77)..(77): Xaa can be any naturally occurring amino acid
  unsure (1)..(189): unsure at all Xaa locations
MDPTKFRPSSSHDTTVTTTNAGAPVWNDNEALTVGPRGPILLEDYHLIEKGAHFPRERIPERVVDPRGASPQGFFQXAPHLTALTWGQFLGAARGGTPRNRGFSTGVHQRGAPENIPEPRGVPREVYPPQGNWELVGNNFPRFFIREGIKFPHVVHAVQPHPRSHVEEYWRVVQFLAHLPERLDTFFFL

SEQ ID NO: 9000 - protein, 613 aa, Triticum aestivum
  misc_feature (235)..(235): Xaa can be any naturally occurring amino acid
  unsure (1)..(613): unsure at all Xaa locations
MALLPEFDPADVGAGRGLIDRLTADAAALQRDVLTEILRRNSHTEYLRGFLDRVPPGASAADLREAFKERVPVSEYEDIKPYVRCIASGEPSSILCSEPITHLLTSSGTSGGQLKLFPSTAEKLDQRLFYNGVQALLRKMHLHPDQGDRRGKGMYLMFIFPGSLTSSGLPIMASSSAYYHSSQFREHDIGGFGRCTSPIEAVLCPDGRQSMYCQLLCGLLDRGVVDHVGGTSAAXFANAFIRGIQFLEDNWEEMCSNIRTGRLSDWIAHAPLRDAVAARHLRGPDPALADEIASECARKPWDGIVRRLWPGARYILAIVTGSMSQYIPVLESYGAGLPLVSPMYVCTECAAGINLNPLDLPSAVSYALLPNIAYFEFAEVTHGDDEKVQASTGLYDNLGKLKLVDLVDVKIGRRYELVVTTFAGLYRYRVGDLLTVSGFYNATPLFRFTGRCGVILKIDYESISEEDLLKAISQAYELHLRPLGYMLGGSTAYADISTLPGHYVLFWELATAEGNHVATDIDRTVMENCCLAVEECFDQMYRESRRRGSITALEIRVLERGAFDALMDLFLSRGTSASQYKTPTAIRSEQALLVLEERVSGKYFSQETPNGPL

SEQ ID NO: 9001 - protein, 546 aa, Hypocrea jecorina
MGLAEHTSRVVAQFDFSDEELNRHVDEFLKQANAGLKQDGTSLSQIPSYVTAVPNGTEKGIYLAVDLGGTNFRVCSVSLNGDSTFNLVYNKVAIPKNLMVAKTARDLFAFLAKQIELFLREHHRDHFESAAHRRSTMSFPEGYRDEQIFRLGFTFSFPVQQLGINKGKLIRWTKGFDIPDAVGKDVCKLLQDEIDRLGLPVKVAALVNDTVGTLMARSYTSAGKHRSLLGAIFGTGTNGAYIEKTASITKPIPGEYDKSTGEMVINTEWGSFDNELNVLPSTVWDQTLDRESVNPGIQMYEKRVSGMFLGEIVRLAINDMMKDDEASLFRDTNSSYNDWSTTTNVSPQSGLLSQWGLDTAVLSVAAADNTPELSTIRQELENTLQVYTPSLEDAQAFKAVAGAVVRRAARLAAVAIGAIVLQSGKLDDPEEELIDIGVDGSLVEHYPFFRDMIYEALRAIEGIGPSGADKIRIGIAKDGSGVGAALIALIAQKMEKPGDFLADLRRDIRRRLSLPFENAGMLPLQNHSTPAFCFLCSVSLAPSLLA

SEQ ID NO: 9002 - protein, 144 aa, Myxococcus xanthus
AIERTLSIIKPDGLEKGVIGKIISRFEEKGLKPVAIRLQHLSQAQAEGFYAVHKARPFFKDLVQFMISGPVVLMVLEGENAVLANRDIMGATNPAQAAEGTIRKDFATSIDKNTVHGSDSLENAKIEIAYFFRETEIHSYPYQK

SEQ ID NO: 9003 - protein, 492 aa, Hypocrea jecorina
MVGLGPRPPPSRKGSAADLPKDLLNEVRKLEEIFTVDTAKLKEITDHFVNELAKGLSVEGGSIPMNPTWVMSYPDGHETGSFLALDMGGTNLRVCEITLTDRKSEFDIIQSKYRMPEELKTGSSEELWEYIADCLHQFIETHHGDCSKLEALPLGFTFSYPATQHYIDEGILQRWTKGFDIAGVEGKNVVPMFEAAIAKRGVPIKLSALINDTTGTLIASAYTDPKVKIGCIFGTGCNAAYMEDCGSIPKLAHMNLPPDCPMAINCEWGAFDNEHKVLPRTKYDIAIDEDSPRPGQQAFEKMIAGLYLGEIFRLVLVDLHDNKDIHIFENQDISLLRRPYTLDSSFLSGIEEDPFENLQETFDTFQSKLNITPTGPELELVRRLSELIGTRAARLSACGVAAICKKKSFESCHVGADGSVFNKYPHFKARGAKALREILDWPAKSNPKEEDPVEILAAEDGSGVGAALIAALTLKRAKAGNLAGILHPENFV

SEQ ID NO: 9004 - protein, 276 aa, uncultured alpha proteobacterium EBAC2C11
MLRVAALQYCASDDVAKTLHHIQPLIAEAASKASLVALPECANYLAASREQLFQKAEWDDESYSQKWLGNIAREFGIWLLAGSLIMRRRDNNQLANRSLLFGPDGEVIAYYDKIHMFDADVGDGKMYRESASFSAGQSPVIAHIDNVPCGLTICYDVRFAHLYRQLALDGAQLFLVPAAFTALSGKAHWHVLLRARAIETGCYIVAPAQSGTHADGRKTYGHSLIINPWGEIIAEAKDGDSIIYAALDLSATARARNAIPSLKTNPVIGPTRTIGP

SEQ ID NO: 9005 - protein, 480 aa, Azoarcus sp. EbN1
MTEHSKLTTAAGCPVVDNQNVMTAGPRGPQLLQDVWFLEKLAHFDREVIPERRMHAKGSGAYGTFTVTNDITRYTRAKLFSELGKKTDLFVRFSTVAGERGAADAERDIRGFAVKFYTEEGNWDLVGNNTPVFFMRDPLKFPDLNHAVKRDPRTNLRSARNNWDFWTSLPEALHQVTIVMSDRGIPASYREMHGFGSHTFSLINANNERYWVKFHMESLQGIRNLTDAEAEAAIGKCRETHQRDLFDAIERGDFPKWKFCVQVMPEADAAKVPYHPFDLTKVWPHKDYPLIEVGILELNRNPANYFAEVEQAAFNPANVVPGIGFSPDKMLQGRLFSYGDAQRYRLGVNHVHIPVNAPRCPAHSYHRDGAMRVDANYGATLGYEPNSYGEWQEQPDFREPPLALGGAADHWDFRKDDDDYYSQPRALFRLMTPEQRQTLFENTARAMGDAPLEIKQRHVENCSRCDPAYGAGVAKALDLG

SEQ ID NO: 9006 - protein, 120 aa, Brassica napus
MQHTCSHSVCENSKSSVSVIEMEISTDENVVVVMVSGGPTRSTRFRPLALNITQPLFPIAGQPVVHHANSACQTIPGLAQVKLDGFYEEREFALDVSTISSDFKVPVRYLTEHKPHGSAE

SEQ ID NO: 9007 - protein, 476 aa, Saccharomyces cerevisiae
MIASKSSLLVTKSRIPSLCFPLIKRSYVSKTPTHSNTAANLMVETPAANPNGNSVMAPPNSINFLQTLPKKELFQLGFIGIATLNSFFLNTIIKLFPYIPIPVIKFFVSSLYCGGENFKEVIECGKRLQKRGISNMMLSLTIENSEGTKSLSSTPVDQIVKETISSVHNILLPNIIGQLESKPITDIAPGYIALKPSALVDNPHEVLYNFSNPAYKAQRDQLIENCSKITKEIFELNQSLLKKYPERKAPFMVSTIDAEKYDLQENGVYELQRILFQKFNPTSSKLISCVGTWQLYLRDSGDHILHELKLAQENGYKLGLKLVRGAYIHSEKNRNQIIFGDKTGTDENYDRIITQVVNDLIINGEDSYFGHLVVASHNYQSQMLVTNLLKSTQDNSYAKSNIVLGQLLGMADNVTYDLITNHGAKNIIKYVPWGPPLETKDYLLRRLQENGDAVRSDNGWPLIKAIAKSIPKRVGL

SEQ ID NO: 9008 - protein, 580 aa, Schizosaccharomyces pombe 972h-
MEPEYVSFSDKDTKSILNESKSSLKDVKPSLEEKSYITPGLVDDVEPKGKNFVVRFFDDFKPAKATGEDGTALKRSLKSRHMQMISIGGAIGTGLYVGSGSSLADGGPASVIINYSLIGIMMFFIVYALGEMAVAYPVAGGFNTYATRFIDPAWGFAVSWNYFINYFVTFPLELTTCAITFRYWTDINSAAWISIFLVVIIIVNLFGVRAYGEVEFILSTVKVVATFGFIILAIIINCGGVPTDHRGYIGGSIIKHKPFRHGFKGFCSVFTTAAFSFSGTEVIGLAAAEVDNPQKALPHAVKQVFWRIAIFYVVSLILIGLLISPDDPNLMGNGSTSVSPFVLAIKEANIKGLPSVFNAVIIISVVSVTNSSTYTAGRTLHGMANLKQAPSFFKYTDRLGRPLLAMIVVLLFGFFAYINEADKNGNDVSDTVFNWLLALSGLSNFFTWGSICLCHIIFRLAFKKQGHSLKELGFVSPMGIWGSCIGLFFNILCLMAQFYVSLFPIGGKPNANDFFQGYLAAPVTLAFFIGYKIYDRSHIPSLDKLDITTGLKTYENLDEEEDEPTTASKRIFKKISSVFC

SEQ ID NO: 9009 - protein, 217 aa, Zea mays
MASAPTPPPLLPVTNPASGSSPAAAGGSDAPIATPAFRLFLSRISDSARRSLSDRRPWGELLDRSAFSKPDSLSDATSRLRRNLAYFRVNYAAVDAFALGASLLAHPFSLLILLGLLAAWCFLYLFRPSDQPVVLFGRTFSDRETLLGLVGASFILLFFTSVASLIISGLLVGGALVAAHGAFRVPEDLFLDEPNAPPGSSAAQGLLSFLGGPGSGV

SEQ ID NO: 9010 - protein, 229 aa, Glycine max
MQIFVKTLTGKTITLEVESSDTIDNVKGKIQDKEGIPPEQQRLIFAGKQLEDGRTLADYNIQKESTLHLVLRLRGGMQIFVKTLTGKTITLEVESSDTIDNVKAKIQDKEGIPPDQQRLIFAGKQLEDGRTLADYNIQKESTLHLVLRLRGGMQIFVKTLTGKTITLEVESSDTIDNVKAKIQDKEGIPPDQQRLIFAGKQLEDGRTLADYNIQKESTLHLVLRLRGGF

SEQ ID NO: 9011 - protein, 287 aa, Pyrus communis
MAKDMEVAERGSFSAKDYHDPPPAPLIDAAELTKWSFYRALIAEFVATLLFLYVTVLTVIGYKSQTDPAVNADACGGVGILGIAWAFGGMIFVLVYCTAGISGGHINPAVTFGLFLARKVSLVRAVLYMVAQSLGAIAGVALVKAFQKSYYIKYGGGANSLSDGYSTGVGLAAEIIGTFVLVYTVFSATDPKRSARDSHVPVLAPLPIGFAVFIVHLATIPITGTGINPARSLGAAVIYNKDKAWDDQWIFWVGPFIGAAIAAFYHQFILRAGAVKALGSFRSNPHV

SEQ ID NO: 9012 - protein, 229 aa, Arabidopsis thaliana
  misc_feature (198)..(198): Xaa can be any naturally occurring amino acid
  unsure (1)..(229): unsure at all Xaa locations
MGRGKIVIRRIDNSTSRQVTFSKRRNGLLKKAKELAILCDAEVGVMIFSSTGKLYDFASSSMKSVMDRYSKSKEEPCQLGSSASEIKFWQREAAMLRQQLHNLQESHRRKMMGEELSGLTVKELQNLENQLEISLHGVRMKKDQLLMGEIQELNRKGNLIHQENVELYKKVYGTQDDNETNRDSVLTNGLGIGEDLQXACESPAKPATATATTLQGIFRNYKIGIAIAL

SEQ ID NO: 9013 - protein, 399 aa, Thermotoga maritima MSB8
MNEEQQVLQEQHQEQTQEQTQEQKETLPPQIERRIKKLISLGKKKGYITYEDIDKAFPPDFEGFDTNLIERIHEELEKHGINIVENEPEEEEISASSDEQELEELLEKESPEIHDSSNVRDSIKMYLKEIGKIPLLTPAQERELARRAQMGDKKAKEKLITSNLRLVVSIAKRYMGRGLSFQDLIQEGNIGLLKAVEKFDWRKGYKFSTYATWWIRQAITRAIADQARTIRIPVHMVETINKLNRLRREYYQKHGEEPSIEELAKMMGKPPEKIKEILEAAKETISLESPIGEDEDSSIEDFVADDSIASPKKEAMRMLMREELEKVLKTLSPREAMVLRMRYGLLDGKPKTLEEVGQYFNVTRERIRQIEVKALRKLRHPSRSKYLKSLLSLMDENEG

SEQ ID NO: 9014 - protein, 543 aa, Thiomicrospira crunogena XCL-2
MTKFIFVTGGVVSSLGKGIAAASLGSLLEARGLKVSMLKMDPYINVDPGTMSPLQHGEVFVTDDGAETDLDLGHYERFVQRNFTKRNSFSTGQVYEKVIRNERRGDYLGGTVQVIPHITDEIKHRIKLAAAGADVALVEVGGTVGDIESLPFLEAIRQLGVEVGRDRAMFMHLTLLPYIAVAGEVKTKPTQHSVKELRSIGIQPDILICRSERPLEESEKRKIALFTNVEEKAVINSLDARTIYEVPRMLHEQGLDRLVTDRFRIDAPVADLSDWDDVVQAQLNPEKSVEIAMVGKYVDLTEAYKSLIEALIHGGIQTKTQVNIHYIDSEDLEKDGIGSIEKMDAILVPGGFGERGVEGKIAAIQFARENNVPYLGICLGMQMAVVEFARHVAGLPSAHSTELDPKTKTPVVALITEWTDENGQLVERDEKADLGGTMRLGGQSCALVEGSKMRDIYGEDVIRERHRHRYEVNDGYIAKLEAAGLKISGRSEDGNLVETVEIEDHPWFVACQFHPEFTSTPRNGHPLFKAFVEAASQHKQTTH

SEQ ID NO: 9015 - protein, 330 aa, Candida albicans SC5314
MWSKEEKKQKREKKMYVQPQQRTYYLLLMFRLFARRNYSIHWRFKDVCPSPRYDTGCTYCQPEFPTNLAIDFDKNLNKTGAIPTKHVMVLTNPINQISELPSKTEFIPNSIPSEITKYRTMIQTDDQRVTISVIHLNNNRHQQILDQYNIKPGSSQQLVFLYPSMKIIRFDLSVSDQFVKKYLYSKPTAPVYNPFVQTKPSAPNNDLFDSIIVDESNFIEDELDKDLLVICGHAKRDLRCGIIAPQLESEFNQVLVRHNLQDTIYTGQVSHVGGHAYAGNVLYYPKDCQTSKDFIWYGRVFPKDVQGIVESTIINKEIIKDLFRGDIEAY

SEQ ID NO: 9016 - protein, 363 aa, Triticum aestivum
  misc_feature (134)..(134): Xaa can be any naturally occurring amino acid
  misc_feature (260)..(260): Xaa can be any naturally occurring amino acid
  misc_feature (272)..(272): Xaa can be any naturally occurring amino acid
  misc_feature (312)..(312): Xaa can be any naturally occurring amino acid
  misc_feature (323)..(323): Xaa can be any naturally occurring amino acid
  unsure (1)..(363): unsure at all Xaa locations
MVAKKPAAAAAAGPEAEERRRLRSLAFSKGLLQRGEPAAPRAALPPSGAVARLQGRDIVRPRGQRRGRFLFSFPGLLAPAAAGGRVGELADLGTKNPVLYLEFPQGRMKLLGTHVYPKNKYLTLQMTRSAEGVXCEDVFESMIVFPEACWVGTNEDNPDELTLEFPPEMHNAAEDVDFKGGAGAASGEVVTVNKPRKQAASPPTPEYESDADSEDSDVRDEIGTQTTSDTPVRKSARTAGKTFQVAELAGGDSAESDTEXIDFAEDLDETMXGAQIKGEIPGEDIKEKKSQVKTFNPEDPPAESLSIKKPPXLVQANLSAQVXKNQKKKRDPHSRKSPRGSPAYKGPPCSKAGGTSPPKTSHP

SEQ ID NO: 9017 - protein, 485 aa, Nitrosomonas europaea ATCC 19718
MDDAKKKLTTSAGAPVADNQNVMTAGPRGPMLLQDIWFLEKLAHFDREVIPERRMHAKGSGAYGTFTVTHDITRYTRANIFSQIGKKTDLFVRFSTVAGERGAADAERDIRGFAIKFYTEEGNWDLVGNNTPVFFLRDPLKFPDLNHAVKRDPRTNLRSARNNWDFWTLLPEALHQITIVMSDRGLPATYRHMHGFGSHTFSFINARQERYWVKFHFRTQQGIKNLTDAEAEALVGKDRESHQRDLYESIENGEFPRWTLFVQIMPESDAASLPYNPFDLTKVWPHKDYPLIEVGVMELNRNPENYFAEVEQAAFNPASVVPGISFSPDKMLQGRLFSYGDAQRYRLGVNHYQIPVNAPRCPFHHYHRDGAMRVDGNQGSTLGYEPNSYQEWQQQPEYAEPPLTLEGAAAHWNHRVDEDYYIQPGNLFRLMNSSQQQVLFDNTARSIGEAPREIQIRHITNCLKADRAYGEGVARALGIALSEVD

SEQ ID NO: 9018 - protein, 321 aa, Parasitella parasitica
MVVDYLTLDRTEDKMPLRGFGCWKIEKKDAENTIYQAIKIGYRLFDGACDYGNEVEVGRGINKAIKEGLVKREELFIVTKLWNTFHSKQHVRTAFDRQLKDWGLEYFDLYLIHFPIPLQYVDPAVSYPPEWYVPHADKLNFERSPIHECWAEMEKLVQAKLTRNIGVANFNCQAILDLLSYAKIKPAVLQIEIHPLLPQERLVKWVQEQGIQVTAYSSFGPTSYVDLCESGKTYSSLLANADVKSIANKHNANTGQILLRYALDRNIAVIPKSVHEDRMKSNLDILNIQLDQDDRKILNSLKTNQRFNDPMIFGFGLPLFD

SEQ ID NO: 9019 - protein, 506 aa, Brassica napus
MTSINVKLLYHYVITNLFNLCFFPLTAIVAGKAYRLTIDDLHHLYYSYLQHNLITIAPLFAFTVFGSVLYIATRPKPVYLVEYSCYLPPTHCRSSISKVMDIFYQVRKADPSRNGTCDDSSWLDFLRKIQERSGLGDETHGPEGLLQVPPRKTFAAAREETEQVIIGALENLFKNTNVNPKDIGILVVNSSMFNPTPSLSAMVVNTFKLRSNVRSFNLGGMGCSAGVIAIDLAKDLLHVHKNTYALVVSTENITYNIYAGDNRSMMVSNCLFRVGGAAILLSNKPGDRRRSKYELVHTVRTHTGADDKSFRCVQQGDDENGKIGVSLSKDITDVAGRTVKKNIATLGPLILPLSEKLLFFVTFMGKKLFKDKIKHYYVPDFKLAIDHFCIHAGGRAVIDVLEKNLALAPIDVEASRSTLHRFGNTSSSSIWYELAYIEAKGRMKKGNKVWQIALGSGFKCNSAVWVALNNVKASTNSPWEHCIDRYPVKIDSDSGKSETRVQNGRS

SEQ ID NO: 9020 - protein, 373 aa, Brucella melitensis 16M
MEMAVIAGLIGSGFMGKTHALALANVNRIFDLPLAVQLHTLGDIDVQIARKAARQLGFAHATGDWRDLISNPDINLIDITTPNRFHKEMALAAIKAGKHVYCEKPLAPSAADCLEMTLAAEREGIQTAVDFNYLKNPMMKLAQEIIASGELGEIRNFRGIHAEDFMADARIPWTWRLDPAGGGGALADIGSHIIATARYLIGPIADVMGEAVTLIRERPDMADLSRTKPVEVDDVCHAFMRFENGATGTLEASWVASGRKMQHDFEISGSKGAIFFSQERFNELELFLYSDRKGQQGFRKIFAGPEHEPYGAFCVAGGHQIGFNDLKTIEVRDFVLAIAGQKTGHADFREGYEVQKTVETIYASSRERQWKKI

SEQ ID NO: 9021 - protein, 461 aa, Cucumis melo
METMQTIDFSFHVRKCQPELIAPANPTPYEFKQLSDVDDQQSLRLQLPFVNIYPHNPSLEGRDPVKVIKEAIGKALVLYYPLAGRLREGPGRKLFVECTGEGILFIEADADVSLEQFRDTLPYSLSSMENNIIHNALNSDGVLNSQLLLIQVTRLKCGGFIFGIRFNHTMADGFGIAQFMKAIAEIARGAFAPSILPVWQRALLTARYLSEITVRHYEYDQVVDTKSTLIPANNMIDRLFFFSQLQISTLRQTLPAHRHDCSSFEVLADCVWRLRTIGFQLKPEEDVRFLCVVNLRSKIDIPLGYYGNAVVFPAVITTAAKLCGNPLGYAVDLIRKAKAKATTHLTSPMVDFMVIKGRPRFTELMRFMMSDITRIGFENVDFGWGKAIFGGPIIGGCGIIRGMISYSIAFMNRHNKNSLVVPLCLPPPDMESFRANVHASLQVKQVLDKVDSDMHNIQSAS

SEQ ID NO: 9022 - protein, 153 aa, Candida maltosa
MSDDIFLVTGGAGYIGSHTVIELINHGIKVVIADNLSNSSYDAVARIEFIVKQHVSHFIKVDIRNEKELNQVFSNHKISGVIHFAALKAVGESTKIPLEYYDNNVSGTIALLNVCKSNNVKTIVFSSSATVYGDVTRFGDNSMIPIPEHCPME

SEQ ID NO: 9023 - protein, 266 aa, Phacelurus digitatus
CELDNIMRLTGITGIVNGMDVSEWDPSKDKYITVKYDVSTAVEAKALNKEALQAEVGLPVDRKIPLVAFIGRLEEQKGPDVMAATIPQLMEEDVQIVLLGTGKKKFERMLMSAEEKYPDKVRAVVKFNAALAHHIMAGADLLAVTSRFEPCGLIQLQGMRYGTPCACASTGGLVDTVIEGKTGFHMGRLSVDCNVVEPADVNKVATTLKRAIKVVGTPAYEEMVKNCMIQDLSWKGPAKNWENVLLNLGVAGGEPGIEGGRSRRSP

SEQ ID NO: 9024 - protein, 343 aa, Symbiobacterium thermophilum IAM 14863
MAVRAILLAGGLGTRLHPLTVELPKPMVPVLGKPWLSRLIDQLAAFGVTDITLSLRHGGQVVTDYFRESPPGVRLRFAVEPQPLGTGGAIRFAAGPDPTDTLLILNADIVQTFDLNALLEFHRQHRAQVTIGLVEVADPSAYGAVELDKNSRVTRFVEKPRPGETDSRMVNAGVYVFDPGVLSWIPPERPVSVERETFPALLRDGVRVYGCLCTGYWKDIGTGDRYLQLHRDILEGRCPIPVSGPVRGPAHWQADDADVSPDARIMPPVYIGSGAVIEAGAQVGPRAVIGAGCLVAKGARISDSVLWDGARVGAGATVRHSVIGFATGIGGGTVENVLLAGWR

SEQ ID NO: 9025 - protein, 258 aa, Paspalum simplex
CELDNIMRLTGITGIVNGMDVSEWDPSKDKYIAVKYDVSTALEAKALNKEALQAAAGLPVDRKIPLVAFVGRLEEQKGPDIMAAAIPQLMEEDVQIVMLGTGKKKFERMLMSAEEKYPNKVRAVVKFNAALAHHIMAGADVLAVTSRFEPCGLIQLQGMRYGTPCACASTGGLVDTVIEGKTGFHMGRLSVDCKVVEPADVQKVATTLKRAIKIVGTPAYNEMVRNCMMQDLSWKGPAKNWENVLLSLGVAGSEPGIG

SEQ ID NO: 9026 - protein, 302 aa, Heterosigma akashiwo
RIGRLVARAALANPETSLVAINDPFMSIDYMVYLFKYDSVHGRYPGTVEVGENAIVVDGVSISVFAERDPTQIPWGAASATYVCESTGVFTTTEKASAHIQGGCSKVIISAPSADAPMFVMGVNADGYSKDMTVVSNASCTTNCLAPLVKVINDAYGIEEGLMTTVHAMTATQLTVDGPSKGGKDWRGGRCASANIIPSSTGAAKAVGKVIPEMNGKLTGMAFRVPTADVSVVDLTCRLVNGASMDEIKATVKAAAEGPMAGVLGYTDEDVVSQDFVDDKRSSIFDANACIGLTNNFVKLVS

SEQ ID NO: 9027 - protein, 139 aa, Moorella thermoacetica ATCC 39073
MYGDLVIDHFLNPRNVGRIEDADGIGAIGDPGCGDYLCIYIKVRDNRLVDVKFQVHGCPAAIATSSILTEMARGKTLEEGLRITDADVAAAIGGLPEVKLHCSNLGASALHDAIRNYQAKMQAGGQQNGRRGSPGSGKV

SEQ ID NO: 9028 - protein, 302 aa, Heterosigma akashiwo
RIGRLVARSLIANPETDLKVINSGASNDYMAYQLKYDSVHGRYPGTVEIADDGLIIDGSLVPTMHTRDPGAVGWGKFGADYICESTGAFLTAEKCAPHLADGAKKIIFSAPAKDDSPTVVMGVNQDTYTTDMQFVSCASCTTNGLGPLVKCIDDAFGIEMGLMTTVHAMTATQLVVDGSSKGGKDWRGGRCASSNIIPSSTGAAKALTKVMPNLKGKLTGMAFRVPTPDVSVVDLTAVLQKEASYEDICAAVKARSEGDMAGILGYCDEPCVSQDFVSDPRSSIFDAEAGISLNPKFCKVVS

SEQ ID NO: 9029 - protein, 354 aa, Ammi majus
MAEMKTSPSQDEEAGVVAMQLATSTVLPMILKSAIELDLLNTIAKAGPGNYLSPSDLASKLLLSNPDAPVMLARILRVLATYKVLGCKRGEVEWLYCWTPVCKYLSNNEDGASIAPILLVHQDKVTIKSWYHLTDAVRDGGTAFNKAHDMSIFEYASQDPQFNKAFNRSMRGHSTITMKKILETYKGFEGLKSIVDVGGGTGATLNMIISKYPTIKGINFDLPHVVGDAPSLPGVEHVGGNMFASVPKGDAIFLKWIFHSWGDEECLKILKKCHQALGDNKKVIVAEFILPEDPGGSDSATKSAVHLDAIMLAYVPGGKERTEKEFESLAKRAGFKSFTKVCCAFNTWIMEFSK

SEQ ID NO: 9030 - protein, 358 aa, Lotus corniculatus var. japonicus
MVDHRILFLLFVFFLFFSNVSSSDGVDPMICQVVDDEGLGAEHHFLEFKRRFGKVYATEEEHGYRFNVFKSNMHRARRHQLLDPSAVHGVTQFSDLTPMEFQHSVLGLRGVGLPSDADSAPILPTDNLPKDFDWRGHGAVTPVKNQGSCGSCWSFSATGALEGAHFLSTGELVSLSEQQLVDCDHQCDPEEAGSCGSGCNGGLMNSAFEYILNNGGVMREEDYPYSGTNGGTCKFDKAKIAASVANFSVVSRDEDQIAANLVKNGPLAVAINAVYMQTYVGGVSCPYVCSKKLNHGVLLVGYGSESYAPIRMKQKPYWIIKNSWGENWGENGYYKICRGRNICGVDSMVSTVAALHTT

SEQ ID NO: 9031 - protein, 608 aa, uncultured bacterium
MGFTTCKVKSHEAHSYNYANSLWSLRMKSLFILLLTLVFVAGCSDSGSVSQSAANLSSSTSSDSTTSADYLSLAIVEEPTHWWHSTIFYEIWPRSFQDSDGDGSGDFNGMTNKLDYLKDLGVKGIWLTPVFEAPSYHGYDFQDFYNVETDYGTMADFENFIAQAHKRNIKVILDLVLNHISDKHEWFIKSANKTAGYEDYFIWRDERPTSGWGQPWSAESNPAAVWHWNETRKAFYYGAFGSSQPDLNLTKQVVIDELNKLASFWLAKGVDGFRLDAVRYAVEEGGYPLQADTQGTIDYWTIFSQHVKSVKPDAMLVAEAWADLKTIGKYRNNGKGLDSSFDFDFGTVVIDMLNPAVKQTADFGTISTNHLQQSRESLWANLTARKAAAPIHYFSPFLTNHDQTRIMYTLENDIAKAKIAASLLMTTPGILYIYYGEEIGLSQYKTGDDQYRRAIMQWSDEDSAGFNATGEFWLDQAKWFPWMQNHQGWWANYWQSLKGTGKSVAAQAQDPQSLFNHYKRMINVRNKNPVLQLPQEVRYYPVDNKEVWLVENIVVGKSVWVLINLSSTVDAEFVVPKNLRGARVDQVTGKEINLGERVSLPAAGVMIF

SEQ ID NO: 9032 - protein, 90 aa, Magnetospirillum magnetotacticum MS-1
PCDYVWRDEISERLRHRFEVNMAYRECLEAKGLRFSGTSPDGLLPETVEHEGHPWFIGVQFHPELKSRPFEPHPLFKGFIAAAIEQSRLV

SEQ ID NO: 9033 - protein, 272 aa, Alkaliphilus metalliredigenes QYMF
MSVERMKELENTKIQQGKENMLNQGFDIVFQDVNFSYNHNESVLNGVSFVAKQGEVTALVGPSGGGKSTALKVAARFGDIDSGKITIGGEDISKIDPETLLKEVSIVFQDVTLFNNTVLENIRIGKKDATDEEVFFAAKAAKCHDFIMEMSNGYNTLIGENGSYLSGGERQRLSIVRALLKNAPIVLLDEATSSLDIQNETVVQQAISRLTKNKTVIVVAHRMRTIANADKIVLLKEGKVHQIGTHKELISHPGEYANMITLQSQSANWKLS

SEQ ID NO: 9034 - protein, 695 aa, Streptomyces coelicolor A3(2)
MSTKPTTTDLEWTELDQRAVDTARVLAADAVQKVGNGHPGTAMSLAPAAYTLFQKVMRHDPADANWVGRDRFVLSAGHSSLTLYTQLYLAGFGLELADLESFRTWGSKTPGHPEYGHTTGVETTTGPLGQGVANAVGMAMAARYERGLFDPEAAEGESPFDHFVYCIAGDGCLQEGISSEASSTAGHQKLGNLVLLWDDNHISIEGDTETAVSEDTCKRYEAYGWHVQRVAPKPDGDLDPNAIYDAIEAAKKVTDRPSFIAMRSIIAWPAPNAQNTEAAHGSALGDDEVAATKRVLGFDPEKSFEVSDEVIEHTRKALEKGQAARAVWEKSFQQWRDNNPERAAEYDRVAKGELPAGWEEKIPVFEAGKGLATRAASGKVLQALGAVIPELWGGSADLAGSNNTTIDKTSSFLPAGNPLPEADPYGRTIHFGIREHAMAAEMNGIALHGNTRIYGGTFLVFSDYMRNAVRLSALMHLPVTYVWTHDSIGLGEDGPTHQPVEHLASLRAIPGLNVVRPADANETAIAWREILRRWTKEFGKGQPHGLALTRQGVPTYEPNEDAAKGGYVLFEAEGGDAEVVLIATGSEVHVAVGARERLQADGVPTRVVSMPSVEWFEQQDQGYRDSVLPPSVKARVAVEAGIGLTWHKYVGDAGRIVSLEHFGASADAKVLFKEFGFTAENVASAARESLAAAQR

SEQ ID NO: 9035 - protein, 379 aa, Psychrobacter arcticus 273-4
MAAQNQSTKVLSGAGLRGQVAGKTALSTVGKSGSGLTYRGYDVSELADKCIFEEVAYLLLYGNLPTQSELDAYQTKLKGLRGLPQSLKEVLERIPAAAHPMDVLRTGCSMLGNLETEISFDEENDQADRMLAAFPSIINYWYRFSHDNVRIETETDDETIGGHFLHLLKGEKPNELHTKVMNVSLILYAEHEFNASTFTARVCASTLSDIHSCITGAIGSLRGHLHGGANEAAMDMIEGFSSPDEAESEMMAMLARKDKIMGFGHAIYSESDPRNVVIKGWAEKLAADVGDDVLYPVSVRCEEVMWREKKLFCNADFFHASAYHFMGIPTKLFTPIFVCSRLTGWAAHVFEQRANNRIIRPSAEYTGEELRPVPDMSAR

SEQ ID NO: 9036 - protein, 620 aa, Neurospora crassa
MDNTNRPHLNLGTNDTRMAPNDRTYPTTPSTFPQPVFPGQQAGGSQQYNQAYAQSGNYYQQNHNDPNTGLAHQFAHQNIGSAGRASPYGSRGPSPAQRPRTSGNSGQQQTYGNYLSAPMPSNTQTEFAPLPSGTPTNMAPMPTTTRRSAHSWPLTSLRTASSAPGSATRGECCSDALLPLHPAVIGADTLFRQSEMEQKLGETNDARRRESIWSTAGRKEGQYLRFLRTKDKPENYQTIKIIGKGAFGEVKLVQKKADGKVYAMKSLIKTEMFKKDQLAHVRAERDILAESDSPWVVKLYTTFQDANFLYMLMEFLPGGDLMTMLIKYEIFSEDITRFYIAEIVLAIDAVHKLGFIHRDIKPDNILLDRGGHVKLTDFGLSTGFHKLHDNNYYTQLLQGKSNKPRDNRNSVAIDQINLTVSNRAQINDWRRSRRLMAYSTVGTPDYIAPEIFTGHGYSFDCDWWSLGTIMFECLVGWPPFCAEDSHDTYRKIVNWRHSLYFPDDITLGVDAENLIRSLICNTENRLGRGGAHEIKSHAFFRGVEFDSLRRIRAPFEPRLTSAIDTTYFPTDEIDQTDNATLLKAQQAARGAAAPAQQEESPELSLPFIGYTFKRFDNNFR

SEQ ID NO: 9037 - protein, 372 aa, Streptomyces coelicolor A3(2)
MTDALKRLSDEGVAIWLDDLSRKRITSGNLAELIDQQHVVGVTTNPSIFQKAISQGDGYDQQLADLAVRGVTVEEAIRMITTADVRDAADILRPVYDNTGGKDGRVSIEVDPRLAHNTHATVAEAKQLAWLVDRPNTFIKIPATEAGLPAIAETIGLGISVNVTLIFSLERYRKVMDAFLTGLEKAKERGLDLSQIHSVASFFVSRVDTEIDKRIDALGTDEAKAQRGKAAVANARLAYQAYEEVFGTDRWAALEKAGANKQRPLWASTGVKDKAYSDTMYVTDLVAPNTVNTMPEATLLATEDHGEITGDAVAGSYERARADLDAIEKLGISYDEVVQLLEKEGVDKFEDAWNDLLKSTEAELKRLAPSKG

SEQ ID NO: 9038 - protein, 261 aa, Streptomyces coelicolor A3(2)
MSDTPQLVVHRDKELMAEAAAARLITKIVDAQASRGSASVVLTGGRNGNGLLAALAGSPARDAIDWSRLDLWWGDERFLPEGDPERNVTQAQQALLDSVPLDPKRVHAMAASDGPYGSDVEAAAAAYAQELATASVPENHAAVPSFDVLLLGVGPDTHVASLFPEHPGVRETERTVIGVHGSPKPPPIRISLTLPAIRAAREVWLLAAGEDKANAVAMALSGAGEIQAPAAGARGRARTLWLLDSAAASQLPRSLYPPASA

SEQ ID NO: 9039 - protein, 222 aa, Sulfolobus solfataricus P2
MKTIFVDLGETLVHFKPRYHENIAYALKEIGYNVDERRVFKAVAKILGKHHYPSQEYGGLSAFDFRELFYELNIYPDEQLITRLNSKNLLSGEYELYDDSITFLEEAKGLGFKLVLVSNATRSIYKIVEDLGIKKYFDGIVASCDLNIMKPHPKIFSYAMEIAKSDGIHIGDIYEIDVIGAKRAGLEAILLDRLGFYPEIRENKVSNLLEALELVKEKLRNS

SEQ ID NO: 9040 - protein, 222 aa, Picea mariana
MGRGKIEIKRIENTTNRQVTFCKRRNGLLKKAYELSVLCDAEVALIVFSSRGRLYEFANHSVKRTIERYKKTCVDNNHGGAISESNSQYWQQEAGKLRQQIEILQNANRHLMGDGLTALNIKELKQLEVRLEKGIGRVRSKKNEMLLEEIDIMQRREHILIQENEILRSKIAECQNSHNTNMLSAPEYDALPAFDSRNFLHANLIDAAHHYAHQEQTTLQLG

SEQ ID NO: 9041 - protein, 222 aa, Picea mariana
MGRGKIEIKRIENTTNRQVTFCKRRNGLLKKAYELSVLCDAEVALIVFSSRGRLYEFANHSVKRTIERYKKTCVDNNHGGAISESNSQYWQQEAGKLRQQIEILQNANRHLMGDGLTALNIKELKQLEVRLEKGIGRVRSKKNEMLLEEIDIMQRREHILIQENEILRSKIAECQNSHNTSMLSAPEYDALPAFDSRNFLHANLIDAAHHYAHQEQTTLQLG

SEQ ID NO: 9042 - protein, 922 aa, Nostoc sp. PCC 7120
MRSSVKTIIGYIHKVCFQDWRSIFMTAPVVAICVMTGGMAGLFQLLEWNTMEQYYALRPNESIDKRILIVTIDEQDITQIGKWPIPDLILAKLIIKLKAQRPAAIGLDIYRDLPVEPGHQEFLGVIKSTPNLIGIKKLVGDQVAPSPTLSELGQIALADLVVDTDGKVRRGLLSAGDSKEKIFLGLAPHLSLMYLQSKGIALEELDPTGTSLRLGKAIFTPLTGEEFSYRGTDVGGYQILLNYRGFQDNFDTVKMRDILSDSISSELIRDRIVLIGTTAKSINDFVNVGYSRNVQDEERRMAGVVVHANLVSQILSAALDGRPLLRVWPEPAEWLLVFCWSFVSSGVTWHGLQVNSQRKQSLPGWPILVILLSISIIFGSSYAAFMIGWWIPVMSPLLTTFLSTIVTTNLYKQSQLEKANQQLQDYSRTLEEKVRDRTQELETAKIAADVANQAKSEFLASMSHELRTPLNGILGYAQILERSENIAPAALEGINIIHQCGSHLLILINDILDLSKIEAGKLELHNTDFDFSYFLTGVVEMCRIRALQKGISFHYLPDPDLPQAINADEKRLRQIIINLLGNAIKFTETGGVNFTIQVLEAGADFNKIRFQVEDTGVGMTPEQLTKIFLPFEQVGDKNKQAEGTGLGLAISCRIAELMGSQIQVDSILGTGSKFWLDLNLNIISHWLQTSSVLQKKKIIGIQDKQPKVLIVDDKWENRAIICNFLRPIGFECLEAANGQEGLNIAATNEPDLIITDLAMPVIDGFEMIQTIRSLPQISKVPIFVSSASVFESDKNKSLQIGGTEFLPKPLELDKLLKYLQDYLQLDWIYAEDSKQTKISENQPSQHNNHQLIVAPPISELDKLLDLSMRGNIKGIHIILDEIEELDLNGDFIGFVTQVRQLSDSFQIKQIRALIKYLKAGVS

SEQ ID NO: 9043 - protein, 218 aa, Picea mariana
KIEIKRIENTTNRQVTFCKRRNGLLKKAYELSVLCDAEVALIVFSSRGRLYEFANHSVKRTIERYKKTCVDNNHGGAISESNSQYWQQEAGKLRQQIEILQNANRHLMGDGLTALNIKELKQLEVRLEKGIGRVRSKKNEMLLEEIDIMQRREHILIQENEILRSKIAECQNSHNTNMLSAPEYDALPAFDSRNFLHANLIDAAHHYAHQEQTTLQLG

SEQ ID NO: 9044 - protein, 665 aa, Haemophilus influenzae 86-028NP
MATRRQLANAIRVLAMDSVQKAKSGHPGAPMGMADIAEVLWRDFLKHNPTNPKWADRDRFVLSNGHGSMLIYSLLHLTGYDLSIEDLKQFRQLHSKTPGHPEYGYAPGVETTTGPLGQGITNAVGMAIAEKTLAGQFNREGHEIVDHHTYVFLGDGCLMEGISHEACSLAGTLGLGKLIAFYDDNNISIDGHVDGWFSDDTAERFEAYGWQVIRNVNGHNAEQIRAAAVLAQAEKEKPTLIICKTIIGFGSPNKSGSHDCHGAPLGDEEIALTRKALGWEYAPFEIPAEYYAEWSAKEKGAAAEKSWEEKFAAYAKAYPELAAEFKRRVSGELPTNWAAESKAFIEKLQANPASIASRKASQNAIEAYAHLLPEFLGGSADLASSNLTLWSGSKPIRAHENVSGNYINYGVREFGMSAIMNGIALHGGFIPYGATFLMFYEYAHNAVRMAALMKQRTLFVYTHDSIGLGEDGPTHQPVEQTASLRLIPNLETWRPCDQVESAIAWQQAVERQDGPSALIFTRQNLAQMNRTSAQLDAVKRGAYVLKDCDGTPELIFIATGSEVELAVQAAEALSAEGKKVRVVSMPSTNRFDKQDEAYRESVLPAAVTKRVAIEAGIADFWYKYVGFNGRVVGMNSFGESAPADQLFKLFGFTVENVVAKAKEIL

SEQ ID NO: 9045 - protein, 405 aa, Actinobacillus pleuropneumoniae serovar 1 str. 4074
MKNKILGSALMIAGTTIGAGMLAMPLTSAGMGFGATVVLLVCLWALLAYTGLLFMEVYQTAPKQDVGVASLAEQYFGITGRVLATASLLILLYALLAAYITGGGSLLSGLLPEIGDAHTTTQVGILLFTVLLGSFVVIGIKGVDGLTRLLFIGKIVAFVFVLLMMLPKAKLENLTAVPLDNLFVVSAVPIFFTSFGFHVIMASINTYLDADIRKIRIAIYIGTAIPLVAYLLWQLATHGVLTQAEFVEILKQDPTLNGLVKATSQITGSTILGEMVRLFSALALITSFLGVAMGIFECVGDLLKRVNLPANRLWLTLATFIPPVLFALFYPNGFIAALGYAGLLFAFYGMLLPIGLAWKARQQHPNLAYRVIGGKAALIVALIAGIIIMIIPFLIQLGYLPQVAG

SEQ ID NO: 9046 - protein, 235 aa, Brassica rapa
MALETLNSPTSATASARPLLRYREEMEPENLEQWAKRKRTKRQRFDQSRLNQETAPSEEEYLALCLLMLARGSAVQSPLPPSSSSDHRGYKCTVCGKSFSSYQALGGHKTSHRKPASNVNVPINQEQSNNSHSNSNGGSVVINGNGVSQSGKIHTCSICFKSFSSGQALGGHKRCHYDAGNNGNGNGSSSNSVEVVGGSDGSYVDDERSSEQSATGDNRGFDLNLPADQVAVVIS

SEQ ID NO: 9047 - protein, 483 aa, Arabidopsis thaliana
MDKEFDSKLTLQGNSSSNGETISRSKSFAFKAPQENFTYHDFELGKIYGVGSYSKVVRAKKKDNGTVYALKIMDKKFITKENKTAYVKLERIVLDQLEHPGIVKLFFTFQDTQSLYMALESCEGGELFDQITRKGRLSEDEARFYSAEVVDALEYIHNMGLIHRDIKPENLLLTLDGHIKIADFGSVKPMQDSQITVLPNAASDDKACTFVGTAAYVPPEVLNSSPATFGNDLWALGCTLYQMLSGTSPFKDASEWLIFQRIIARDIKFPNHFSEAARDLIDRLLDTDPSRRPGAGSEGYDSLKRHPFFKGVDWKNLRSQTPPKLAPDPASQSASPERDGSPWNPTHVGDTSVLQNDGHNGLSESSGSITRLASIDSFDSRWQQFLEPGESVLMISAVKKLQKITSKKVQLILTNKPRLIYVDPSKLVVKGNIIWSDNSNDLNVQVSSPSHFKICTPKKVLSFEDAKQRALQWKKAIETLQNR

SEQ ID NO: 9048 - protein, 237 aa, Brassica rapa
MALETLNSPTSATASARPLLRYREEMEPENLEQWAKRKRTKRQRFDQSRLNQETAPSEEEYLALCLLMLARGSAVQSPLPPSSSSDHRGYKCTVCGKSFSSYQALGGHKTSHRKPASNVNVPINQEQSNNSHSNSNGGSVAINGNGVSQSGKIHTCSICFKSFSSGQALGGHKRCHYDAGINGNGNGSSSNSVEVVGGSDGNYVDDERSSEQSATGDNRGFDLNLPADQVAVVISKR

SEQ ID NO: 9049 - protein, 142 aa, Lotus corniculatus var. japonicus
MAGSVRTGGKGTVRRKKKAVHKTTTTDDKRLQSTLKRIGVNAIPAIEEVNIFKDDVVIQFLNPKVQASIAANTWVVSGAPQTKRPDNLENLKKLAEQFQKQAPEAGAADSTAAQEENDDDVPELVPGETFETVAEEETKATS

SEQ ID NO: 9050 - protein, 449 aa, Bifidobacterium longum NCC2705
MSTTTPAQPAQLTRNERLDRLPFNKAHRKLLVASGIGWAFDAMDVGLVSFVVAAIAADPHFNLTPTEKSWVLSIGFVGMAIGAAVGGFIADRVGRKTVFTATLIIFGIANGAMALSWSLGMLLGARLIIGLGLGAELPVASTLVSEFSPTKQRGRMTVLLESFWAVGWIVAAMIGYFVIPNTGDWGWRWALAIGALPLLYAIVTRVHIPESVRFLEAKGREDEAEKAVRYFEEAGGVAPVTSPKGKPLPKIKTRELFGSKYLARTIAIWATWFFVNFSYYGAFTWMPSLLADQFGSLTKSFGYTLAISIAQLPGYFLAAWLVEVWGRRKTLSIFLAVSAVAAFAFSQAGSVALVLVFGMLLSASNLGAWGVLYAVTPEIYPTRLRGAAAGAAAAVGRIAAIIAPLLMPWFLTLSGGNKAVAFIIFAAAFIIACVAALCLPERKGLDLED

SEQ ID NO: 9051 - protein, 368 aa, Pseudomonas fluorescens Pf-5
MTGAQRWVVKIGSALLTADGKGLDRTAMGVWVEQMVALHEAGVELVLVSSGAVAAGMSRLGWTARPSAMHELQAAAAIGQMGLVQAWESSFAEHGRHTAQILLTHDDLSDRKRYLNARSTLRALVELKVIPVINENDTVVTDEIRFGDNDTLAALVANLVEADLLVILTDRDGMFDADPRNNPDAQLIYEARADDPALDAVAGGTGGALGRGGMQTKLRAARLAARSGAHTIIVGGRLDRVLDRLKAGERIGTLLSPERGMLAARKQWLAGHLQTRGTLVLDEGAVSALSQGNKSLLPVGVKQVQGGFRRGEMVVCVAPDGREIARGLANYSALEAQKIIGQPSDAIVGVLGYMAEPELVHRDNLILV

SEQ ID NO: 9052 - protein, 158 aa, Pinus halepensis
MHELIKKYNLNGQFRWICAQKNRVRNGELYRYICDTKGAFVQPAIYEAFGLTVVEAMTCGLPTFATCNGGPAEIIVDGVSGFHIDPYHGDSASDRIADFFERCKTDPSYWVNISNGGLQRIYERYTWKIYAERLMTLSGVYGFWKYVSNLKGARHAAI

SEQ ID NO: 9053 - protein, 416 aa, Legionella pneumophila str. Lens
MSNTEYQTIDNKTQYINGKEKHQNQAYPEYINHSMEKYYEGRVNKSWQGKHILKGKIPTANSLIFSSNDYLNISQHPQLIKAQIAAMQKYGNGQMQSAVFLNNSSFLLGQCEKKFSSFLNYSAALLTQSGWSANVGLIQTLAKYNTPVYLDFYAHMSFWSGVKAARAKPVPFLHNSVDSLKKRIEHHGPGIIAVDSIYSTLGTISPLADYADIARKFKCLLIVDESHSLGTHGSQGKGMVAKLGLSSQIDIITASLAKALSGRGGIITGDRQLIEYIRYSSLPSIFSSALMPHDLAGFSASLEIITQEEWRRAKLQTNADFLREALSCEGINIGGSNSQIVPLVTGSEANTLWLRDELEKEDLFGAVFCSPATPKNKCLIRLSISAHHEKSDLLRVIECLVRLARKRPDIPLFKGN

SEQ ID NO: 9054 - protein, 416 aa, Mycobacterium bovis AF2122/97
MSQPSTANGGFPSVVVTAVTATTSISPDIESTWKGLLAGESGIHALEDEFVTKWDLAVKIGGHLKDPVDSHMGRLDMRRMSYVQRMGKLLGGQLWESAGSPEVDPDRFAVVVGTGLGGAERIVESYDLMNAGGPRKVSPLAVQMIMPNGAAAVIGLQLGARAGVMTPVSACSSGSEAIAHAWRQIVMGDADVAVCGGVEGPIEALPIAAFSMMRAMSTRNDEPERASRPFDKDRDGFVFGEAGALMLIETEEHAKARGAKPLARLLGAGITSDAFHMVAPAADGVRAGRAMTRSLELAGLSPADIDHVNAHGTATPIGDAAEANAIRVAGCDQAAVYAPKSALGHSIGAVGALESVLTVLTLRDGVIPPTLNYETPDPEIDLDVVAGEPRYGDYRYAVNNSFGFGGHNVALAFGRY

SEQ ID NO: 9055 - protein, 438 aa, Mycobacterium bovis AF2122/97
MGVPPLAGASRTDMEGTFARPMTELVTGKAFPYVVVTGIAMTTALATDAETTWKLLLDRQSGIRTLDDPFVEEFDLPVRIGGHLLEEFDHQLTRIELRRMGYLQRMSTVLSRRLWENAGSPEVDTNRLMVSIGTGLGSAEELVFSYDDMRARGMKAVSPLTVQKYMPNGAAAAVGLERHAKAGVMTPVSACASGAEAIARAWQQIVLGEADAAICGGVETRIEAVPIAGFAQMRIVMSTNNDDPAGACRPFDRDRDGFVFGEGGALLLIETEEHAKARGANILARIMGASITSDGFHMVAPDPNGERAGHAITRAIQLAGLAPGDIDHVNAHATGTQVGDLAEGRAINNALGGNRPAVYAPKSALGHSVGAVGAVESILTVLALRDQVIPPTLNLVNLDPEIDLDVVAGEPRPGNYRYAINNSFGFGGHNVAIAFGRY

SEQ ID NO: 9056 - protein, 304 aa, Glycine max
  misc_feature (89)..(89): Xaa can be any naturally occurring amino acid
  unsure (1)..(304): unsure at all Xaa locations
MGRSPCCEKEHTNKGAWTKEEDERLINYIKLHGEGCWRSLPKAAGLLRCGKSCRLRWINYLRPDLKRGNFTEEEDELIINLHSLLGNNXEWALIAARLPGRTDNEIKNYWNTHIKRKLYSRGIDPQTHRPLNASATPATTATATAVPSANSSKKMSNSSSDIDNDISSNSNGFQLVSNSAYANTKIGTNLVAAEDSNSSSGVTTEESVPHHQLNLDLSIGLPSQPQGSSLNPEKLKPEPQEHDDQKPQVLYKWYGNITSQQGVCLCYNLGLQSNQTCYCKTMGTATTTTATDSNLYRFYRPMNI

SEQ ID NO: 9057 - protein, 316 aa, GIBBERELLA ZEAE PH-1
MSKRNLLLCFDAFGTLIRPAKPVAQQYAQVARQCGLTDISNEELQSTLISTIKQESKKNPNFGNETGLGATRWWTNVIHNTFTPLLKDGQALPQDLAPRLLHRFASREGYETEEGLVDALKGLKSNSSRHYDQLVIGVITNSDDRIPSILSSLGLTVSPLRYGTQSDANQTKTNTYDIDFHCMSYDVGVEKPDKRIFNAAEYMLAQIISARSGRSLNESKTEVGTWQKVYVGDDYSKDVVGSTDAGWNPVLLDPKDECDSVADLKRWRSSPDEKSQKKACRIEDHPTETIEGLFKSYDFATVNSIGNLISWLKDKA

SEQ ID NO: 9058 - protein, 470 aa, Salmonella typhimurium
MKKTKIVCTIGPKTESEEMLSKMLDAGMNVMRLNFSHGDYAEHGQRIQNLRNVMSKTGKKAAILLDTKGPEIRTIKLEGGNDVSLKAGQTFTFTTDKSVVGNNEIVAVTYEGFTSDLSVGNTVLVDDGLIGMEVTAIEGNKCICKVLNNGDLGENKGVNLPGVSIALPALAEKDKQDLIFGCEQGVDFVAASFIRKRSDVVEIREHLKAHGGENIQIISKIENQEGLNNFDEILEASDGIMVARGDLGVEIPVEEVIFAQKMMIEKCIRARKVVITATQMLDSMIKNPRPTRAEAGDVANAILDGTDAVMLSGESAKGKYPLEAVSIMATICERTDRVMNSRLDYNNDSRKLRITEAVCRGAVETAEKLEAPLIVVATQGGKSARAVRKYFPDATILALTTNEVTARQLVLSKGVVSQLVKEINSTDDFYRLGKDVALQSGLAQKGDVVVMVSGALVPSGTTNTASVHVL

SEQ ID NO: 9059 - protein, 357 aa, GIBBERELLA ZEAE PH-1
MSTKYSPLPTSDDSAMSSDVSTGRRPRVVSLGRPEFIGEKYIGEFQKDFDYDILDVTNHQEALEKLPLMLKQHGPIDAFIIRMGRPPYRPFDKIFKLLAPHCKIIASAAAGYDDLAEEWCTEQGIWLCNSVNAVAEATADMAFFLTLAVIRDTYRGERCLREGNWRGPVVPSRDPWGMTLGIVGLGAIGKCLAKRAVAFNMKIKYYNRRRLSAEDEERYHATHCPSLNELLAQSDVVSINCPLTKETENMISTKEFETMKDGAFIVNTARGAIVDETALINALENGKITRAGLDVFLNEPDLNEYFKTSDKVAIQPHIAGLTDLAFQRGEREAFENIKALFKTGMPVSPVNYPIEEF

SEQ ID NO: 9060 - protein, 295 aa, Myxococcus xanthus
MYKQGHGYFWIGGPGEEAFNVSLGLLMKKGQGPDFDYLHAHYRQSGTLLALGEEPIGSLRQMKNTATDPYSGGRNFAGHYSARKYNVAPVSSPIEVQYAIAPGTAMVQKRHGGDGITIVTGGDAGTAEGDFASCLVWSSRPANPLPILIIVTNNKWGISTAAEGQHGEQRISDRGKAFGIRSKTINGNDAVEAYTELREAMAYVRTERKPFLLEANVSRLYGHSSASGANYVSNEVDCLTDFEAKLEKDGVLTREQMDALRNSYTEEMAAAARQVRDEPQPDPESIWKHIYAEDK

SEQ ID NO: 9061 - protein, 214 aa, Brassica napus
MGPKAGTLVIILLGLTLLSDARSFLHSSLDSEKVIKNEKVCTLCEEYVNVAISYLENNQTQAQIIEDLHDRCSHMRGFAQQCVTLVDYYVPLFFIQLESFQPQDFCKRMNLCDKVAALVEEASQDSCAVCHKTVSDILIKLQDPDTQLDIVELLLKGCKSFKNYEKKCKKLVFEYGPLILVNANDFLVKNDVCKLLRACPDEKTVLTQPGTADS

SEQ ID NO: 9062 - protein, 172 aa, Triticum aestivum
MGQVWASLQEKLQGRHWKERQVRKITDRVFDRLTEDTQKPEKDALKFEEVYIAVLCVYNDINKYLPGPHYDPPSKERLKELMREFDIDMNGLLDREEFAEFIRKLTAESLCAISLKLIITLVAAPALALATKRATEGVPGVGKVVHKVPNAIYAAAITMAAVLIQRSAEGVE

SEQ ID NO: 9063 - protein, 450 aa, Burkholderia fungorum LB400
MSTSVNAGARLDRLPISRFHWKILFLIGAGVAIDAFDIYLGGTVMAATVKTGFATLHQGALFISLTFTGMLIGAGAAGYVGDRFGRRYSYQTNLLVFGLAAVGCWLAPNMPMLIVGRFIMGVGLGAEVVVATGTLCEFVPPAYRGRWAALMSLMIHIGVLAATGLSYLIIPRFGWRVMFLIAALGALVIWIMRKRMPESPRWLESVGREAEAQAVLERIEAEVARHHGSLPPVQLQPSVTAAADGRSSLAALFARGQLRKTLVGTVTGVTINIALYGFLSWIPTFLVKQGLEVSTSLGFATIIAFGGPLGVLAGLLFTDRVGRKKGLIGFAAVSAVLGVAYSHLQGQVLIGTVGFLVEGTIYGLATIGLYGFIPELFPTAIRLRGTGWCGVCSRGASIGMPYLTVMLFERFGVSGVTSMVAGVLLLLIVTVGLFSEETSQRSLESIALQD

SEQ ID NO: 9064 - protein, 233 aa, Triticum aestivum
MDALCLLAALLACALASSGSAQPADPQQGSYGNDVANQDMRISTTMVALLAAVVAVFFFILASIIYLRHCTGYSYPHAPRPDDSRGSGPGAGFSSFIARRQQRRAATRGLDAEVVKAFPTMRYAEAKALRVGRKAAPLLECAVCLSEFEDEDRLRLLPKCSHAFHPDCIGEWLASHVTCPVCRPNLDPKQGRRQRRTRRGTPRGWEPTQQPPAIARWFRHHQKAGAGPWVQSN

SEQ ID NO: 9065 - protein, 313 aa, Agrobacterium tumefaciens str. C58
MRRTVMILCCGEALIDMLPRQTTLGEAGFAPYAGGAVFNTAIALGRLGVPSAFFTGLSDDMMGDILRETLRASKVDFSYCATLSRPTTIAFVKLVDGHATYAFYDENTAGRMITEAELPALGADCEALHFGAISLIPEPCGSTYEALMTREHETRVISLDPNIRPGFIQNKQSHMARIRRMAAMSDIVKFSDEDLAWFGLEGDEDTLARHWLHHGAKLVVVTRGAKGAVGYSANLKVEVASERVEVVDTVGAGDTFDAGILASLKMQGLLTKAQVASLSEEQIRKALALGAKAAAVTVSRAGANPPFAHEIGL

SEQ ID NO: 9066 - protein, 307 aa, Legionella pneumophila str. Lens
MSRHSHDGAHHHEHGEVTYDKAFIIAITANGLFVVMQIIFAYLANSTSLLADAFHNLGDVLGLILAWVATGLMKRKPTHKATYGFKKTSILAALANGALLVFTCGIIATDAMYKLFSPTEIQAVSVMIVAAIGIVVNFSTALLFLRGSDDLNIRGAYLHLFYDALISVGVVLSAGVLYLTGWVWIDPVVGLLIALVILKGTWSLFADSFRLIIDGVPRDISWIKVSDFLLAIPGVKSIHDLHIWAISTKENALSVHLFMPEESLSDDLRRELVEKLKHDFSIQHVTIQVEKTEAECNDACHNPRIII

SEQ ID NO: 9067 - protein, 791 aa, Glycine max
  misc_feature (269)..(269): Xaa can be any naturally occurring amino acid
  unsure (1)..(791): unsure at all Xaa locations
MDAASQLVSCGIDPFHRASSPSPRHRRHSNLLLLRRRSSRVFAVSAEPKPAVNGANSRPPPTRAVNGGVSTRIGDVSKEIKRVRAQMEEDEQLATLMRGLRGQNLRDSLFAEDDVELRLVEVDESSEFLPLVYDPASISAYWGKRPRAVATRIVQLLSVAGGFLSRIAGDVINKKVKENEVARAIELREIVTSLGPAYIKLGQALSIRPDILSPVAMTELQKLCDKVPSFADDVAMALIEEELGQPWQNIYSELSSSPIAAGSSPDNHXLGQVYKGRLMENGDLVAVKVQRPFVLETVTIDLFIIRNLGLALRKFPQVSIDVVGLVDEWAARFFEELDYVNEGENGNRFAEMMRKDLPQVVIPRTYHKYTSRRVLTTEWIDGEKLSQSTESDVGELVNVGVICYLKQLLDTGFFHADPHPGNLIRTPDGKLAILDFGLVTKLTDDQKYGMIEAIAHLIHRDYPAIVKDFVKLGFIPDGVNLEPILPVLAKVFDQALEGGGAKNINFQELASDLAQITFDYPFRIPPYFALIIRAIGVLEGIALVGNSEFAIVDEAYPYIAQRLLTDESPRLRDALRYTIYGKSGVFDAERFIDVMQAFENFITAAKSGGGENMNGNMAELGILSTSQSEYLLPGFQSVIPLSQQPVQTRAALAFLLSDRGNFFREFLLDEIVKGIDAVTREQLVRVMSLLGVQNVTPVFSMVPTVGPFKPAALIPTITEEDEVILNNVQMVVEFLTAGSSLSRTSGQALNIPQIIQELLPVLPGISVKVLPEVVSRLSSRVLARLIRDTFL

SEQ ID NO: 9068 - protein, 665 aa, Chlamydophila pneumoniae J138
MINKELDIGILGKIAGAIKQISIESIQKASSGHPGLPLGCAELAAYLYGYVLRQNPRDPHWINRDRFVLSAGHGSALLYSCLHLAGFDVSLEDLQEFRQLHSRTPGHPEYGETVGVEATTGPLGQGLGNAVGMALSMKMLESRFNRPGHEIFNGKIYCLAGDGCFMEGVSHEVCSFAGSLNLNNLVVIYDYNNVVLDGYLNEISVEDTKKRFEAYGWDVYEIDGYDFTHIHETFSSIKRGQERPVLVIAHTIIGHGSPKEGTNKAHGSPLGVEGTHETKQFWHLPEEKFFVPPAVKNFFAHKIQEDRKAQEQWLDEVRVWSKQFPELHEEFVALTSHKLPKNLESLVQSVEMPDSIAGRAASNKLIQVLVQHIPYLIGGSADLSSSDGTWIANEKVIHTYDFSGRNIKYGVREFGMATIMNGLAYSQVFRPFGGTFLVFSDYMRNAIRLAALSKLPVIYQFTHDSIFVGEDGPTHQPVEQLMSLRAIPGLYVIRPADANEVRGAWIAGLKHTGPTVIVLSRQALPTLPAAHRPFKDGVGRGAYIVLKESGEKPDYTLFATGSEVSLALSVAKELEHLDKQVRVVSFPCWELFEAQDVDYKQSIVGGDLGIRVSIEAGSALGWYKYIGSEGLAIAMDRFGYSGASDDVSEECGFTTEQILQRILSQ

SEQ ID NO: 9069 - protein, 480 aa, Synechococcus sp. CC9605
MSDASFDFDVIVIGAGYGGFDAAKHAAEHGLKAAIVESRDMGGTCVNRGCVPSKALLAASGKVRELADDKHLSSFGIHAAPVRFERQKIADHANQLVQTIRTNLTKTLERAGVTILRGHGRLEGSQKVGLREPSGVDRVLTAKDVIIATGSDPFVPPGIETDGRTVFTSDEAINLEWLPRWIAIIGSGYIGLEFADVYTALGCEVTMIEAMGKVMPTFDPDIAKIAGRHLIDGRDIDARSGLLARKVTPGCPVQIELADFNSRELVESLEVDAVLVATGRVPSSKGLNLESLNVETNRGFVPIDDAMRVLVNDQPVPHLWAVGDVTGKLMLAHTAAAQGTVAVDNILGHAREIDYRSIPAATFTHPEISSVGLTEADAKALAEKDGFQLGSVRSYFKANSKALAELDSDGLMKLLFNKTSGEVLGAHIYGLHAADLIQEVANAVARRQSVRQLATEVHTHPTLSEVVEVAYKQASAQVAA

SEQ ID NO: 9070 - protein, 468 aa, Pseudomonas fluorescens Pf-5
MRIELIKSRANLFLTTINLPRLPMIESVEDFLARLKKRDPDQPEFHQAVEEVLRSLWPFLEANPHYLSSGILERICEPERAVVFRVSWVDDQGKVRVNRGFRIQMNSAIGPYKGGLRFHPSVNMGVLKFLAFEQTFKNSLTSLPMGGGKGGSDFNPKGKSDAEVMRFCQAFMSELYRHIGADVDVPAGDIGVGAREIGFLFGQYKRLSNQFTSVLTGKGISYGGSLIRPEATGFGCVYFAEEMLKRRGDRVEGKRVAISGSGNVAQYAARKVMDLGGKVISLSDSEGTLYCESGLSEEQWLAVLELKNVQRGRISELASQFGLEFRAGQTPWDLPCDIALPCATQNELDAEAARTLLRNGCTCVAEGANMPTTLEAVDIFIDAGILFAPGKASNAGGVAVSGLEMSQNAMRLLWTAGEVDSKLHNIMQSIHHACVHYGEENGRINYVKGANIAGFVKVADAMLAQGVV

SEQ ID NO: 9071 - protein, 163 aa, Xanthomonas campestris pv. campestris str. ATCC 33913
MMNKITHYFKSLLLLELLGGLWLTLKYTFKPKYTVLYPMEKFPQSPRFRGLHALRRYPNGEERCIACKLCEAVCPALAITIDSAKREDGTRRTTRYDIDLFKCIFCGFCEESCPVDSIVETHILEYHFEKRGENIVNKPQLLAIGDRLEAEIAERRAADAAFR

SEQ ID NO: 9072 - protein, 260 aa, Camellia sinensis
TREGNFDLVGNNFPVFFVRDGMKFPDMVHALKPNPKSHIQENWRILDFFSHHPESLHMFTFLFDDAGVPQDYRHMEGSGVNTYTLINKAGKAHYVKFHWKPTCGVKCLLEEEAIKVGGANHSHATKDLYDSIAAGNYPEWKLFIQIIDPDHEDRFDFDPLDVTKTWPEDIIPLQPVGRLVLNKNMDNFFAENEQLAFCPAIIVPGVYYSDDKLLQTRIFSYADTQRHRLGPNYLQLPANAPKCAHHNNHHEGFMNFMHRR

SEQ ID NO: 9073 - protein, 274 aa, Triticum aestivum
HYRTSLYKKAGWYRSGIPGISSTHASAFEERDVVVDAGCVRAVLGELVLTFLFVFTGVAAAMAAGVPELPGAAMPMATLAGVALAQALAAGVLVTAGFHVSGGHLNPAVTVALLARGHITAFRAVLYVAAQLLASSLACILLRYLSGGQATPVPVHTLGAGIGPMQGVVMEVILTFSLLFVVYATIIDPRTTVPGYGPMLTGLIVGANTIAGGNFSGASMNPARSFGPALAMGVWTNHWVYWVGPLVGGPLAGFVYETVFMVTKTHEPLLGWDF

SEQ ID NO: 9074 - protein, 355 aa, Oryza sativa
RPRNAAFLAPLRTSSAVCTKAVSNSDGTPGTSSSPHVVCFGELLIDFVPTVNGVSLAEASAFKKAPGGAPANVAVGIARLGGSSAFIGKVGDDEFGYMLADILKENNVNNQGLLFDAHARTALAFVTLRNDGEREFMFYRNPSADMLLEEKELDLDLIRKAKIFHHGSISLITEPCKTAHIAAAKAAKDAGVLISYDPNLRLPLWSSADDARDGILSIWETADVIKISEEEVSFLTKGEDPYDDSVIKKLMHPNLKLLLVTEGPEGCRYYSKEFNGRVGGLKVNAVDTTGAGDAFVAGILSQLSVDFSLLQDEGRLKEALKFANVCGALTVTERGAIPALPTRQQVVDALTKVVA

SEQ ID NO: 9075 - protein, 536 aa, Emericella nidulans
MSYIEEEDQRYWDEVAVKNWWKDSRWRYTKRPFTAEQIVAKRGNLKIEYPSNVQAKKLWGILERNFNKEASFTYGCLDPTMVTQMAKYLDTVYVSGWQSSSTASSTDEPSPDLADYPMNTVPNKVNHLWMAQLFHDRKQREERMTTPKDQRHKVTNVDYLRPIIADADTGHGGLTAVMKLTKLFVERGAAGIHIEDQAPGTKKCGHMAGKVLVPISEHINRLVAIRAQADIMGTDLLAIARTDSEAATLITSTIDHRDHPFIIGSTNPDIQPLNDLMVMAEQAGKNGAELQAIEDEWLAKAGLKLFNDAVVDAINNSPLPNKKAAIEKYLTQSKGKSNLEARAIAKEIAGTDIYFDWEAPRTREGYYRYQGGTQCAINRAVAYAPFADLIWMESKLPDYKQAKEFADGVHAVWPEQKLAYNLSPSFNWKKAMPRDEQETYIKRLGALGYAWQFITLAGLHTTALISDTFAKAYAKQGMRAYGELVQEPEMANGVDVVTHQKWSGANYVDNMLKMITGGVSSTAAMGKGVTEDQFKS

SEQ ID NO: 9076 - protein, 374 aa, Arabidopsis thaliana
MSKSGDNQPVDRYLRRQILGEGTYGVVYKATDTKTGKTVAVKKIRLGNQKEGVNFTALREIKLLKELNHPHIVELIDAFPHDGSLHLVFEYMQTDLEAVIRDRNIFLSPGDIKSYMLMTLKGLAYCHKKWVLHRDMKPNNLLIGENGLLKLADFGLARLFGSPNRRFTHQISHLVSYLYLLVEDSLSLNWLYLFTQVFATWYRAPELLFGSRQYGAGVDVWAAGCIFAELLLRRPFLPGSTEIDQLGKIFQAFGTPVPSQWSDMIYLPDYMEFSYTPAPPLRTIFPMASDDALDLLAKMFIYDPRQRITIQQALDHRYFSSSPSPTEPGKLQIPASKGDALEPKASEQNQHGNSPAVLSPPGKMRRVMGPEGFT

SEQ ID NO: 9077 - protein, 506 aa, Phalaenopsis hybrid cultivar
MSIFLIATLFLSLSLHLLLRRFRRRRRILPLPPGPLNFPIVGALPFIGSMPHSGLALLSRRYGPIMFLKMGIRQVVVASSSSAARSFLKTHDSRFSDRPLDIISKQVSYNGQNMVFADYGPKWKLLRKVSNLHLFGPKAMSRWADVRRDEAFSMSHFLKKQSDSKNPVLLSNLLVCSMANVIGRISMSKRVFDEEGKEAKEFKEIIKELLVGQGASNIGDLVPAMRWLDPQGARKKLLGLNQRFVRMISKFLAEHGESRGEREGNPDLLDLIVADKIAGDDGEGLSEENIKGFISDLFVAGTDTSAMVIEWAMAEMLKNPAILRRVQEETDRIVGRDRLLEESDIPNLPYLQAICKEALRKHPPTPLSIPHYASEPCEVEGYHIPGKTWLLVNIWAIGRDPEVWEKPLEFDPERFMEGKMARIDPMGNDFELIPFGAGRRICAGKLMGMVMVQYFLGVLVQGFDWSLPEGVVELDMEEGPGLVLPKAVPLLVTARPRLPAAAYGVV

SEQ ID NO: 9078 - protein, 130 aa, Brassica napus
  misc_feature (119)..(119): Xaa can be any naturally occurring amino acid
  unsure (1)..(130): unsure at all Xaa locations
FSKGENLIDLFGEVDHALKVFDRMAQSVGPRLYSCCNCRNHVGLHDDIISKAFQGRTGRAFLFSHAMNIVVGPKEDRHLLTGLHTVADISCADCNEPLGWKYERAYESSQKYKEGKFIXEKAKIVKEEDW

SEQ ID NO: 9079 - protein, 290 aa, Campylobacter lari RM2100
MKLALIQQEFKQNKEKTIEKTCELIKQAAKEKAELVCLQELHQTQYFCQSENTNFFDLANDYEEDINFWSNVAKENKVVLVTSLFEKRSAGLYHNTSVVFEKDGSIAGKYRKMHIPDDPCFYEKFYFTPGDLGFEPIQTSVGKLGVLICWDQWYPEAARLMALKGAQILIYPTAIGWFDKDEKEEKQRQLEAWIGVQRGHAIANGLPVVAINRVGFEKDESGVEEGIRFWGNSFVFGAQGEELFRADDKQELCKIVEIDMQRCENVRRWWPFLRDRRIEYFHELNKRFID

SEQ ID NO: 9080 - protein, 325 aa, Campylobacter lari RM2100
MRKSIAEWQKQELLLLSLPHENSDWKPYLEEILQSYEEFVKAVANFQKVLLIAPSEKDFQRFKHIKNVDFFKCDTNDTWIRDFGAIDVCEDDKLIGLDFTFNAWGDKFQSTLDNAVNSKLFSQKLSGKLEKIDFILEGGSIDFNGQGVMLTTSACLLNENRNSHLNKEQIEAKLKEIFGLKEIIWLENGFIKGDDTDSHVDTLARFINEKTIAYCVCKDENDEHYAPLKAMEEELKKTGFDLLELPLPKPLYFEGKRLGATYANFVFVNGGLIVPTYNDENDALVLENLQKACKDRKVVGVDARVFLRENGSLHCSCQNRYEGQR

SEQ ID NO: 9081 - protein, 1205 aa, Bacteroides fragilis NCTC 9343
MKLHIAMLAATLLLSGGASYAQGNKQEKKAKAYMVADAHLDTQWNWDVQTTIKEYVWNTINQNLFLLKKYPNYVFNFEGGVKYAWMKEYYPAQYEEMKKYIGEGRWHISGSSWDATDALVPSTESFIRNIMLGQQYYRQEFGVESTDIFLPDCFGFGWTLPTIASHCGLIGFSSQKLDWRVHPFYGKSKHPFTIGLWKGIDGSSIMLAHGYDYGRRWNDEDLSENEQLKELAGRTPLNTVYRYYGTGDIGGSPTLASVRSVEKGLRGNGPVEIVSATSDQLYKDYLPYKNHPELPVFDGELLMDVHGTGCYTSQAAMKLYNRQNELLGDAAERAAVTAEWLNQAKYPGSTINEAWKRFIYHQFHDDLTGTSIPRAYEFSWNDELISLKQFSNVLTSSIHGIGRELDTRVSGIPVILYNALGFAVTDIAEIELDLPKAPKGITVYDEKGKKVSAQLISYTDGKARILVEATVPATGYVVYDIRTSGTGASNVSTNVNTLENSLYKITLDKNGDIVSLTDKKNGKELVKAGKAIRLALFTQNKSYNWPAWEVLKETTDRTPVSITDDVKITLVEDGTLRKSLCVEKRHGESVFRQYIRLYEGSRAERIDFYNEIDWQSTNALLKAEFPLNLENEKATYDLGIGSIQRGNNTETAYEVYAQYWADLTDRDGSYGVSVMNDSKYGWDKPDNHTIRLTLLHTPETRGGYAYQDHQDLGHHTFTYSLIPHQGALDKPATVEKAEKLNQQLKAFRTEKHKGNVGKSFSFVASDNRNVLIKALKKAEETDEYVVRVYETEGRKAQSATLTFAGEIISASEANGTEKTIGNATFEGNKLQVNITPYSVRTYKVRLKPSGREASPIEYAALPLDYDRKCASYNEFRGEGDFESGYSFAAELLPDSLIAGQITFRLGEKEIANGMTCEGDTLQLPAGNKYNRLYILAASTEGDNQADFRIGKQTASFVVPSYTGFIGQWGHKGHTEGYLKDAEIAYVGTHRHASNGDQPYEFTYMFKFGMDIPKGATSVILPRNEKVVLFAATLVAENEPATTVAGTLFRTNNVGNAATAGNDEEAVRENILKRAKIIACSGYTNDEEKPDFLLDGKTDTKWCDVSQTPNYVDFDLGEAQNISGWKMVNAGQESHSYITNGCFLQGKMNPGDEWTTLDAIDGNHANVVSRPLNYDGKVRYIRLLVTRPTQSTGGRDTRIYELEVYK

SEQ ID NO: 9082 - protein, 822 aa, Tropheryma whipplei str. Twist
MLFGTILGYPRLGPRRELRDYLYSYWQGKISEEVLEEKTRLLREETHRRLILLGLSAENYSIPESFSYYDHVLDAAVHVGAVPSRFSWLLNDGIVDLNAYFTLARGDRSLAPLESLRYFGSSYHYLVPEIDGNTHFALTSHRVITQFEQAKQAGVNVRPTILGPVSLLMMSRSHGPNAINPIERLQDLVPVYSELFEKLYNSGCKFVQVDEPAVTHNTFGIQKSQELLVDAYKFLSSRKLRPEILVAMSYGNAADQVDALATTGVEAMAFNLIDGAVPFANPSLADKALFGGVIDGRNIWRGDLAAAYYKLERLRELSGNVVASTSASLFHLPLSLDTEDLGDHLKEWLAFADEKVRQVMILARGLEYGVGCIYEHLDSAANSLSDRMTTPGVRVEEVRQALQDLGESDFCRPPREQQQGCNHASLPILPMVGIGEFSDGTPFVNNDGIPNNNPQAAISFQEDLDILAVQRLGDIDPIQRFASRMHGFAITHNGWVQSIGPHSVCPPILWGDVSRITPMSSWIEYTQTLTEKSVKPVLPGPLTLLMSCFVREDQPFQETAQQIAIAIRDDIADLQRSGIRAIQIDEPALEEFLSIYDNARYCAPQVFRLATSSAKPEVQIHLHLRPPNLVETIDIINDLDVDVISAEIVPYTFGLPAQKCLMEIRRRIPLCLYFHDANFSRMPSVDECRYLIDTLVRDVDGATLAKQFDDMHIAGFTAGCAFTAINPRDICVPRADDAGIPSLGSGADHALERQKATYIPGGIHNLWIGLIYSHSGYNAFVYDSAYMRDIYIGNELQFVKNMTQAVLLLRKEFTSPQKALSA

SEQ ID NO: 9083 - protein, 61 aa, Glycine max
  misc_feature (14)..(14): Xaa can be any naturally occurring amino acid
  misc_feature (30)..(30): Xaa can be any naturally occurring amino acid
  unsure (1)..(61): unsure at all Xaa locations
FFEDVLVNGKPWTXGVPEVFSGSHVYVCAXHGSRDVRCGVCGPVLIKKLHEEIELRGLKDR

SEQ ID NO: 9084 - protein, 392 aa, Symbiobacterium thermophilum IAM 14863
MWALARSVEEYGIAVRRRLHRNPELSFAEHDTHQYLAEELQGLGCSFRSHLAGGTGLHVVLGGTRPGPVVALRADIDALPIQEETGLPFASERPGVMHACGHDVHTAILLATARALKSVEQDLPGTVVLLFQPGEEKNPGGASLMIRDGVLDQPKVDAIFGLHVDPYLEAGRMAFASGPVMAAPDELRVTVTGRGGHGAWPHQTVDPVVTAAQIITLLQQVVARNVDPFQPAVLTVGMIHGGTAHNIIPDEVEFIGTVRTMDEGLRRRMPERIEAVIRGVCEAAGASYRMEYERGYPVLVNHPEATETGRRAAAAVLGEDRVGRMEPSMGGEDFAYYLERVPGTFARLGARSPGDAAPHGLHTSRLMIDESCIAVGVAYYIQVVQQFLMGER

SEQ ID NO: 9085 - protein, 438 aa, Clostridium perfringens str. 13
MDIEKFLREIKEKIINYRRDFHKYPESAWKEFRTSSLIGKYLREMGYEIKIGKEIISEEHRLDVPNELDLKKSYEKSLKQGAYKELSDYMIGGYTGVVGILQNGEGPTIALRFDIDGVKVLECENNEHFPFKNGFSSLNRGIMHACGHDGHIAIGLGVAEGIIRFKEYLSGTIKLIFQPGEESVCGGNPMAQSGILDDVDYLLSGHIGIKARKSGEIICGTKGFLATSKINAEFTGKSSHAAVAPEKGHNALLSASTAVLNLDAIPRNGEGITRINVGKLIAGSGRNVIPGKAFMEVETRGETTELNEYMESYATRILKASADMHDNHVKISCLGRSISGSSDRELIDIIKWEVKNIKGYNNVIDEEDFGASEDICYMMKRVQKNGGKASYIMFGSELKDEHHSIRFDFNEEDLFPAINLYLRVVMNLCNKNNKIFKR

SEQ ID NO: 9086 - protein, 550 aa, Burkholderia sp. 383
MTKYVFVTGGVVSSLGKGIAAASLAAILESRGLKVTLLKLDPYINVDPGTMSPFQHGEVFVTEDGAETDLDLGHYERFISTKMRKANNFTTGQIYESVIRKERRGDYLGKTVQVIPHITNEIQAFIERGAASATCGEPDVAIVEIGGTVGDIESLPFLEAARQMSLRLGRNSACFVHLTLVPYVATAGELKTKPTQHSVQKLREIGILPHVLLCRADRRIPDDESKKISMFSNVPEDAVISVWDADSIYKIPQMLHDQGLDRIICEELKLSPKDADLTMWSELVEKLENPKHEVTIGMVGKYVDLTESYKSLIEALRHASLHTSTKVNIEYIDSEEIETNGVDSLKHLDAVLVPGGFGRRGTEGKIAAIRYAREAKVPYLGICLGMQLAVIEFARNVVGLKQANSTEFEPDTPERVVALITEWYDRDGKVETRTEESDLGGTMRLGSQRCPIKPGTMAEEIYGKDVNERHRHRYEVNNRFVPQLEAGGLIISARTPSEDLPEMMELPRSMHPWFVGVQFHPEFTSTPRDGHPLFKSFVEAALANKQARGV

SEQ ID NO: 9087 - protein, 323 aa, Pseudomonas fluorescens Pf-5
MHNPIPVTVLSGFLGAGKTTLLRHLLKAEHGLKIAVIENEFSDAGIDTQLLGEQPVQVMTLSNGCVCCTIHTDLTKALYLLLERLDSGEIAFDRLVIECTGLADPAPVAQTFFIDEELRERYILDGIITLVDAKHAEFHLTQTIAQAQIGFADRLLVSKRDLVDEATFEALCQRLTRINRRAPIRLVEHGQIDLAELLDVRGFNLNADLGGGLSLRPVSKAPSVDRISSLVLRTEQALDLDRLSEFMNELLEDHGKQLLRYKGVLSVIDEPRRMVFQGVLKLYGFDWDSEWAEGEVRESVMVFIADDLPEEKIRQGFERMLAG

SEQ ID NO: 9088 - protein, 584 aa, Streptococcus thermophilus LMG 18311
MAFEIIMPKLGVDMQEGEIIEWKKQEGDVVNEGDILLEIMSDKTNMELEAEDSGILLKITRQAGETVPVTEVIGYIGAEGEVVADNSTSAPAAEATAQLEAAGLEVPKAPSQPSPATAEKAALADNEYDIVVVGGGPAGYYAAIRGAQLGGKVAIVEKSEFGGTCLNKGCIPTKTYLKNAEILDGLKIAAGRGINLASTNYTIDMDKTVDFKNSVVKTLTGGVQGLLKANKVTIFNGLGQVNPDKTVTIGSETIKGRNIILATGSKVSRIDIPGIDSQLVMTSDDILDLRELPKSLAVMGGGVVGIELGLVYASYGVDVTVVEMADRIIPAMDKEVSLELQKILSKKGMKIMTSVGVSEIVEGNNQLTLKLNNGEEIVAERALLSIGRVPQLNGLENLNLELDRGRIKVNEYQETSIPGIYAPGDVNGTKMLAHAAYRMGEVAAENAMHGNVRKAHLDYTPAAVYTHPEVAMCGLTEEDARAKYGDVLIGKSSFAGNGRAIASNEAHGFVKVVADAKYHEILGVHIIGPAAAELINEAATIMENELTVDELLQSIHGHPTFSENMYEAFADVLGEAVHNPPKRK

SEQ ID NO: 9089 - protein, 210 aa, Triticum aestivum
MAPKNAAPAAAAADAGMEPRFRGVRKRPWGRYAAEIRDPARKARVWLGTFDTAEAAARAYDAAALHYRGPKAKTNFPVGTVAAFAHVPLPPPKALAVSPSSSTVESSSRDTPAAPPAAPAPPPALDLSLAMPAMVAAQPFLFLDPRVAVTVAVAAPAPAPCRSAAISGMNKAASREEEQSDTGSSSSVVDASPAVGVGFDLNLPPPVEMA

SEQ ID NO: 9090 - protein, 926 aa, Psychrobacter arcticus 273-4
MTINNHILRERISLLGSFLGDAISRQTGEQTLHTIEILRKGFIQQRREPNEAHKQQLIDFIASLDNQALKNVIRSFSIYFFLANLSEENYLREQRHTLRMQSEHSWEGSFRRTLLECRERNIEPAQMQELIEQLKFIPVFTAHPTEARRRTTMNLLQSLFTHSDALNNFAKNSFAYEQAKEQTAQTIDLLWSSDEVRTRKPLVYDEINNGLHYFNASLFNAIPKVYRNIKDAIVEIYPELIDYPLPAFMSFGSWIGGDRDGNPFVTHDTTEMAVLMHADAVLRHYQVLLKKLRRQLIHSDTIVTIEPDVYAKIESYIELDRRVFDYNLDDYGNEPYRRLLSLILSKVKATNYLIQSKGSDSEAKKDAYANPQELLEDLRIIRQSVNTHDTAHGEGLLLDVIRLVKTCGFHLAALDIRQESSYHSGVIADIFANAANLPDYQTLNETERQQWLTRLLEKPGTPLIYTDNLTDKTREQLALMNSVATLRKLVGQDTFGSYVISMTNNASQLLEVLLLMRFAGLCRVDDKGQLSADLPVAPLFETIEDLKNIDKILPAVLDNPLYRGLLQHSDNTQEIMLGYSDSSKDGGIITSAWQLYSAQQTINRIAEEYGIKTRLFHGRGGSVSRGGGSTHKAIAAQPAGTLHGQIKVTEQGEVLYAKYANTDTAVFELTMGITGTLKACSSRFVVQPPELPQYEALFARLADVGEQRYRKLTDHTEGFYEFYSQATPVAEISLLNIGSRPAHRNKGLPSKTTLRAIPWVFGWSLARFTLPAWYGVGSALDSVKEDEALMKEMNDCWPFFNVFISNIEMAFTKSDMSIAHAYSQLCDDEMLREQIMTAVTDEHELTYSGLNSLLNQQSLLSSQQNLSASLEWRNAYLDPTNYIQIELLKRARQKEASGDANHGDLDVEDPLIRSINALAAGLRNTG

SEQ ID NO: 9091 - protein, 216 aa, Camellia sinensis
MGRRPARCYRQIKNKPYPKSRYCRGVPDPKIRIYDVGMKRKGVDEFPFCVHLVSWEKENVSSEALEAARIACNKYMTKFAGKDAFHLRVRVHPFHVLRINTMLSCAGADRLQTGMRGAFGKPQGTCARVAIGQVLLSVRCKDGNSHHAQEALRRAKFKFPGRQKIIVSRKWGFTKYNRTDYLRWKSENRIVSMQPLGCHGPLANRQPGRAFINASA

SEQ ID NO: 9092 - protein, 312 aa, Synechococcus sp. CC9605
MSTASKPLETQRRRSSDPVSWYLATIGRIPLLTPAEEIELGNQVQAMMAFTEDGSREIEDGELTTAQRRLLRIGRRAKERMMKANLRLVVSVAKKYQGKGLELLDLIQEGSLGLERAVEKFDPTRGYKFSTYAFWWIRQSMTRAIACQSRTIRLPVHLSERLTTIRKVSLDLAHKLGAMPSRVEIAEAMDIPLDELDSLLRQALTTSSLDAPVNGEEGRSFLGDLIADSSLDEPLDIVEQRIHHEQLGRWLSHLSEQEQHVLRMRFGLEGNERHTLAEIGRLMEVSRERVRQVELKALRKLRNLTRRLPSGI

SEQ ID NO: 9093 - protein, 369 aa, Synechococcus sp. CC9605
MIAIPQVDMGQDLAVDSAPIGTATAGPHAERLSKLVTTQRATVERDTGLELYRDMTLGRRFEDKCAEMYYRGKMFGFVHLYNGQEAVSTGVIGAMKRQHDWFCSTYRDHVHALSAGVPAREVMSELFGKETGCSKGRGGSMHLFSKEHHLLGGFAFIAEGIPVALGSAFTSRYKRDALGDASSNAVTAAFFGDGTCNNGQFFECMNMAQLWKLPIIFVVENNKWAIGMAHDRATSDPEIWRKASSFGMAGEEVDGMDVLAVRAAAQRAVERARAGEGPTLLECLTYRFRGHSLADPDELRAEEEKLFWAKRDPLKALERDLTEAGLVNSDELRAIEKDIDDIVQDCVDFALSAPEPDPAELTRYIWAED

SEQ ID NO: 9094 - protein, 1049 aa, Yarrowia lipolytica CLIB122
MTLIVVSLFLPYTINFNLDEGQRPKVDVTTEPVAPSRPPISRSNSDLKTLPTVPKSGGVSALTLALERFPQEKPSQQNSGGSSLTSSVTQTPNPALPSMFHKAEPTGPAPAIVHPDEFFKPSPHAQASAIVQPPSAVAGALQVSSAGSPQQAGFLENELALQKMKHPTVPPSASEPSSVSSANSNPAEYPTLRPPRPQYNQPQSRASSPPPRVVDKRRPVSGQTAMRFIDRFGQQKPSDSFQSAKDWTVEKSHKGNGGLRNAVNRYCASTNHKKLWVGTLGMPSDELGDVSKVEIERKLTREYDSVPVFAPDNTFEAHYTHYCKGILWPTLHYQTPDSDKSKAYHDHSWEHYKALNQMVADKVIEVYKRGDVIWIHDYHLLLVPEMVRQQLPNARIGMFLHVTFPSSEVFRCLAARNELLTGMLGATCIGFQTAEYGRHFLQTCNRLLVVDASVDGVENNDGRFTAVVACPIGIDPPSLQKHFMDPEVDKWRRLIRARWPGKRLLVSRDKLDSLRGIKQKLLAYEHFLINNREFCDNVVLVQVCLSGNESDSLEGELVHIMDRINALTDDLSNQQVIFLHQDIEFEQYLAMLAEAEAYVALSLREGMNLTCHEFILCSKDNSGQLILSEFTGSASVLDNDDVLVVNPWNMRQVSDAYKTALTMDRGTREKHRGRLVEFVEGHTCLQWATTFLQHLEDAWVEHQKSKRLLPRLNIAYAKERYDIVAKQPGKYRLFLLNLEGRDFSSPHTSKPALSSSAAVYSSTHNRIPILTELVSDPYNVVYIISSDARHDIERLFRNVPNLGIIAENGGYLRPYRSDQWIRMCDEEDVHNWKDSVLEVLESIKERCPGSSIKSDETTITFQFTPQYSAEQEQDFSFDFAGECVSHINDAFSTQNITARFNDDRILVENQQLSRLAAVKRAVAIFEKTCKIGGDIESKGINSGHLTVAPSSPTLTRTRSYTISAPGPSYDATISYVFVAGNDQSDYPVIEWANSLGDVETVLTVGLHSEHSPAAVSVEGLNGLTLALRELAVGDRSDIKGDRDTRERTP

SEQ ID NO: 9095 - protein, 503 aa, Nierembergia sp. NB17
MMQLSTELAIAAIIFLLAHILISKTSGRRLPPGPRGWPVIGALPLLGDMPHVSLAKMAKKYGPIMYLKVGTCGMAVASTPHAAKAFLKTLDINFSNRPPNAGATHFAYNAQDMVFAPYGPRWKLLRKLSNLHMLGGKALEDWSNVRANELGHMLKSMLDLSREGQRVVIADMLTFAMANMIGQVILSKRVFVDKGVEVNEFKNMVVELMTVAGYFNIGDYIPCLAWLDLQGIEKGMKILHKKFDVLLTKMFDEHKTTSHEREGKSDFLDMVMANRDNSEGERLSTTNIKALLLNLFTAGTDTSSSVIEWALTEMLKNPSILKKAQVEMDQVIGKNRRLLESDISNLPYLRAICKETFRKHPSTPLNLPRISSESCEVDGYYIPKNTRLSVNIWAIGRDPDVWENPLKFNPERFLSGKYAKIDPRGNDFELIPFGAGRRICAGTRMGIVMVEYILGTLVHSFDWKLPSDVIELNMEEVFGLALQKAVPLEAMVTPRLPLNVYAP

SEQ ID NO: 9096 - protein, 250 aa, Suaeda maritima subsp. salsa
MGKSYPTVSEENQKSIEKAKKKLRGLISEKHCAPIMLRLAWHSAGTFDVQSKTPGPFGTMRHQAELAHGANNGLDIALRLLEPIKEQFPEISFADFYQLAGVVAVEVTGGPEIPFHPGREDKPEPPQEGRLPDATKGCDHLRDVFIKQMGLTDQDIVALSGGHTLGRCHKDRSGFEGPWTPNPLVFDNSLLKELLSGEKDGLLQLPSDKALLADPVFRPLVEKYAADEDAFFADYSDAHLKLSELGFADA

SEQ ID NO: 9097 - protein, 293 aa, GIBBERELLA ZEAE PH-1
MAPDVCTFTLNTGDEMPAVGFGTWNIPRSQAAKAVETALRAGYRHIDTALAYGNEKEVGAGIRASGVPREEIWVSGKLRNNWHKHARKCLQTSLKNLGVGYLDLYLIHWPCSRDADNPAICYEDWDYVDTWMEMEELLDEGKVLNIGVSNFGIQQLERLLTSTEIVPAVNQIELHPCNPSPKLVAYCNNRGIHSEGYSCLGSGHSALHRNKTLRDIADAKEKTVQQVLLQWGIEKGWGVVCKSVTPSRIKSNFELSGWELTDDDMEAIDGIKKRFKAVGDGFLPHRVFFGDDE

SEQ ID NO: 9098 - protein, 258 aa, Arabidopsis thaliana
MATESYEAAIKGLNDLLSTKADLGNVAAAKIKALTAELKELDSSNSDAIERIKTGFTQFKTEKYLKNSTLFNHLAKTQTPKFLVFACSDSRVCPSHILNFQPGEAFVVRNIANMVPPFDQKRHSGVGAAVEYAVVHLKVENILVIGHSCCGGIKGLMSIEDDAAPTQSDFIENWVKIGASARNKIKEEHKDLSYDDQCNKCEKEAVNVSLGNLLSYPFVRAEVVKNTLAIRGGHYNFVKGTFDLWELDFKTTPAFAFS

SEQ ID NO: 9099 - protein, 335 aa, Leptospira interrogans serovar Copenhageni str. Fiocruz L1-130
MTRIAINGFGRIGRLVFRAGIKDPNLEFVAINDLVTPDNLAYLLKYDSTHGRFQGTVEHTEKELIVDGKKILCVSERDPEKLPWKDLKVDYVIESTGLFTDRVGAEKHIKAGAKKVVISAPAKDKDIPTFVMGVNNEKYNPSNDHIVSNASCTTNCLAPIVKVVLDNWGIEEGLMTTIHATTATQPTVDGPSKKDFRGGRGAMQNIIPASTGAAKAVGLCIPEVNGKLTGMSFRVPTPDVSVVDLTVRTTKETSLKEISAKMKAASEGAMKGILGYTEDMVVSNDFVSSTLSSIFDMDACIELNSRFFKLVSWYDNEMGYSNRVLDLIRYMAKKG

SEQ ID NO: 9100 - protein, 443 aa, Arabidopsis thaliana
MGGIPESIGNLSSLTSLDLEDNHLTDRIPSTLGNLKNLQFFRKTGIIAGVVSGIAVILLGFFFFFFCKDKHKGYKRDVFVDVAGTNFKKGLISGEVDRRIAFGQLRRFAWRELQLATDEFSEKNVLGQGGFGKVYKGLLSDGTKVAVKRLTDFERPGGDEAFQREVEMISVAVHRNLLRLIGFCTTQTERLLVYPFMQNLSVAYCLREIKPGDPVLDWFRRKQIALGAARGLEYLHEHCNPKIIHRDVKAANVLLDEDFEAVVGDFGLAKLVDVRRTNVTTQVRGTMGHIAPECISTGKSSEKTDVFGYGIMLLELVTGQRAIDFSRLEEEDDVLLLDHVKKLEREKRLEDIVDKKLDEDYIKEEVEMMIQVALLCTQAAPEERPAMSEVVRMLEGEGLAERWEEWQNLEVTRQEEFQRLQRRFDWGEDSINNQDAIELSGGR

SEQ ID NO: 9101 - protein, 373 aa, Bradyrhizobium japonicum USDA 110
MASPELSQFRRIVVKVGSALLVDSDKGEVRTSWLAALADDMAKLHKEGRDVLVVSSGSIALGRSRLKLPRGPLKLEESQAAAAVGQIALARIWSEVLGAHGIDAGQILVTLQDTEERRRYLNARSTIGKLLEWRAIPVINENDTVATTEIRYGDNDRLAARVATMASADLLVLLSDIDGLYDAPPKNNPNAKLIPVVDSISSEIEAVAGDAESELSRGGMRTKVEAAKIATTGGTHMLIASGKIEHPLQAIANGGRCTWFLTPANPITSRKRWIAGTLEPKGTLTIDAGAVTALRAGASLLPAGVIKVEGQFARGDAVIVRGPDTSEIGRGLIAYDADDAERIKGRSSPDVMTILGISGRAEMIHRDDLVVGG

SEQ ID NO: 9102 - protein, 520 aa, Lilium longiflorum
MSRHESRKLSDDYEVVDVLGKGGFSVVRRGISKSRGKNNDVAIKTLRRYGYTLPGAQRSQPGQRGLSPLGMPTLKQVSVSDALLTNEILVMRRIVEDVSPHPNVIHLHDVYEDANGVHLVLELCSGGELFDRIVAQDRYSESEAAEVVQQIASGLAALHKSTIIHRDLKPENCLFLNQEKRSTLKIMDFGLSSVEDFTDPIVALFGSIDYVSPEALSQRQVSSASDMWSLGVILYILLSGCPPFHAPSNREKQQRILAGDFSFEEHTWKTITSSAKDLISSLLSVDPYKRPTANDLLKHPWVIGDSAKQELIEPEVVSRLRSFNARRKLRAAAIASVLSSKVLLRTKKLKNLLGSHDMKSEELENLRAHFKRICANGDNATLPEFEEVLKAMKMNSLIPLAPRVFDLFDNNRDGTIDMREILCGLSNLRNSQGDDALQLCFQMYDADRSGCISKEELASMLRALPEDCVPADITEPGKLDEIFDQMDANSDGVVTFDEFKAAMQRDSSLQDVVLSSLRTI

SEQ ID NO: 9103 - protein, 268 aa, Arabidopsis thaliana
  misc_feature (99)..(99): Xaa can be any naturally occurring amino acid
  misc_feature (133)..(133): Xaa can be any naturally occurring amino acid
  unsure (1)..(268): unsure at all Xaa locations
MSSSTMYRGVNMFSPANTNWIFQEVREATWTAEENKRFEKALAYLDDKDNLESWSKIADLIPGKTVADVIKRYKELEDDVSDIEAGLIPIPGYGGDASXSAANSDYFFGLENSSYGYDYVVGGKRSSPAMTDXYRSPMPEKERKKGVPWTEDEHLRFLMGLKKYGKGDWRNIAKSFVTTRTPTQVASHAQKYFLRQLTDGKDKRRSSIHDITTVNIPDADASATATTADVALSPTPANSFDVFLQPNPHYSFASASASSYYNAFPQWS

SEQ ID NO: 9104 - protein, 399 aa, Bradyrhizobium sp. BTAi1
MLINLSPTPPDAVMLAARLFAEDPRPHKVNLGIGMYYDEEGRIPQLAAVREADHRLRSRNRPWPYLPAEGLVDLKNKAMPVVFGEDQADDLRRRTAWIQTVGGTGAVRIGAELARAIAPDAMASISDPSWPNHEAIFRAVGARVSSYRYYDVESCNIDVDGMLQDLGRLPRGTVVVLHGCCHNPTGFDPTPAQWNHIAQVLADRGLIPFIDLAYQGFGEGLEADAQSVRIIAQSCNLIFVSVSFSKSFSLYGERVGLLFVVTESEAQAALVGERARAVSRALYSSAPSNGALLIAEVLGDPQLKTTWIDELDAMRRRILLMRAELVDQLAGGNRGANFAPIKAQRGLFSYSGLTRTEIERLRVDHAVHAVADGRICLAALNAGNLPSVAAAIRQVSSRH

SEQ ID NO: 9105 - protein, 286 aa, Deinococcus radiodurans R1
MGWPEGRAPVAPEQGAPGPFFSDRGGVCWRHPAQVRQGKSGAGPAVPLRRTHMEFFIDTAIVDEIREINAWGVLSGVTTNPSLIVASGRDFKEVIGEIAELVPGGAISAEVTALDAEGMIKEGKDVAAWHKQVVVKLPLTPAGLQACKALTSEGIKTNVTLCFSVPQALLAARAGATYVSPFVGRVDDTGWDGSELIRQIKEAFVLGDIQTKVLAASIRHPQHVVQAALAGADVATIPYKVFTQMVKHPLTQAGLDSFMADWAKRQGASPETPPSEAGTNPVKKEG

SEQ ID NO: 9106 - protein, 80 aa, Agrobacterium tumefaciens str. C58; identical to SEQ ID NO: 1380

SEQ ID NO: 9107 - protein, 141 aa, Xylella fastidiosa Temecula1
MVLERTLSIIKPDAVAKNVIGDIYSRFEKAGLKIVAAKYKQLSRREAEGFYAVHRDRPFFNALVEFMISGPVMIQVLESENAVARHRELLGATNPKDAAPGTIRADFAESIEANAAHGSDSVENAAIEVAYFFAATEIILR

SEQ ID NO: 9108 - protein, 336 aa, Xylella fastidiosa Temecula1
MNMAIKVGINGFGRIGRNILRSAVQNFGSNIDIVAINDLLEADYLAYMLQYDSVHGRFKGEIAIEGTALILNGKKIRLTAERDPGNLQWADAGAEIVIESTGLFLTQESAGKHLAAGAKKVIISAPSKDETPMFVYGVNHNSYNGEPIVSNASCTTNCLAPLAKVINDKWGITRGLMTTVHAATATQKTVDGPSNKDWRGGRGILENIIPSSTGAAKAVGKVIPSLNGKLTGMSFRVPTSDVSVVDLTVQLNTPATYKEICTEVKQQSEGPLRGILGYTEDKVVATDFRGETCTCVFDADAGIALDPTFIKLIAWYDNEWGYSNKCLEIAKVIAAK

SEQ ID NO: 9109 - protein, 433 aa, Agrobacterium tumefaciens str. C58
MLSDESGEQAEMAVREGESGLRLLGKKLGRNWLPVLIVSMLAVVAVTELHTPYMPAALWLCAIIAILAVREKPAAPEKDKETAADVDEPDVPGENVISGVRAGLAVLDTPVFILDKNASVLFQNGAAERAFGQLPAGAHISARLRSPGLLDVIRETITTGQPNQVEHSERFPSERVFIVRIARADVGEGASPPFYILSFRDVSELRRIDRMRSDFVANASHELRTPLASLRGFIETMQGPARNDPKAQERFLAIMLDQATRMSRLVDDLMSLSRLELRANIAPDQKVDLVPVIGHVRDALLPLADELDVTITLHLPDRPAEVQGDRDELVQVFQNLVENACKYGQEGKVVDVWLRAEPGKPVEVSIIDKGPGIPAEHVPRLTERFYRVSVADSRSKKGTGLGLAIVKHILTRHRARLIIKSEMGSGTDFTVRF

SEQ ID NO: 9110 - protein, 559 aa, uncultured alpha proteobacterium EBAC2C11
MAAKEVKFGAEARTKMLEGVDILANAVKVTLGPKGRNVVLEKSFGAPRITKDGVTVAKDIELKDKFQNMGAQMVREVASKANDVAGDGTTTATVMAQSIAQEGAKAVASGMNPMDLKRGIDMAVDSVVKSLEAKSKKISTSDEVAQVGTISANGEEEIGKMIAEAMERVGNEGVITVEEAKSLDTELDVVEGMQFDRGYLSPYFVTDAEKMRATLEEPYILLHEKKLSNLQDMLPILEKVVQSGRPLLIIAEDIEGEALATLVVNRLRGGLKVAAVKAPGFGDRRKAMLEDIAILTNGTVVSEEVGISLDGLTLDMLGSAKRVEITKDESTIVDGSGAKKEIEARCNQIRAQAEESTSDYDREKLQERLAKLAGGVAVIKVGGATEVEVKERKDRVDDAMHATRAAVEEGIVPGGGVSLVKAIPNLSKLKPANRDQEVGIEIVTRALQAPARYIAQNAGAEGSVIVGKLIEGKDDNVGYDATSNDFTDMIKAGVIDPTKVVRSALQNAASVAGLLVTTEAMVAEKPEPKESAPGGGMPDMGGMGGMGPWGGMGGMGGMM

SEQ ID NO: 9111 - protein, 211 aa, Photobacterium profundum SS9
MSPNKHNLIAPETALIGRATSITPSLPHAVNGTILNDEKPSNYSEIIIGMGCFWGAERLFWNLPGIYSTAVGYSGGFTPNPTYEEVCSGKTGHSEVVRIIYDPLIISLEQILTLFWESHNPTQGMQQGNDIGTQYRSVIYTTTPNQLTYAQHSKQCYQQSLEQQQLESPITTEIEPAGTFYFAEDYHQQYLVKNPNGYCGLGGTGVCFIPL

SEQ ID NO: 9112 - protein, 310 aa, Triticum aestivum
MAFLNMEQHTWAFTFGILGNIISLMVFLSPLPTFYRVYRKKSTEGFQSTPYLVTLFSCLLWMYYAFLKSGSELLLTINAVGCVIESLYIAMYLVYAPKSARLLTAKLFIGLDVGLFGLIALVTMLASHGPLRVQVVGWICVAVALGVFAAPLSIIRLVIRTKSVEFMPFSLSFFLVLSAVIWFAYGALKKDIFVAMPNVLGFLFGVAQMALYMAYRNKKPATVVLVHEEMKLPEHVKEVAGGAKPQGGAPTEGRISCGAEVHPIDVLPAVADVEQAAAAADEDVIRDDQNMLRPEQPAVIKPDVAIVVQA

SEQ ID NO: 9113 - protein, 175 aa, Oryza sativa
MAPSVMASSATTVAPFQGLKSTAGMPVARRSGNSSFGNVSNGGRIRCMQVWPIEGIKKFETLSYLPPLTVEDLLKQIEYLLRSKWVPCLEFSKVGFVYRENHKSPGYYDGRYWTMWKLPMFGCTDATQVLKELEEAKKAYPDAFVRIIGFDNVRQVQLISFIAYKPPGCEESGGN

SEQ ID NO: 9114 - protein, 547 aa, Candida albicans SC5314
MSLFEKNTTPDQNLGEDQNQNQNQNHSNHSINNDGNDDKKDFISHKENYLEDSTSSEFDMVGLEANDTILHNKMKLINDAIDEIGFTPYHLKLFFLNGMGYCTDCMLTYLESSVRTFINYQFGYKFPVSNECYAGGMILGALVWGFGADLIGRRLAFNLSLLLSAIFTIMTGMMGNMASYCLFVLLSSFAAGGNLVLDTCVFLEYLPHKDQWLLTFFAFFWGIGQTIAVALAYAFLPNNSCESADYCPSHINRGWRYVFYTNGSIVLAMAILRLTVVRLKETPKFLVANNRDAEAVEVLQEIAHKYNRKCSLTLEQLLECGEIESNDDYRKHFSFGGTLSLMFQHLKILFATKKSAWSTSLLFFSWACLGIAYPLYSAFLPEYLATRGANISADTTSGVYRDLVISNVSSVGGPIIAGLLLYLLPVLGRKGVLFIGGVTTMALLFGYTAVRTRAQNVGLTSAVYCALYIYYGVMYAYTPEVMPSAARATGNCLCLFFTRISTAMVPIIAWYSDTSSAVPIWICGALVGVIGIVALALPFEPSKQRVV

SEQ ID NO: 9115 - protein, 476 aa, Azotobacter vinelandii
SQKFDVIVIGAGPGGYVAAIKSAQLGLKTALIEKYKGKEGKTALGGTCLNVGCIPSKALLDSSYKFHEAHESFKLHGISTGEVAIDVPTMIARKDQIVRNLTGGVASLIKANGVTLFEGHGKLLAGKKVEVTAADGSSQVLDTENVILASGSKPVEIPPAPVDQDVIVDSTGALDFQNVPGKLGVIGAGVIGLELGSVWARLGAEVTVLEAMDKFLPAVDEQVAKEAQKILTKQGLKILLGARVTGTEVKNKQVTVKFVDAEGEKSQAFDKLIVAVGRRPVTTDLLAADSGVTLDERGFIYVDDYCATSVPGVYAIGDVVRGAMLAHKASEEGVVVAERIAGHKAQMNYDLIPAVIYTHPEIAGVGKTEQALKAEGVAINVGVFPFAASGRAMAANDTAGFVKVIADAKTDRVLGVHVIGPSAAELVQQGAIAMEFGTSAEDLGMMVFAHPALSEALHEAALAVSGHAIHVANRKK

SEQ ID NO: 9116 - protein, 433 aa, Cucumis melo
LEEGKKEPFHYDEEINLLLSDWWHESVLKQEVGLSSSPMRWIGEPQSILINGRGQSNCSIGAKYMKNMEQCKLSGSEECAPFILFVKPNKTYRIRIISTTSLSALNFAIGNHKLLVVEADGNYVQPFLTSDIDIYSGESYSVLINTDQNPSQNYWVSLGVRGREPKTPPGLTLLNYLPNSFSKLPISPPPETPKWNDYDRSKNFTYRILAAMGSPKPPVKSTRRIFLLNTQNKMNGGYTKWAINNVSLTLPSTPYLGAIKIGINDTFDQNPPPETYPENYDIHKPPPNGNTITGNGVYRFQLGEIVDVVLQNANTLNDKHSEIHPWHLHGHDFWVLGYGEGKFSAAVDETKLNLKDPPLRNTVVIFPFGWTVLRFVADNPGVWAFHCHIEPHLHMGMGVVFAEGVDKVGRIPTHAMACGGTAKALIQNPTQKP

SEQ ID NO: 9117 - protein, 491 aa, Pseudomonas fluorescens Pf-5
MLSLSVQAATLTRDNGAAVGDNQNSQTAGATGPVLLQDVQLIQKLQRFDRERIPERVVHARGTGAHGTFTVTDNLTDLTRAKVFAAGEVTPVFVRFSAVVHGNHSPETLRDPRGFATKFYTEDGNWDLVGNNFPTFFIRDAIKFPDMVHAFKPDPRTNLDDDSRRFDFFSHVPEATRTLTELYSNSGTPASYREMDGNGVHAYKLINAKGEVHYVKFHWKSLQGLKNLDPKQVVEVQGRDYSHMTNDLVTHINKGDFPKWDLYVQVLKPEDLAKFDFDPLDATKIWPGVPERKVGQMVLNRNPANVFQETEQVAMAPANLVPGIEPSEDRLLQGRVFSYADTQMYRIGANALQLPINAPKNPVNNGNQDGAMNLGHSSTGVNYQPSRLMPREEPQTARYSQMALAGSTQQAKIQREQNFKQAGDLYRSFSKKERQDLIDSFGGSLATTDDESKHIMLSFLYKADPEYGTGVTKVAKGDLARVKALAAKLSD

SEQ ID NO: 9118 - protein, 272 aa, Xanthomonas campestris pv. campestris str. ATCC 33913
MSRAPDRIAACFDALRHSGRKALIPFITAGDPSLEATVPVMHALVRAGANIIELGVPFSDPMADGPTIQRSSERALGRGAGLAYVIEAVQEFRREDATTPVVLMGYLNPIEIHGTRRFAETAVAAGIDGVLLVDLPPEEADETRAIFTEVGLALIALASPTTGEARLDMLCSTAQGYLYYVSFSGVTGAADRLDTHAASDRLRQLRARAGAPVVAGFGIKDAASAAAMAVDADGVVVGSALVAALADASDVRSARKRAEDFLQPLRQALDAG

SEQ ID NO: 9119 - protein, 435 aa, Bradyrhizobium japonicum USDA 110 [sequence omitted]

SEQ ID NO: 9120 - protein, 558 aa, Nostoc punctiforme PCC 73102
MATFTVGDYLLLRLEQIGIKHIFGVAGDYNMEFLDYIVNHNGIELIPTCNELNASYAADGYGRLNGIAALITTFGVGELSAINGVAGAYAEHVPVVAITGAPATKIQALGSLVHHTLGTGDFSMFARMYEQVTVAQAYLTNENATTEIDGVLGICLLKKLPVYISIPMDVALTEVSAPSDSFIPPVFQSDGATLAEIVDVCVNILEKASQPVILADIGVARYHLHEQLRKLLTATGYPYATMNMGKGLLEETHPQFIGIYNGAASEESVRKRIEQADCVLTIGALMTDFNTGKFSAKLDPSQTIEVHGQYVKVKHALYNNVAMADVLSALSQRLQRRDPQTLNFKSATENLDAGFITPIEGGSSAPITQQYFWHRFAHFLQEDDIIVAETGTCLFGASIVPLPKGATFVGQVLWGAIGYSVASLLGCALAKPTAGIAASQRRSILLVGDGSFQMTAQELSTILRYNLKPIIFLINNDGYTIERDIHGERMPYNDIQPWNYHQLPKVFGGNGWGIKVSTESQLDKALQTAQQNHDQLAFIEVVMDKMDSPEVLLKMLQQ

SEQ ID NO: 9121 - protein, 350 aa, Brassica napus
MSGTEEMSKALKASTPGFCDMPSTIVRASIVQASTVYNDTPKTIEKAGEFIAQAASDGAQLVVFPEAYIGGYPRGYRFGIGVGVHNEAGRDCFRRYHASAIVVPGPEVDKLAEMARKNKVYLMMGAMEKDGYTLYCTALFFSSEGRFLGKHRKVMPTSLERCIWGYGDGSTIPVYDTPLGKLGAAICWENRMPLLRTSLYGKGIELYCAPTADGSTEWQSSMMHIALEGGCFVMSACQFCKRKDFPEHADYLFTDWYDDQHQEAIVSQGGSVIISPLGKILAGPNFESEGLVTVDLDLGDIARAKLYFDVVGHYSRPDIFNLRVNENQNKPVTFVSKSVKAADGSEPQDN

SEQ ID NO: 9122 - protein, 525 aa, Zea mays
TRPGNSAFQSGGTTLKRSSLRNNSASNVHNFSKADVVPVIVPRTSSGGELATDSRSDAADVAPVFPKVTRRVEPATDSRKESNDVELVVPRASSRMEIADLAPISSSKSGRRLESAPDSKEESADTAPVVVSNPRANVRMEIVSDSAPALSKSNRKLDSGTNSKKESADAVIVPRTNSRMEMISDSRREPSAGRISPFRIQSRYAEPRKLAHAKADSNKVDSRNKITETEDFNCQIFLPRRNGVFQTISSEEPREDVKCGPVDRVGFSNSSEPNASVRNENYVPRMRKPGDNCYIEVSRAGRARSSVSNWEGRDQPPSHEEPTTSSSTLAPTGHPYSSRGSNQASEAPTIASDEDVLSLIMERHDLFLSSTKSRLMKLQIIHQMWERNDIRGVLSAMDRMGDHAVCADMASVLMEKSETITLDLCTSILPVVTDLLESKIDRHLVVALELLVKLVRTFGPMIHSTVSSGPCVGVDIEAEQRRERCNLCFIELEKAKNKLPSLTRRKGAVANAAQELALVFQEIMS

SEQ ID NO: 9123 - protein, 433 aa, Bacillus cereus G9241
MQPSAPPHLESTETIFSSSITKLVVFICWLAILADGYDLGIYGAVLPKLLEDKSWALSPAHAGTIASYALFGMFIGAILVGTITDLIGRKWTLICCLALFSITMGLAAIAPSPELFGIWRFIGGIGLGGVIPTASALTVEYSPKKRQSFIYALMFTGYPLGIVLGAILSMFMLEGFGWRTMFGIGMIPLLLIPFIIRYLPESIQFLLSRNRQEEVDQILNRFQIEFYAKNETHQTPSNIRKKNGFLSLFSKEYIKATLLFWITYIMGMFLIYGLNTWLPQMMRQAGYPLGSSLSFLLMLNITAAIGALFAGAIADRIGAKIVISISYLMAAICIGLLTIKPSVTIIYLLIGLAGIGSVGITQILNAYVTQYFPSHIRATSLGWGLGLGRVGAIAGPILVGIIMTMQYDLVWNFYLFSFAGLLAAISVFFIPTK

SEQ ID NO: 9124 - protein, 524 aa, Escherichia coli
AAKDVKFGNDAGVKMLRGVNVLADAVKVTLGPKGRNVVLDKSFGAPTITKDGVSVAREIELEDKFENMGAQMVKEVASKANDAAGDGTTTATVLAQAIITEGLKAVAAGMNPMDLKRGIDKAVTVAVEELKALSVPCSDSKAIAQVGTISANSDETVGKLIAEAMDKVGKEGVITVEDGTGLQDELDVVEGMQFDRGYLSPYFINKPETGAVELESPFILLADKKISNIREMLPVLEAVAKAGKPLLIIAEDVEGEALATLVVNTMRGIVKVAAVKAPGFGDRRKAMLQDIATLTGGTVISEEIGMELEKATLEDLGQAKRVVINKDTTTIIDGVGEEAAIQGRVAQIRQQIEEATSDYDREKLQERVAKLAGGVAVIKVGAATEVEMKEKKARVEDALHATRAAVEEGVVAGGGVALIRVASKLADLRGQNEDQNVGIKVALRAMEAPLRQIVLNCGEEPSVVANTVKGGDGNYGYNAATEEYGNMIDMGILDPTKVTRSALQYAASVAGLMITTECMVTDLP

SEQ ID NO: 9125 - protein, 311 aa, Arabidopsis thaliana
MTQHWPDFSSQKLSPFSTPTATAVATATTTVQNPSWVDEFLDFSASRRGNHRRSISDSIAFLEAPTVSIEDHQFDRFDDEQFMSMFTDDDNLHSNPSHINNKNNNVGPTGSSSNTSTPSNSFNDDNKELPPSDHNMNNNINNNYNDEVQSQCKMEPEDGTASNNNSGDSSGNRILDPKRVKRILANRQSAQRSRVRKLQYISELERSVTSLQAEVSVLSPRVAFLDHQRLLLNVDNSALKQRIAALSQDKLFKDAHQEALKREIERLRQVYNQQSLTNVENANHLSATGAGATPAVDIKSSVETEQLLNVS

SEQ ID NO: 9126 - protein, 204 aa, Zea mays
VREDRALLNGAQKLLGIQIAIGEAVANVLSGMYGPVGQLGVGNAILIILQLFFAGIIVICLDELLQKGYGVGSGISLFIATNICESIMWKAFSPTTINTGRGAEFEGAVIALFHMLITKSNKVAALRQAFYRQNLPNVTNLLATVLIFLIVIYFQGFRVVLPVRSKNACGQQGSYPIKLFYTSNMPIILQSALVKHNKVGTGGG

SEQ ID NO: 9127 - protein, 117 aa, Brassica napus
LEAGSKPEILLAMSCLCKGNNEAFLICNGFKDAEYVSLALLGRKLALNTVIVLEQEEELDLVIDLSHKMNVRPVIGLRAKLRTKHSGHFGSTSGEKGKFGLTTTQIVRVVRKLSEAC

SEQ ID NO: 9128 - protein, 95 aa, Glycine max
  misc_feature (76)..(76): Xaa can be any naturally occurring amino acid
  unsure (1)..(95): unsure at all Xaa locations
INHGLVALVESYEMKIFEVKLIVMMSCFTALITYVADTSDVIETATLLVRNANFLYIDVVQILWDVLMDAVQMSGXDIYPNANACLVLVNTWAEL

SEQ ID NO: 9129 - protein, 316 aa, Vibrio parahaemolyticus RIMD 2210633
MSNKLEQLRKLTTVVADTGEIDAIKKYQPEDATTNPSLILKAAQIAEYAPLIDASIEYAKAQSNDKAQQVQDTCDMLAVNIGKEILKTIPGRISTEVDARLSYDMEGSVAKARQLVKMYNDAGITNDRILIKLASTWEGIRAAEILEKEGINCNLTLLFSFAQARACAEAGVFLISPFVGRIMDWYKAKEGRDFEASEDPGVLSVTKIYNYYKEYGYKTVVMGASFRNIGEILELAGCDRLTIAPALLAELEAAEGEVVEKLVDSKGAAERPAPMTHAEFLWEHNQDPMAVEKLAEGIRNFAVDQGKLEAMIEAKL

SEQ ID NO: 9130 - protein, 494 aa, GIBBERELLA ZEAE PH-1
MAENYHKEVISGLKNKSLFIQDAFINGQWVAKENKFDVFEPSTATVLGQVANCALEDFQTAIKSADVAQTKYFDSTTGASRGAMLRKWYDLVLANQEDLAKILSLENGKTYSEALGEVIYSASFISWFAEEATRSYGVTIPSSAPHTTLMTIREPVGVCGIITPWNFPAAMITRKIAPALAAGCSVVIKPPSETPYSALAFTKLAIEAGLPPATIQVLPTRDRQAATELATNPLVKKISFTGSTGVGKYLAKLAAGTLKKLSLELGGNAPFIVFEDADLDLAAEGAMFCKFRCSGQTCVCANRLYVQKSVAKEFTAKLVEKVNALKMGGGLDKTTTQGPLVNKSAIDKVKEHIADATSKGAKIATGGSTPDSPGFFHQPTVLTGVTQEMAVAKDETFGPLAPVFEFDTEEDAIRLANDTEFGLAGYFFSKDISRVMRVAHKMQVGMVGANTGKISAAEAPFGGVKESGYGKEGSLYGMAEYQNIKSITIGNLNN

SEQ ID NO: 9131 - protein, 663 aa, Vibrio parahaemolyticus RIMD 2210633
MDRKYLANAIRALSMDGVQQANSGHPGAPMGMADIAEVLWRSHLNHNPSNPEWADRDRFVLSNGHGSMLIYSLLHLSGYELSIDDLKNFRQLHSKTPGHPEYGYAPGIETTTGPLGQGITNAVGMAMAEKALAAQFNKEGHDIVDHFTYVFMGDGCLMEGISHEACSLAGTLGLGKLIAFWDDNGISIDGHVEGWFSDDTPKRFEAYGWHVIPAVDGHDADAINAAIEAAKADPRPTLICTKTIIGFGSPNKSGSHDCHGAPLGAEEIAATRKELGWEHGPFEIPQEVYAEWSAKETGAAKEAAWNEKFAAYEAAYPELAAEFKRRVNGELPAEWEEKASQIIADLQANPANIASRKASQNALEAFGALLPEFMGGSADLAPSNLTMWSGSKSLEANDFSGNYIHYGVREFGMTAIMNGIALHGGFVPYGATFLMFMEYARNAMRMAALMKIQNIQVYTHDSIGLGEDGPTHQPVEQIASLRLTPNMNTWRPCDQVESAVAWKLAIERKDAPTALIFSRQNLAQQPRSAEQVADIAKGGYILKDSEGKPELILIATGSEVELAVKAAEQLTAEGKKVRVVSMPSTDAFDKQDADYREAVLPSDVTARIAIEAGIADFWYKYVGFDGRIIGMTTFGESAPADQLFEMFGFTVENVVNTAKELLA

SEQ ID NO: 9132 - protein, 390 aa, Deinococcus radiodurans R1
MMFEDTHDEHVLLTPGPTPIHPRAQKALIRSMLGHMDPEVFALNSEIQRDLREMYGTEPEGFTALLAGTGSLGMEAGFANLVEAGDEVLVCANGSFGRRMAEMAARYGAKVRLVTAPLGEAIKPADVAAHLDDDISMVAVVHGETSTGVLNPVPEIAELVRGSGALLTVDAVTTAGMEPFHMQQWGVDYAYTGAQKCLSAPPGLAPVAISERAFSRFAARRTQTPLWYCDFEGLRDYWVNHTYHHTVPVNLHFAFHAALRAALEEGLEARQARVRLMGRVIERTLAPLGFSHYVRRPEDRLPTVLALRLPEGFDDAGLRQALRQREISVTGGLGPTAGVIWRLGLMGESARPGPYHRLMTELEDLLGAPGLLDRYEAVLAEEQRGELALA

SEQ ID NO: 9133 - protein, 517 aa, Coriolopsis gallica
MLHTRTRLGNVLALLSLLGTAWGAIGPKTDLHIVNKVIAPDGFPRDTILAGGTFPGPLITGKTGDRFLIDVYDDLTNTTMLTPTSIHWHGLFQHTTNWADGPAFVTQCPISSGHNFLYNFRVPDQSGTYWYHSHFGLQYCDGLRGPIVVYDPHDPQKHLYDVDDDSTVITLSDWYHVAAASVPVPPQSDSTLINGLGRWGGDPTSELAVITVEHGKRYRFRLASLSCDPFFTFSIDGHDMTIIEADGVNTQPLKVDQLDIFAAQRYSFVLEANQPKGNYWMRANPNHANFVGFENGINSAILRYKGAPVAEPNTTQTPSKKPLLETNLHPLTKQAVPGKPHPGGADVNINLELGVDVNAGLFLVNGSPFIPPDIPVLLQILSGNYSAQSLLPPGVVYTLPPNQSVELSIPGGVLGGPHPFHLHGHAFSVVRSAGSSVYNYKNPVQRDTVSIGDSTDNVTIRFFTDNPGPWFLHCHIDFHLNAGLAVVFAEDPKDTAFVNPVPSSWKELCPTYYAENP

SEQ ID NO: 9134 - protein, 232 aa, Parachlamydia sp. UWE25
MNLAWLLAEFIGTFTLIFIGVGAICLNEMNPGSVGLVGIALAHGLAIAVMVSNVGHISGGKLNPAVSIGVLIGGRSDWKTTVAEIFAQLAGAVFAALCLKIIFPTDVTEVTKLGTPVLADGVSMGIGIMAEAILTFLLVFTVYAAAVDPKGAFKSIAGFTIGGVIIFDILVGGGLTGAAMNPARAFGPALVSGEWIDQIVYWIGPILGGLLAGLLYSKLMLKDLTTLSTPSV

SEQ ID NO: 9135 - protein, 422 aa, Brassica napus
  misc_feature (39)..(39): Xaa can be any naturally occurring amino acid
  misc_feature (47)..(47): Xaa can be any naturally occurring amino acid
  misc_feature (87)..(87): Xaa can be any naturally occurring amino acid
  misc_feature (99)..(99): Xaa can be any naturally occurring amino acid
  misc_feature (107)..(107): Xaa can be any naturally occurring amino acid
  misc_feature (140)..(140): Xaa can be any naturally occurring amino acid
  unsure (1)..(422): unsure at all Xaa locations
MREILHIQGGQCGNHIGAKFWEVVCAEHGIDRTGRYTGXDSDLQLEXRINVYYNEASCGRFVPRAVLMDLEPGNHGTVSRSGPYGSXFRPDNFPYSGQXSGAGNNWXPKGHYTEGAELIDSVLDVVRKEAENCDCLQGFXQVCHSLWPSPKVSDTVVEPYNATLSVHQLVENADECMVLDNEALYDICFRTLKLSNPSFGDLNHLISATMSGVTCCLRFPGQLNSDLRKLAVNLIPFPRLHFFMVGFAPLTSRGSQQYSALSVPELTQQMWDAKNMMCAADPRHGRYLTASAVFRGKLSTKEVDEQMMNIQNKNSSYFVEWIPNNVKSSVCDIAPKGLKMASTFIGNSTSIQEMFRRVSEQFTAMFRRKAFLHWYTGEGMDEMEFTEAESNMNDLVAEYQQYQDATAGEEEYEDEEEEYDEA

SEQ ID NO: 9136 - protein, 133 aa, Magnaporthe grisea 70-15
MVNPPKEGEPSYELYKKEYDGIFEGLKARATALHKAFAEMEGVECDTPQGSMYLFPTINVPQKAAAEAEKEGRTPDEFYCMRLLEATGVCVVPGSGFGQKPGTLHLRTTFLAPGTEWVGSIVKFHKEFMDKYR

SEQ ID NO: 9137 - protein, 101 aa, Saccharum officinarum
ANRIREKYPDRIPVIVEKAERSDIPDIDKKKYLVPADLTVGQFVYVVRKRIKLSAEKAIFIFVKNTLPPTAALMSAIYEENKDEDGFLYMTYSGENTFGLL

SEQ ID NO: 9138 - protein, 687 aa, Cucumis melo
MAKVANQPLFPLPFLVFFVLSIIFGFGITLSKAVSQTRYYKFEVDYMFWSPDCVENIVLGINGTFPGPPIRANVNDTVVVEVINNLSTEGVVIHWHGILQRGTPWADGTASISQCPINPGENFTYEFKVDKPGTYFYHGHFGMQRAAGLYGSLIVDLEEGKKEPFQYDEEINLLLSDWWHTSIQEQEVGLKSNPMRWIGELQVILINGTGQFNCTSLDKYNTSSEHCEWKDQCAPFVLKVEPNKTYRIRIASTTSLSALNFAIANHTMLVVEADGNYVDPFETSDIDIYSGESYSVLVTTNQATTQNYWASIGVRGRKPKTSPALLLFNYLPNSVAKLPISPPPETPKWDDYDRSKSFTNRVLASAMNTTKPPPIFTRRISLLNTQNRINGKFTKWAINNISLTLPSTPYLGAIKFGLNSTFNQTPPPETFPKNYNIKIPPPNPNTNTGNGVYRFRSGEIVDVILQNANALTNNTSEIHPWHLHGHDFWVLGFGDFKFSAADETKLNLKNPPLKNTVVIFPFGWTAIRFVADNPGVWIFHCHIEPHLDMGMGVIFAEAVERVREIPPYALACGRTATHNVVPIIPQPKPPRGPGPVIPYFMLWVIGLVIIVCGIGLFGVCLYRIGLRRGYTFNNLSWRPYLGLSDSQSNQIEFSDLSRSNLTQEESNPTQEESNPTQEESNPILEEP

SEQ ID NO: 9139 - protein, 357 aa, Sulfolobus tokodaii str. 7
MVSAIVLAGGYATRLRPLSLTKPKALLPILDKPLLDYILDSLEIAGINEVYLSLRVMADKILSHIEGENRKVIPVIEKERLGDAGPLKLISQRYNLSDDVLVIYGDIYNELDIKSLLKFHEKEGCDATIVGKPVEDPRRYGVLITEGERLVQIIEKPKNPVSNLINAGIYVFKKKLLEKIDGQSIAKNFLPKLLSDNTCIAVYKYDGLWMDIGVPSDYIRINLQLLSLKYPKGYINEEAKVSEKVNLIPPYYISSGVNISEDSFIFNSIIGKNTSIGNGVYIDQSILMEDVKVDSFSYIRDSILGDKDNLGKWVRLDSVILGDEVVIYDGVFVNRDTIILPYKEVNESVYDKGKIIL

SEQ ID NO: 9140 - protein, 812 aa, Oryza sativa
  misc_feature (16)..(16): Xaa can be any naturally occurring amino acid
  misc_feature (336)..(336): Xaa can be any naturally occurring amino acid
  misc_feature (440)..(440): Xaa can be any naturally occurring amino acid
  unsure (1)..(812): unsure at all Xaa locations
MAAKLARLHSLRERLXATFSSHPNELIALFSRYVNQGKGMLQRHQLLAEFDALIEADKEKYAPFEDILRAAQEAIVLPPWVALAIRPRPGVWDYIRVNVSELAVEELSVSEYLAFKEQLVDGHTNSNFVLELDFEPFNASFPRPSMSKSIGNGVQFLNRHLSSKLFQDKESLYPLLNFLKAHNHKGTTMMPNDRIQSLRGLQSSLRKAEEYLMGIPQDTPYSEFNHRFQELGLEKGWGDCAKRVLDTIHLLLDLLEAPDPANLEKFLGTIPMMFNVVILSPHGYFAQSNVLGYPDTGGQVVYILDQVRALENEMLLRIKQQGLDITPKILIVCSRXTRLLPDAVGTTCGQRVEKVIGTEHTDILRVPFRSENGILRKWISRFDVWPFLETYTEDVANEIMREMQAKPDLIIGNYSDGNLVATLLAHKLGVTQCTIAHALXKTKYPNSDIYLDKFDSQYHFSCQFTADLIAMNHTDFIITSTFQEIAGSKDTVGQYESHIAFTLPGLYRVVHGIDVFDPKFNIVSPGADMSVYFPYTEADKRLTAFHPEIEELLYSEVENDEHKFVLKDKNKPIIFSMARLDRVKNMTGLVEMYGKNAHLRDLANLVIVCGDHGNQSKDREEQAEFKKMYGLIDQYKLKGHIRWISAQMNRVRNGELYRYICDTKGVFVQPAFYEAFGLTVIEAMTCGLPTIATCHGGPAEIIVDGVSGLHIDPYHSDKAADILVNFFEKCKQDSTYWDNISQGGLQRIYEKYTWKLYSERLMTLTGVYGFWKYVSNLERRETRRYIEMFYALKYRSLASAVPLAVDGESTSK

SEQ ID NO: 9141 - protein, 627 aa, Mycoplasma pulmonis UAB CTIP
MYKFKFADIGEGLHEGKVAEIYVKLGDTVKEGDSLFSVETDKITSDIPSPTGGVINKILFELGGTVHVGEEIFWIDDGSGPASDSPEPAAAEAKPAAEEHKSSAGDLFGSRRRKPGGSAAAAAPSPAPAPVAAPAPAAVAAPSVAGKVAGKAYTGAVEAEYDVIVIGAGPGGYLAAEEAGKYGLKTLIIEKQYWGGVCLNVGCIPTKALLHATEELYNLEHSHEHNGIVADFKALKIDRQKTWINIQKNKKSVVDKIVGGVKFLMKAAKATSIEGEAKFVGSHELEVNGKVYRGKNIIIATGSLDRKLNLPGFEQAYKDEVVLSSDKLINLDSHLPETLGIIGAGVIGVEFAEVFAMAGTKVTIIQNTDAILANAPLAKEIKTELTNHLKKYGVEFKFNASTTKIEKNQLFFEVGGKEESMKFDKILAAVGRIPTPLNAGEVGIEIGQRNEIIVDDKLMTNVENVYAIGDVTGKNMLAHVAYRHAIRVVESIVGEEEVYPKQEIPGCIYTKPEIAFVGLTEQQAKEAGYDVVTSKYSFSTLGKALASSEGNGFVQLVVDKKYGRILGCHIIGKNSTDYIAEIVLAMDNEISVFEIAATIHPHPTYGEIVWEAARALSLKLNIEKHKK

SEQ ID NO: 9142 - protein, 459 aa, Wolbachia endosymbiont of Drosophila melanogaster
MTDYDLIVIGGGPGGYKCAIAAAKLGLKVACIDKNSIFGGTCLRVGCIPSKALLHSSYQYAHTKNDLSKLGIKIKDASFDLKEMLGYKDARVQELGKGIEYLFNLHKITKINGLASFDQGNLEVSVEGKVLKTKNIVIATGSDVISLPGINIDEKSIISSTGALSLTEVPKKLVVIGAGAIGLEMSSVWRRLGSEVTVVEFFDRIAAAMDGELSKSLLSSLQKQGIKFLLSTKVEEIKQSSNSLSVKVCSVKDNQTNTIEADKVLVAAGRKPCTENLGIDEKIEKDNRGFVQVNNRYETNVKGIFAIGDVIGGAMLAHKAEEEGVAVAEIIAGQSPHVDYGIIPSVIYTHPAVSSIGKTEEELKNAGRKYKVGKCQFAANGRAKITDDAEGFVKVLTCSRADTILGVHIIGAYADTLINEAAVAMAYSAAAEDIYRICHSHPDINEAFRDACIDAFFKK

SEQ ID NO: 9143 - protein, 368 aa, Mycoplasma pulmonis UAB CTIP
MSKKFKYVDPKKVMDSSDQLIRVLDIDGKLIDSKYKTSLSNEKIIEAYTWMVRSRQQDTYMTQLQRQGRMLTFAPNFGEEALQVATSLAMEKDDWFLPAFRSNATMLHLGVPMINQMVYWNGNERGSKIPEGVNVLPVNVPIATQYSHAAGVAYGMKLLGKKNVAVTIIGNGGTAEGEFYEAMNVSSIHNWPVVFTVNNNQWSISTPEHLETKATIAAKAHAVGIPGVRVDGNDLLASYEVMKEAVEWAKEGNGPVLVEFYTWRQGVHTSSDNPRIYRTEEMEKEKEKWEPMHRIKNYMIEKGFWTEEQDQKLWEDSLTLVKETYEESMKMHDIPVDEVFDYTYEKLPPYLERQKAEAKEWFEKKGGK

SEQ ID NO: 9144 - protein, 581 aa, Oryza sativa
MAGRSELVVSFGEMLIDFVPTVAGVSLAEAPAFVKAPGGAPANVAIAVARLGGGAAFVGKLGDDEFGRMLAAILRDNGVDDGGVVFDAGARTALAFVTLRADGEREFMFYRNPSADMLLTHAELNVELIKRAAVFHYGSISLIAEPCRSAHLRAMEIAKEAGALLSYDPNLREALWPSREEARTKILSIWDQADIVKVSEVELEFLTGIDSVEDDVVMKLWRPTMKLLLVTLGDQGCKYYARDQKKLEEAIKFANACGAITATKKGAIPSLPTEVEVLKLMEMLEAWKYCDAVMLLLLYMMQKLPWCLVWYEVDATSHVFGWKPEAAWPREPARVPEPRHSIRRASRCKPRARAVVADRPVAAAVSLCTRLSPVSPLRSKPPRRHRRRHRPAPPLRAQAAKGQRQHPSSLCRVAPAHLLLFPESAKGQAPFLPLLFPFFLLAGVILPVAALAATAERQLAPLTAQVGSQTDIAAHLNPSLPFPSSSIRLRAIAAAPVLCLASAVLRRAPGEPVRSRTRKGTSAALSSSSSPARGRRDYSRAVGLSSQRPVPHGATSAPAQPRSGRADPGQSLPVRAFHREP

SEQ ID NO: 9145 - protein, 414 aa, Dechloromonas aromatica RCB
MKHVKKSAKLANVCYDIRGPVLQKAKQMEEEGHKIIKLNIGNLAAFGFDSPEEIQQDMIRNLPNAAGYTDSKGIFAARKAIMHYTQQKGIKGVTLEDIYVGNGVSELIVMAMNALLDAGDEVLVPAPDYPLWTAAISLSGGTPKHYLCDESKGWLPDLDDIRSKINAHTKAIVLINPNNPTGALYPDDLLYEIIDIARQHHLTIYADEVYDKVLYDDVKHTSIASLAEDVLMITFNGLSKNYRSCGYRAGWMVVSGDKRHAKDYIEGLDMLASMRLCANAPGQHGIQTALGGYQSINDLIKDGGRLRRQRDIAHELITAIPGVTCVKPKAALYMFPRLDPKIYPIKNDQQFISELLQEEKVLLVQGTGFNWPHPDHFRLVFLPHEDDLREAVARIARFLENYRKRHNTNQLIKD

SEQ ID NO: 9146 - protein, 337 aa, Arabidopsis thaliana
  misc_feature (105)..(105): Xaa can be any naturally occurring amino acid
  misc_feature (119)..(119): Xaa can be any naturally occurring amino acid
  misc_feature (319)..(319): Xaa can be any naturally occurring amino acid
  unsure (1)..(337): unsure at all Xaa locations
MAKEPVRVLVTGAAGQIGYALVPMIARGIMLGADQPVILHMLDIPFAAEALNGVKMELVDAAFPLLKGVVATTDAVEACTGVNVAVMVGGFPRKEGMERKDVMSXKNVSIYKSQASVLXELACLHQTCKGSGSLQIPANTNALILKEFAPSIPEKNITCLTRLDHNRALGQVSERLSVPVSDVKNVIIWGNHSSTQYPDVNHATVKTSVGEKPVRELVKNDEWLNGEFISTVQQRGAAIIKARKLSSALSAASSACDHIRDWVVGTPEGRFVSMGVYSDGSYNVPAGLIYSFPVTCRNGEWTMVQGLPIDDASRKKHCXLTAEELKEEKDLAYSCLS

SEQ ID NO: 9147 - protein, 216 aa, Chlorobium tepidum TLS
MSEYFSNIKTSVTTIATGMGITLKHFFNAVKRKGDAGIDDADYFRQVDGLCTLQYPKEAIPTPPHGRYRLYCNINDCIGCKQCERACPVECITIETIKTTSDDLEACGKTSGGQQKRMWVPVFDIDLAKCMTCGICQSVCPTDCLYHTPVADFSEFDVSNMMYHFGNLSKIEAEAKRKKLAEQQAQAAKEKAAAGGAPAPKPAPKAAPQPNPGDAR

SEQ ID NO: 9148 - protein, 479 aa, Erwinia carotovora subsp. atroseptica SCRI1043
MSTTQKRMYINGEFVENRSGKWIDVVNPATEQVISQVPEGSADDAKRAIDAAEAAQPSWEALPAVERGVWLHKIAAGIREREAELTDTIIAEGGKTHGLAQTEVLFTADYLDYMAEWARRYEGEIIQSDRPNENIFVFRKAIGVTTGILPWNFPFFLIARKAAPALITGNTIVIKPSEITPNNAVIFAEIIHKIGLPKGVINFVTGYGPTVGQELAGNPKVGMVSLTGSVAAGIATMTAAAQNVTKVSLELGGKAPAIVMDDADLDLAVKAIVSSRVINSGQVCNCAERVYVQKGIYDEFIIRIKAAMEQVTFGNTAEKKTLDMGPLISAAALQRVEDKVAKAVSQGAKVLLGGKSESGTGYFYPPTLLVNVTQEMPIMHEEVFGPVLPVATFDTLEDAIAMANDSEYGLTSSIYTQNINTAMKALKGLKFGETYINRENFEAMQGFHAGWRKSGVGGADGKHGLQEYLQTHVAYLQFH

SEQ ID NO: 9149 - protein, 325 aa, Geobacter sulfurreducens PCA
MATTLRAILPDSELLKMHEQMVLSREFEESCAEQYTKGHITGFLHLYSGQEAVAVGATAALRKDDYILSAYREHAQAIVRGAEPRRVMAELFGKATGMCKGKGGSMHLFDPSLAFMGGYAIVGGQFPIAVGLAFASKYRKEGRISACFFGDGAVNQGTFHESLNWARLWELPVLFICENNFYGIGTAVSRASALSDIHKRTCGYDIPSVRVDGMDVMAVHEAVKWGAEWVREHSRPYLIEAMTYRFRGHSMADPGKYRSAAEVELWKSRDPIPNFEKRLVEEGIATEAELAAVLEKCRGVVADAVAFAEESPWPEDDEVYSDIYV

SEQ ID NO: 9150 - protein, 231 aa, Arabidopsis thaliana
  misc_feature (21)..(21): Xaa can be any naturally occurring amino acid
  misc_feature (43)..(43): Xaa can be any naturally occurring amino acid
  misc_feature (54)..(54): Xaa can be any naturally occurring amino acid
  misc_feature (83)..(83): Xaa can be any naturally occurring amino acid
  misc_feature (125)..(125): Xaa can be any naturally occurring amino acid
  misc_feature (167)..(167): Xaa can be any naturally occurring amino acid
  unsure (1)..(231): unsure at all Xaa locations
NAAASQFIMGQSIPITLWLSXAPVVLGVAMASLTELSFNWLGXISAMISNISFXYRSIYLQESHGSSFFPSTFFTLLNHVKVXFGNCIVFLQTDMDSTNVYAYISIIALFVCIPPAIIVEGPKLXLNHGFADAIAKVGMTKFISDLFWVGMFYHLYNQLATNTLERXVAPLTHPVGNVLKRVFVIGFSIVIFGNKISTQTGIGTGIAIAGVAMYSIIKAKIEEEKRQGKKA

SEQ ID NO: 9151 - protein, 324 aa, Alkaliphilus metalliredigenes QYMF
MSKTNNMKKESIKKLIEKGKKRGIITYAEIVHALEDIELDKEQIEEIYEHFATLGIDIVGDKEADDVDDVDEAELEDEEEVTVAENIEADINMLKGVIIDDPVRMYLKEIGKVPLLTGPEEIDLATRMEAGDELAKKKLVEANLRLVVSIAKRYVGRGMLFLDLIQEGNLGLIKAVEKFDYRKGYKFSTYATWWIRQAITRAIADQARTIRIPVHMVETINKLIRVSRQLLQEFGREPKPEEIAKEMDLPEEKVREILKIAQEPVSLETPIGEEEDSHLGDFIPDDDAPAPAEAAAFSLLKEQLIEVLDTLTPREQKYYVFALV

SEQ ID NO: 9152 - protein, 474 aa, Bifidobacterium longum NCC2705
MATKETTATKQTAESSEETETKKKASSTTTARKTSAKKSKSAEPSKKTTRKSAAKKTAKKAKDDELVKDEDTQVDDELDDDAEVNDDDLDVDDLDEDLDDVDEDDADDEDLDEDDADDDDVEDDEDEEEAKSKAPEQPKEKGAYVVSDTDDEEENIIPSGNPKRRVIAAGATADPVKDYLKQIGRVSLLNAEQEVDLSERIEAGLYAQHLLDTESEGMEFKRKRELKWAAADGKKAKDHLLEANLRLVVSLAKRYTGRGMLFLDLIQEGNLGLIRAVEKFDWKKGFKFSTYATWWIRQAITRAMADQARTIRVPVHMVEVINKLSRVQRQMLQDLGREPTPDELARELDMPVEKVQEVQKYGREPISLHTPLGEDGDSEFGDLIEDTDAIAPSDAVAFSLLQEQFKQVLETLSPREAGVIKMRYGLEDGQPKTLDDIGRVYGVTRERIRQIESKTMSKLRHPSRSQTLRDFLDQ

SEQ ID NO: 9153 - protein, 352 aa, Xanthomonas campestris pv. campestris str. ATCC 33913
MSDTARPKVWVSQPLFDDVVEQLGAHFELVTTAQVTAYSSADLAARLAPLDGALVTLNERIGAAEIAAAPQLRAIANVGVGYNNLDIDALSAAGILASNTPDVLSETTADLGFALLMATARRVTEAERWLRDGQWGQWSFKTMLGADIHGSTLGILGMGRIGQGIARRGAHGFGMRVLYHNRSQLPAETEQAVGAQYVGLDTLLAQSDHLVLVLPYTQASHHIIDAAALAKMRPTATLVNIARGGIVDEIALADALANGRLAGAGLDVYEGEPRVRPELLAQHNVVLTPHIGSASLATRRAMVQLAVDNLIAALGVGANAGHPPSALNADAVAAAKRGGATVGATKTAATKR

SEQ ID NO: 9154 - protein, 579 aa, Thiobacillus denitrificans ATCC 25259
MSAPTSRHLYGRLLGYVKPHWRMFALSIVGLILTAATEPMLPALFKPLLDEGFVAKDQDFIRWVPLLLLGLFVLRGVASFISTYSMAWVGSRLVMDLRAAMFDKLMALPTRYFDQNPSGQLIAQLAFNVTQVTQSATSSLTTLVRDTVTVLGLLGYLVWLNWRLTLIVFALVPLTLWVVRVASKRLRGLSRKAQENIGDLTQVVDEAVGGHRVVKLYGGETYEQARFHRAANLARQFEMKRVAANAVYEPVIQFIAAIALAIIVFIAAGQASANTTTVGGFVAFFMAMLLLFAPLKRLTAVNDQLQRGLAASETIFALLDQDAERDTGTREPAHIEGRLAFRDVGLTYPGKQTPALARISLDIAPGETVALVGASGSGKTTLANLVPRFYDPDAGRIELDGVDIRDVKLQSLRGHIALVSQDVVLFNDTLAHNIAYGSKREASPDEIRAACVAAHAWDFIQAMPDGLDTLIGENGMRLSGGQRQRIAIARAILKNAPILILDEATSALDSESERHVQAALETLMQNRTTLVIAHRLSTIERANRIVVLEGGRIVETGAHADLLAKQGRYAQLHALQFSQ

SEQ ID NO: 9155 - protein, 320 aa, Bifidobacterium longum NCC2705
MPEPVRERLRALKDAPGSVIVVGSMNADYTVTTKRLPKPGETVNGGAMKVLPGGKGANQASAAARLGVNVQLLGAVGEDSNADFLLSKLDEAGVDTADILHVEGPSGTTVITVSAEGENTIVYSPGSNAKASAGYVQSHRTTIAECAVLGLCLESPIATVIAAAQTAHDAGVTVLLNDSPFMDELPHELVEATDILLVNQHEVAQLLGLPDDDVESLDWYEVAERFTDYGFDRAIVTLGASGSVVIENGRWHRVSAAQVNAVDTTGCGDSFMGTVLAGLAAGHTLLQSAQIGSYVSAYAATKLGAQSAYGTAEEVIAYFS

SEQ ID NO: 9156 - protein, 541 aa, Bacillus cereus G9241
MNKTWWKEAVAYQIYPRSFMDSNGDGIGDLQGIIAKLDYLKDLGIDVIWICPMYKSPNDDNGYDISDYQDIMDEFGTMEDFDALLDEVHKRDMKLIIDLVINHTSDEHPWFIESRSSKDNPKRDWYIWHDGKDGAEPNNWESIFNGSAWEYDEVTGQYYLHLFSRKQPDLNWENKEVREVLYDTVNWWLDKGIDGFRVDAISHIKKEDGFKDMPNPKKLKYVPSFDKHMNVDGIQPLLEELKENTFSKYDIMTVGEANGVKIEDAELWVGEEQGKFNMVFQFEHLSLWDAEKKKDLDVVGLKKVLTKWQKGLENKGWNALYIENHDKPRIVSTWGDDKQYWRESATALGAMYFFMHGTPFIYQGQEIGMTNVQLPNVEDYDDVATKNLYREKIAEGVSHQDMMEIIWASCRDNSRTPMQWNDEMNAGFTTGAPWFSMNQNYKEINVEKQKNEGNSIFNFYKKMIALKKEHDVLNYGTYDLLLEDNPQIYAYTRTLNDEKIVVISNISKEEAVYNEGSFALERKRLLLNKKEVAEHEQVTSI

SEQ ID NO: 9157 - protein, 377 aa, Thiobacillus denitrificans ATCC 25259
MTASFLPPKRILMGPGPSDVPQRVLDAMARPTIGHLDPAFVDLMEQIKAMLRMAFRTENALTFPVSAPGSAGMEMCFVNLVEPGDKVIVCRNGVFGGRMLENVKRTGGVPVVVDDAWGAAVDPQKVRDAFKSNPDAKVLAFVHAETSTGAQSDAAALAKIAQEAGALTILDCVTSLGGTPVLLDQWRIDAAYSGSQKCLSCTPGLSPVSFSERAIEKIKARKTPVQSWFLDLNLVLGYWQSAGKRTYHHTAPINPMYGLHESLVMLEEEGLENSWARHRAMHEKLKAGLEGLGLRYVVEESARLPQLNSIYVPEGVDEAAIRSRLLSEFNLEIGAGLGDMAGKIWRIGLMGYSAKQANIDLCLQALSACLEKSAAGA

SEQ ID NO: 9158 - protein, 531 aa, Yarrowia lipolytica CLIB122
MAEKNDFLVEAGLNGSSDVKHEDSHSLSSTDVDSTSMDMIADDKVLYEQMRIINNTIDEIGLTAYHWKLFCLNGMGYATDSTLTFIQSLTLAPTQKEFDFEFPGPTMALYGGMLLGAIIWGFSADIIGRKFAFNSSLILSAVFAMIAAGMPNLAGYCVLVAMSAAAAGGNLVLDTTVFLEFLPSSQQWLLTLLAAWWGVGQLIAVLVIWPFMANYQCESKDYCPKHINMGWRYSWITLGGMVLILGILRITVIRLIETPKFNLCEGNVEQVVKDLHKIANAGGKTISLTVEQLEACGKLDPAQLRKNQKWKWVKDLGTNVKLLFANRKLAQSTTILWISWTVLGIAYPLYSSFLPAYLSSRGAQTGGGTIDDTYRAMSISNTFSIFGPVLAAILLFVPKIPLWGRFYIPAPGRRGAMCIGALLTMTFFFAYTTVKTEVQNVAFSSVTSLTIYTYYGTLYAFTPEVMPSRARATGNGIAIAFTRLAGIMSPLIAYYGDTSSSIPIYVCAACYGALGLGCFLYPFEPMVNRAM

SEQ ID NO: 9159 - protein, 296 aa, uncultured bacterium
MSRTRNVLAIVMAGGEGSRLHPLTDERCKPAVPFNGKHRIVDFVLSNLVNSEIYSIYLLVQYKSQSLIEHIRSSWTMTRFIPQHFVTVVPPQMRNGPEWFQGTADSVYQNIHLIESFQPDIVAVFGADHIYRMDVRQMVDFHRASEAHVSVATLPVPLSQCNQFGIVEVDAHHRIANFVEKPKNTRPMPGSSTHALASMGNYLFNADVLLDALKKAHATGHSDFGRDILPTMLQSHRLMAYDFTQNEIPGTASYEEHAYWRDVGTIDAYFDAHFDTLGATPRFRMTNRDWPIYASP

SEQ ID NO: 9160 - protein, 459 aa, Emericella nidulans
MSNLPVEPEFEQAYKELASTLENSTLFEQHPEYRRALQVVSVPERVIQFRVVWENDKGEVQINRGYRVQFNSALGPYKGGLRFHPSVNLSILKFLGFEQIFKNALTGLNMGGGKGGSDFDPKGKSDSEIRRFCTAFMTELCKHIGADTDLPAGDIGVTGREVGFLFGQYRRIRNQWEGVLTGKGGSWGGSLIRPEATGYGVVYYVQHMIKHVTGGKESFAGKRVAISGSGNVAQYAALKVIELGGSVVSLSDSKGSLIVKDESASFTPEEIALIADLKVARKQLSELATSSAFAGKFTYIPDARPWTNIPGKFEVALPSATQNEVSGEEAEHLIKSGVRYIAEGSNMGCTQAAIDIFEAHRNANPGDAIWYAPGKAANAGGVAVSGLEMAQNSARLSWTSEEVDARLKGIMEDCFKNGLETAQKFATPAKGVLPSLVTGSNIAGFTKVAEAMKDQGDWW

SEQ ID NO: 9161 - protein, 365 aa, Yarrowia lipolytica CLIB122
MSQTPLPCRYKTAKTLGQGTYSVVKEAMHIETGQYYAAKVINKKLMSGREHMVRNEIVVLKRVSQGHKNILTLVDYFETTNNLYLVTDLARGGELFERICSKGAYYESDAVEIVKNTLSGVAYLHSHGIVHRDLKPENLLFRTAAEDSDLLIADFGLSRIIDEERFRTLKTTCGTPGYMAPEIFTKAGHGKPVDMWALGVITYFLLCGYTPFDRDSSAEEMQAILAGDYAFEPEEYWQDVSEEARDFVNKCLCVDSDKRITATEAQEHPFLTRDLSKVAENETNLLPHVKSNISLRRLTGAMSGTSLSEQNKAISRLKESESMDGAYCFSPENNKPGVTPTGSVGVKSQRAELAELGLKPLTKMQ

SEQ ID NO: 9162 - protein, 124 aa, Solanum tuberosum
GCITTKELGTVMRSLGQNPTEAELQDMINEVDADGNGTIDFPEFLNLMARKIKDTDFEEELKEAFRVFDKDRNGFISAAELPHVMTNLGEKLTDEEVDEIIREADVDCDGQINYDEFVKVMMAK

SEQ ID NO: 9163 - protein, 601 aa, Bacteroides fragilis NCTC 9343
MTYHHLSVLVHRQAEKYGDKTALKYRDYEKAQWIPISWNEFSQTVRQAANAMVELGVQEEENIGIFSQNKPECLFTDFAAFANRAVTIPLYATSSPAQAQYIINDAQIRFLFVGEQFQYDAAFSVFGFCPSLVQLIIFDPAVVKDPRDMSSIYYDEFLAKGKDLPHNEVVEERTARASAEDLANILYTSGTTGEPKGVMLHHSCYLEAFRIHDIRLVDMTDKDVSMNFLPLTHVFEKAWTYLCVHKGVQVCINLRPADIQTTIKEIRPTLMCSVPRFWEKVYAGVQEKIAETTGIKKMLMLDAIKVGRIHNLDYLRVGKTPPRMIQLKYKFYEKTIYALLKKTIGIENGNFFPTAGAAVPDEICEFVHSVGIDMLVGYGLTESTATVSCTSKTGYDIGSVGQVMPEVEVKIGEDNEILLRGKTITKGYYKKAEATAAAIDEEGWFHTGDAGYFKNGQLYLTERIKDLFKTSNGKYIAPQALETKLVIDRYIDQIAIIADQRKFVSALIVPVYGFVKQYAKEKGIEYKDMAELLEHPKITALFRARIDTLQQQFAHYEQIKRFTLLPEPFSMEKGELTNTLKLKRPVVARNYKEVIDKMYEE

SEQ ID NO: 9164 - protein, 529 aa, Zea mays
MFSPPFSPSPSPPSLEAFAPQLLRPVRPPTRLIPPAAMDPYKHRPSSGSNSSFWTTNSGAPVWNNNSALTVGQRGPILLEDYHLIEKLAQFDRERIPERVVHARGASAKGFFEVTHDVSHLTCADFLRAPGVQTPVIVRFSTVVHERGSPETLRDPRGFAVKFYTREGNFDLVGNNMPVFFIRDGMKFPDMVHAFKPNPKTNLQENWRIVDFFSHHPESLHMFTFLFDDVGIPLNYRHMEGFGVNTYSLINRDGKPHLVKFHWKPTCGVKCLLDNEAVTVGGTCHSHATKDLYDSIAAGNYPEWKLYIQTIDLDHEDKFDFDPLDVTKTWPEDIIPLQPVGRMVLNKNVDNFFAENEQIAFCPAISVPGIHYSDDKLLQTRIFSYADTQRHRLGPNYLMLPVNAPKCAHHNNHHDGFMNFMHRDEEVNYFPSRFDPARHAEKVPIPPRVLTGCREKCIIQKENNFKQAGERYRSFDPARQDRFIQRWVDALTDPRVTHEHRTIWISYWSQCDAALGQKLPSRLNLKPSM

SEQ ID NO: 9165 - protein, 1749 aa, Nostoc sp. PCC 7120
MQSLPQLCWPQCLESVIDLSPLTVEPEMPLSDAVSQMAKQGAAIVVVANTQILGWLSERDVVKLVALGVDLRTTTISQVMNTSIIFFRVGQFENIGAIISLLRQHQSCCLLVVDEQEQLMGTITSESIYQALGAVTELNSQEELETSLQDFQLLKSAVVNPQDAIEASEKSLWRVANTAPILIWISATDTSCIFFNNAWLELTGSTLEQEIGKNWSERVHPEDLQGFLDAYLQAFYTHQFFSVEYRLLGLNGEYLWLLNIGVPKFTSNGDFAGYINSCIDITEHKQYFAALEESTNRLKLALEATNTIYWERNLSNDQLFFLNPVVEFGDSEGLTNSKVLAFFHPEDRERVDTAAQEAIANCSCLEIEHRLPVAGQPSKYKWFLSKSTVLTDTTGKPSRMIGISTDITDRVEAQDALEQANQELERRVAKRTLALQKANRQLLAEISDRQIAQEQLRQSQQMLQLVMDTIPHSVFWKDRNSVFLGCNRNFAIMVGYEHPENLIGKTDYDFLPDPRNADLYRQCDARIIETNNPEYHIIEPMLAPDGQQIWLETNKVPLHDPEGNVVGVLGTFEDITERKQVQEALEKSEERFRFLAESIPQQVWIAQPDGYIEYVNQRTLEYFGNEPESILGWKWQQWIHPDDRPHCLEIWQHCVATGEPLDVEFRWLRTTDQTYRWHIGRALALRDSQGNIINWFGTNTDIDDRKQTEEALAERVKLSDFRSEVDTILTQSYTLQDLMRGSADAVVKHLNAAFARIWILNKQENLLELQVSSGRYTHLDGSHRCIPVGQCKIGLIAQVGKPHLTNCVQTDPLISNPEWVKQEGMVAFAGYPLIVENETLGVIAMFSCQALSESHFQALGIAANQIAIGIKRQQTEAALRHSEERFRNLVETSSDWVWEVDENAIYTYVSPKVKDILGYEPQELLGRSPLDMMPPTEAERVIKIFTSFMAAQQPFKCLENTNVRKDGCLVVLETSGVPVFDAEGKFCGYRGMDRDITARKEVETNLYQTQQQLQVILDNSPAIIYVMDLQNRFILVNRQYEQLFHTTQSEIVGKSVYETWPNDIAHQYAFNNRQVITTGMAIEVEEVVPHEDGLHTYLSIKFPLKDRNGIVYAMCGISTDITERKLAEDSLLRFHKAMESTSDAIIFGDIFNISNYTNPSFQELYGYNLEQLQAAGGVCTVFQEPQKQQEIMARVMKGESWRGEVAMRSRDGSLLQVDLRSDAIRDSNGKIIGTVCIHTDITKRQQVEEGLKLRDRAIDASSNGIIIADASTPNRPIIYVNPAFERMTGYSSDEVIGQNFRLFQSADIDQLGLRELSTAMQAGKACTVILRNYRKDGSLLWNELNISPVYDQTGQLTHYIGIQTDITERKQAETALLVSQQRLQYLLTSSPAVIYTCKTCGDFGSIFVSDNITTITGYPAQEFTENSDFWSNHIHPEDAPAILRKLSSVLEEEIYKLEYRFLHKDGTYHWIYDQGRVVKDDTNNPVEMVGYLIDITDRKQLEEYLKVALEKEKELSELKSRFVSMTSHEFRTPLSTILSSSELLEHYRHKWTEEKQLTHLHRIQTAVKRMTEMLNDILIIGKAEAGKLEFMPRPLDVVAYCQNLVEEIQLNLNNQQVNFISEHQSMSCCMDEKLLGHILINLISNAIKYSPANSNVQVKFYCRDRCAVFEVQDWGIGIPAEDITHLFESFYRAKNVGNILGTGLGLAIVKKCVDIHQGEISVSSNPEVGTLFTVNIPLKQSINEEVKND

SEQ ID NO: 9166 - protein, 585 aa, Arabidopsis thaliana
MYRLVSNVASKARIARKCTSQIGSRLNSTRNYAAKDIRFGVEARALMLRGVEDLADAVKVTMGPKGRNVIIEQSWGAPKVTKDGVTVAKSIEFKDRIKNVGASLVKQVANATNDVAGDGTTCATVLTRAIFTEGCKSVAAGMNAMDLRRGIKLAVDTVVTNLQSRARMISTSEEIAQVGTISANGDREIGELIAKAMETVGKEGVITIQDGKTLFNELEVVEGMKIDRGYISPYFITNPKTQKCELEDPLILIHEKKISNINAMVKVLELALKKQRPLLIVAEDVESDALATLILNKLRANIKVCAVKAPGFGENRKANLHDLAALTGAQVITEELGMNLDNIDLSMFGNCKKVTVSKDDTVVLDGAGDKQAIGERCEQIRSMVEASTSDYDKEKLQERLAKLSGGVAVLKIGGASETEVSEKKDRVTDALNATKAAVEEGIVPGGGVALLYASKELEKLSTANFDQKIGVQIIQNALKTPVYTIASNAGVEGAVVVGKLLEQDNPDLGYDAAKGEYVDMIKAGIIDPLKVIRTALVDAASVSSLLTTTEAVVTEIPTKEVASPGMGGGGMGGMGGMGGMGGMGF

SEQ ID NO: 9167 - protein, 373 aa, Arabidopsis thaliana
MAMTMIQLCYAGVTLFARATLVHGLSPRVFILYRQAFATIFIFPFLYLSRRKSKIAISSLDLKSFSLIFLVSLIGITINQNLYLEGLYLTSSSMGSAVGNIIPAITFLISFLAGYEKLNLRDIRGLAKIAGTILCVAGAISMTLLRGPKILNSESALPIAKSVLGHLKDQNTWLIGCLFLFSSTLCWSFWLILQVPISAYYPDNLSLSAWMCLFGTIQCAVVTFFLEKDPNAWILHSYSEFATCLYAGIGASALSFTVQAWAIAKRGPVFSALFNPLCTVIVTILAALFFHEEIYTGSLIGGLGVILGLYTVLWGKAKDVMMNQDQRDNDQKSEVKIHIEDSSNTTICNKDLKNPLLSKHKSTEEIQTHQQLY

SEQ ID NO: 9168 - protein, 275 aa, Zea mays
  misc_feature (41)..(41): Xaa can be any naturally occurring amino acid
  misc_feature (200)..(200): Xaa can be any naturally occurring amino acid
  unsure (1)..(275): unsure at all Xaa locations
MPFRFQFPWLKNPTTNGGTSNIDTNPSPRFPNPFLPIQAHXTSFLSSFPRALPPPPPWARITSPASTSGALPTSEIEERLAGVPVYALANAAQEFVLVSSTRVGGQGGESVSPTQALGLLCFRKEDADALLEQMDGDMRAGSGVVPVALNKVIQMKSDGVAFRFLPDSSQVANAIKIPEHLWRRSVREEQVEVILGLTGXSRMLSNFTLMQDEGLYAGEGFPGVPVFQSRSLVLMSDNKRYRPVFFRKEDLDNSLHRTSRDQQKPNPAVRFGDTQ

SEQ ID NO: 9169 - protein, 389 aa, Staphylococcus aureus subsp. aureus MSSA476
MQQHSSKTAYVYSDKLLQYRFHDQHPFNQMRLKLTTELLLNANLLSPEQIVQPRIATDDELMLIHKYDYVEAIKHASHGIISEDEAKKYGLNDEENSQFKHMHRHSATIVGGALTLADLIMSGKVLNGCHLGGGLHHAQPGRASGFCIYNDIAITAQYLAKEYNQRVLIIDTDAHHGDGTQWSFYADNHVTTYSIHETGKFLFPGSGHYTERGEDIGYGHTVNVPLEPYTEDASFLECFKLTVEPVVKSFKPDIILSVNGVDIHYRDPLTHLNCTLHSLYEIPYFVKYLADSYTNGKVIMFGGGGYNIWRVVPRAWSHVFLSLIDQPIQSGYLPLEWINKWKHYSSELLPKRWEDRLNDYTYVPRTKEISEKNKKLALHIASWYESTRQ

SEQ ID NO: 9170 - protein, 342 aa, Parachlamydia sp. UWE25
MKGLVKKISAPGLWMENLPIPSHVKDDEVLIKTIKTSICGTDVHIYKWDAWAQKNVPVPLVIGHEFIGEIAEFGKNVKGFKIGERVCGEGHIVCNQCPNCRMGRKHVCMHTKGLGYHISGCFAEYFVLPAENVFSLPPSISDDLGAIFDPYGNAVHTTLAFNLIGEDVLITGAGPIGIMAAAIAKQAGARHIVITDVNDYRLDLARTMGVSHAINVNRESLDNFMQSLGIKYGFTVGLEMSGHPDGLKTLTEKIRHGGNIALLGILPPATSIDWNLVIFKMLTLKGIYGREIFSTWYQMVHLLEIGLNLAPIITHHFSVDNFEKGFEVMLSGQSGKVILDWV

SEQ ID NO: 9171 - protein, 639 aa, Lactobacillus reuteri
MCGIVAFVDNEKPQIKDQLIQKMKDRIIHRGPDAEGQYVDDDVALGFRRLSFIDVKSGNQPIFNEDSSKAIEFNGEIYNFEELREELISKGHTFKTHADTEVILHGYEEWGKDVVNKLRGMFGFVIWDFKTKEMFGARDHFGIKPLYYAKMNGTFFVGSEIKAFLDHPNFKKELNKEALKPYMTFQYPVTQETFFKGVYRLPEGHYFTYKDGQFEMTQYWDENFEPEDETFDEAVNKIDEVVKNSVKAHTFADKGIKVGSFLSAGVDSSLVTALMRPDNTFSIGFDSTYDETKQARELAAKMGLKNTDEKLTNEEAFHAFPMIQYYLDEPDSNPSVVPLYFLNKLAKDNGYKALLSGEGADELFAGYIDYGFNTKVKFIRWVTDQLKKMPRERRYKFAKWLDGKHFHGQEHMYRNLAPARDTFIGQAYIFSPEEAADYLQPEFDCGPSIADILNPLFDKMEDKDIDEVAKKQYVDLHRFMPGDICLKADKMSMANSVEIRVPLLDKEVMKVAETTPTKYLFNYKDTKWAFRMAANRHLPEEWATRPKMGFPTPVRAWLREKKYYQEVRELFEQDFVKEFFDQEKLLKLADDNFEGKVDGRRKIWTIYTFLTWYKLYFIDNFKPDESGIDRAQKAATTEV

SEQ ID NO: 9172 - protein, 396 aa, Parachlamydia sp. UWE25
MDENFLSHIEAQLEDLKTQGLYKQEQEITSPQDAKITIAGGKEVLNFCSNNYLGLANHPEIIQAAEKSYSDYGFGLSSVRFICGTQTVHKQLERRLSQFLETDDTILYCSCFDANGGLFETLLSAEDAVISDALNHASIIDGIRLSKAKRLRYDTNDMASLEQQLKVAKDSRFRLIATDGVFSMDGTIANLRAICDLADEYQALVMVDDCHAVGFMGVKGKGTSEFCDVMGRVDLITGTLGKALGGALGGYTSGRKPLIDWLRQRSRPYLFSNTLAPSIAAASLTVLDLIEKSDDRREKLKANALYFREKMTALGFDLIPGSHPIIPIMLGDAKLAQNFAAKMLEQGVYVIGFAYPVVPQGKARIRTQMCANHTRENLNQAIQAFEKVGKELKIIS

SEQ ID NO: 9173 - protein, 472 aa, Geobacter sulfurreducens PCA
MAEQTFDLIVIGAGPGGYVAAIRAAQLGMTVAVAEQRETLGGVCLNEGCIPSKALLDSSEFFAQARDGFAGHGILIDPPRLDLARMMARKDDVVKKLTDGIAYLFKKNRITWLKGTARLAGRNGDLLRVEVGGNGTAPAHLLEAGKVLLATGSEAVPVPGLAFDGETVVSAREALAFDRVPEHLLVVGAGYIGLELGSVWRRLGSQVTVVEVLAKPLPATDGQVADALVRSLKKQGISFRMETRVTGIEKREGTAVVTVESSAGGRDAIACDRVLVAAGRRPVMAGLGLEPFNLAMEGGRIRVDDNYLTSAPGIYAIGDLIHGPMLAHKAMAEGEVFAERLTGEASVVDYEYIPGIVYTWPEAAGVGLTEEQLKEQGIPYAAGRFNFMANGRARCMGETEGFVKILAKPDTGRVLGIHVVGPRASDLIAEAVTVMTYGGSAADIAMTFHAHPTLAEAMKEAALDVEKRAIHA

SEQ ID NO: 9174 - protein, 248 aa, Arabidopsis thaliana
MEGGASNEVAESSKKIGRGKIEIKRIENTTNRQVTFCKRRNGLLKKAYELSVLCDAEVALVIFSTRGRLYEYANNSVRGTIERYKKACSDAVNPPTITEANTQYYQQEASKLRRQIRDIQNLNRHILGESLGSLNFKELKNLESRLEKGISRVRSKKHEMLVAEIEYMQKRVKEIELQNDNMYLRSKITERTGLQQQESSVIHQGTVYESGVTSSHQSGQYNRNYIAVNLLEPNQNSSNQDQPPLQLV

SEQ ID NO: 9175 - protein, 162 aa, Hordeum vulgare
MSAAEGAVVFSEEKEALVLKSWAIMKKDSANLGLRFFLKIFEIAPSARQMFPFLRDSDVPLETNPKLKTHAVSVFVMTCEAAAQLRKAGKITVRETTLKRLGGTHLKYGVADGHFEVTRFALLETIKEALPADMWGPEMRNAWGEAYDQLVAAIKQEMKPAE

SEQ ID NO: 9176 - protein, 137 aa, Geobacter sulfurreducens PCA
MKRKIEKTDAQWRGQLTPEQYEITRRKGTEPAFTGAYWDCHDRGTYRCVCCGAPLFDSADKFDSGTGWPSFTAPLDGDGVESEEDRSFFMHRTEVHCASCGAHLGHLFPDGPAPTGRRYCINSASLVLDRAGEGEKE

SEQ ID NO: 9177 - protein, 148 aa, Triticum aestivum
FPVQEAPDLLHNLNQQALGGQHSSRSPSPPKQNADAGMRIKATFGSEKVRFRLKPECSFQELKQEMARRLSIVDTSFLIVKYLDDDLEWVLMTCDADLQECLHVYKLANLQTVKISVHLAPIPEARVTIGHTGLSMKDIIGLISLWGF

SEQ ID NO: 9178 - protein, 177 aa, Mycoplasma pulmonis UAB CTIP
MLFVIFYEGENMQKEIFIAGGCFWGVERYFQKVKGVLDTKACYINGGFEGVKYKEVCEGSSHVEAVRVIYDNSKITEEDLWKLYLRIINPYSLNKQGNDRGVQYRIGLYSYDKDLLKKFSDLNEAFMKSEGKKNYIEIQKVEDVTLAEEYHQNYLLKNVNGYCHINLDDIPEEYQKQ

SEQ ID NO: 9179 - protein, 415 aa, Arabidopsis thaliana
MTTMSNLPAEVLEEILSRTPVTSLRTMRSTCKKWNNLSKKKIIPEAARKQQGLMLIKKKICSLSFSLHEIHKDDYVVPCINQVDIPRNIEVEKIFHCDGILLCVIEDNCSLLVWNPYLGQTRRIEVSSDADMNDRYALGYDNNNSSHKILRIKKDFKNSDGLGYEIYRFASNSWSLLDEEVMKPEWDVWSVQRSSVSLKGNTYFLLQGNDYDDQEDEEEEDDEEYEDDDDVLPKDNFLLCFDYTTERFGPRLLLPFNPHVEETVALSCIGEERLVMLYQSFKTYKGIEIWVTDKIDPKAVSWSKFLKVDITPLTGFPVDFYADSFVIDEEKKVAAVFDIHCSYQKAHIIGEDGYLKCVNMGRASDVGNGQPLVFSSYVPSLVKVPVKQPKGKRKGRSSETKSNKNKKGRKIKIIG

SEQ ID NO: 9180 - protein, 466 aa, Bradyrhizobium japonicum USDA 110
MATYDLVVIGTGPGGYVCAVRAAQLGMKVAVVEKNATLGGTCLNVGCMPSKALLHASEMFEEAAHSFAKMGVSVSEPKLELPAMMNFKQQGIDGNVKGVEFLMKKNKIDVLKGTGKILGTGKVEVSADGKSQVVETKSIVIATGSDIARLKGIEIDEKRIVSSTGALSLDKVPGKLLVVGAGVIGLELGSVWKRLGAEVVVVEFLDRIMPGMDGEIAKQFQRILEKQGFAFKLGAKVTAVDTSGKTLKATIEPAAGGAAETLEADVVLVCIGRVPYTDGLGLKEAGVALDNRGRVQIDPHFATSLKGVYAIGDVVAGPMLAHKAEDEGVAVAEIIAGQAGHVNYDVIPGVVYTTPEVSSVGKTEEELKQAGVAYTVGKFPFTANGRSKVNQTTDGFVKILADAKTDRVLGVHIIGREAGEMIHEACVLMEFGGSAEDLARTCHAHPTRSEAIKEAALAVGKRAIHM

SEQ ID NO: 9181 - protein, 357 aa, Thermotoga maritima MSB8
MDEIELRHILHMNPELSFKEYRTKETLRKAVIEIGYEKIIEVAGTGLVIEKKETEDPYVVLRADMDALPIKEETGWEFASRNEYMHACGHDFHMSALYGAMKRLRNVKKNFLFVFQPAEETGGGAKEVVDFLKDKYEIKAAVGFHVTDEYDAGTVASRPGVLFASATEFDVYFKGVPAHVAFAEKGKDALKAAVSFLGWLYNKKWNALVGVGKISGGRARNIVPDEIKLEGTIRSEALRITEEVISNMVKQLGELKEEMGVDFAVERGSVYPEVKVDQNLFETLRETCQRLGFSFVECDMKWTGEDFGYFSQVFPSLLFWFGVGEGERFGLHHPRFLPNDRYIPMAADLLAELAMVI

SEQ ID NO: 9182 - protein, 119 aa, Brassica napus
  misc_feature (109)..(109): Xaa can be any naturally occurring amino acid
  unsure (1)..(119): unsure at all Xaa locations
MAKSTFKQEHDLEKRSAEAARIREKYPDRIPVIVEKAEKSDIPTIDKKKYLVPADLTVGQFVYVIRKRIKLSAEKAIFIFVDNVLPPTGALMSAVYEEKKEEDGFLYVXAYSGENTFGY

SEQ ID NO: 9183 - protein, 709 aa, Magnaporthe grisea 70-15
MCGASVIVSLRRKHEETNGAAAAKTSDKESRLAKSLDALAHRGPDARGVWIDPTGEVGLAHTRLAIIDLSAEGNQPLHDDQDHIHAVITGEIYDHDRLRRECVEAGYRFKGHSDSEVVVALYQRYGAPGFLEHCRGEFSMVVYDDRSGEVFACRDRSGIKPLFYTIVQNELWFSSEVKGFLGMGWKPEWALESIAMGVTQVGSSTIFQGVNRIEPGFYMKVTADGDITHSKYWDFDYPDKTVVDNRSMEDMVQELREALVDAVRLRLRADVPVGIYLSGGLDSSMIAGIAKKLIDEEGATAGSQKASERMTTFTLAVNSDQDNSVYNEASIASRTAKFLGVKEKTLNADEQLLASTFEDACWHIEQPISTLSMCAKVALSKLARDSGVTVILTGEGADETFAGYPWMLPDLTAEADHSRPDAPINRDIDNLRGPIRKQLFDMWANLGSTEMPKLLQQVKPETWAKMNFVSTPVVSDGSSGVGLIHPKLRAKYNLDDRISKTQDCIGEDVLKKVREKWHPLNSSLYLNHKTLLANTIIPSNGDRTEMANSVEGRPPILDHKVLELASKLPPSVQVGYFPDGANLNSGKTVFRSNNADGELMARFREKFLLREAARPFVTDEIYSRPKHSFMASSNYHAGGPIHQVLKRLLTKENVEAVGFLDWPKIEAHLASAFDPQLAHVAGQNFAPCLQAASFVTISQKFGVARASVE

SEQ ID NO: 9184 - protein, 139 aa, Triticum aestivum
  misc_feature (110)..(110): Xaa can be any naturally occurring amino acid
  unsure (1)..(139): unsure at all Xaa locations
LNKDLGFAAEDRAENIRRVGEVAKLFADAGLVCIASFISPYRRDRESCRALLSDGSFIEVFLNMSLELCEARDPKGLYKLARAGKIKGFTGIDDPYEAPLNCEIEIPRVXKEVDGVCPSPSDMAAQVITYLEDKGFLHE

SEQ ID NO: 9185 - protein, 230 aa, Novosphingobium aromaticivorans DSM 12444
MNELIGRVFSFEKTVFPDSRELFGKLSTQGQSPKALMISCADSRIVPEQIMQAEPGELFVCRNAGNMVPPFATMNGGVSSTVEYAVVALGVRDIIVCGHSDCGAMKALAAPELPQGMPNVVAWLRHGSAAEHVVSSCSPHLHGNERVRAVSLQNIIAQIAHLRTHPSVAAAIARGEMALHGWFVDISAGMVLGLDGDTGQFVPLREDRSLPVALPAQPRAASEPLVEAAE

SEQ ID NO: 9186 - protein, 470 aa, Novosphingobium aromaticivorans DSM 12444
MLFATLAAGEGLDVLNPATQQRIATVKAYSTEEIARLIEAADAARGAWAARTAKERSVVLRRWYDLVMSHQEDLAALVTAESGKPLAEARGEVAYGAAFIEWFAEEGKRAYGDTIPTFANGKRVLTIRQGVGTCAAITPWNFPVAMITRKVAPALAAGCAMVVKPAEATPLSALALETLAHEAGVPAEVFRVVPTDDPAGVGTLFCTHPQVRKLSFTGSTRVGQLLMEQAAANVTRLSLELGGNAPFIVFDDADLDAAVDGLMASKFRNAGQTCVCANRILVQDSVHDAFLAKVQERVAALVVGDGAQPGTTIGPLINEAAVKKVGALVADACEAGARVLAGGGKSPVGTGFFEPTILADVTPDMAVASAEIFGPVVPVIRFADEPQAIRIANDTPYGLAAYFYARDVGRIWRVMEALEYGMVGVNDGIISTEVAPFGGIKHSGLGREGSRHGLDEYLELKYCLMGGIDR

SEQ ID NO: 9187 - protein, 212 aa, Parachlamydia sp. UWE25
MFTVALSGGQTPNAIFKELSQQDYLKQLDWTKVFCFWSDERSVPPTDTESNYAMAMESGLAKLPLKREHIFRMKAESDIEENALEYEAIIREKVSSNSFDLLMLGMGDDGHTASLFPHTQGLHAKDRLVIANYVPQKHTWRMSLTYECIHLAKTICIYAMGKKKANMVAQALTKSYDPDNLPIQRIGTTHHKALWILDHEAGEKLLQIFQRR

SEQ ID NO: 9188 - protein, 207 aa, Brassica napus
MQIFVKTLTGKTITLEVESSDTIDNVKAKIQDKEGIPPDQQRLIFAGKQLEDGRTLADYNIQKESTLHLVLRLRGGMQIFVKTLTGKTITLEVESSDTIDNVKAKIQDKEGIPPDQQRLIFAGKQLEDGRTLADYNIQKESTLHLVLRLRGGMQIFVKTLTGKTITLEVESSDTIDNVKAKIQDKEGIPPDQQRLIFGGKQLEDGRT

SEQ ID NO: 9189 - protein, 371 aa, Brassica oleracea var. italica
QMGQAENQVSFDLLESYLEKKNPEGSLWESKGSRGFRENALFQDYHGLKNFRQAMASFMEKNRGGKARFDPDRIVLTAGATAANELLTFILANPNDALLVPTPYYPGFDRDLRWRTGVRIVPIHCDSSNHFQITPEALEAAYKTARDANIRVRGVLITNPSNPLGATVQKKVLEDLLDFCVRKNIHLVSDEIYSGSVFHASEFTSVAEIVENIDDVSVKERVHIVYSLSKDLGLPGFRVGTIYSYNDNVVRTARRMSSFTLVSSQTQHMLASMLSDEEFTDKYIRINRERLRRRYETIVEGLKKEGIECLKGNAGLFCWMNLGFLLNTNTKEGELELWDVILKELELNISPGSSCHCSEFGWFRVCFANMD

SEQ ID NO: 9190 - protein, 397 aa, Solibacter usitatus Ellin6076
MRQAFLCDAVRTPFGRYGGALAGVRTDDLAAIPLRALLGRNPQLDPGALDDVVYGCVNQAGEDNRNVARMALLLAGIPESVPGTTVNRLCGSSLEAAAVAARAIRCGEIALAIAGGVESMSRSPLVLSKPDAAWTRSQKIEDSTLGWRFVNPLMKERYGVDSMAETAENVATECGILRADQDAFAFRSQQRAGAAMTASRLAEEIVAVEISKKPAVSTDEHPRPDTTLEALTALRPIVRPGGTVTAGNASGINDGAGALLLAGESAAAQYGLTPKARIVATAVAGVAPRAMGLGPVPAVRKVLALTGLTLGQIDLIELNEAFAAQALAVLRALGLADDAAHVNPDGGAIALGHPLGASGARLLGAAVRQLQCGGGRYALCTMCIGVGQGIATIVERV

SEQ ID NO: 9191 - protein, 168 aa, Actinobacillus pleuropneumoniae serovar 1 str. 4074
MANIREIYLAGGCFWGTEAFMQRINGVLDAQSGYANGNTENPSYQEVCAGSGHAEVVKVTYDADKISLAKLLDYYFKVIDPVSVNQQGEDKGIQYRTGIYYVDPQDIPVINQALADLQTQYEQPLVVENTMLEHYFPAEEYHQDYLDKNPNGYCHIDLQLMNEILRNQ

SEQ ID NO: 9192 - protein, 433 aa, Novosphingobium aromaticivorans DSM 12444
MTTNAELWTRREAAVPRGVSSMHQRFFARGENAEAFDAEGNRYIDFATGIAVCNTGHGHPRVLAAVQRQLDAFSHCSFQVTPYENYIELAERLNAIAPIDGPVKSIFFTTGAEALENAVKIARAHTGRRGIITFQGGYHGRTLLTLAMTGKVLPYKARFGPMPGDVFHARFPIPYHGFSEEEAIAGIEALFASAIEPSAVAAIVLEPVLGEGGFYTASYAFFRALREICDRHGILLIADEVQAGFARTGRMFAMDWVREATGVTPDLMTVAKAMAGGFPISGVMGRAEIMDAPDPGGLGGTYGGSPLGCAAGLAVLDVIADEDLCARAVAIGNRIKARLRRMRDNGMTAIGDVRGPGAMIAMELVHDGDPSRPNPDATRALVQEGAREGLLLLSCGLRGNVVRFLPALTMPDALLDEALDRLEIALNRVLGGQ

SEQ ID NO: 9193 - protein, 391 aa, Arabidopsis thaliana
MVMSLNFTAIEVKTINSVESWEGGVLVVVSGSVKTKEFSNRRSFVQTFFLAPQEKGYFVLSDVFLFVDEGTVYYHQPSYLSEIKHEAQLNPPTRHPDPQVSDYVLEEEASDYVNAVQIKDDLVDKYSLQEDQHQPQHEDYEDEVAIEETPREEVAVDVVHEHRAAPVEEPVGEKSKMSYASILKVAKEAATVPVAATQPSYNKSSQDINEWDQPMRTPSPQLAAPLAPIQQSNSSTYVSDYGAEAEDGSGFEDFEFKSVYVRNLPSDISASEIEEEFKNFGTIKPDGVFLRTRKDVMGVCYAFVEFEDMTSVENAIKASPIYLGGRQVYIEERRPNPAGVRGARRGGGRGRGGYPTEAPRGRFGGRGSGRGNQDGGDYRPRGNGYYRGGGR

SEQ ID NO: 9194 - protein, 544 aa, Parachlamydia sp. UWE25
MAMQTKYIFITGGVCSSLGKGLTSAAIGLLLEKKGLRVSMLKLDPYLNVDPGTMSPFQHGEVYVTDDGAETDLDLGHYYRYTNSFLSKASNATSGQIYNTVIKRERHGDYLGKTVQVIPHITNEIKQRIVNCGKQQENIDVVLVEIGGTAGDIESLPFLEAIRQFTYDHRNNCLNIHLTYVPYLKAAGEVKTKPSQHSVQVLRGIGIFPDIIVCRCEVNLSDEVKDKISLFCNVNRRAVIEEKDVEHSIYEVPLDLHKQGIDALICELLHLPNPSINLSEWEKILETIKNPKGTVTVGIVGKYVQHQDAYKSVFESLTHGALAAGYKLQIKRFEADKLPLDDNQLAKTIEGCDGYLVPGGFGERGWLGKIHTAKLCREKKIPYFGICLGMQVMAVEFARHVVGLNEANSTEFDPDTIHPVISLLSEQRGLQDLGGTMRLGAYICDLKLHTKAYQAYKSSQISERHRHRYEFNNTYKEQMEKAGFVVAGTLKGENLCEIAEVKDHPWMIGVQFHPEFKSKPTDPHPLFRDFIQAMIIYHKSQHGK

SEQ ID NO: 9195 - protein, 458 aa, Solibacter usitatus Ellin6076
MGSVSAPVEIGSLLDRGRWTPYQRLLTALAALAVIFDGFDIQILGFAIPSLMKEWGVARPAFGPVLALGLAGMAAGSPFAGYWGDRWGRRPALIGCVALFGLATVATSSVHSVFALAVLRFVTGLGAGGAVPNATAFAAEFAPLRQRAVAVKLTIVCVPLGGMLGGLIAAQVLPALGWRALYQIGGALPLAFAAILWTVLPESPSFLAQRPQRWPALEQLLRRMSRAVPAGSSFEDQRESGSVRRAPIRELLGSRHLRDTVGLWLAFFFCLGAIYLVFGWLPAMLTSQGMDVAGASRGLALYNFGGVLGVFIWAVLMTHLGSRRPLLSGALAAAGTAIAILLVPVQSQGGRELMFAGLALNGLVSNAVQTSMYSLAAHVYPTAVRASGVAYAAAIGRVGGIFSSIFGAAIISAGAGAYWGTLAASMACAFAGLAWVRSHYPALAKENAEAVRPDQERL

SEQ ID NO: 9196 - protein, 161 aa, Mesorhizobium sp. BNC1
MISRLERINIIEWFRRLFGGNPPRIQAAALPWRRKHGTVEVMLITSRNTGRWILPKGWPEGREALDQTAMREALEEAGVEGAISGEIGRYIYGKEMSSGFRSRCEVAVFPLEVKREVKRWPEKTQRARRWFVPEEAALLVVEPDLSRLIGAFEGNPRKITA

SEQ ID NO: 9197 - protein, 362 aa, Sulfolobus tokodaii str. 7
MHLYSFSTSIICVHKTAFVWDDRYLNYSFPGNHPFKSLREAMTKKLLEERGAFHEIDIVPPKVISEELLSLIHTKEYIEFIKRKSEEGSGLLDEGDTPAFKGIFEAALIRVSGTVTAVELLQSYDHTINIGGGFHHAKRSQASGFCVFNDVALAIKLAERSFKKIALVDIDGHHGDGTQYLLYDDPKVLKVSLHMFHPRFFPGTGDEYEIGSGEGKGMTINIPLPPGTGDDMYLYAFNEIVVPKIKEFKPDLIFLLNGGDSYYEDPLVELKLSTKGYLEVVRTVHSLAHQFANGKLVMTGGGGYNYEATARIWALSIAEIAGLDFTEFETLEDCCLIASSEFVKKRVLEIVDKLKKIHGLSN

SEQ ID NO: 9198 - protein, 635 aa, Dechloromonas aromatica RCB
MCGITGIFDTRSKRDIDRAVLHRMNESQIHRGPDEGGTHVEPGVGLGHRRLSIIDLSTGQQPLYNEDNSVCVVFNGEIYNYQELIPELQALGHVFHTRSDTEVIVHAWEAWGESCVDRFRGMFAFALWDRNRETLFLARDRLGVKPLFYALLDDGTFLFGSELKSLLAHGGLKRDIDPCAVEEYFALGYVAEPRSIFKQALKLPPASTLLVRRGQPVGTPREYWDVRFTLDNPISDADAQAELTHRLEESIKLRMISEVPLGAFLSGGVDSSAVVALMAGLSQKPVNTCSIGFSDPAFNESEFAKMVADRYQTNHHLDIVESDDFDLIDTLARLYDEPYADSSAIPTYRVCQLARKHVTVALSGDGGDESFGGYRRYRLHMMEEKMRSALPLGLRRPLFGALGKLYPKADWAPRVFRAKTTFEGMARNSVEAYFHSVSILRAPMRDRLFSTQFKSALSGYDALKVFTDHAAKADTTDPLALIQYLDLKTYLIGDINTKVDRASMAHSLEVREPLMDHKLVEWLATLPSTLKIRGQEGKYLLKKSMEPHLPNDVLYRPKMGFSVPLARWFRGPLKTRVQESILGSRLADTGWFNRDYLQKLVTDHNNGSRDYSASIWTILMFEAFLRNVMEQGEAA

SEQ ID NO: 9199 - protein, 459 aa, Bacteroides fragilis YCH46
MKQTRGYLLLICIVSAMGGLLFGYDWVVIGGAKIFYEPFFGIENSAALRGWAMSSALIGCLAGALLSGIWSDKYGRKKMLVIASFLFALSAWGTGAVDHFSYFIFYRIVGGLGIGIASNISPVYIAEVSPTHVRGKFVSLNQLTIVLGILLAQLANWQIGEYYTQGSDILSETSVQWAWRWMFWAELIPAGIFFLLSFIIPESPRWLATVHQQEKAQKTLTRIGGETYARQTLEELNQLTQSQGNRQNNEWKSVFRPEMRKVLIIGIVLAIFQQWCGINVIFNYAHEIFSSAGYAVSDVLMNIVVTGITNVIFTFVAIYTVDKWGRRTLMLIGSAGLALIYLILGTCYFLDVSGLPMLLLVVLAIACYAMSLAPVVWVVLSEIFPVKIRGMAIAISTFFLWVACFILTYTFPVLNESIGAEGTFWLYGGICLAGFLFIRQNLPETKGKTLEEIEKELIK

SEQ ID NO: 9200 - protein, 335 aa, Desulfotalea psychrophila LSv54
MKVKATSGSAGAGVDPAHARQLLYQMVRIRRFEEKAAELYTKMKIRGFLHLYIGEEAVAAGVSAALEPEDASVGTYREHGNALARGISAGAIMAEMYGKQEGCSRGRGGSMHIFDDKTRFYGGNAIVGGGLPLAVGLALADKMQGKKRVTCCFFGDGAVSEGEFHESMNLAALWNLPVLFICENNLYAMGTALERSQSVTDLTRKAVSYRIAASAVDGMDVLAVEAAANEAVNAVRSGQKPYFLECRTYRFRAHSMFDPELYRSKAEVDKWKKRCPIDSFVKRLKKQDLLSDGDMEKLERQVAREIEEAVAFAENGTWEPVEDLTRFVYSERGTT

SEQ ID NO: 9201 - protein, 430 aa, Yarrowia lipolytica CLIB122
MDRTRTHDENSLHEYRKPTAAGGAPTKRVALGTVTNTASVATKAKVAISKPPQRITRQPLVAQNQNIPPLAAQTSTTSLVQPCPGSDDTVDEEVDTQTADVEPTQIEDDFYESDEEGPTQRFAVSESNPQALYPVVDKESMAELNRVATYFSTNNGVDLDENDDDTYDISMVAEYAEEIFTYMKELEVRFQPNPGYMDSQTEIHWAMRSILVDWLVQVHHRFSLLPETLFLTINYIDRFLTIKTVSLSKLQLVGAVALFVAAKYEEINCPSVQEIAYMVDNGYHVDEILKAERYMIDLLDFNLGWPGPMSFLRRTSKADDYDLETRTLAKYLLEVTIMEKTFVGAPPSWLAAAAHFLSRRMLNRGHWTDGHTYYSGYTEKQLLPAVMRIIQCCRDPLTHHKAIFEKYKDRKFKRASVYVQEWMDHEENNH

SEQ ID NO: 9202 - protein, 260 aa, Triticum aestivum
  misc_feature (225)..(225): Xaa can be any naturally occurring amino acid
  misc_feature (235)..(235): Xaa can be any naturally occurring amino acid
  unsure (1)..(260): unsure at all Xaa locations
QVCTKKQAGTGPEFPGYRRPTRPTFEKEVGQDRGALVEFYAPWCGHCKKLAPEYEKLAASFKKAKSVLIAKVDCDEHKSVCSKYGVSGYPTIQWFPKGSLEPKKYEGQRTAEALTEYVNSEAATNVKIAAVPSSVVVLTEETFDSVVLDETKDVLVEFYAPWCGHCKSLAPIYEKVASVFKQDEGVVIANLDADKYTSLAEKYGVSGFPTLKVFPKGYKAGEEYXTGRELDDFVXFISEKSGTNRDSKGQLTSKAGLVAS

SEQ ID NO: 9203 - protein, 367 aa, Pseudomonas fluorescens Pf-5
MFDYRPESAPIESCTRHGALWQGSRARIFFGTRFHKTQNNGLPAASIFRAFSARQCCPTFSNTPAARIVTRPSTGCALLSTGRLPMPHTLDCPVLTHSGLHMPKLGLGTWPMLDQECTRAVEQALELGYRHIDTAQAYNNEEAVGQALANTPVPREQIHVTTKVWWDQLQPTAMRHSLERSLKALQTDYIDLFHIHWPTSDWELERSIETLVSFKEQGLVKHIGVANFPLALLRRVIEGLGAPLSAIQVEYHVLLGQSGLLDYARERDMVLTAYTPLARNKVSEMAEIQQVAAKHGVLPTQVALKWLLDQDNVAAIPKASSRANQLANLESLKIHLDDADRALIAALPKDQRQVSPDFAPVWDHFDH

SEQ ID NO: 9204 - protein, 648 aa, Emericella nidulans
MEALLQQSRAMCPFLKRSSPNTLRSLATATRPSTSPGGGTMTNLQRIARRCPVMSKALAVQSARMTGTKRFTSSAAGVPGAGAGTPKPTRGSPGKRALHSTGGNGANMSTEFHKGAQQIHPGLSNATRSHVGASATVSGPTPRAPVAAPFDYDAFYNAELQKKHQDKSYRYFNNINRLAQEFPRAHTASKDEKVTVWCSNDYLGMGRNPEVLATMHKTLDTYGAGAGGTRNISGHNQHAVSLENTLAKLHGKEAALVFSSCFVANDATLATLGSKMPDCVILSDSLNHASMIQGIRHSGRKKMVFKHNDLVDLETKLASLPLHVPKIIAFESVYSMCGSIAPIEAICDLADKYGAITFLDEVHAVGMYGPHGAGVAEHLDYEIYASQDTANPLSTKGTVMDRINIITGTLGKAYGCVGGYIAGSAALVDTIRSLAPGFIFTTSLPPATMAGADTAIRYQARHQQDRILQQLHTRAVKQSFKDLDIPVIPNPSHIVPLLVGDAELAKQASDKLLEEHGIYVQAINYPTVPRGEERLRITPTPGHTQELRDHLVEAVNTVWNDLGIKRASDWKAMGGFVGVGVEAAELENQPIWTDAQLNMRPDETLEAAVEREFQAAVPGMKAGGAKAKPVGSIAANPIGASIPVAAAA

SEQ ID NO: 9205 - protein, 626 aa, Yarrowia lipolytica CLIB122
MPEWKAIWKTIFNPEVTIAQDAPDLDGPGGVKEIENVTSIWSKKGLWIAWGSMLLLAVAIALDAQTVFVYSTFATSSFNQMSLLSALGVVQSVMYIATRPVMAKIADVLGRFEGLLLSIVILTVGFIMLAASPNIGTYFAAQIFYVFGQVGIQFMQQVFAADTSDLKNRTFFVILPNLCYLFVPWCAAPITNAVLKHTTWQWGYGMWCIIVPVVSIPVLTTMFVNKLKARRLGLQAGLAVKNFKKTVQHFDFIGLILLTAGLVTLFLAATLVKTSADWNKPHVLGMIIVGPICLTLFPIWEIFPKYPFLPFRVLRNRVLLTCCFYIALYFLAFYLYQPYYYSWLMVCKNLSVTAATNTSVTTTVSSTAGGLFTAIAIRYTKRIKPFIVVGSCIYLLGLGLSYNYRQPYHSLAQFIVSQAVEGVGAGMLGSPTQVMVQAVVSHNQVAAATAVYLSSTSIGNVVGDAISGAMYRQMYPKRLREYASFLNETEIDTIINNINEPLKYTWGSPERTQIVTAFNKVYRHMLYGPLIVAGAMIVISLTLPNINLDEIEQQVKGVVFGKSQKANQADENPVGDFGGNPVGGFGAEPVAAFAPEYNGQHDIEKNAYEQKLELDTESDKKSETRV

SEQ ID NO: 9206 - protein, 417 aa, Thiomicrospira crunogena XCL-2
MEGNFLQLSYALDTFYFLMSAVLVMWMAAGFAMLEAGLVRSKNTVEILTKNALLYSVACSMYLIVGYNVMYPGDPISAYLPNLSFFLGADNTVEAVIAGGDGAPYYSGMSDFIFQAVFAAATMSIVSGAIAERMKLWPFLVFAVVMTSFIYPMEGYWKWGGGWLDQLGFQDFAGSVVVHMAGAAAALAAVIMVGARKGKYGPNGEVHPIPGANLPMATLGMFILWMGWFGFNGGSELMVSNVEEANAVATIFVNTNAAAAAGMIAAALLSKYMFGKTDLTMVLNGALAGLVSITAEPLAPTPGLAMFIGAVGGLIVVLSVVFMDKLKLDDPVGAISVHGTAGIWGIFAVLFSNADATFFGQFVGTVATFAWMFITSIIVLYIIDKTMGLRPTEEEEMEGMDMKECGMEAYPEFDHKS

SEQ ID NO: 9207 - protein, 398 aa, Pseudomonas syringae pv. syringae B728a
MSLFSAVEMAPRDPILGINEAFNADTRSTKVNLGVGVYCDEDGRIPLLRAVAEAEKVRVAQHAPRGYLPIDGIAAYDQAVQKLLLGADSPLIASGRVLTTQSVGGTGALKIGADFLKQLLPDAVVAISDPSWENHRALFETAGFAVQNYRYYDAATHDVNRAGMLEDLHNLPNNSVVVLHACCHNPTGVDLSLDDWKKVLEVVKAKGHVPFLDMAYQGFGQGIQEDALAVRLFAESGLTFFASSSFSKSLSLYGERVGALSIITESKEETTRVLSQVKRVIRTNYSNPPTHGAIISAAVLNDPTLRAMWEEELGEMRLRIQGMRKAMVERLADNPAGQDFSFVARQCGMFSYSGLTAEQAQRLRSEFGIYALDTGRICVAALNQKNIDVVCDAIKQVL

SEQ ID NO: 9208 - protein, 333 aa, Tropheryma whipplei str. Twist
MSEIGTRVYTECDADLSLIQNVLVAVIGYGSQGHAQALNLRDSGVNVVIGLKENSASRKSAQDSGFEVLLPQEAAKKAQLISLLVPDPAQRDVYESAIKHNLSEGDALLFSHGFNIRYGYITPPDGVDVLMVAPKGPGHMVRREYLDNRGTPAVFAIEKDASGRCFDLALSYAKGIGALRAGAIQTTFTEETETDLFGEQAVLCGGLEQLIQYGYETLVEAGYQPEVAYFEVLHELKLIIDLIVEGGLSKSRWSISDTAEYGSYVSGPRVIDKHVKENMKKILGEIRSGEFANRFIKDQDSGANEFTQLREIAARHPIEEVGARLRALFSWSK

SEQ ID NO: 9209 - protein, 564 aa, Deinococcus radiodurans R1
MNPVSSISYKKYFPASQFSSETIQSTLNLSMTSLQGELKWWQSGIIYQIYPRSYQDSNGDGVGDLPGITARLPYVASLGVQAVWLSPIFKSPMRDFGYDVADYCDIDPVFGTLEQFDALVAEAHRLGLKVMLDYVPNHTSSDHAWFQEALTGKASAKRDWYVWRDPAPDGGLPNNWKSFFGGPAWTLDEASGQYYLHQFLPSQPDLNWRNPDVRAAMFDVLRFWMRRGVDGFRVDVIWLLAEDERFLDEPENPDADREVVGGQIEHSTLLHIYTQDQPETHDYVREMRRVIDEFDDRMMVGEIYLPLDKLLPYSGTPEAPMVHLPFNFHLILLPWDAQTIRQFADEYDAASNAAGAWPNWVLGNHDQHRFKTRVGAAQYRVAQTLLLTLRGTPTVYYGDEIGMENVPVPPEKMVDPSGLQQPDSPDAGRDPERTPMQWEAAPGAGFTAAGTEPWLPLTDNFAQVNVQVQEQDSQSDLNYFRALTRLRQEQPALVGGSYRSLDSGHADVFAFERELNGERLTVWLNFRGEERAVAATGQTLLSSRGDQPAAQSPLRGHEARVVLG

SEQ ID NO: 9210 - protein, 392 aa, Oryza sativa
MLIPILSCLVKMQIFVKTLTGKTITLEVEFSDTIDNVKAKIQDKEGIPPDQQRLIFAGKQLEDGRTLADYNIQKESTLHLVLRLRGGMQIFVKTLTGKTITLEVESSDTIDNVKAKIQDKEGIPPDQQRLIFAGKQLEDGRTLADYNIQKESTLHLVLRLRGGMQIFVKTLTGKTITLEVESSDTIDNVKAKIQDKEGIPPDQQRLIFAGKQLEDGRTLADYNIQKESTLHLVLRLRGGMQIFVKTLTGKTITLEVESSDTIDNVKAKIQDKEGIPPDQQRLIFAGKQLEDGRTLADYNIQKESTLHLVLRLRGGMQIFVKTLTGKTITLEVESSDTIDNVKAKIQDKEGIPPDQQRLIFAGKQLEDGRTLADYNIQKESTLHLVLRLRGGL

SEQ ID NO: 9211 - protein, 1267 aa, Kluyveromyces lactis NRRL Y-1140
MSCAVQAAVVAMKDNSSHGQVPYRANNEHLNRVVQSVTDATKRLSQISTASSNANVNNTKTSKRRNRDTVGPWKLGKTLGKGSSGRVRLAKNMETGKLSAIKIVPKKFVKSNQIKQLPYGIEREIIIMKLISHPNVMGLYEVWENKSELYLVLEYVEGGELFDYLVSKGKLPESEAIHYFKQIVQAVAYCHGFNICHRDLKPENLLLDKKKRSIKIADFGMAALETSDKLLETSCGSPHYASPEIVLGRKYHGSPSDVWSCGIILFALLTGHLPFNDDNVKKLLLKVQSGKYQMPQWLSVEAKDLISRILVVDPNRRITIDQILQHELLTKYDQKSRSKSNSDLNLLNRTPNIVSFSSERDIDETILSNLQILWHGAARKHLVTRLMKPGFTEEKMFYSLLWNYQEKQQKSMQKDLIPVPTLKTSSASSVSPLNISSDVNSVTNTAKKQQQSSNGTVLPASMAPTISAFGQQISSDSSESSTLQAPKIHQKSHFSISSLKNGSSKSPKKTKQGFIASSSSSKLFQPNFGAKSSSQSISKSSSKKSLTPTTPKKRTLQNSASKRSLYSLQSISKRSINLNELLHDELQHEYPPPPLPSISSSEHTSSKLESIVDDYDRSTSVHGATMDNFLGESGQHMKAQQNEKLTQPSKNILAQPKLNNQPQTENRQSVTSMKRKTADNTIATVPVSMTPLKDMTNTFQSKSMYVSSLDPKRNKPKPSLENLLRKVSVPQRIKSRSTIRKLRDSGDWTVSGEAQALFGGKGSSEGENQLQRQKTNPSKLTAPETVLTTSTPMTDIKPDLLRMPSSLINSSMTFKDLSQFIMNIDEDKVPVTQASNPVNTDHEKLSENQTLMIENDSNRFETSSNYDDYNVNTAPAVTTAGDIDIFEDAPDDANESVTTSESMIDQSQLNLKKKAASIDSIDTSHVLTPATDVRVSLYINQMDKLDNLPRETTEQIISKFKLSPIKDIKQKRFSNGDRDLTITGSMISMFKDLDGDESRAEYDDNGLGLLGSALDTRPVENETNEDTNGTTVKRNSTVLVSSINGDNLDLSTEEQKNDDGNHGQGQTRRVTLLFDDGSSESEQVFKPVAAERRQPTLNANSTTTNNVGSKRKSNYINKLPKIKEDEVKPITSMKSSSPVNWFSKLLQRIKTSKPKRTVYEYRTSSIPFDNIHILLMTQFGKNGVDCELKKMERKGDKEYVTYDCNFGGIKRNRPKSKFTVEMRCMNGTETVLSLETRSKRFVNDKDTMASFERFNKDVAGAISAQEE

SEQ ID NO: 9212 - protein, 157 aa, Deinococcus radiodurans R1
MTQDTKTDFQKPSDNDLRERLTPIQYQVTQHEGTERAFTGEYWDHDEDGIYVDVVSGEPLFSSLDKYDAGCGWPSFTQPIPDVALTENTDYKIGYARTEVRSASADSHLGHVFPDGPRDRGGLRYCINSAALRFVPLSELDAQGYGQYRALFEGRQG

SEQ ID NO: 9213 - protein, 340 aa, Campylobacter lari RM2100
MAVSIYYDKDCDINLIKSKKVAIIGFGSQGHAHAMNLRDSGVEVIIGLKEGGQSWAKAQKANFIVKSVKEATKEADLIMILAPDEIQSEIFNEEIKPELKAGKTLAFAHGFNIHYGQIVAPKGIDVIMIAPKAPGHTVRHEFSIGGGTPCLIAIHQDESKNAKNLALSYASAIGGGRTGIIETTFKAETETDLFGEQAVLCGGLSALIQAGFETLVEAGYEPEMAYFECLHEMKLIVDLIYQGGIADMRYSVSNTAEYGDYITGPKIITKETKEAMKGVLKDIQNGSFAKDFILERRANFARMHAERKLMNDSLIEKTGRELRAMMPWISAKKLVDKDKN

SEQ ID NO: 9214 - protein, 217 aa, Oryza sativa (japonica cultivar-group)
MSKRSRSMWDMQEFVGSVDTARVLMLLAQQSQHGLLGGGGFAAGAQPVVVRGGAHDRVFECKTCNRQFPTFQALGGHRASHKRPRQQQQHALGGGAGADDAGLCLGRQPTPPRPQPAKPRVHECPVCGLEFPIGQALGGHMRRHRAEAEAAATTTTTTTKNGDVGKAAAVKACDGGGVCLDLNLTPSENRAKCRNVVGLGAGGQGVHKALAMLDCFL

SEQ ID NO: 9215 - protein, 178 aa, Mangifera indica
FGGVYRGHLKDVKLDVPIKRVSRESRQGRKEYVSEVKIISRLRHRNLVQLVGWCHDRGEFLLVYEFMPNGSLDSYLYSPAAGLGWPARHKIALGLASALLYPHEEWEQCVMHRDVKPSNIMLDSAFNAKLGDFGLARLVDHDRNLQTTDLAGTRVYIAPECFYTGKPSKESDIYSFGI

SEQ ID NO: 9216 - protein, 138 aa, Brassica napus
  misc_feature (120)..(120): Xaa can be any naturally occurring amino acid
  misc_feature (132)..(132): Xaa can be any naturally occurring amino acid
  unsure (1)..(138): unsure at all Xaa locations
MKLLQASVCLISLILVLPSIFAASSSEDFDFFYFVQQWPGSYCDTQKSCCYPTSGKPAADFGIHGLWPNYKDGTYPSNCDDTKPFDSSTISDLVSSMKRNWPTLACPSGSGEAFWEHEWXEKHGPCSQSVIXQHEYFQ

SEQ ID NO: 9217 - protein, 329 aa, Burkholderia fungorum LB400
MQKILVARPIFPDVIERLKQYFDVDWNQGDVLSADELTRRLADKDGALTAGEPIGAAVLAAAPRLRVVSNMAVGYNNFDMTAFNAANVLGTNTPDVLNESTADFGWALMMAAARRIAESEHWLRAGKWQKWTYDGFLGSDLYGSTLGVIGMGRIGQALARRAKGFNMQVIYHNRSRVAPEIEAELNAGYVSKQDLLRRADHVVLVLPYTKENHHTIGAAELALMKPSATLTNIARGGIVDDAALVEALRSKQIAAAGLDVFEGEPNLNRDLLSVPNVVLTPHIASATEATRRAMANLAADNLIAGLGEGPRAGRPPNPVNPGVIGKARS

SEQ ID NO: 9218 - protein, 385 aa, Pseudomonas fluorescens PfO-1
MLKALRFFGWPLLAGVLIALLIIQRYPQWVGLPSLDVNLQQAPQTTSVQQGPVSYADAVTIAAPSVVNLYTTKVINKPSHPLFEDPQFRRFFGDNSPKQKRMESSLGSGVIMSPEGYILTNNHVTSGADQIVVALKDGRETLARVIGSDPETDLAVLKIDLKNLPAITVGRSDNIRIGDVALAIGNPFGVGQTVTMGIISATGRNQLGLNNYEDFIQTDAAINPGNSGGALVDANGNLTGINTAIFSKSGGSQGIGFAIPVKLAMEVMKSIIEHGQVIRGWLGIEVQPLTQELAESFGLSGRPGIVVAGIFRDGPAQKAGLQLGDVILSIDGEPAGDGRKSMNQVARIKPTDKVTIQVMRNGKELKLTAEIGLRPPPAPVKEKEE

SEQ ID NO: 9219 - protein, 418 aa, Kluyveromyces lactis NRRL Y-1140
MRIPTRRGLSALSRVTRAPADKILGLTEKFNVDRHPNKINLTVGIYKDNRGRVTTFPSVASAQSLLETSLDLNNDLSYLPITGSQDYQNNVLNFLYRESSDGSELLENNRITFVQTLSGTGALAVASKLLATFVSKTVWIPNPSWANHSNVFQWNGFNQIKYYTYYEDGKLSIDKWLKELKESCSSRDPDWPPSIVLHACCHNPTGVDPTLEQWQQILPVIHDLGITPIIDMAYQGMESGNLIQDAYLLRMCLEYEWPNGLFVCQSFAKNMGLYGERVGSLSVVVPPNPLDLKSTIDSQLKKIVRGIYSSPPGYGSRVANLVLSNPKLKQQWFVDVKNMSDRLWNVRIQMHERLNWPNLVDFKTQHGMFYYTGLNPYQVQILQERYGIYLTEDGRMSLSGVNDGNIDYLCDSLRQVVQ

SEQ ID NO: 9220 - protein, 632 aa, Pseudomonas fluorescens PfO-1
MSHASDLISEDILAYLGQHERKELLRFLTCGNVDDGKSTLIGRLLHDSKMIYEDHLEAITRDSKKVGTTGDDIDLALLVDGLQAEREQGITIDVAYRYFSTAKRKFIIADTPGHEQYTRNMATGASTCDLAIILVDARYGVQTQTRRHSFIASLLGIKHIVVAINKMDLKGFDQGVFESIKADYLKFAEGLKMKPTSMHFVPMSALKGDNVVNKSERSPWYTGQSLMEILETVEVAGDRNFTDLRFPVQYVNRPNLNFRGFAGTLASGIVKKGDEVVVLPSGKSSRVKSIVTFEGELEHAGPGQAVTLTMEDEIDISRGDLLVHADNVPPVTDSFEAMLVWMAEEPMLPGKKYDIKRATSYVPGSIASIVNKVDVNTLEEGPASALQLNEIGKVKIALDAPIALDGYDSNRTTGAFIVIDRLTNGTVGAGMIVAQPVTHGTATHHGKLAHVATEERAQRFGQQPATVLFSGLSGAGKSTLAYAVERKLFDLGRAVFVLDGQNLRHDLNKGLPQDRAGRTENWRRAAHVARQFNEAGLLTLAAFVAPSAEGREQAKDLIGRERLLTVYVQASPTVCAERDPQGLYAAGGDNIPGESFPYDVPLDADLVIDTQSLSLDESVKQVLDLLRKRGAI

SEQ ID NO: 9221 - protein, 314 aa, Geobacillus stearothermophilus
MDVVTIGESMAVFTPTSVGLMRQATTFTMRIGGRESNVAVGLARLGHRVGWISKVGSDEFGKAILSFLKGEGVDVSRVKWMGNTDRHLLKEQRRLNDTRVYYYRKGSAASRLTPADLDEKYIAEAKYLHITGITPALSENCRDTVFAAMAMARRHGVKIVFDPNLRLKLWNEADRAKEVMLRMAAESDVVLPGEAEASFLFGKHSVEEWGSRLLDMGASLVVIKLGANGAHYFTNAHHEYVQGFLLKGYDPVGAGDGFVEGYPDCLKDFVLTEAVQRANAVGALVTMVEGDADGMPERDDVERLINQRRKMLRR

SEQ ID NO: 9222 - protein, 326 aa, Arabidopsis thaliana
MANSGEGKVVCVTGASGYIASWLVKFLLSRGYTVKASVRDPSDPKKTQHLVSLEGAKERLHLFKADLLEQGSFDSAIDGCHGVFHTASPFFNDAKDPQAELIDPAVKGTLNVLNSCAKASSVKRVVVTSSMAAVGYNGKPRTPDVTVDETWFSDPELCEASKMWYVLSKTLAEDAAWKLAKEKGLDIVTINPAMVIGPLLQPTLNTSAAAILNLINGAKTFPNLSFGWVNVKDVANAHIQTFEVPSANGRYCLVERVVHHSEIVNILRELYPNLPLPERCVDENPYVPTYQVSKDKTRSLGIDYIPLKVSIKETVESLKEKGFAQF

SEQ ID NO: 9223 - protein, 358 aa, Acinetobacter sp. ADP1
MFIKNAWYVACRPEEIQDKPLGRTICGEKIVFYRGKENKVAAVEDFCPHRGAPLSLGYVEDGHLVCGYHGLVMGCEGKTIAMPAQRVGGFPCNKAYAVVEKYGFIWVWPGEKSLANEADLPTLEWADHPEWSYGGGLFHIQCDYRLMIDNLMDLTHETYVHSSSIGQKEIDEALPVTKVDGDHVVTERYMENIIAPPFWQMALRGNHLADDVPVDRWQRCHFFAPSNVHIEVGVAHAGHGGYNAPKTRKSLQWLSIVVTPETETSHWYFWGMARNFQPENQQLTDQIREGQGKIFTEDLEMLEQQQQNIVRNPQRQLLMLNIDAGGVQSRKIIDRLLAKENSPSPQDTQRKFPNIRVI

SEQ ID NO: 9224 - protein, 644 aa, Solibacter usitatus Ellin6076
MCGIAGFVTVQPSDSPSIIERMTDTIRHRGPDDFGFYRDPWASLGFRRLAIIDVSGGHQPMPNEDQSKFIIFNGEIFNHASLRPALEQAGHRYSNRSDTETILHSYEQYGADCVLRLRGMFAFAIWDKNTRKLFCARDRLGKKPLYYFWDGRTFAFASEIKALFEHPSISPQFEESLLPEYLAFGYVSEDRTLFRGIRKLMPGHHLTLHLGAPNPQPVIRQYWEIPDPQPEQRDDASWISECRDRMEQTVQMRLMSDVPLGMFLSGGVDSSAIAALMKRNFSGPVKTFAVGYQEAEFSELSYARHVAGAIGTDHHEVVVGMEDFFNALPRLIWHEDEPITWPSSVSLYFVSKLAREHVTVVLTGEGSDEMFGGYARYRFYAMNERWMRFYRILPRAVRTAIRSQVATTSLLSSTLRRKLQHTFVGRAEDLESLYLDNFYSAFSQSQQRDLFPALAATSPYANFRRYWDSKPGLNPLPRMLFADQKTYLIELLMKQDQMSMATSIESRVPFLDHEFVEFSTRVPEHMKLRNGEGKYIVKKAIEGLVPHEIIYRKKMGFPTPLRQWLLDPRAAHLFDMMRAKDGLLASCIDPARLDDLLLRQTSGREDVTDRIWRLLTLQLWGDMFFTGKREERWDGLMAAARPAV

SEQ ID NO: 9225 - protein, 260 aa, Triticum aestivum
  misc_feature (196)..(196): Xaa can be any naturally occurring amino acid
  unsure (1)..(260): unsure at all Xaa locations
NKFVQKSIPVPVRNSRDIVDPRVRSTMFFAHRENTVSALGRFVLIIWLFVVLIINSSYTASLTSILTVQQLATGITGLDNLVASALPIGYPAGKFVRNYLIDELNIPESRLVPLSTVEEYANALNRGPKDGGVAAVVDEMPCVEIFLSTHCNFRIVGQEFTKEGWGFAFQRDSPLAADLSTAILQLSKSGQLQKIXNEWAHKSDLPPIDEQWGWEQIHALVLGTLPGGLFPCLGWLLDIAVLCPPTGVNLSPRESRLAKL

SEQ ID NO: 9226 - protein, 327 aa, Chlorobium tepidum TLS
MGEKITIEQTAKYTSRGNKATRTGFGEALLEAGRENPSVVALCADLTGSLNMHLFRKEFPERFIQTGIAEANMISMAAGLATIGKIPVASSFAVFATGRVFDQIRQSVCYSNLNVKICASHAGLTLGEDGATHQILEDIGLMRSLPRMTVVVPCDYSETKRATKAIIEHEGPVYLRFGRPNVPDFTADEDGFEIGKSIELHPGKDVTVIACGIMVWKALEAARILEKEGVSVRVINMHTIKPIDTLAIVRAANDTGAIVTAEEHQMYTGLGEAVANVCARNIPVPIEMVAVEDTFGESGKPDDLLRKYKLTTEDILEKIYLVLRRKD

SEQ ID NO: 9227 - protein, 349 aa, Thiobacillus denitrificans ATCC 25259
MIPPEPIPVTLLTGFLGSGKTTVLNQIVRQLPRTAILMNEFGEVALDHQLLQEMEGPLALLSGGCVCCTISGSLSPTLKNLWMARDRGDIPAFERVVIETTGIADPVPVLDNLLHDNWVRARFRLDGVVATVDALVGMGQLDEHAEAVKQVAVADRLLLTKTDLAPAATTAALRERLAALNPAADILTVTHGALDPAAIQNLGLWNAATRTLEVARWLKPERYRQAVAGRLGGKPRTALHDSRIEAFSVLIDTPLDRYGLQSALSMLTAFRAENLLRFKAIVNLKGEALPVVLHGVQHVLYPEVQLDAWPDDDRRSRFVFIVRDLEPQFVAKLLADFSGAARIPDPATP

SEQ ID NO: 9228 - protein, 357 aa, Oryza sativa
TRIPPSRRAASSERRRRRRPMGKPGKLALPSHESTIGKFLTQSGTFKDGDLLVNKDGLRIVSQSEEGEAPPIEPLDHNQLSLDDLDAIKVIGKGSSGIVQLVRHKWTGQFFALKVIQLNIQENIRRQIAQELKISLSTQCQYVVACCQCFYVNGVISIVLEYMDSGSLSDFLKTVLKGLMYLHHEKHIIHRDLKPSNILINHMGEVKISDFGVSAIIASSSAQRDTFTGTYNYMAPERISGQKHGYMSDIWSLGLVMLELATGEFPYPPRESFYELLEAVVDHPPPSAPSDQFSEEFCSFVSACIQKNASDRSSAQILLNHPFLSMYDDLNIDLASYFTTDGSPLATFNTSNRYDDR

SEQ ID NO: 9229 - protein, 569 aa, Desulfotalea psychrophila LSv54
MPFQKNINCKYPETLLVDPEQIEGLKAEALDLISLTLSVEQICDLELLLNRGFYPLVAYMDQASYLSVLKNMRLTDGTLWPTPISLAVSKNRVAGLTIGQRLALNDQEGFLIAILTISDIWQADTRLEAKAVYGTTDSARHPGVRKLYDCSGDYYLAGSLEGISLPVHYDFQSLRLSPAETVQRFMTKGWQRVVGFQTDEYLHYGHHKMIMAAAQEIGAAVFIQAQINCPGEITHYTHVRCHQAFTKLFPINMAGLGLFALPAKKTGPREALLQAIIKKNFGCTHFMVAPDHADPFAVMTDEKALFYPRGEAQKLVAYYEKETEITMIPQRGVGYCKKDKKYIFQGAKGAENSSLIDSKGLMGRLKREEEIPPWFTCPKIVQEIRHDFLPRSGQGFTIFMTGLSGAGKSTIAKVLQVKFAEMRERPVTLLDGDIVRLNLSSELSFSQKDRNLNVTRIGFVAGEITKNGGIALCAPIAPYEESRQVNRRLISNYGGYIEVYVATPLQVCEQRDSKGLYAKARSGRIKNVTGITDPYIPPTNPEITIDTTNINPMDAAEKILLYLKGEGYL

SEQ ID NO: 9230 - protein, 529 aa, Yarrowia lipolytica CLIB122
MPITVSQEVTETAPEVSWAATKTYLGSRVSTLKPPKLSAQEKRCLNPIYVLRQLGKKQWLFFSVAILGWIWDAFDYFSVSQTATEIAKDLDMSVADITWGLSIVLMLRSIGAIIFGLASDRFGRKWPFIVNIAIFSILELGTGFVQTYTQFLALRALFGIAMGGMFGNAAATALEDCPPEARGLISGFLQAGYDIGNLLCVIFTRAIVPNSKHGWRALFWFGAGPPILIMVFRAFLPETDTYIASRINKEDNSTVEIDPETGLHMQPAQKVGTWASIVIFIKGVGHTLKVHWLMFTYLVVMMAGFNFMAHGSQDLYPTLLKNQLKFSIDRSTVTNAVATLGALSGQVTIGHLSNVFGRRLSVIISCVIGGALIYPWAFSGGGAGINASVFFLQFFVGCWGIVPIHLSELTPPALRTSLVGVAYQLGNLASAASSTIEAKIGERFPILDEHGNHLPEEYDYGKVMAIFMGCVFAFTMIVMFLGPEKRGSDLCAPQYEVTDAQTAAGDEKFEDKEKVEEVAIERIDTNLTR

SEQ ID NO: 9231 - protein, 390 aa, Triticum aestivum
  misc_feature (231)..(231): Xaa can be any naturally occurring amino acid
  misc_feature (249)..(249): Xaa can be any naturally occurring amino acid
  misc_feature (278)..(278): Xaa can be any naturally occurring amino acid
  misc_feature (316)..(316): Xaa can be any naturally occurring amino acid
  misc_feature (328)..(328): Xaa can be any naturally occurring amino acid
  misc_feature (342)..(342): Xaa can be any naturally occurring amino acid
  misc_feature (350)..(350): Xaa can be any naturally occurring amino acid
  misc_feature (370)..(370): Xaa can be any naturally occurring amino acid
  misc_feature (385)..(385): Xaa can be any naturally occurring amino acid
  unsure (1)..(390): unsure at all Xaa locations
MDSALASAAAIADQRQKIEQYRHILASVISSSPPDIPQAKRFLNHMVSDEVPLVVSRQLLQTFAQELGKLEPDSQKEVAHYALTQIQPRVVSFEEQVVVIREKLAELYESEQQWSRAAQMLSGIDLDSGIRMLDDTNKLSKCVQIARLYLEDDDAVNAEAFINKASFLVTNSHQEVLNLQYKVCYARILDLKRRFLEAALRYYDISQIEQRKIGDEEIDENALRTTLNAAXVTCTILGWVLGPQRSRVXLATLYKDERCSKLKIYPILQKVFLGRILXRKPEIDAFAEELRPHQKPLPPDPPAVLDRAMIEHNLLXSASKLYTNISFXRSLGTLLGIDPKKXEKIACPNXSVEDRMRGQIDQLRLWIHFXEDDTEGYSNGDQQIXGLCQR

SEQ ID NO: 9232 - protein, 377 aa, Escherichia coli K12
MIGGFMINYGVVGVGYFGAELARFMNMHDNAKITCVYDPENGENIARELQCINMSSLDALVSSKLVDCVIVATPNYLHKEPVIKAAKNKKHVFCEKPIALSYEDCVDMVKACKEAGVTFMAGHIMNFFNGVQYARKLIKEGVIGEILSCHTKRNGWENKQERLSWKKMKEQSGGHLYHHIHELDCVQHLLGEIPETVTMIGGNLAHSGPGFGNEDDMLFMTLEFPSGKLATLEWGSAFNWPEHYVIINGTKGSIKIDMQETAGSLRIGGQTKHFLVHETQEEDDDRRKGNMTSEMDGAIAYGHPGKKTPLWLASLIRKETLFLHNILCGAKPEEDYIDLLNGEAAMSAIATADAATLSRSQDRKVKISEIIKHTSVM

SEQ ID NO: 9233 - protein, 140 aa, Brassica napus
LNESTGWGLEISDVKKQLEDARSRGIDVRALVVINPGNPTGQVLAEENQYDIVKFCKNEGLVLLADEVYQENIYADNKKFHSFKKIVRSLGYGEEDLPLVSYQSVSKGYYGECGKRGGYMEITGFSAPVREQIYKIASVN

SEQ ID NO: 9234 - protein, 329 aa, Rhodospirillum rubrum
MTGASGFVGAAVVRALLARGQNVRALVRDTSPRRNLEGLPLETVIGDLTDTASLRAAARGVDALYHVAADYRLWTLDPPAMFRANVEGSVAVIRAAAEAGAKRIVYTSSVAVIKPKADGTPADETTPTLASDMIGPYKLSKFEAERAVQRLITNEGAPVVIVNPSTPIGPRDIKPTPTGRMIVEAALGKMPAYVDTGLNVAHVEDVAEGHLLAFDRGEIGERYILGGEDMSLRDILFTIARLTGGKPPRVSLPHGLIVPLAWAVETLARLRRSETEPFVTLDGLRMARKHMFFSSAKARTALGYAPRPAEQALADALVWFRANGFLDPR

SEQ ID NO: 9235 - protein, 1387 aa, ASPERGILLUS NIDULANS FGSC A4
MFQINRELAALGIEWNPRRIYYLETWRYPEVESPTRWNIRDGLLEDFQVEEWLNQRGEFSPPVPPAEVGNGSHGGIRLLACNYHLFPKISVGMSPETFGLAPQKYEIGNYMLSLTYDMSSHWTTALLAGESIVDTASTIFNRSSLPLAPLSPCDVVREYLMSSPTLWDHPLMLPCIVLSHHLRRLQHHCNRDLTPIVMGIEAQLGVTRVGRRNFDARPRSINAIKDGPVARVQSEHLTVTINTQLTRVGFTARNPKWNYEASALLEKIVTELAAYTPALRPEANEEILGVLDHNITLAKSLEDNVLGLQKRLELQLNVLYSFVAQTDNRLSARLAATAGRDSTSMKILAFITTIFLPGSYVASLFSMNMFNWEDGASGSEGPGSGGSTISPQFWIYWTVAAPLTALTLAGWALWWSFEKHRYDEHLEGNRQDTRVKIPPWWRRILETRHTLNPGLADDYLRFAQQRYETSRPRSKAQHQRATSHLPGGNTRSVLHATPFPLCMQAGKGNRLVDVDGYEYIDCMGDMTACLYGHSHPVIMETVDSTMKSIGMNLGSSTSAEAHFAEALCDRFASIDHIRFCTSGTEANLYALSVARQSTNRTKVIVFEGAYHGGVLSFSHGIAPNNVDKDDWILGQYNDIDGAVQLITENKDIAAAVVVEGVQGAGGCIPGSAGFLHAIQDAARENGIIFILDEVMTSRLAPGGLQSILLHPDHGTPLKPDLTTFGKWIGGGLSIGAFGGRRDLMSVYDPRTSIIHHSGTFNNSTLAMNVGCKGLTSVYTPEACTSLNNLGDELRSGLQELAKGTKMVVTGLGAVMNIHFVRASGSRVVARTSDLEVNSGSVEEALRDLLWFYLIERGFWIARRGMISLILGTGVEEVEQLKGVVGDFLEDFRELVSAYLLPVAALATAVSTHPQTPSDLIVATSSGIVHGIYNDTAHKVRAFLGIPYAEPATGDLRFAPPQPRAPSQHPINASSFGAPCPQVYNYDNESIWNVLPYRIRNVEDMSEECLFVNIWTPAEHQTKKSGAGRKGKAVMLFIHGGGFGEGAGSVGFYDGVDLASSEDVVVVTFNYRLNVFGYPNAPGLDPAEQNLGLLDQRLAVQWVHQNIANFGGDPDRILLFGQSAGGASVDAYAYAYPEDPLVSGFVLQSGTVSLFNNADTAHANWNRLSTAVGCSAGDGSLACMRSVSFSRILEVLGNGSYTFTPVADNRTVFSDYIARAKAGGLARLVRIRTPLTRCQPTLAGINAREFSAGFPLSQSSINETAVTEDLFGSFSCPAYQAVKTRLRQHIPTWRYVYHGNFTNLSPKPWLGAYHSGAWVAFAQNRHTGLEDYGWPLFTFNETTLVNLAVDNRPGAVLGSAEDWDRHCRGDVYIGYTIPDSLQLHVYNM

SEQ ID NO: 9236 - protein, 513 aa, Bacteroides fragilis NCTC 9343
MAQEDVFKKLVSHCKEYGFVFPSSDIYDGLGAVYDYGQMGVELKNNIKKYWWDSMVLLHENIVGIDSAIFMHPTIWKASGHVDAFNDPLIDNKDSKKRYRADVLIEDQLAKYDDKINKEVAKAAKRFGEAFDEAQFRSTNGRVLEHQAKRDALHERFAKALNDNNLEELRQIIVDEEIACPISGTKNWTEVRQFNLMFSTDMGSTADGSMKIYLRPETAQGIFVNYLNVQKTGRMKVPFGIAQIGKAFRNEIVARQFIFRMREFEQMEMQFFVRPGSELEYFKKWKEIRLKWHKALGFGDDHYRFHDHDKLAHYANAATDIEFLMPFGFKEVEGIHSRTNFDLSQHEKFSGKSIKYFDPELNESYTPYVIETSIGVDRMFLSIMSAAYCEEQLENGESRVVLKLPAALAPVKLAVMPLVKKDGLPEKAREIIDNLKFHFHCQYDEKDSIGKRYRRQDAIGTPYCVTVDHQTLEDNCVTLRNRDTMEQERVAISELNNIIADRVSITSLLKTIQ

SEQ ID NO: 9237 - protein, 574 aa, Kluyveromyces lactis NRRL Y-1140
MCGIFASFRNPDVQAYKPKALQLSKRIRHRGPDWSGNIVKNSTILVHERLAIVGLDSGAQPITSEDGSYTLAVNGEIYNHIMLREECASYPFKTLSDCEPIIPLYEKYDIDAPKHLDGMFAWCLYDSKKDRIIAARDPIGITTLYMGRSSASPKSVWFSSELKCLTDDCDEIIAFPPGHVYDSETDKLTRYFTPDWLDESRIPTTPVDFKAVRESLEKAVRKRLMAEVPYGVLLSGGLDSSLIAAIAARETEKTNAELDPVVYDSDPHQLAGLDEQGHLHAAGWSRLHSFAVGLPNAPDLQAARKVATFIGSIHHEHTFTLQEGLDALDDVIYHLETYDVTTIRASTPMFLLSRKIKAQGVKMVLSGEGSDEIFGGYLYFAQAPSAAEFHVESVKRVKNLHLADCLRANKSTMAWGLEARVPFLDRDFLQLCMNIDPNDKMIKPAEGKIEKYILRKAFDTTDEPDLKPYLPEEILWRQKEQFSDGVGYSWIDGLKDAAESTISDEQFAQPKAEWGDDIPTTKEAYWYRLKFDALFPQKTAASTVMRWIPKADWGCAEDPSGRYAKIHEQHVDKK

SEQ ID NO: 9238 - protein, 262 aa, Brassica napus
  misc_feature (159)..(159): Xaa can be any naturally occurring amino acid
  unsure (1)..(262): unsure at all Xaa locations
MDSRWSLRGMTGLVTGGTKGIGYAIVEELAGFGARVHTCARDQTLLDECLNEWKAKGYQVTGSVCDVSSRPQRDELMKTVSSLFSGKLNILINNVGTLTSKPATEFTAQDFSSQIATNLESAYHLSQLAHPLLKASGFGSIVFMSSVGGVVSARSRIHXSLTKGGMNQLARNLACEWASDGIRANSVAPWVTRTPPAQDRRDAKKYAEAICPRTPLGRPCEPSEVASLVTFLCLPAASYITGQTIFIDGGLTVNGFSYKPEV

SEQ ID NO: 9239 - protein, 256 aa, Triticum aestivum
MGFLEDFQASVETLPAMLHKNYSLMRELDKSLQGVQLENEQRCQQEIEDIKHGLESGSITTYEPAKLKFSDEAIEEQKHCVRIADEKVALATQTYDLVDAHIQQLDQYMRKLEELRLEKEAAAAAAAAAADTAVAATSAAPAGAGSLRSAAADPAPKTGRAGERSRGGRKKAKVPTEMPTEMPMEQPAIDLELPVDPNEPTYCFCNQVSYGEMVACDNPDCKIEWFHFGCVGLKEQPRGKWYCLSCSAFQKKRKGR

SEQ ID NO: 9240 - protein, 496 aa, Actinobacillus pleuropneumoniae serovar 1 str. 4074
MNNGAPVVDNQNSMTAGPRGPLLAQDLWLNEKLANFVREVIPERRMHAKGSGAFGKFTVTHDITQYTKAAIFSEVGKETELFARFTTVAGERGAADAERDIRGFAVKFYTEQGNWDFVGNNTPVFFLRDPRKFPDLNKAVKRDPRTNMRSATNNWDFWTLLPEAFHQVTIVMSERGIPASYRHMHGYGSHTYSLINANNERFWVKFHFRTEQGIKNLTNEEAAAIIANDRESHQRDLYESIEKGDFPKWKLYIQVMPEAEAEQVDFHPFDLTKIWSKKDYPLIEVGVMELNRNPANFFADVEQSAFAPSNLVPGISVSPDRMLQARLFNYADAQRYRLGVNHHQIPVNAPRCPVHSNARDGQSRVDGNYGSTLHYEPNSFGQWQEQAQFAEPPLKINGDAAFWDYRQDDSDYFSQPRALFNLMTEKEKQSLFKNTAEGMGDALDFIKYRHIRNCYFCDPAYGEGVAKALGMTVADAMEAYNTDPAMGQPGLIKPNF

SEQ ID NO: 9241 - protein, 327 aa, Pirellula sp. 1
MKTQSITQLVIGAAIAVAFVGPITKTARADDRGHVTADSQVMHRTIQIDDLEIFYREAGPKDAPTLLLLHGFPTSSHMFRNLIPALADRYHVVAPDYPGFGFSSAPSVDEFEYSFDNLAREIQVFTERLKLDQYSLYVMDYGAPIGFRLATAHPERVQTLIIQNGNAYEEGIDNQFWVPVKAFWNERSSENRDALRSMLTLDATKWQFTNGVRNAATISPDNWGHVQPLLDRPGNDEIQLELFHSYGSNPALYPQWQAYLRKHQPPTLIVWGKNDAIFPAEGAYPYQRDLKNAELHLLDTGHFALEEDGEVIANHMRRFLGQHVHSR

SEQ ID NO: 9242 - protein, 160 aa, Pseudomonas fluorescens PfO-1
MSAFHDLKLTALDGQELPLAPFKGQVVLVVNVASKCGLTPQYAALENLYQQYKGKGFSVLGLPCNQFAGQEPGSEQEIQEFCSLNYGVSFPLSKKLEVNGHDRHQLYRLLAGEGAEFPGDITWNFEKFLLGKDGRVLARFSPRTAPDDPSVITAIEKALS

SEQ ID NO: 9243 - protein, 668 aa, Actinobacillus pleuropneumoniae serovar 1 str. 4074
MAERKVLANAIRFLSMDAVQKANSGHPGAPMGMADIAEVLWRDFLKHNPTNPKWADRDRFVLSNGHGSMLIYSLLHLTGYDLSIEDLKQFRQLHSKTPGHPEYGYAPGVETTTGPLGQGITNAVGMAIAEKTLAAQFNREGHKIVDHYTYAFLGDGCLMEGISHEACSLAGTLGLGKLIAFYDDNNISIDGHVDGWFSDDTAQRFEAYGWQVIRNVDGHDAEQIKFAIENAKAETERPTLIICKTIIGYGSPNKSASHDCHGAPLGNDEIALTRKALNWEYAPFEIPAEIYAEWDAKAQGAVVEKEWNAKFAAYEAAYPELAAEFKRRMAGDLPANWEAESKAFIEKLQANPAAIASRKASQNAIEAYAHILPEFLGGSADLASSNLTLWSGSKPIRADHNVDGNYINYGVREFGMSAIMNGIALHGGFIPYGATFLMFYEYAHNAVRMAALMKQRSLFVYTHDSIGLGEDGPTHQPVEQTASLRFIPNLETWRPADQVESAVAWKAAVERKDGPSALIFTRQNLAQQTRTPEQLANVARGGYILRECCQKGGCPDLILIATGSEVDLAMKAAEVLDAEGTKVRVVSMPSTNVFDKQDAAYRESVLPSSVTKRVAIEAQLSDFWYKYVGFEGRIVGMNSFGESAPADQLFKLFGFTVDNVVAKAKEIL

SEQ ID NO: 9244 - protein, 149 aa, Lotus corniculatus var. japonicus
MGSIAVKLFLILGLLATSCVAQAPGAAPTQAPTTTPPPPPAAAPAPPPATPPPAATPAPTTTPPAATPAPSASPPAPTPTASPTGAPTPSASSPPAPIPSGPASGPGPAAGPGPNSADTPPPPSAAFSLNQPIIAGTALVATFFAMVLA

SEQ ID NO: 9245 - protein, 578 aa, Alicyclobacillus acidocaldarius
MELVWQHRWAADAYPLDLSTMVLVLRVARCTPAQRVRVHFGDRYEPDFQNSSEARRYGSDGTFDWFTCRVAAPTRRLKYAFEVLSSTGRAVYLGEGGLADTLDAVQPFQYPYIHPSRVLAVPDWVGHAVAYQIFPDRFAVGEQQLVRPTDPWDARPTPDSVFGGNLRGIVDKLPYLSDLGVNLMYLTPIFQAPSNHKYDTQDYFAVDPAFGTLGDLQLLVREAHRLGIRVVLDAVFNHSGFQFAPFQDVIARGTASPYWSWFFVQGDRVDVESVNYETFATRLRHMPKLNLAEPAAEEYFLQVAKHYVLECDIDGWRFDVANEIDPHFWSRLRSELRALKPDILLIGEIWHDSLPWLMGDAFDGVMNYPLRELVMRYAMDESIDEPAFAEAWVRLYLQYPRPAWRAMWNLLGSHDTERALTRARGHVPSVVLAFAMLFTLPGIPMVYYGDEIGMEGGTDPDCRRGMIWDANLWQLDLREAVRQLAWLKRTHPALAGDTMEIRDANSGVLHYVRLNGTGPHLHIAVCKRRDFGAEVDSPLFAWDVPSRTSGEERKILIWECDSTEGCGHDSRADGFHNQ

SEQ ID NO: 9246 - protein, 477 aa, Crocosphaera watsonii WH 8501
MSESGFDYDLIIIGAGVGGHGAALHAVKCGLKTAIIEAKDMGGTCVNRGCIPSKALLAASGKVRELQDTKHLHNLGIEIDGVDFQREAIADHATNLVNKIRGDLTNSLKRLKVDTIHGWGKIVDTQKVSVLGDDGEKIITAKDIMLCPGSVPFVPRGIEVDHKTVFTSDEAVKLEVLPQWIAIIGSGYIGLEFSDIYTALGCEVTMIEALDTLMPGFDPEISKLAERSLIKARDIETYSGVFATKITPGAPVTIELTDAQSKEVIDVLEVDACLVATGRVPATKNLGLENIGVETNRGFIPVNDKMEVLRDGEPVPHLWAVGDANGKMMLAHAASGQGEIAVENMCGREKTIDYRSIPAAAFTHPEISYVGLTEPAARELGEKEGFEVSSVKTYFKGNSKALAEGETDGIAKVVYRKDNGELLGVHIMGIHASDLIQEAANAIAQRQSVKNLSFNIHTHPTLSEVLDEAFKRAEATV

SEQ ID NO: 9247 - protein, 555 aa, Dechloromonas aromatica RCB
MLKNPDILVVGKHSFNDAALSQIAKSKGDEAAWQQAFQRFGVKAAEHVSGDFAVALNEPNGQVFLAIDRFAIRSLCYRQIGNRLLFAERADELADASTEIDPQAIFDYFYFHAIPSPRTIFKGVYRVPPGHYVLFENAQLTVAPYWIPTFEETRNQPFEKLRDEFRDILQQATTRQLDGGKAACFLSGGTDSSTVAGMIGLAHGAPAATYSIGFEAEGYDEMAFARIAARRFNTEHHEYYVTPDDLVSSIPMVASSYDQPFGNSSALPAYYCAKMAKEGGVSKILAGDGGDELFGGNSRYAKQRIFNSYRHLPSFLQKGLLEPLFSLPGMDQIPLLKKGSSYIEQASIPMPDRLQLYNLITRLGVDQVLTPGFLQAINLNAPLGLQREVWSSAVTDSLTNRELAFDWRFTLAESDLPKVCGTTRLAGINVGFPMLDDELLAFSLRLPVEYKLKGLKLRWFFKEALRGFLPDEIIVKKKQGFGLPFGVWLNRHDALRKLARNSVMGLVDRGVLRGEFVDQLFNKHLQEHPGYYGEMIWISMMLEQWLVHHRANYSI

SEQ ID NO: 9248 - protein, 634 aa, Zea mays
MDGCDCIEPLWPTDDLLVKYQYISDFFIALAYFSIPLELIYFVKKSSFFPYRWVLIQFGAFIVLCGATHLINLWTFTTHTKTVAMVMTIAKISTAVVSCATALMLVHIIPDLLSVKTRELFLKNKAEELDREMGLIRTQEETGRHVRMLTHEIRSTLDRHTILKTTLVELGRTLGLEECALWMPSRSGSSLQLSHTLRHQITVGSSVPMNLPVVNQVFSSNRAIIIPHTSSLARVRPLAGRYVPPEVAAVRVPLLHLSNFQINDWPELSAKSFAIMVLMLPSDSARKWHVHELELVEVVADQVAVALSHAAILEESMRARDLLMEQNVALDLARREAEMAIRARNDFLAVMNHEMRTPMNAIIALSSLLLETELTPEQRLMVETVLKSSNLLATLINDVLDLSKLEDGSLELEIKAFNLHAVFKEVMGFIKPIASIKRLSVSVMLAPDLPLCAIGDEKRLMQTILNISGNAVKFTKEGHITLVASIVKADSLREFRTPEFHPTASDEHFYLKVQVKDTGCGVSPQDLPHVFTKFAHPQSGGNRGFNGSGLGLAICKRFVSLMGGHIWIDSEGTGRGCTATFVIKLGVCDNTNTYQQQLVPLVWPSSADSNLSAPKVLPDGRGSVSLKSRYQRSV

SEQ ID NO: 9249 - protein, 362 aa, Sorghum bicolor
MGSTAEDVAAVADEEACMYAMQLASSSILPMTLKNALELGLLEVLQKDAGKALAAEEVVARLPVAPTNPAAADMVDRILRLLASYDVVKCQMEDKDGKYERRYSAAPVGKWLTPNEDGVSMAALALMNQDKVLMESWYYLKDAVLDGGIPFNKAYGMTAFEYHGTDPRFNRVFNEGMKNHSVIITKKLLEFYTGFDESVSTLVDVGGGIGATLHAITSHHSHIRGVNFDLPHVISEAPPFPGVQHVGGDMFKSVPAGDAILMKWILHDWSDAHCATLLKNCYDALPEKGGKVIVVECVLPVTTDAVPKAQGVFHVDMIMLAHNPGGRERYEREFRDLAKAAGFSGFKATYIYANAWAIEFIK

SEQ ID NO: 9250 - protein, 357 aa, Chlamydomonas reinhardtii
MAAANQKPGPAGRPEPLIGHPRYEKIKDLNSGTFGFVQLARDKLTGETWAVKFIERGDKITKYVEREIINHRCLVHPHIVQFREVFLTPTHLCIVMEFAPGGDMFEYVVRKNGLREDEARWFFQQLIVGLDYCHRMGVVNRDIKLENTLLDSSPRPLVKICDFGYSKHEKFQSAPGSRVGTPAYLAPEVILTTKGKTYDGKIADIWSCGVMLYVMLVGAYPFERPEDKHDNQKLQKMIQRILHVDYHIPPHVRASEDCKDLLAKILVADPHKRITVDGIYNHKWYLKGLPPGVREMNDRVQPPPEGLQSVEEIKRLIEEARHVGVGAPGYVNPVETDEYIDDAMDNMYDEGSLDYND

SEQ ID NO: 9251 - protein, 525 aa, Escherichia coli
AAKDVKFGNDAGVKMLRGVNVLADAVKVTLGPKGRNVVLDKSFGAPTITKDGVSVAREIELEDKFENMGAQMVKEVASKANDAAGDGTTTATVLAQAIITEGLKAVAAGMNPMDLKRGIDKAVTVAVEELKALSVPCSDSKAIAQVGTISANSDETVGKLIAEAMDKVGKEGVITVEDGTGLQDELDVVEGMQFDRGYLSPYFINKPETGAVELESPFILLADKKISNIREMLPVLEAVAKAGKPLLIIAEDVEGEALATLVVNTMRGIVKVAAVKAPGFGDRRKAMLQDIATLTGGTVISEEIGMELEKATLEDLGQAKRVVINKDTTTIIDGVGEEAAIQGRVAQIRQQIEEATSDYDREKLQERVAKLAGGVAVIKVGAATEVEMKEKKARVEDALHATRAAVEEGVVAGGGVALIRVASKLADLRGQNEDQNVGIKVALRAMEAPLRQIVLNCGEEPSVVANTVKGGDGNYGYNAATEEYGNMIDMGILDPTKVTRSALQYAASVAGLMITTECMVTDLPK

SEQ ID NO: 9252 - protein, 400 aa, Rhodobacter sphaeroides 2.4.1
MAFLSDTLARVKPSQTIAVTNKARELAAAGRDVIGLGAGEPDFDTPDNIKAAAKRAIDAGRTKYTAVDGIPELKRAICEKFERENGLKYTPAQVTVGTGGKQILYNALVATLNPGDEVIIPAPYWVSYPDMVLLAGGTPVSVAAGMETGFKLTPEQLEAAITPRTKWFIFNSPSNPTGAAYTRAELAALCEVLMRHPQVWIMSDDMYEHLVFDDFDFTTPAQIEPGLYDRTLTCNGVSKAYCMTGWRIGYAAGPVELIRAMGTIQSQSTSNPCSIAQYAALEALSGPQEFLATNREAFQRRRDLVVSMLNEAKGVTCPNPEGAFYVYPDISGCIGKTSAGGAKITDDEAFASALLEETGVAVVFGAAFGLSPNFRISYATADEVLREACARIQAFCAGLS

SEQ ID NO: 9253 - protein, 197 aa, Medicago sativa
  misc_feature (78)..(78): Xaa can be any naturally occurring amino acid
  misc_feature (110)..(110): Xaa can be any naturally occurring amino acid
  unsure (1)..(197): unsure at all Xaa locations
MSASRFIKCVTVGDGAVGKTCLLISYTSNTFPTDYVPTVFDNFSANVVVNGSIVNLGLWDTAGQEDYNRLRPLSYRGXDVFILAFSLISKASYENVSKKWIPELKHYAPXVPIILVGTKLDLRDDKQFCIDHPGAVPITTAQGEELRKLINAPAYIECSSKSQENVKAVFDAAIRVVLQPPKQKKKKNKAQKACSIL

SEQ ID NO: 9254 - protein, 511 aa, Zea mays
  misc_feature (415)..(415): Xaa can be any naturally occurring amino acid
  unsure (1)..(511): unsure at all Xaa locations
MEAPSLTKPNDPTKPSNTSSTLSLEGGPGEASPLRKMFAVASIAAGIQFGWALQLSLLTPYVQLLGVPHAAASFIWLCGPISGLVVQPIVGYYSDHCTSRFGRRRPFILGGALAVAIAVFLIGYAADIGHSAGDDITKKTRPRAVGVFVIGFWILDVANNMLQGPCRAFLADLAAGDQQKTRIANGFFSFFMAVGNVLGYAAGSYSGLHKIFPFTETKACDVFCANLKSCFFFSILLLLFLATVALLYVKDKQVEAIPLDDATQPSCFFQLFGALKELKRPMWMLMLVTAVNWVGWFPYFLFDTDWMGREVYGGTAGEDAYAKGVRVGSLGLMVNAVVLGFMSLAVEPLGKMVGGVKRLWAIVNFILAIGFGMTVVITKVAEHQRRMNPAAVGHPSEGVVVGSMVFFGVLGVPLXITFSVPFALASIYCSASGAGQGLSLGVLNLAIVVPQMVVSALSGPWDSLFGGGNLPAFMVGAAAAALSAIMAIVLLPTPKPADEAKASSMMAGGFH

SEQ ID NO: 9255 - protein, 3656 aa, Streptomyces rochei
MTDNDKVASYLRRATLDLRAARRRIHELEADPVAIVGTACRLPGGIETPEAFWEVLAAGEERLSAFPEDRGWDLTGLYHPDPDHPGTTYVRTGAFLERAGEFDAAFFGVSPREAAAMDPQQRLLLETSWELIENAGLDPHSLRGTDTGVFLGVARHGYGDTGGSAEDAEGYTVTGAAPSVASGRIAYTLGLEGPAITLDTACSSSLVALHLAVASLRRGECGLAIVGGAAVMAGPEVFVDFARQRALAADGRSKAFGAGADGFGFGEGVAVLLLERLSDARRRGHTVLAVVRGTGINQDGASNGLAAPSRAAQRKVIEQALANAGVAPGDVDAVEAHGTGTTLGDPIEAHALLDTYGRGRGPQRPLWLGSAKSNIGHTQGAAGAVGVLKMVLALRHERLPRTLHAEEASPHVDWSSGAVALLAEEQHWPRGERPRYAAVSAFGISGTNAHVVLQEAPAPEETGERAAPRPATPQHPVPLVVSARSEEALRAQARRLSDVLADTDAELPGIGLTLATARARHEHRAVVVAGSRDLALHGMREVAAGAARLTGTVESGGRSAVFLFPGQGSQWAGMGADLLAWSPVFAETIRACDEAMAPWQDWSVAAVLRQQPGAPGLDRVDVVQPALFAVMVSLAALWRSYGVEPAAVAGHSQGEIAAAYVAGALTLEDAARLVVLRSRLLRSLAGKGAMAAVALDEAAVRELLVPYAGAVEVAAVNGPASVVVSGEPAAVDSLVADCAGRGARARTIDVDYASHSAQMEEVREELAAALRDLRPGRARVPFYSTVTGRPMDGGELDAGYWYRNLREPVRLHDVVRLLADAHHDTFIEVSPHPVLAATVEETLEAAGREPGAALALGTLRRGAPGPESFLTFAASAHVEGVDVRWQPAFGDDARPVALPTYPFQRKHYWTAPAGPARATGGVTYRVSWTPLPAPEPADARGPWLIVGPAASPAWAGLLPAAVREAGGTPLECALDPGLDRAGAAAALTAALAGTTGVRGVLSLLAADESDHPGRPGVPVGAVATLTLAQALADAGVDAPLWCLTRGAVQTDEDDGIGSYAQNAVHGLGRVAGLELGRRWGGVLDLPHPDGADAALLGRVPGLLAGAHAAEDHLALRPGGLYGRRLVPVRTPATTDGTGPRLHGTVLLTGADSPIGARLARWAADSGADHLLLVGEADEELLNALRERGTTATRCAADEDALRAAVEAAPHDISTVVHAATRTEFGPVLATDPEDFAATLQAKTGLALTLAAVLDGRPVEREIHCSSVAGVWGGAGMAGYAAGSACLDAFAAHRRAQGHPSTAVAFSPWALPGTVPSAPQAAQRGLRGLSADRALAALTSALDSGESAVAVSDVDWPAFAAGFGAVRPTALFAEISEARETAEPPAAPAAPDGSPAADLAARLTARTPAQREELLIGVVAEATAAVLGHDSAEDVSARRAFTELGLDSLGSVQLRKRLSAATGLRLPASLVFDHPTVTRLARHLLSLLAADSGPELAAAVGSAPPSAEDEPIAIVGMSCRFPGGIGSPEELWRAVVDGQDLTGELPRDRGWELGALYHPDPDHPGTSYSDRGGFLADAAGFDAEFFGITPREALAMDPQQRLMLEVAWEAVERGGIDPDALRGSRVGVFVGSNGQSYMPLLRGEADRVEGYQGLGNSASVLSGRLAYTFGWTGPALTVDTACSSSLVGIHLAIRALRDGECAMALAGGVTVICDPYTFVDFSRQRGLAADGRCKPFSAQADGFGLAEGAGALLLEPLSRAIESGHPVLAVLRGSAVNQDGASNGLAAPNGPAQEEVIRQALADARLSAADIDLVEAHGTGTRLGDPIEAGALQATYGAPRARPLALGSVKSNIGHTQAAAGVAGVIKAVLAMRHGVIPRSLHAEELSPEIDWSPGTIRVQRENEDWPAGPRVRRAGVSSFGVSGTNAHVVLEEAPAVPESAPAGAEAAPVLPEAVAANVAAPAGRPGGRGLAADTAALVLSARTPSAVRAQAGALAALLRTSPATPLADTARTLATGRTRLDIRAAVLGDDRDSVCAALDALAAGEAAADVVPPRTAAPRKAVLVFPGQGSQWAGMAADLLGQSEIFAAAMADCAAALAPYTDWDLLATLRGDGPEDAFERPDVVQPLLFAVMVSLAALWRAHGVEPAAVVGHSQGEIAAACVAGALTLDTAAKVVALRSKVLGELNGQGGMASVTAAPGELREALAPWDGRLSVAAVNGPRSLVVAGEAAALDEFLGSPRAEEMSPRRIAVGYGSHSPQVAQVEQRLADVLGTVPARSAAVPFCSTVTGAPLDTAGLDAAYWYRNLRGTVRLDQAVRTLMEQGFDTFVEVSPHPVLLPGIEQTAEDLGRDVVTLASLRRDRPGARTFLRNLLEAHADGLPVDLLPALEPGGTAELPTYPFEHTSYWPRPCRTRADAAPSGMDSVAHPVLSAALETPDGGHVLTGRITLGDQPWLADHAVGGETLLPGSALVDLALTAGRHAGTPAVAELVLCAPLLPGAATAVRVTVGAPAADGTRTVDIHARDTDAPGTPWTRHATGVLGEAAPPPATPAVWPPADARPIDLDAAYARLADRGYGYGPAFRALRAAWQRGAEVFAEAELPAAAGPDDAESAGYLLHPVLLDAAAQTLGLGPLADRDGAFLPFSWTGTTLYASGATTIRVSAAPAGADAMSLSVTDPAGAPVAVVSAVTVRPVGGEPGPRAGEETGADDLYHLTWRPLPETTGRAVGCATIGGPCGLGKDHPDLAALAAAVAAGEPEPEAVVVPCRPWQAADPAGSVRESVLHAAGLVRQWLDAPERTGRLVFLTRNAVSTGPADTAADPAQAAVWGLVRSAQAESPGNFALVDIADGADPAVLAALPAVLDHPQLAVRGDLALVPRLASTRTAPALLPPRTPARLEPAGTSLDALAFAAAPDAGRQPGPGEVRVELRSCGVNFRDVLIALGMYPGAAVMGTEGAGVVTAVGPDVTGVAVGDRVMGLFEGAFGPVAVTDHRLVTPVPPGWSTTEAAALPIAFTTAHYALHDLAGVRPGQAVLVHAAATGVGMAAVRLARLAGAEVFATASPAKQGVLRSLGLDDDHIASSREPGFGRRFRAVRGGRGMDVVVNSLTGALLDESAELLAEGGAFVEMGKTDLRDADRFRGRYLPFDLAEAGADRLGAILAEVASLAAGGELGRQTVTAWPLQRASAALQHMSTGRHTGKLVLVQPAPLDPEGTVLVTGGTGTLARLLARHLVTEHGVRHLLLLGRRGPDAPGAARFEAELGELGATVTTRACDVSDRAALAAALDGIPAGHPLTGVVHTAGVLADGLAASLGEDELGTVLAPKADAAWHLHELTADREPNFFVLFGSGASVLAGPGQGAYAAANAALDALARYRQARGLPATSLGWGLWEEASGLTGALDERDTRRMARAGMRPLPTARALALFDLAIRRGDAVAYPLHLDTARAQGAQDAPEVLRGLLHTPLRRAARDQSGGDGLAARLAPLPRPDRLAALTHAVQAQAAAVAGYDTADAVAARRQFKDLGFDSLASVELRNRLGSALGLRLPSTLVFDHPTPEAVAVFVDGRLFAGADAAGAPAPEPGRSVAEHLAALEAVLEGWQEAGEDTAGERRAIGARLTALSDRWSAVAAGDSRTAVDTVDDEELFALLDQRFGEGNEER

SEQ ID NO: 9256 - protein, 335 aa, Vanilla planifolia
SIDAQLRLLAPAKVSEDDKLVEYVALLLDRFLDILQDLHGEVVRETVQELYELSAEYESKHDPKKLDELGNLLISLDPGNSIVIASSFSHMLNLANLAEEVQIAFRRRIKLKKGDFADEASATTESDFEETLKRLVGKLKKTPQEIFDALKNQTVDLVLTAHPTQSVRRSLLQKHGRIRNCLTQLYAKDITPDDKQELDEALHREIQAAFRTDEIRRIPPTPQDEMRAGMSYFHETIWKGVPQFLRRVDTALKNLGINERLPYNAPLIQFSSWMGGDRDGNPRVTPEVTRDVCLLARMMAANLYFSQIEDLMFELSMWRCSDELRLRADELQRSS

SEQ ID NO: 9257 - protein, 168 aa, Vanilla planifolia
RQVSTFGLSLVKLDIRQESERHTDVMDAITRPFEIGSSREWSEEQRQQCLLSELAGKRPLFGPDLPRTEEIADVLDTFQVIAELPSDGFGAYIISMATSSPDVLAVELLQREFRVPKPLRVVPLFEKLADLEAAPAAVSRLFSIDWYRDRINGKQEVMIGYSDSGKDA

SEQ ID NO: 9258 - protein, 142 aa, Clostridium thermocellum ATCC 27405
MSLISWNPFREVDSISRDMETFFERSPFGFFSRATAPRVDVFETEKDVVVKAEIPGVSKEDLNVYVDENSIRLSGETKRDTEYKNEHIYRTERYYGSFSRTIPLPVEVKSEQAKAEYKDGILTVTVPKVETTQMKGKKIDIH

SEQ ID NO: 9259 - protein, 588 aa, Triticum aestivum
  misc_feature (343)..(343): Xaa can be any naturally occurring amino acid
  misc_feature (390)..(390): Xaa can be any naturally occurring amino acid
  unsure (1)..(588): unsure at all Xaa locations
MAEAGDPTLEQGLLANPEESNQLTYTGDGSVDFSGNPVVKEKTGRWKACPFILGNECCERLAYYGISTNLVTYLTKKLHDGNSSAARNVTTWQGTCYLTPLIGAILADAYWGRYWTIATFSTIYFIGMSVLTLSASVPMLMPPSCEGAICPEASPLQYTVFFLGLYLIALGTGGIKPCVSSFGADQFDDTDPAERIQKGSFFNWFYFSINIGALISSSFLVWVQDNLGWGLGFGIPTVFMGLAIISFFAGTSLYRFQKPGGSPITRVCQVVAATLRKWNAPVPEDSSLLYELADGVSAIEGSRQLEHTDELRCLDKAATITDLDVKEDSFNNPWRVCTVTQVXEELKIWVRMFPVRGNDNCVFQCPMLKMSTMFVEQGMVLDPTIGSFKXIPPASLSTFDVVSVIIWVPIYDSILVPIARRFTGKERGFSELQRMGIGLVISILAMSAAAVLEIKRLAIAREAHLVDQNVPVPLSILWQIPQYFLVGASEVFTFIGALEFFYDQSPDAMRSLCSALQLITTALGNYLSAFILTMVAYFTTRGGRPGWIPDNLNEGRLDYFFWLLAGLSFLNFLVYVLCANRFKSKKAA

SEQ ID NO: 9260 - protein, 364 aa, Tropheryma whipplei TW08/27
MVNSLQKLSTAGVSVWLDDLSRSRITDGDLKKRIEKQCVVGVTTNPSIFAKSIASSRDYDSSFKNAFSRGCTLDEAVLSVISEDVSGALDLLADSYSASKGIDGRVSIEVDPTLAYDTEGTFRSVKSIWESINKPNLYVKIPATREGLEAISQSIASGVCVNVTLIFSLQRYREVIDAYLTGLERAVEAGRSIENIFSVASFFVSRFDVYVDEQLDNIGTPQALHLKGRAAVANARLAYEVYEEAFATPRYKILADKGANKQRPLWASTGVKNPRYPDTCYVTNLVARDVVNTMPEATLDAVNDHGEIRGDTITGTYEDSRAILSELAELGVNYTEVTDKLEADGVKQFIDSWNQLKSNVRSRF

SEQ ID NO: 9261 - protein, 406 aa, Yarrowia lipolytica CLIB122
MIASATPRPERYVLSPVSPHAKVEMSKNDPSSFYKSEVRLPPMRVLDTQPSQLPVNIPPLNYTPFDSASASVSANANSNANVNANGNASVGNTPNPVPHSLPPPAPTHSMSSTPISTPAPISTTPIPHLHSQAPTPQPVQQQSVQSVQPVQPVQHQHQHQHQHQHQPQHVQHMPLNQPPLLHQPTPLPPPPQHNTTPQPYGHPIPPPMPMTHPMMPPYYTPFSGQDFKRKTFESKDTASHMYQMISQLETFVQNHGGDMRNMAHAASSPHSPLPSIDALNAMILRLRSCSAIFDEWRDNVVAIHQAAASSQTTNAQYPPKTTPPASPLFINTNTKRKRKRSRSDASTTVCRGCGTTETPEWRKGPEGARTLCNACGLYHAKLAKRKGINVAGEAIRQKRMRTNLSE

SEQ ID NO: 9262 - protein, 698 aa, Tropheryma whipplei TW08/27
MEYNVSRERRASALTVFVWDDKDDLAVNTARVLAADAVENVGNGHPGTAISLAPAAYLLFQKVMRHNPSDPSWAARDRFVLSCGHSSLTLYIQLFLAGYKLSLQDLRGLRQWGSLTPGHPEYGHTPGVEITTGPLGQGLASAVGFAYSARFQRGLFKTDIFDHYVYVIASEGDIEEGVTSEACSLAGLQQLGNLLVILDRNYISIEDNTDIALSEDIKSRYLSYGWQVIEVPWRRAGAEYREDVLSLYEALLEAQKDTDRPSLIILETVIAWPSPGKQNTGAAHGAALGVNEVKDLKRILGFDPEKTFEVPDGVLQHTKGALDRGQSQQDNWENVFSSWRQEHPIEAALFDRLQNGVTPDIDHVLPVFSSEKPISTRAASGQVINRIAEVMPELWGGSADLAESNNTTIKSANSFLPESVTVDHWKSDRYGRILHFGVREHAMAAIINGIVLHGNTRVFGGTFLVFSDYMRPAVRLAALMKIPSIFVWTHDSIGLGEDGPTHQPVEHLWALRAIPGLSVIRPADANEVAWAWKEILERRDGPVGLVLSRQNLPVLDRTCLAPASELRKGAYILADGSRYPRLILIATGSEVSLAIGAREVLENRGIPTRVVSAPCLEWFDQQEKSYRNHVLPPDVETRISVEAGLSLGWSKYIGDKGASVSIEHYGASAAGDVLFERFGFTVENIVKTADALLGGCGE

SEQ ID NO: 9263 - protein, 230 aa, Zea mays
  misc_feature (216)..(216): Xaa can be any naturally occurring amino acid
  unsure (1)..(230): unsure at all Xaa locations
MQIFVKTLTGKTITLEVESSDTIDNVKSKIQDKEGIPPDQQRLIFAGKQLEDGRTLSDYNIQKESTLHLVLRLRGGMQIFVKTLTGKTITLEVESSDTIDNVKSKIQDKEGIPPDQQRLIFAGKQLEDGRTLSDYNIQKESTLHLVLRLRGGMQIFVKTLTGKTITLEVESSDTIDNVKSKIQDKEGIPPDQQRLIFAGKQLEDGRTLSDYNIQKXESTLHLVLRLRGGQ

SEQ ID NO: 9264 - protein, 385 aa, Phaeodactylum tricornutum
MKVATTLTLAFICCASAFGLNGQTTSVMKKVGFGAGSKPMVQAIDVQGNRLGSNMQPLKSAVANEDAPRGGATKSPVDIGLLLYFGLWYLGNYYYNITNKLALNAAGGKVGFPMTISSLQLGVGSIYALFLWLAPDARSRPKISMDDIVKMLPVALCFMGAHSASVFAMGMGAVQFAQIVKASEPAFAAVLSQFVYGKKSRRHKWLCLPIVIGGVILASVKELDFAWSALIAACIANMFAAVRGNENKKLMETPGLKDRIGTVGNQFAITTVLGFILSLPVLFLREGSRFGEFVQLAKTTPAIWMNLVASGLWFYGYNECATMTLKKTGAVTQSVANTAKRVIVIVGVALVLGESLSPIKLIGCSIGIGGVFLYSIIDNLVKPKK

SEQ ID NO: 9265 - protein, 247 aa, Brassica napus
  misc_feature (54)..(54): Xaa can be any naturally occurring amino acid
  unsure (1)..(247): unsure at all Xaa locations
STHASAPFKNYLERYTTPYLASKSSNPLWYAVRRASAHIIVLSSYSPFDVIVVXVKYTPQWRWLDAEFKRVDREKTPWLIVLMHSPVYNSNEAHFKEGESMRAAFEEWFVEYRVDVVFAGHVHAYERSYRVSNVRYNVSSGDRFPVPDTSAPVYITVGDGGNQEGLAGRFMEPQPDYSAFREASYGHSTLDIKNRTHAVYHWNRNDDGKKVATDEFVLYNQYWGKNIRRRKLKKHYIKSVVVDWIAS

SEQ ID NO: 9266 - protein, 397 aa, Neisseria subflava
MYQHVEYYPGDPILSLVETFKNDQRPEKVNLSIGIYFDDEGKMPVLESVSRAETARAATPAPSPYLPMEGLNTYRSAVQHLLFGKDNPALAQGRIVTVQTLGGSGALKVGADFLHRWFPEARAYVSDPTWDNHRGIFEGAGFEVGTYPYYDPATVGVKFDEMTAFFNTLPEHSALILHPCCHNPTGVDMSEQQWDEVLQIIKTRKLIPFMDIAYQGFGGDLDSDAYAIRKAVEMDLPLFVSNSFSKNLSLYGERVGGLSVVCPNKEEAELVFGQLKFTVRRIYSSPPAHGAYIAADVMNNPELYALWQNEVYVMRDRIRAMRQKLYDVLTAQIPDRDFTYFIKQRGMFSYTGLSVEQVRRLRDEFAVYLLDSGRMCVAGLNASNIAYVADAFAEVLK

SEQ ID NO: 9267 - protein, 411 aa, Rhodospirillum rubrum
MGKAGMSMRRVVVTGMGAVSAIGANVGEFAEALRQGRSGIGPIEAISTDRLTVKIAAEVKGFDPKAHFTSDKLAMLDRFAQLALVAAREAMADSALTIDEDLAPRCACIIGSGGSGLITLEEGYRRLYEEGKHRVPPFTVPKYMNNSATSQVTMEFGLKGPAFSVSSACATATHSIGLGFHMVRSGMADVAVVGGADALITMGHIKAWEALRVVAKDTCRPFCKDRSGMVLAEGAAVFVLETLESAQKRGATIHAEMAGFGMTADAGDLLSPSVDGASRAVRMALADGGLAPEDIAYVNAHGTGTVANDATETKCLHEVFGDHAHKLMISATKSFHGHSLGASGAVELVATILALRDGLIAPTLNFTEPDPECDLDYVPNVARQVTVDAGISNSFAFGGLNAVLALRRFVG

SEQ ID NO: 9268 - protein, 586 aa, Lactobacillus sakei
MKKTKIVSTLGPASNSVEIITKLIEAGANVFRFNFSHGDHEEHLSRMNMVREAEKATGKTVGIMLDTKGAEIRTTVQQGKKFELHTGEVVRISMDDTLEGTPEKIAVTYPGLYDDTHVGGHVLIDDGLVDLKIIEKDEANKELVTEVQNDGMVGSRKGVNAPGVSINLPGITEKDASDIRFGLDNDINFIAASFVRKPQDVLDIRELLEEKHMEHVQIFPKIESQEGIDNIDDIMKVSDGLMIARGDMGVEIPFENVPFVQKNLIKKCNAIGKPVITATQMLDSMQENPRPTRAEVNDVANAVIDGTDATMLSGESANGDYPVEAVATMARIDERTEKSLTDRDAYALKAYSKTNLTESIGQAVAHTARNLGIKTIVAATESGSTARMISKYRPQADILAVTFDERTRRGLTVNYGVYPVMAKKPANTDDMFNLATQTAQEHGFAKEGDLILITAGVPVGERGTTNVMKIQLIGSKLTQGQGVGDETIVGKAVVASNAKEAAEKAVDGGILVVKATDKDYLPAIEKSSAIVVENGGLTSHAAVVGIAMGIPVVVGAKDATEAIKDGEVVTVDSRRGIVYRGATNAL

SEQ ID NO: 9269 - protein, 546 aa, Shewanella sp. MR-7
MTTRYIFVTGGVVSSLGKGIAAASLAAILEARGLNVTIMKLDPYINVDPGTMSPTQHGEVFVTEDGAETDLDLGHYERFIRTKMNRRNNFTTGRIYEEVLRKERRGDYLGATIQVIPHITNAIKEKVIAGGEGHDVAIVEIGGTVGDIESLPFLESIRQLGVELGRDRTLFMHLTLVPFLGAAGEVKTKPTQHSVKELRSIGIAPDVLICRGDRAIPANERAKISLFCNVEERAVISLKDVDSIYKIPALLRSQGLDDLVVKRFGLECREADLSEWENVIYQEANPNGEVVIGMVGKYIELPDAYKSVNEALKHAGLKNRVSVTIKYIDSQTVEAKGDEVLQGLDGILVPGGFGERGVEGKIQAAKFARENNLPYFGICLGMQVALIEFARNVAGMADAHSTEFNKETPFPVVGLITEWVDEEGNVEQRHEASDLGGTMRLGAQLCHLLEGSKAAQAYKGNSCVERHRHRYEVNNKYRERLEQAGLVFSGLSSDRKLVEMIELKDHPWFVAGQFHPEFTSTPRDGHPLFEGFVAAASAHQKRDLKK

SEQ ID NO: 9270 - protein, 291 aa, Sulfolobus tokodaii str. 7
MITVVGSYNVDFILKVDEFPNEGETVFAKEIYINHGGKGSNQAVSASRLKAKVRIIAAVGNDEFGKNAIRFWEDEGIDTAYVKIKNSVTGSAYIIVNSRGENVIVVNRGANALLNEEDIDNALSGDILLTQLEIDEKVVKKALKEFNGIKILNPAPAILKDFSILDYVDILTPNEIEFKELTNTDDIDSGIQLLLKKVKKAVIITLGERGALIATKHEKILVPTIKVNPIDTTGAGDVFNAALAVYLERNYDLRTAVRIANKLASYSTTIIGALGPRYEEVKNLIEEENEN

SEQ ID NO: 9271 - protein, 232 aa, Triticum aestivum
PLLPPWLEEHQGLPTTATGRSREETLCTAASRRRVGLLVAGSPRRSGRGGRRWRSGTWRRGSSPSPTSGPAAAAPSPPSGRPRRTSRASPPRPPPAPRARCSRPSRTSRPAAPTTCLPGVSPREPALLRPRPRRRRRVAGPSRDGRRRRRRTRSVPWPSVSSVGTLRFCCVTLLCFGERLVKCDETVGVWKAVFYSFSPCQCPRAPVADAWVDNFPGIPDGYHPVFWSNLFF

SEQ ID NO: 9272 - protein, 158 aa, Pseudomonas fluorescens PfO-1
MINASLMQMVINASNDGIVVAEREGKDDNILIYVNPAFERLTGYTSEEILYQDCRFLQSGDRDQENLALIRDALRNNGSCREILRNYRKDGTPFWNELSLSTVKNVDDGQTYFVGVQKDVTVQVKAQQRVAQLEAQVAALEAELAALKATNGANKTAN

SEQ ID NO: 9273 - protein, 451 aa, Rhodobacter sphaeroides 2.4.1
MVRSSTFTSHARAILALGLPLVGSHLAQMSLHVTDTVMLGWYGVTELAAVVLGASLFFVTFILGSGFAQAVMPMVAEALGRGDETQVRRDTRMGLWLSIAFGLLVYPLFWFSGSILLALGQQPEVAALAQDYLRIAGLGMVPALLIMVLKSYLSALERTQIVLWATLAAVVVNAGLNWVLIFGRFGAPELGVEGAAIASVGAQIMSLAALGLYAALLPPLRRFNLFQRFWRPDWHALARVFALGWPIGFTGLAEGAIFQAAALMMGWIGTVPLAAHGIAPEVTALAFMVHVGISNAATIRTGRADGAGNTEGLRDGAKVAILLSLGFGLVMVAIFLLFPGPIIALFLDRANPEFDEIVAFGSVLLAFAALFQIADAMQVIALGLLRGLRDTQVPMWLASFSYWMVGIPASYVLGFPMGLGGPGLWLGLVVGLTLAAILLMTRFWLRAPRLA

SEQ ID NO: 9274 - protein, 111 aa, Crocosphaera watsonii WH 8501
MKTLPKERRYETLSYLPPLTDQQILLQVQNVLDQGMIPGVEFEEDPSPTTHFWTMWKLPLFNAVSAQEVLAEVRECRSEYPNAYIRVIGFDNIKQCQTMSFIVHKPNNRAY

SEQ ID NO: 9275 - protein, 378 aa, Sulfolobus tokodaii str. 7
MVSRIGREIEISPVELASQIAKKVEINLASGTPDPKVMPIAEIKETYNEVIEEYGSKVFFYPGAGGQEELIKEIENYIPNLNLSLNGNRIVVTSGAQHAIELLSKYFLENDTIAVENPTFIETFTPLKLRSNVVLPIGLDSKGIIVDELETVLKIVKIKLLYVIPNCHNPAGVNLCEDRRKRLVELADSYDFYILEDDPYKPIAGETPKPIKYFDKSGRVIYISSFSKIIAPGLRIGFILANEEIAEKISLIEQMDFSTSTINQYVVARLLKKGIVKNRMNYLYEHYANKMKILTDSLLDTGFTDFNRPSCGFFLLLDLKKDSWKVFNEAIKMGLSFVPAKPFFLRGGDTMARLSISVATEDEIKKGVKILKSAWDRV

SEQ ID NO: 9276 - protein, 428 aa, Magnaporthe grisea 70-15
MLSTMRIASRQVAGRRMAVRPLAALRPASTWANVQMGPPDAILGITEAFKADSNNKKINLGVGAYRDDAGKPYVLPSVRQAEEKVIAARMNKEYAGITGVPEFTSGALTLAYGKDSTALDRTAITQSISGTGALRIGAEFLSKFYPGAKNIYIPTPSWANHGAVFTQAGLKVEKYRYYNKDTIGLDFEGLVADVKAAPKGSIFLFHACAHNPTGVDPTPEQWREIETVVKSAGHYAFFDMAYQGFASGDIHKDAFALRHFVAQGHNVCLAQSFAKNMGLYGERVGAFSIVCDSAEEKKRVDSQLKILVRPMYSNPPIHGARIAAQILNTPALYDQWLAEVKGMADRIITMRALLKENLEKLGSKHDWSHITSQIGMFAYTGLTPEQMEQLAKSHSVYATKDGRIRSLVSPARTLAVLLRLSSRSRVRW

SEQ ID NO: 9277 - protein, 257 aa, Lycopersicon esculentum
MFSSDENLFNFIVFFILVMAFPTFILCQFFTSPYGKHYTSADSGTTISPPIAWAFMESPTLWLTIIVFRLGKNYTNPLAFLLISPYLFHYTNRTIIYPLRLRSRNTKNNFPLNIAVTAFIFNLLNAYIQSRWVSHYANYQEDDWFWVRFGIGLVIFGSGMLLNIWADGVLLGLKSQGGGYKIPRGGLFDYVSSPNYLGEIMEWLGWALMTWSWAGLAFFVYTCANLVPRAVSNHKWYLQKFGEDYPKNRKAVFPFLY

SEQ ID NO: 9278 - protein, 362 aa, Solanum melongena
WDTSVAIEVKVGDSIEIVRFFHCYKRGVDRVFVDHPMFLEKVWGKTGSKIYGPKAGQDYLDNELRFSLLCQAALEAPRVLNLNCSKYFSGPYGEDVLFIANDWHTALIPCYLKSMYQSRGIYLNAKVAFCIHNIAYQGRFTFSDFPLLNLPDEFRGSFDFIDGHEKPVKGRKINWMKAGILESDRVVTVSPYYAQELVSAVDKGVELDNVLRKTTITGIVNGMDTQEWNPATDKYTDVKYDITTVMDAKPLLKEALQAAVGLPVDRKIPLIGFIGRLEEQKGSDILVAAIHKFIGLDVQIVVLGTGKKKFEQEIEQLEVLYPNKAKGVAKFNVPLAHMITAGADFMLVPSRFEPCGLIQLHA

SEQ ID NO: 9279 - protein, 268 aa, Triticum aestivum
  misc_feature (16)..(16): Xaa can be any naturally occurring amino acid
  misc_feature (227)..(227): Xaa can be any naturally occurring amino acid
  misc_feature (229)..(229): Xaa can be any naturally occurring amino acid
  misc_feature (244)..(244): Xaa can be any naturally occurring amino acid
  misc_feature (251)..(251): Xaa can be any naturally occurring amino acid
  misc_feature (255)..(255): Xaa can be any naturally occurring amino acid
  misc_feature (262)..(262): Xaa can be any naturally occurring amino acid
  misc_feature (267)..(267): Xaa can be any naturally occurring amino acid
  unsure (1)..(268): unsure at all Xaa locations
GSGTRDRPGRRRRPWXPYKHRPTSGANSGYWTTNSGAPVWNNNNALTVGQRGPILLEDYHLIEKLAQFDRERIPERVVHARGASAKGFFEVTHDVSQLTCADFLRAPGVQTPVIVRFSTVVHERGSPETLRDPRGFAVKFYTREGNFDLVGNNMPVFFIRDGMKFPDMVHAFKPSPKTNMQENWRIVDFFSHHPESLHMFTFLFDDVGIPLNYRHMDGFGVNTYTLXSXDGKAHLVKFHWKPTXGVKCLLXDETXTVGGTCXTMPQXT

SEQ ID NO: 9280 - protein, 362 aa, Solanum myriacanthum
WDTSVAVEVKVGDSIEIVRFFHCYKRGVDRVFVDHPMFLEKVWGKTGSKIYGPKAGQDYLDNELRFSLLCQAALEAPRVLNLNCSKYFSGPYGEDVLFIANDWHTALIPCYLKSMYQSRGIYLNAKVAFCIHNIAYQGRFAFSDFPLLNLPDEFRGSFDFIDGHEKPVKGRKINWMKAGILESDRVVTVSPYYAQELVSAVDKGVELDNVLRKTSITGIVNGMDTQEWNPATDKYTDVKYDITTVMDAKPLLKEALQAAVGLPVDRKIPLIGFIGRLEEQKGSDILVAAIHKFIGLDVQIVVLGTGKKKFEQEIEQLEVLYPNKAKGVAKFNVPLAHMITAGADFMLVPSRFEPCGLIQLHA

SEQ ID NO: 9281 - protein, 219 aa, Rhodobacter sphaeroides 2.4.1
MLKIYGVYRSRASRPLWLLAELDLPFEHVPVIQANRVAHPHGPEAPLNTASAAYLAVNPLGQIPCLEEEGLILTESLAITLHIARTQGGQLGPRSEPEDALMVSWSLFAATAVEPPALEIQLIQRSGGGTSPEGQAAIAIAAERLRRPLARLERHFAAEDYLVGGRFTVADLNLAETLRYGQAHPALLEPFPAVAAWLDRCQSRPAFRLMMERRAAEPE

SEQ ID NO: 9282 - protein, 362 aa, Solanum palinacanthum
WDTSVAIEVKVGDSIEIVRFFHCYKRGVDRVFVDHPMFLEKVWGKTGSKIYGPKAGQDYLDNELRFSLLCQAALEAPRVLNLNCSKYFSGPYGEDVLFIANDWHTALIPCYLKSMYQSRGIYLNAKVAFCIHNIAYQGRFAFSDFPLLNLPDEFRGSFDFIDGHEKPVKGRKINWMKAGILESDRVVTVSPYYAQELVSADDKGVELDNVLRKTSITGIVNGMDTQEWNPATDKYTDVKYDITTVMDAKPLLKEALQAAVGLPVDRKIPLIGFIGRLEEQKGSDILVAAIHKFIGLDVQIVVLGTGKKKFEQEIEQLEVLYPNKAKGVAKFNVPLAHMITAGADFMLVPSRFEPCGLIQLHA

SEQ ID NO: 9283 - protein, 398 aa, Erwinia carotovora subsp. atroseptica SCRI1043
MPAAFYQQLTTQIMAARTEGVFKEERIITSAQQAEIEVMDSDRLLNFCANNYLGLADSPELIVAAKAGLDSHGFGMASVRFICGTQDIHKQLERKLADFLGMEDVILYSSCFDANGGLFETLMGPEDAIISDALNHASIIDGIRLSKARRYRYANNDMSQLEAQLQLARAEGARHIMIATDGVFSMDGVIADLQGVCDLADRYDALVMVDDSHAVGFVGEQGRGTHEHCGVMDRVDIITGTLGKALGGASGGYTAGKREVIDWLRQRSRPYLFSNSLAPAIVTASLKVLDLLEYVGERRDRLWKNARLFREKMTAAGFTLAGADHAIIPVMLGEAQLAQDFAQALQREGVYVAGFFYPVVPLGQARIRTQMSAAHTSQQIEFAVEAFIRVGKRLGVII

SEQ ID NO: 9284 - protein, 268 aa, Pisum sativum
MAESSSTKTGLRLAGKVAIVTGGASGIGKETAHLFANQAARMVVIADIQDELGIQVAESIGTDRCTFIHCDIRIEDDVKNLVQSTVDTYGQIDIIHCNAGIISPSDQTLLELDVSQANGVFATNAIGTALCVKHAARAMVDGKVRGSIVCTASISASYGVTTGTDYSMSKHAVLGLMRSASVQLAKYGIRVNSVSPNGLATPLTEKLLDADAKTVEEIFSKFSMLKGVVLRTNHVADAVLFLASNDSDFVTGFDLRVDGNYITSHAVI

SEQ ID NO: 9285 - protein, 361 aa, Erwinia carotovora subsp. atroseptica SCRI1043
MKALAKLRPEEGIWMMDAPMPELGHNDIMIKIRKSAICGTDVHIYNWDEWSQKTIPVPMVVGHEYVGEIVAIGQEVNGFHIGDRVSGEGHITCGYCRNCRAGRRHLCRNAIGVGVNRPGSFAEYLVIPAYNAFRIPDNISDELAAIFDPFGNAVHTALSFDLVGEDVLITGAGPIGMMAAAVCRHVGARNVVITDVNAYRLELASKMGATRAVNVAEEKLTDVMIELGMTEGFDIGLEMSGAPSAFRAMLKAMNHGGRIAMLGIPHEPMSIDWGEVIFKGLFIKGIYGREMFETWYKMSALIQSGLDLSPIITHRFHIDEFQKGFDAMRSGQSGKVILNWDEAYTRHTSSCMCVDCATRHT

SEQ ID NO: 9286 - protein, 130 aa, Thiobacillus denitrificans ATCC 25259
MDNEALKGVKVMVIDDSNTIRRSAEIFLNQAGCEVILAQDGFDALAKITDHEPDVVFVDIMMPRLDGYQTCSLIKRNARYRGTPVIMLSSKDGLFDRARGRMVGSDEYLTKPFTKDTLLTAVREHASAGA

SEQ ID NO: 9287 - protein, 362 aa, Solanum platense
WDTSVAIEVKVGDSIEIVRFFHCYKRGVDRVFVDHPMFLEKVWGKTASKIYGPKAGQDYLDNELRFSLLCQAALEAPRVLNLNCSKYFSGPYGEDVLFIANDWHAALIPCYLKSMYQSRGIYLNAKVAFCIHNIAYQGRFAFSDFPLLNLPDEFRGSFDFIDGHEKPVKGRKINWMKAGILESDRVVTVSPYYAQELVSAVDKGVELDNVLRKTSITGIVNGMDTQEWNPATDKYTDVKYDITTVMDAKPLLKEALQAAVGLPVDRKIPLIGFIGRLEEQKGSDILVAAIHKFIGLDVQIVVLGTGKKKFEQEIEQLEVLYPNKAKGVAKFNVPLAHMITAGADFMLVPSRFEPCGLIQLHA

SEQ ID NO: 9288 - protein, 411 aa, Zea mays
MSKKKKKTPPPVRHFVAFSSSRDCRLRPREFSIRSPSGLVRVRTRDWVGRLVLPCRKIPFVRCRQLAILGRSWSGPVLMEERYEALKELGAGNFGVARLVRDKRTKELVAVKYIERGKKIDENVQREIINHQSLRHPNIVRFKEVCLTPTHLAIVMEYAAGGELFEKICSAGRFSEDESRYFFQQLISGVSYCHSMEICHRDLKLENTLLDGSPTPRVKICDFGYSKSALLHSKPKSTVGTPAYIAPEVLSRKEYDGKVADVWSCGVTLYVMLVGSYPFEDPEDPRNFRKTISRILGVQYSIPDYVRVSSDCRRLLSQIFVADPSKRITIPEIKHHPWFLKNLPREISEREKANYKDADAAEPAQAVDEIMRIVEEAKTPGDMSKVVDPALLAEMAELESDEEEADADDTY

SEQ ID NO: 9289 - protein, 256 aa, Pisum sativum
MAESSSTKSSLRLAGKVAIVTGGPKQGARIVVIADIQDKLGIQVAESIGTDKCRFIHCDIRIEDDVKNLVQLTVDCYGQIDIIHCNAGIVSPSDQTLLELDVSQTNGVFATNAIGTALCVKHAARAMVDGKVRGSIVCTASISASYGVTTGTDYSMSKHAVLGLMRSASVQLAKYGIRVNSVSPNGLATPLTEKLLDADAKTVEEIFSKFSMLKGVVLRTNHVADAVLFLASNESDFVTGLDLRVDGNYITSHAVI

SEQ ID NO: 9290 - protein, 351 aa, Solanum pseudocapsicum
WDTSVAIEVKVGDSIEIVRFFHCYKRGVDRVFVDHPMFLEKVWGKTGSKIYGPKTGQDYLDNELRFSLLCQAALEAPRVLNLNCSKYFSGPYGENVLFIANDWHTALIPCYLKSMYQSRGMYLNAKVSFCIHNIAYQGRFAFSDFPLLNLPDEFRGSFDFIDGYEKPIKGRKINWMKAGILESDRVVTVSPYYAQELVSAADKGVELDNVLRKTSITGIVNGMDTQEWNPATDKYTDVKYDITTVMDAKSLLKETLQATVGLPVDRKIPLIGFIGRLEEQKGSDILVAAIHKFIGLDVQIVVLGTGKKKFEQEIEQLEVLYPNKAKGVAKFNVPLAHMITAGADFMLIPSR

SEQ ID NO: 9291 - protein, 645 aa, Arabidopsis thaliana
MSKPIRNLDGPSGRAPTVQQIRNKHGTREVIVDNGIISVSFSSPQGLITGIKYKGVNNVLHPHQRAREYFVPEPYKNTMNPLYLNHTDKFRQYGLWQRYTELYPNHDLIYTIGVSNYSKDWFYSQVTRKIGDSTYTPTTWQTVFHLPYVNMRGSYTLQLALASAAWANLQVRFNNEYTRPFFSTGYIGRDNAIARHGIHGLYRLYSINVPGRLLRTGTNTIYLRQAKASGPLEGVISKEKPTLGGTRIKTRKRNIAAPLDPAAFSDALVQIYLDNAGDLELVARSLESSDLNFSRYGDIFFEVVFIGGRTQTGSVKSDEGERHPYSIIDCEPKREAILPSVVYIQKILRRKAFLIKNLENVTRRFLQSLELFEENERKKLAIFTALAFSQKLSGLPAETVFQPLLKDTLVAKGIVLNFVTDFFNEYLVENSLDDLISILRRGKMDDKLLEFLPPTKRTTESFAEHFTKAGLTALVEYNERKIFEVKLKEIKAVLTSQVTEEINVDEVTEMVKQQVKDAKLPETEVVHVIWDGIMNAVQWSGKNQQQNSNAVLRQVKTWAPLLNTLCSTGNMEMELMYKVQMQCYEDAKLMKVFPEVVRSLYELDVLAEDTILHWYRKGTNPKGRQTFVKGLEPFVNWLEEAEEEE

SEQ ID NO: 9292 - protein, 393 aa, Populus balsamifera subsp. trichocarpa x Populus deltoides
MEAQNPQHGHPVEISVDILDGEMSGGSKGCGEAPCGFSDTGNNSKNAKERSASMRKLWISVALCIVFMSAEIAGGIEANSLAILTDAAHLLSDVAGFAISLFSLWAAGWEATPRQSYGFFRIEILGALVSMQLIWLLAGILVYETIIRLIHGTSEVNGFLMFLVAAFGLLVNIIMALVLGHDHGPDHDHKHGTGHSHGTTVSTHNHHHVEHPKHDDNHHDHSNNEHHHAHEDHVEPLLDKGEAMHEKKQRNINVQGAYLHVLGDSIQSIGVMIGGAIIWYKPEWKIIDLICTLIFSVIVLGTTIKMLRNILEVLMESTPREIDATKIEKGLLEMEEVMAIHELHIWAITVGKILLACHVKIMPEANADMVLDNVISYLRREYNISHVTIQIER

SEQ ID NO: 9293 - protein, 425 aa, Thiobacillus denitrificans ATCC 25259
MSRNEALFEASQKVIPGGVNSPVRAFRSVGGTPVFFSRARGSRVWDADGREYIDYVGSWGPAILGHAHPGTVKAVQDAAANGLSFGAPSEAELTIATRITELLPSVEKVRLVSSGTEATMSAIRLARGFTGRSKFIKFEGCYHGHADFLLVKAGSGALTFGNPTSAGVPPEVAAQTIVLDYNDVAGLERTFAEIGDEIACIIVEPFAGNMNLVKPSAEFMAAMRRLCDEHGALLIFDEVMTGFRVDLGCAQKLLGIRPDLTTLGKVIGGGMPVGAFGGRADVMDALAPVGPVYQAGTLSGNPVAVAAGLATLASVSEPGFYPALAARTEKLVKGLTAAAREAGVTFCADSVGGMFGLYFAAEPPASFAEVMRCDKEKFNRFFHAMLDHGVYLAPSAFEAGFVSAAHSDADIDATVAAAREVFRTL

SEQ ID NO: 9294 - protein, 524 aa, Escherichia coli
AAKDVKFGNDARVKMLRGVNVLADAVKVTLGPKGRNVVLDKSFGAPTITKDGVSVAREIELEDKFENMGAQMVKEVASKANDAAGDGTTTATVLAQAIITEGLKAVAAGMNPMDLKRGIDKAVTAAVEELKALSVPCSDSKAIAQVGTISANSDETVGKLIAEAMDKVGKEGVITVEDGTGLQDELDVVEGMQFDRGYLSPYFINKPETGAVELESPFILLADKKISNIREMLPVLEAVAKAGKPLLIIAEDVEGEALATLVVNTMRGIVKVAAVKAPGFGDRRKAMLQDIATLTGGTVISEEIGMELEKATLEDLGQAKRVVINKDTTTIIDGVGEEAAIQGRVAQIRQQIEEATSDYDREKLQERVAKLAGGVAVIKVGAATEVEMKEKKARVEDALHATRAAVEEGVVAGGGVALIRVASKLADLRGQNEDQNVGIKVALRAMEAPLRQIVLNCGEEPSVVANTVKGGDGNYGYNAATEEYGNMIDMGILDPTKVTRSALQYAASVAGLMITTECMVTDLP

SEQ ID NO: 9295 - protein, 388 aa, Clostridium thermocellum ATCC 27405
MYDFQGALKDIKNKGLYREFRNVNAAQGPYTVIDGRKMLMMSSNNYLGLCDDIRLKRAAIESIRKFGVGAGGSRLTCGNFELHRELEERLAKFKDVESCIVFGSGYAANIGAISGIADKNWVIFCDRLNHASIVDGIRLSGAKLVVYKHCDMEDLESKIVRYHTGKSLIVTDGVFSMDGDVAPVDRIVKLAKKYNLMTMVDDAHATGILGEKGRGTSEYFGLKDAVDISMGTLSKAFGVEGGFVAGKRKLVDFLRHKAKSFIYSTAPPPHNMAAALEALNIIETEPQARKELAEKSVWLRNRLIEKGFNVPKGVTPIIPLMVGDVNTAVEFSMLLYNEGIYIPAIRPPTVPKGTSRLRISIMASHSYEDMEFALKNLVRFGRKLGIIP

SEQ ID NO: 9296 - protein, 1007 aa, Streptomyces coelicolor A3(2)
MHDDRSLVEARLKRVLDERVRPALYPESVPLDVAVWNAPGEPVPVEEGLAAEPRPIEVGARWGAPWGTSWFRVTGTVPTEWAGKTVEAILDLGFDENMPGFQCEGLVYRPDGTPVKGLNPRNQWVRIGAPVEGGEQVRLHVEAASNPVILDYHPFVPTRLGDKDTAGSEPQYTLTRMDLAVLDETVWNLVLDLEVLGELMAELPVDSPRRWEILRAVDKALDAIDLQDVNGTAEQARSRLTEVLAAPAVPSAHRISAVGHAHIDSAWLWPLRETVRKVARTTSNMTALLEDEPDFVFAMSQAQQWAWVRDHRPEVWARVKKAVADGRFVPAGGMWVESDTNMPGSEAMARQFVHGKRFFLDEFGVENDEAWLPDTFGFAAGLPQIIKAAGAKYLLTQKISWSQTNKFPHHTFRWEGIDGTRIFTHFPPVDTYNCSMKGSEIAHAATNFKDKGVARHSLAPTGWGDGGGGTTREMVAKAARLRNLEGSATVEWETPHAFFEKAEAENPAPPVWVGELYLELHRATLTSQAKTKQGNRRSEHLLREAELWAATAAVRAGFPYPYDDLDRIWKTVLLHQFHDILPGSSIAWVHREARATYDRVAAELNGIIDAAQRALAGEGDTPLVFNSAPHARAGVPAGAAASPATDGRTGLSPRPGGGHVLDNGLLRVEIDERGLVVSAYDLAADRETIAPGGAGNLLQLHPDFPNMWDAWDVDEFYRNTVTDLTDADEVVPGDDGASVRIVRSFGSSRVTQVLTLAPGERRLEVDTEVDWHETEKFLKLAFPLDVHAERYASETQFGHFHRPTHTNTSWEAAKFEACNHRFVHLEEPGWGVALVNDSTYGHDVTRTVRTDADAGTTTTVRLSLLRAPRFPDPETDQGVHRFRHALVPGAGIGDAVREGWRINLPERHLTGGAPEVAPLVTVDRDAVVVTAVKLADDGSGDVVVRFHEAHGGRTRATLTAGFAVADVQVTDLLERPLADTEAPRPDGDRIAVSLRPFQLTTLRLKRA

SEQ ID NO: 9297 - protein, 457 aa, Clostridium thermocellum ATCC 27405
MYDLQRKDLEYIWHPCSQMKDYEDFPPIVIERGEGPYIFDVLGNRYIDAVSSWWVNLFGHCNKRINDAVKRQLDSLEHVIFANFSHRPAIELAGKIVEITPQGLNKVFFADNGSSAVEIALKLSFQYHLQTGSCEKKKFVALSDAYHGETLGALAVGGLDLYSKIYKPLMMSTIKVPGPDCYRCKYGKERTCCEAECFCEMEKILEEKHREICGVIIEPMVQAAAGMKIYSAKYLIKLREACSYYNIHLIADEIAVGFGRTGKMFACEHGGISPDIMCLSKGLTAGYMPLSLVVTTQKIYDAFYSDYIELKAFLHSHSYTGNPLACAAALESLKIFEDDDVLNKNREKSGLFRKLAESLAHSHPYVGEFRQIGMIAALELVENKAQKKEFDWKKRVGYNIYKLALKKGLLLRPLGNVLYFMPPYVVGQKDIEDIVSGAFYAINEYFGLDFKYKRMFP

SEQ ID NO: 9298 - protein, 629 aa, Ustilago maydis 521
MNPPASGSGDGGEDAASATQRSSSINQMAFCHECGIEIRPLMTPDPTCPRCNGQFVEIIDENSAADGMSFALETDEDDEIPLPGHFASLSSVQGGGLLNHLLTAMATGRAAQRSPHTPGSSDSNPRTATAADSPGRNQSPYTTTRSGTTSFGPFGLQWNVQYGSGGGDPYQRAAEQQAEQDQRQQQNSNLQSPPTLSNFLRFAFGGADSTDDPATRPDTYFHEDGMGGAGGVADGRHFNHDNRGTFHQPDRSNDPSSRDSGTNAGSPNNDLPPELSALRNLFTSLFGEPGAQGGSLLDVLAAGAQGGGPRGQWGDYVLGQQGLDDIISQLMEQTQGSTAPPPATEDVIEKLERFTLEDKQRIQKARNQDCPTCKDDFLPSSEANKQDGSGEKGEDADEQQQDLISMPCGHIFHVDCLVPWLRMHGTCPVCRISIVKPTEGQEEQSSSNTTTQQPQGSSGGNTSDASAARATAIPGGWPSPPNPFASSFNHNMHQGVQVPRDSPEVSTMTIHPQPATSTTVTSTTYPAHVIGTPSTTGATGPAGIVINSIMSSPPIVSDREEFFAEPPSMDESQQQAHSGIREDMRETLRRAAEDRARNAGAQADGSTGGAGQRQRQRQRQPWLEPDELD

SEQ ID NO: 9299 - protein, 216 aa, Glycine max
  misc_feature (40)..(40): Xaa can be any naturally occurring amino acid
  unsure (1)..(216): unsure at all Xaa locations
MMNASKFIKCVTVGDGAVGKTCMLICYTSNKFPTVFHLNXDYIPTVFDNFSANVAVDGSIVNLGLWDTAGQEDYSRLRPLSYRGADIFVLAFSLISRASYENVLKKWMPELRRFAPNVPIVLVGTKLDLREDRGYVADHMGSSVITSAEGEELRKQIGAAAYIECSSKTQQNVKAVFDTAIKVVLQPPRRKEMARKKRHRRSGCSFVSIMCGGCAA

SEQ ID NO: 9300 - protein, 311 aa, Cucumis melo
NFQDYHGLPEFRNAIASFMGKAGGGRVKFDPSRIVMGGGATGASETVIFCLADPGDAFLIPSPYYAAFDRDLQWRTRAQIIPVHCNSSNNFQITREALEVAYKKAEESNIKVKGLIITNPSNPLGTIYDRDTLKSLVNFVNDNNIHLICDEIYSATVFKSPSFTSIAEIIEEMDHCKKELIHILSSLSKDMGLPGFRVGILYSYNDTVVSIARKMSSFGLVSSQTQHLLAAMLSDKEFVDNFLVENSKRLAKRHARFTEELEKMGITCLNSNAGLFVWMDLRKLLKDQSFESEMELWRVIINEVKLNVSPG

SEQ ID NO: 9301 - protein, 444 aa, Bacillus halodurans C-125
MAKQQRDIGIREVPLPHKWLILSLQHLCAMFGATILVPLLVDLSPAVALISSGLGTLAYLLITKGQVPAYLGSSFAFITPIIAVTAFGGPEAAMVGSFFVGLVYGVAALLIKVVGRKWLMTVLPPIVVGPVIMVIGLGLAGVAIDMAMMETIEQGVQVFNGTFMLVAMITLLITIVAAVFFKGFFGLVPMMFGIAGGYVTALFVGLIDFQAVYEAKWLVAPDFIVPFVTYTPTVEWTVLAIMVPIAAVTLAEHIGDQMVLSKVAGKNFLEKPGLHRSLAGDGVATMIASFLGGPPNTTYGENIGVIAITRVFSVFVIGGAALLAIVFGFSGKISALISTIPQAVMGGVSILLFGVIASSGLRMLIDNEIQLGEKRNLIISSVILVIGIGGAFVPINENVQIPGMALATIIGIVLHLVLPNKEVSYGTKSMFENEKTERKKEQAA

SEQ ID NO: 9302 - protein, 429 aa, Pseudomonas syringae pv. syringae B728a
MADKKAQLIIEGAAPVELPILTGTVGPDVIDVRGLTATGRFTFDPGFMSTASCDSKITYIDGDNGILLHRGYPIEQLAEQSDYLETCYLLLNGELPTAEQKAQFVAVVKNHTMVHEQLKTFFNGFRRDAHPMAVMCGVVGALSAFYHDSLDINNPQHREISAVRLVAKMPTLAAMVYKYSMGQPMMYPRNDLSYAENFLHMMFNTPCEIKPISPVLAKAMDKIFILHADHEQNASTSTVRMAGSSGANPFACIAAGIAALWGPAHGGANEAVLTMLDEIGDVSNIDTFIAKAKDKNDPFKLMGFGHRVYKNRDPRATVMKQTCDEVLKELGITNDPQLELAMRLEEIALTDPYFIERSLYPNVDFYSGIILKAIGIPTSMFTVIFALARTVGWISHWKEMLSSPYKIGRPRQLYTGNVQRDIVALQDRK

SEQ ID NO: 9303 - protein, 354 aa, Cyanidium caldarium
MVLNANHLQTKKTIKETLLAPRFYTTDFDEISRYDISSNFEEIEAIVNEFRSDYNKKHFIRDEEFDRHWSQIDAQTKQMFVEFLERSCTAEFSGFLLYKELARKLKEKMPVLAEGFLLMSRDEARHAGFLNKAMADFNLTLDLGFMTKNRRYTFFKPKFIFYATYLSEKIGYWRYITIYRHLEKHPEHRIYPIFKFFESWCQDENRHGDFFAAIVKSQPYLLEGFISKLWCRFFLLAVFATMYLNDCQRGEFYKSIGLDPRQFDIYVIQKTNESAAKLFPTVLDLDNPRFFECLDKCACYNKLLLEIDDREQPFFNQVLNVFYKFYLYFLLVLNFIMLYFLRTVNCNSFTRMVK

SEQ ID NO: 9304 - protein, 591 aa, Bordetella pertussis Tohama I
MSRAVSNQRRRFVQGLAGGGVLAGLGLWRQAAWAQPGAAQPEVLSGTEFNLEIGRTPANFTGAARMATTVNGSIPAPILRWREGDTVTLRVTNRLDEDTSIHWHGILLPTGMDGVPGLSFPGIRPGETFTYRFQVRQSGTYWYHSHSGFQEQTGLYGAIVIEPRRADPVRAERDHVVLLSDWTDEDPMSVFRKLKVMPDYYNYIQPTVDNLIDDARKQGWASTLGERLMWQQMRMNQTDLADVSGATYTYLANGKSPAGNWTGLFKPGERVRLRFINGSAMTYFDVRIPGLKMTVVAADGLPVRPVEVDEFRIAVAETYDVIVEPAEDRAYTIFSQAMDRSGYARATLAPREGMQAEVPALDPVQVLTMMDMGMAHDMPGMDHGAAGQQGAAMDHGAMGGMDHAAMGHGSSEASGGMVEVRHPYPAEHGPANSMLPDIVTTRLDDPGVGLRDNGRKVLTYADLRSMVEPEDNRAPTREIELHLTGNMDRYMWSFNGLKFSQAKPIVLKYGERVRFVLVNDTMMTYPIHLHGLWSDLESPDGNFQVRKHTISLNPAQRISYRVSADARGNWAYHCHLLYHMEAGMFRAVVVE

SEQ ID NO: 9305 - protein, 590 aa, Pseudomonas syringae pv. syringae B728a
MANINALSFDAIIIGGGGAGMRAALQLAQGGHKTAVVTKVFPTRSHTVSAQGGITCAIASADPNDDWRWHMYDTVKGSDYIGDQDAIEYMCSVGPEAVFELEHMGLPFSRTEQGRIYQRPFGGQSKDFGKGGQAARTCAAADRTGHALLHTLYQANLKAGTVFLNEYYAVDLVKNNDGAFVGIIAICIETGETSYIRANATVLATGGAGRIYSSTTNALINTGDGIGMALRAGVPVQDIEMWQFHPTGIAGAGVLVTEGCRGEGGYLINKHGERFMERYAPNAKDLAGRDVVARSMVKEIIAGNGCGPDGDHVMLKLDHLGEEVLHSRLPGIMELSKTFAHVDPATAPIPVVPTCHYMMGGVATNIHGQAITQDAAGVDQIIPGLFAVGEVACVSVHGANRLGGNSLLDLVVFGRAAGIHLEQALREGVDYARASESDIDAALARLAGLNERTTGEDVATLRKELQSCMQNYFGVFRTGEYMQKGIAQLADLRVRIANVKINDKSQAFNTARIEALELQNLLEVAEATAIAAEHRKESRGAHAREDFEDRDDENWLCHTLYFPGDKSVTKRAVNFSPKTVPTFEPKIRTY

SEQ ID NO: 9306 - protein, 157 aa, Zea mays
VRPFPLFFLQPSKRPAKQGTQIESSPCHARKAPAAHDGNGNGGAAAAAAPKGCVTVRVGLEGEEQRRFAVPLGHLKHPLFGALLEEAEREYGFRHQGALAIPCRVDRFVQLERLIGRDLHGACAHHLVDLDGAAVAAAQHQHQHHLHLPRFVGCFRA

SEQ ID NO: 9307 - protein, 440 aa, Vibrio parahaemolyticus RIMD 2210633
MSGKERNLPTHRISRFSKFASLATRVAGNVIAEGTKQIAKGNRPKAKDLLLTPQNIARLTDQLAHLRGAAMKLGQMLSMDAGDILEPELAEILARLRSNADPMPSKQLNSVMVNALGEQWKSAFLAFNFKPIASASIGQVHQAYSDAGDNLAVKVQYPGIRKSIDSDVDNVGTLLKIVGLIPESVDYKGLLEEAKKQLYDEANYEREAQFACRYHEALQGHPHFVVPKIYPEISSQSVLAMSFIQGTPIEKIANYDQETRDFVMHNLLELLFKELFEFKMVQTDPNFANYLYLEESKQIGLLDFGATREYSERFSSGYRQAFSSVVNDDEQGLNDALEQIGFFAQSIKPEQRMAILDLVKMACEPMLIDEAYDFKASGLAQKLREAGTILSMEQDYWHTPPADAIFLHRKIGGMYLLAARIGAKVNIRRLVQPYLKINSG

SEQ ID NO: 9308 - protein, 356 aa, Tropheryma whipplei TW08/27
MRMKALVYHGPGKRSLDTVDDPTIKLGTDVILEMETTTICGSDLHILKGDVAAVKPGTVLGHEGIGKIVEVGKDVKSHSVGDRVIVSPMSSCGVCRFCRANNNGHCLGDSEGPGGWRLGGLINGVQAQFARIPLADNSLHKLPSGLDPKVGILVSDVLPTGHEVGAQAGQVTLGSVVAVIGCGPVGLGAIVTSLLYSPSKVIAVDADSNRLELARKLGATDTVRVNRERPLDAIEDVKKLTEGGFGVDVAIEAVGVPVTFSMALGIAAPGGRVANIGVHGAPVDFPLQDLWDKNIAVTLGIVSTHTIPLLLAALSEGKIDASQFVTHEFDLSDLERAYDVFSAAAQHNVVKVAIRA

SEQ ID NO: 9309 - protein, 590 aa, Arabidopsis thaliana
MSIREAMRNPICTNCGGPAMLGDVSLEEHHLRIENARLKDELDRVCNLTGKFLGHHHNHHYNSSLELAVGTNNNGGHFAFPPDFGGGGGCLPPQQQQSTVINGIDQKSVLLELALTAMDELVKLAQSEEPLWVKSLDGERDELNQDEYMRTFSSTKPTGLATEASRTSGMVIINSLALVETLMDSNRWTEMFPCNVARATTTDVISGGMAGTINGALQLMNAELQVLSPLVPVRNVNFLRFCKQHAEGVWAVVDVSIDPVRENSGGAPVIRRLPSGCVVQDVSNGYSKVTWVEHAEYDENQIHQLYRPLLRSGLGFGSQRWLATLQRQCECLAILISSSVTSHDNTSITPGGRKSMLKLAQRMTFNFCSGISAPSVHNWSKLTVGNVDPDVRVMTRKSVDDPGEPPGIVLSAATSVWLPAAPQRLYDFLRNERMRCEWDILSNGGPMQEMAHITKGQDQGVSLLRSNAMNANQSSMLILQETCIDASGALVVYAPVDIPAMHVVMNGGDSSYVALLPSGFAVLPDGGIDGGGSGDGDQRPVGGGSLLTVAFQILVNNLPTAKLTVESVETVNNLISCTVQKIRAALQCES

SEQ ID NO: 9310 - protein, 338 aa, Cyanidium caldarium
MPNRQDCNLEANKISSQLALTFYYDMLLGRGFEDACAQMYYRGKMFGFVHLYNGQEAISTGVIKSLKTTDYVCSTYRDHVHAISKGVPPRSVMAELFGKETGCSRGRGGSMHLFSSFHRFLGGFAFIGEGIPIALGSAFKSMYSQQVCKSVQELDVTVCFLGDGATNNGQFFECLNMAGLWNLPVIFVVENNQWAIGMAHHRSTSQVEIYKKAAAFGINSCEVDGMDVVAVHKTAKEAILKARKGDGPTLIEALTYRFRGHSLADPDELRSKNEKDIWISRDPIKNFQSYVIRNKLLSQKQLIKVKDEVTQTINDALQFAIISPEPKLQDLHKYVFTH

SEQ ID NO: 9311 - protein, 1465 aa, Adiantum capillus-veneris
MATPGGPKTKHSVSVAQTRADARLHAAFEGSGDAGAGGSRAPFDYSKSGMDASSVTSVAPEAITAYLQRMQRGGLTQAFGCMLVVAGQKIVAFSENAPEMLEVAAGLGTDLRMLFTQGSTAALDQAVKEEDLSSVNPLVLQSCGGSAKQFYAMLHRIEDVAGVVIDLEPIENGVVEKKSSAEMAVKPIARVQSLPGGEIGRLCQVVVEEVQEMTGYDRVMAYKFHEDGHGEVVAEVRRPDLEPYLGLHYPSTDVPQASRMMFMKNGVRMIGDCTLPPVRVVQAKELAQPISLAGSTLRAPHGCHAQYMSNMGSAASLTMAVAIDDYDDDSSLSCGSRKLWGLVVCHHPSPRTVSYPLRCACEKLMVAFGVQLNIELDLAAQLRENHILTTQALLCDMLRRIRGAPIGIVSRSPSIMDLVKCDGAALYYGGRFWPLGTTPSEFQIRDLAEWLLGASEEIASTGVTCTDSLAEMGYPGAALLGDAVCGMAAAMITPNSDFLFWFRSHTAKEVYWGGAEHDPQSRDDDSWMQLPRSSFKAFLEIVKRRSLPWEEVEVDAIRSLQLILREDLEQFCAAVGAVKASDGDDEDSLVPSAKKLSLKETEENGGADNSKKLERMHSAAAGGGGGGGRWEKMRLPSSLAQEWMEAIRGTGDGGASGGGGGGPFDWDLISAFQHNSFIVVDALKPDFPIIYASTGFFNLTGYTSREVIGGNCRFLQGPDTNPADVASIREALAQGTGTFCGRLLNYRKDGSSFWNLLTIAPIKDDLGSIVKLIGVQLEVSKYTEGIRANNRRPNGMPQSLIRYDVRHQDKVSAFIAQLVAALTKPDKVETPRLSSAMRFSLTGQTIESLPQPTAIPREGGGRTRRPRSSSFLSLLGMEKEKDIPEEDELQELEVIMLEDASVGRPGSLDDPERTRRGIDLATTLERIGKSFVITDPRLPDNPIIFASDRFLELTEYTREEVLGNNCRFLQGRGTDRKAVQLIRDAVKEQRDVTVQVLNYTKGGRAFWNLFHLQVMRDENGDVQYFIGVQQEMVAPRPVHQPPELPDILPDRVEQEKAEVVRATAQRVDAAARELPDANLVPDHLFAPHSKVVTPLPHSKTNSSSWFAIRRVQRRLRRGERLGLKHFRPIKPLGSGDTGSVHLVELRGTGQVFALKAMDKSMMLQRNKVHRARAEREILAIMDHPFLPTLYASFQTKTHVCLITDYCPGGDLFLLQDKQPTQTLSERTASFYAAEVVVALEYLHCMGVIYRDLKPENVLLQKNGHILLTDFDLSFLTSCRPQLILQGGKGRSRRSKRRRRVTFCAEPRVSSNSFVGTEEYIAPEIISGEPHSSAVDWWALGILLYEMLYGRTPFVGRNRQKTFYNVLNKELIFPTSIPVSLAGRQLIAGLLQRDPTIRLGTLRGASELKKHPFFREINWPLIRWRKFSANQAHNANNVSSLDEGESDSGNAWEANGGSTQSFQDTF

SEQ ID NO: 9312 - protein, 239 aa, Lactobacillus sakei
MDNSIMVQALGELVGTFILVLLGDGVVAGVSLAKTKANGAGWIAITLGWGFAVTLGVYASAFMGPAHLNPAVTLAFAIIGKVSWSVVLPFIIAQMIGAFLGAVVVWIQYYPHWQATDDQSAILGTFATGPAIRSPFANLMSEIIGTFVLVFALLALTRGQFTEGLNPLVVGVIITAIGLSLGGTTGYAINPARDLGPRIAHAVLPIANKGDSDWQYSWIPVIGPFVGGILGALLFVLLP

SEQ ID NO: 9313 - protein, 449 aa, Stevia rebaudiana
MGKEKIHISIVVIGHVDSGKSTTTGHLIYKLGGIDKRVIERFEKEAAEMNKRSFKYAWVLDKLKAERERGITIDIALWKFETTKYYCTVIDAPGHRDFIKNMITGTSQADCAVLIIDSTTGGFEAGISKDGQTREHALLAFTLGVKQMICCCNKMDATTPKYSKARYEEIVKEVSSYLKKVGYNPDKIPFVPISGFEGDNMIERSTNLDWYKGPTLLEALDQINEPKRPSDKPLRLPLQDVYKIGGIGTVPVGRVETGVIKPGMVVTFGPSGLTTEVKSVEMHHEALTEALPGDNVGFNVKNVAVKDLKRGYVASNSKDDPAKGAASFTSQVIIMNHPGQIGNGYAPVLDCHTSHIAVKFSEILTKIDRRSGKELEKEPKFLKNGDAGMVKMLPTKPMVVETFAEYPPLGRFAVRDMRQTVAVGVIKSVDKKDPTGAKVTKAAVKKGAK

SEQ ID NO: 9314 - protein, 124 aa, Brassica napus
LDNKMEITASVLRSFTDVFYVIHIIFQFRTGFIAPSSRVFGRGVLVEDTRQIAIRYLSSHFIIDILAVLPLPQVVILIIIPHMTGSRSLNTKNLLKFIVFFQYIPRFIRIYPLYKEVTRTSGIL

SEQ ID NO: 9315 - protein, 326 aa, Shewanella sp. MR-7
MSRINSTAAEELVDFSVDTAEFDLDKEDIAADLVQELGLEQQVQDDLQKNLDATQLYLGEIGFSPLLSAEEEVYFSRKALKGCEKSRNRMIESNLRLVVKIARRYNNRGLALLDLIEEGNLGLIRAVEKFDPERGFRFSTYATWWIRQTIERAIMNQTRTIRLPIHVVKELNVYLRTARELAQKLDHEPTAEEIAEKLQVSSVDVSRMLKLNEKITSVDIPLGGDNDKALLDVLADDDNVGPDYKVQDEDISNSVVKWLNELNTKQREVLARRFGLLGYEPSTLEDVGAEIGLTRERVRQIQVEALKRLRDLLGAQGLSVEALFRN

SEQ ID NO: 9316 - protein, 277 aa, Staphylococcus aureus subsp. aureus MSSA476
MEVKTFYNGNTMPQIGLGTFRVENDENCMESVKYAIEQGYRSIDTAKVYGNEEQVGAGIRAGLESTGIAREDLFITSKLYFEDFGRENVAAAYEASLSRLGLKYLDLYLVHWPGTNEAVMVDTWKGMEDLYKNNKVKNIGVSNFEPEHLEALLAQVSIKPVINQVEYHPYLTQHKLKLYLAAQHIVMESWSPLMNAQILNDETIKDIAQELGKSPAQVVLRWNVQHGVVTIPKSVTPNRISENFQIFDFELSDEQMTRIDGLNQDKRIGPDPKTFEG

SEQ ID NO: 9317 - protein, 202 aa, Zea mays
SRDAKPSRTLSPQPLAAVAAAGGAAREEMRQTVVNTLERKLFYIPSFKIYRGVAGLYDYGPPGCAVKSNVLAFWRQHFVLEENMLEVDCPCVTPEVVLKASGHVEKFTDLMVKDEKTGTCYRADHLLKDFCKDKLEKDLTLSPETAAEFKRVLAVLDDLSTEELGAKIKEYGIVAPDTKNPLSAPYPFNLMFQTSIAPTGLS

SEQ ID NO: 9318 - protein, 546 aa, Oryza sativa
MRGDETSSLLFIHPWPPSLEAHHRHTGSLLHSAFLARSPHLTSLTYIAGSIAPSPAANEMLRAAARALTVSSLNPKVLALADHHLGGLVARRAQSMQQELDANPASHPFSEIIYCNHSNPQSQGQQPNKFFREVLALCNHPHLLDRSEASFMFSSDAITRAREIVGFIPGKTTGGYSHCQGIEGLRDAIAAGIASRDGLPSYSEDIFLTDGAAAPVHMMMHLLIRGKKDGILCPIPSHSLYTDSMVLRGATLVPYYLDESRGWSVNISDLKKQLDGARAKGIDVRGLVVVNPGNPTGQVLVEENQCEIVELCKNECLVLLADEVYQENIYTDQKKFNSFKKVARSIGYGEGDISLVSFHSVSNGYYGECGRRGGYMEVTGFSSEVRGEVYKVASLSACSNISGQILMSLVMNPPKVGDESYPSYRAERDSILSSLSCCAEAMVSTFNSMEGMTCNKAEGGISVFPSVRLPPRAIEAAEAMNTEPDVFYALRLLESTGIVVVPGSVFGQVPGTWHFRCTILPQEEKTRQIISRFNVFHEAFMEEFRS

SEQ ID NO: 9319 - protein, 362 aa, Solanum pseudolulo
WDTSVAIEVQVGDSIEIVRFFHCYKRGVDRVFVDHPMFLEKVWGKTGSKIYGPKAGQDYLDNELRFSLLCQAALEAPRVLNLNCSKFFSGPYGEDVLFIANDWHTALIPCYLKSMYQSREIYLNAKVAFCIHNIAYQGRFAFSDFPLLNLPDEFRGSFDFIDGHEAPVKGRKINWMKAGILESDRVVTVSPYYAQELVSAVDKGVELDNVLRKTSITGIVNGMDTQEWNPATDKYTDVKYDITTVMDAKPLLKEALQAAVGLPVDRKIPLIGFIGRLEEQKGSDILVAAIHKFIGLDVQIVVLGTGKKKFEQEIEQLEVLYPNKAKGVAKFNVPLAHMITAGADFMLVPSRFEPCGLIQLHA

SEQ ID NO: 9320 - protein, 530 aa, Oryza sativa
MCGILAVLGVADVSLAKRSRIIELSRRLRHRGPDWSGIHCYQDCYLAHQRLAIVDPTSGDQPLYNEDKSVVVTVNGEIYNHEELKANLKSHKFQTASDCEVIAHLYEEYGEEFVDMLDGMFAFVLLDTRDKSFIAARDAIGICPLYMGWGLDVCRIKILVLIYVPSKKFKVFVTGHEVGFFFDVISGSLFKAIIKRLMTDVPFGVLLSGGLDSSLVASVVSRHLAEAKVAAQWGNKLHTFCIGLKGSPDLRAAKEVADYLGTVHHELHFTVQEGIDALEEVIYHVETYDVTTIRASTPMFLMSRKIKSLGVKMVLSGEGSDEIFGGYLYFHKAPNKKEFHEETCRKIKALHLYDCLRANKSTSAWGVEARVPFLDKNFINVAMDIDPEWKMIKRDLGRIEKWVLRNAFDDEEKPYLPKHILYRQKEQFSDGVGYSWIDGLKDHANEHNAARLTVPGGPSVACSTAKAVEWDAAWSKNLDPSGRAALGVHDAAYEDTLQKSPASANPVLDNGFGPALGESMVKTVASATAV

SEQ ID NO: 9321 - protein, 898 aa, Yersinia pestis biovar Medievalis str. 91001
MNIASNPAASNTKDKWVRGHMNEQYSAMRSNVSMLGTLLGDTIKEALGEHILDRVETIRKLSKSSRAGNEASRQELLTTLQNLSNDELLPVARAFSQFLNLTNTAEQYHSISPHGEAASNPEALAQLFTRLKDKKLSDQDMRSAVDDLSIELVLTAHPTEITRRTLIHKLVEVNTCLSQLDHNDLADYERNKIMRRLRQLVAQSWHTDEIRKLRPSPVDEAKWGFAVVENSLWEGVPAFLREFNEQLENSLDYRLPVEAVPIRFTSWMGGDRDGNPNVTAEITRHVLLLSRWKATDLFLRDIQVLVSELSMSECTPELRELAGGEEVLEPYRQLMKNVRTQLTNTQAYLEARLKGERVLPPHDLLVSNDQLWEPLYACYQSLKACGMEIIANGQLLDTLRRVRCFGVPLVRIDVRQESTRHTDAIAELTRYLGLGDYESWSESDKQAFLVRELNSKRPLVPLKWEPSAETQEVLETCRVIAEAPQGSIAAYVISMAKVPSDVLAVHLLLKEAGCPFTLPVAPLFETLDDLNNADDVMTQLLGIDWYRGLIQGKQMVMIGYSDSAKDAGVMAASWAQYRAQDALIKTCEKAGITLTLFHGRGGSIGRGGAPAHAALLSQPPGSLKGGLRVTEQGEMIRFKFGLPEVTISSLALYAGAILEANLLPPPEPKKEWIEVMDLLSDASCDMYRNYVRENPEFVRYFRAATPELELGKLPLGSRPAKRRPDGGVESLRAIPWIFAWTQNRLMLPAWLGAGAGLQRAIDAGKQDVLATMCRDWPFFSTRIGMLEMVFAKADLWLAEYYDQRLVDKSLWPLGQQLRDQLAADIKVVLAIANDDHLMADLPWIAESIALRNVYTDPLNVLQAELLHRSRQQEHPDACVEQALMVTIAGVAAGMRNTG

SEQ ID NO: 9322 - protein, 113 aa, Nanoarchaeum equitans Kin4-M
MKLAELIELPKEQCNDKKCPHHGHLKVRGFFFKGKVIKKSDNKTVKIEIIRYYWLPKYERYELRRTRITAYLPECLKDIKEGDYVLIGETRPLSKTKHFVVLGKLKKGIALTQ

SEQ ID NO: 9323 - protein, 250 aa, Triticum aestivum
MEFTGPEHAAGTPPGTRAPSDASSGNSGAAGSWEARYRECLRNHAAAQGGHAVDGCGEFMPSGAHDLLRCAACGCHRSFHRRDDGQQHPRLFLPAPAATPTTAPRVPLLMPPPQHHHPYAAGHPLAPPFAYNPHHHQYQRTPSGGGTTTESSSEEPGPGPPSTSAPGQGHGQARRPKRFRTRFTAEQRGQMLALAERVGWRMLKQDEALVEQLCAQAGVRRQVFKVWMHNNKHHRRQPQPPQSQQQQQQR

SEQ ID NO: 9324 - protein, 362 aa, Solanum quitoense
WDTSVAIEVQVGDSIEIVRFFHCYKRGVDRVFVDHPMFLEKVWGKTGSKIYGPKAGQDYLDNELRFSLLCQAALEAPRVLNLNCSKFFSGPYGEDVLFVANDWHTALIPCYLKSMYQSRGIYLNAKVAFCIHNIAYQGRFAFSDFPLLNLPDEFRGSFDFIDGHETPVKGRKINWMKAGILESDRVVTVSPYYAQELVSAVDKGVELDNVLRKTSITGIVNGMDTQEWNPATDKYTDVKYDITTVMDAKPLLKEALQAAVGLPVDRKIPLIGFIGRLEEQKGSDILVAAIHKFIGLDVQIVVLGTGKKKFEQEIEQLEVLYPNKAKGVAKFNVPLAHMITAGADFMLVPSRFEPCGLIQLHA

SEQ ID NO: 9325 - protein, 115 aa, Brassica napus
MAKTCFKTEHPLERRQAESARIREKYADRIPVIVEKADKSDVPEIDKKKYLVPADLTVGQFVYVVRKRIKLSPEKAIFVFVNSTLPPTASLMSAIYEENKDEDGFLYMTYSGENT

SEQ ID NO: 9326 - protein, 579 aa, ASPERGILLUS NIDULANS FGSC A4
MTTPAHQEPNDPSTVSVTASSPAPSHHVFNEQTNYVPKRTIITIFLACSTVDLIALMDQTTLAASLSIIGNALHASDKAAWISGGYFVTSTCFQLLYGRLSDIWSRKSVLFVGLAIFFIGSLASSLAQSGTQLIVFRAFTGVGGGGLMTVAQMIVSDVVPLRERGKYQGILGAVVAIANGIGPVIGGALSSVSADGWRWIFRLNLPLTAITTLSVFFFMPLRKVQGDWRVKLKAIDFVGGGLALAGTAVLLLGLTWGGGEYPWQSSHVIATIVVGFAVCVLFMLWQWKGAAYPLVPVHIFKSGIVNGACLTMFINGWNFLVQVYYIPSFYQLVFGYSAVRAGAMLLPITLMQTASSTLSGLVVHWIGRYRECILFGWMIWAVGLGLFSTLDEHSGVGKQIGYGILTGVGVGNTLQPALIAIQAGVERRDMAVVTSFRNFVRNLGGTLGLAIAQTIINNLILSSLSPVHLSPSEQKSFLASPTAYISTLPETEATHIRSLLIPAYKRGFRIIFIIGAALAALAFGIAFALMRQVGLEKGDDEKLKEEGRRRVELEKGMKGDAEKEGGDVHVDSNDEGRRE

SEQ ID NO: 9327 - protein, 362 aa, Solanum robustum
  misc_feature (5)..(8): Xaa can be any naturally occurring amino acid
  unsure (1)..(362): unsure at all Xaa locations
WDTSXXXXVKVGDSIEIVRFFHCYKRGVDRVFVDHPMFLEKVWGKTGSKIYGPKTGQDYLDNELRFSLLCQAALEAPRVLNLHCSKYFSGPYGEDVLFIANDWHTALIPCYLKSMYQSRGIYLNAKVAFCIHNIAYQGRFAFSDFHLLNLPDEFRGSFDFIDGYEKPVKGRKINWMKAGILESDRVVTVSPYYAQELVSAVDKGVELDNVLRKTSITGIVNGMDTQEWNPATDKYTDVKYDITTVMDAKPLLKEALQAAVGLPVDRKIPLIGFIGRLEEQKGSDILVAAIHKFIGLDVQIVVLGTGKKKFEQEIEQLEVLYPNKAKGVAKFNVPLAHMITAGADFMLVPSRFEPCGLIQLHA

SEQ ID NO: 9328 - protein, 328 aa, Thermotoga maritima MSB8
MKPLRKIRLGIVGCGIAARELHLPALKNLSHLFEITAVTSRTRSHAEEFAKMVGNPAVFDSYEELLESGLVDAVDLTLPVELNLPFIEKALRKGVHVICEKPISTDVETGKKVVELSEKSEKTVYIAENFRHVPAFWKAKELVESGAIGDPVFMNWQIWVGMDENNKYVHTDWRKKPKHVGGFLSDGGVHHAAAMRLILGEIEWISAVAKDLSPLLGGMDFLSSIFEFENGTVGNYTISYSLKGNERFEITGTKGKISISWDKIVLNEEEMKVPQENSYQKEFEDFYQVVAEGKPNDLGSPVQALKDLAFIEACVRSAGNKVFVSSLL

SEQ ID NO: 9329 - protein, 260 aa, Streptococcus mutans UA159
MTKTLTKHLQAIKAEGKGLFIPYIMAGDHDKGLDGLFDTISFLEAQGVSAIEIGIPWSDPVADGPVIELAGQRSLVKGTSLASIIARLQEKKTQVPLVIMTYFNPVFQYGVETFVADLQNTSVKGLIIPDLPHEQESFIKPYLENLDLALVPLVSLTTGLERQKELIEDARGFVYAVAINGVTGKTGNYRDDLDKHLKHLTEIAQIPVLTGFGVSTLADIKRFNQVSDGVIVGSKIVKGLHEGMQEEIKDFIYAGSHYQK

SEQ ID NO: 9330 - protein, 125 aa, Triticum aestivum
  misc_feature (4)..(4): Xaa can be any naturally occurring amino acid
  misc_feature (94)..(94): Xaa can be any naturally occurring amino acid
  unsure (1)..(125): unsure at all Xaa locations
GNQXIDAFAEELKPHQKALLPDKSTVLERAMIEHNLLSASKLYTNISFEELGTLLGIDPRKAEKIACRMICEDRMRGSIDQVEAVIHFEDDTEXLQQWDQQIAGLCQALNDILDSMSSKGIAIPV

SEQ ID NO: 9331 - protein, 362 aa, Solanum sisymbriifolium
WDTSVAIEVEVGDSIEIVRFFHCYKRGVDRVFVDHPMFLEKVWGKTGSKIYGPKTGQDYLDNELRFSLLCQAALEAPRVLNLNCSKYFSGPYGEDVLFIANDWHTALIPCYLKSMYQSRGIYLNAKVAFCIHNIAYQGRFAFSDFPLLNLPDEFRGSFDFIDGYEKPVKGRKINWMKAGILESDRVVTVSPYYAQELVSAVDKGVELDNVLRKTSITGIVNGMDTQEWNPATDKYTDVKYDITTVMDAKPLLKEALQAAVGLPVDRKIPLIGFIGRLEEQKGSDILVAAIHKFIGLDVQIVVLGTGKKKFEQEIEQLEVLYPNKAKGVAKFNVPLAHMITAGADFMLVPSRFEPCGLIQLHA

SEQ ID NO: 9332 - protein, 362 aa, Solanum stagnale
WDTSVAIEVKVGDSIEIVRFFHCYKRGVDRVFVDHPMFLEKVWGKTGSKIYGPKTGQDYLDNELRFSLLCQAALEAPRVLNLNCSKYFSGPYGEDVLFIANDWHTALIPCYLKSMYQSREIYLNAKVAFCIHNIAYQGRFAFSDFHLLNLPDEFRGSFDFIDGYEKPVKGRKINWMKAGILESDRVVTVSPYYAQELVSAVDKGVELDNVLRKTSITGIVNGMDTQEWNPATDKYTDVKYDITTVMDAKPLLKEALQAAVGLPVDRKIPLIGFIGRLEEQKGSDILVAAIHKFIGLDVQIVVLGTGKKKFEQEIEQLEVLYPNKAKGVAKFNVPLAHMITAGADFMLVPSRFEPCGLIQLHA

SEQ ID NO: 9333 - protein, 140 aa, Chlamydomonas reinhardtii
MMVWTPVNNKMFETFSYLPPLTDEQIAAQVDYIVANGWIPCLEFAEADKAYVSNESAIRFGSVSCLYYDNRYWTMWKLPMFGCRDPMQVLREIVACTKAFPDAYVRLVAFDNQKQVQIMGFLVQRPKSARDWQPANKRSV

SEQ ID NO: 9334 - protein, 754 aa, Erwinia carotovora subsp. atroseptica SCRI1043
MAIVNHTLGFPRVGLRRELKKAQESYWAGNATQEELLTVGRELRARHWQQQKDAGVDLLPVGDFAWYDHVLTTSLLLGNVPARHQNEDGSVDLDTLFRIGRGRAPTGQPAAAAEMTKWFNTNYHYMVPEFTKGQQFKLTWTQLLDEVDEALALGHKVKPVLLGPVTYLWLGKVKGEQFDRLSLLQDILPVYQQVLAELTKRGIEWVQIDEPALALELSQEWLAAFKPAYDALQGQVKLLLTTYFDSVSQNLETIKALPVQGLHIDLVHGKDDAATLSAQLPANWVLSLGVINGRNVWRADLSNWFERLQPLVGTRDLWLGSSCSLLHSPIDLSVEVRLDDEVKSWFAFAIQKCAELSLLSQALNSGNGQALEAYSAPIRARRTSTRVNNVAVAQRLAAITAQDSQRQNVYSVRADAQRERFNLPAWPTTTIGSFPQTTEIRGLRLDFKQGRLDGNNYRTGIAEHIKQAVAEQERLGLDVLVHGEAERNDMVEYFGEHLDGFVFTQNGWVQSYGSRCVKPPVIIGDVSRPEAITVEWAKYAQSLTDKPMKGMLTGPVTILCWSFPREDVTRETIAKQIALALRDEVADLEAAGIGIIQIDEPALREGLPLHRSDWDAYLAWAVDAFRLNAAVAKDDTQIHTHMCYCEFNDIMDSIAALDADVITIETSRSDMELLESFEEFEYPNEIGPGVYDIHSPNVPSVEWMEALLKKAAQRIPAERLWVNPDCGLKTRGWPETRQALANMVQAAQRLRETQ

SEQ ID NO: 9335 - protein, 399 aa, Streptomyces coelicolor A3(2)
MLGIVLAGGEGKRLMPLTADRAKPAVTFGGTYRLVDFVLSNLVNGDILRICVLTQYKSHSLDRHITTTWRMSSLLGNYVTPVPAQQRLGPRWFLGSADAILQSLNLVHDEQPEYVAVFGADHVYRMDPRQMLAQHIESGAGVTVAGIRVPRAESPSFGVITPGSDGQTVTGFLEKPADPPGLADDPGCVFASMGNYVFTTKALVEALHRDAEDPDSVHDMGGSILPQLTDRGEAALYDFSANHVPGETTRDQGYWRDVGTLDAYYDAHMDLIAERPAFNLYNRDWPVYTHSTQLSPARFNAGGIASESIISAGCLIRGQVTRSVLSPGVVVDPGAVVQGSVLHDNVHIGRGAVVRGAVLDKNVQVPPGATIGVNPQRDGELYTVSKGGVIALGKGQRVP

SEQ ID NO: 9336 - protein, 387 aa, Streptomyces coelicolor A3(2)
MRVGLLSREFPPDVYGGAGVHVEFLARELARLVDLDVHSWGEGRTDGVLRHRPWSALDGANDALRTFSVDLAMTAALEGRELVHSHTWYANLGGHLAKLLHGVPHVVTAHSLEPLRPWKAEQLGGGYELSGWAERTAFEAADAVIAVSGAMREDILGCYPDLDASRVHVVHNGIDTRLYRPDHGTDVLDRVGLDRSRPYVLFVGRITRQKGVPQLLRAVRDIDPAAQVVLCAGAPDTPEIDQEFRDLFAGLSRAREGVHWIPRMLPRTEVIQLLTHAAVFVCPSVYEPLGIVNLEAMACGTPVVASRVGGIPEVVTDGVTGVLVPREDGADDAFEAGLARALDSVLGDPAGARRMGEAGRARAVEEFGWDAVARRTVRLYEEILKQA

SEQ ID NO: 9337 - protein, 478 aa, Pseudomonas syringae pv. syringae B728a
MSQKFDVVVIGAGPGGYVAAIKAAQLGLKTACIEKYQDKEGKLALGGTCLNVGCIPSKALLDSSWKFYEAKNGFSVHGISTSDVSIDVPAMIGRKSTIVKGLTGGVASLFKANGVTTLQGHGKLLAGKKVELTAADGTVEIIEADHVILASGSRPIDIPPAPVDQKIIVDSTGALEFQQVPQRLGVIGAGVIGLELGSVWARLGAQVTVLEALDKFIPAADEAVSKEALKTFNKQGLDIKLGARVTGSKVEGEQVVVSYTDAAGEQSITFDRLIVAVGRRPVTTDLLASDSGVDLDERGFIYVDDYCTTSVPGVYAIGDVVRGLMLAHKASEEGIMVVERIKGHKAQMNYNLVPSVIYTHPEIAWVGKTEQTLKAEGVEVNVGTFPFAASGRAMAANDTGGFVKIIADAKTDRVLGVHVIGPSAAELVQQGAIAMEFGTSAEDIGMMVFSHPTLSEALHEAALAVNGGAIHIQNRKKR

SEQ ID NO: 9338 - protein, 418 aa, Escherichia coli
MRGSHHHHHHGSMKRVVITGLGIVSSIGNNQQEVLASLREGRSGITFSQELKDSGMRSHVWGNVKLDTTGLIDRKVVRFMSDASIYAFLSMEQAIADAGLSPEAYQNNPRVGLIAGSGGGSPRFQVFGADAMRGPRGLKAVGPYVVTKAMASGVSACLATPFKIHGVNYSISSACATSAHCIGNAVEQIQLGKQDIVFAGGGEELCWEMACEFDAMGALSTKYNDTPEKASRTYDAHRDGFVIAGGGGMVVVEELEHALARGAHIYAEIVGYGATSDGADMVAPSGEGAVRCMKMAMHGVDTPIDYLNSHGTSTPVGDVKELAAIREVFGDKSPAISATAAMTGHSLGAAGVQEAIYSLLMLEHGFIAPSINIEELDEQAAGLNIVTETTDRELTTVMSNSFGFGGTNATLVMRKLKD

SEQ ID NO: 9339 - protein, 143 aa, Lactobacillus sakei
MSDDLRQQLTPEQYVVTQENATEMPFSGEYDEFDQPGIYVDVVSHEPLFSSLDKYDAGCGWPSFTRPIVKLNEKRDRTHGMERVEVRSQNADSHLGHVFTDGPQEQGGLRYCINSAALKFIPKDDLKAAGYGEYLALFEKEGQ

SEQ ID NO: 9340 - protein, 631 aa, Cyanidium caldarium
MRKFHKLYIHTNIGGQFQTINLLVFIISLLISTSISLFVNSLNNNATVIKEATIHDILALINSDFNLHREALVNQRLQSTFFCQTLYASITEFESLAVFSHEGLLYCVPSFNSKDVNKIEDNFQFSYLNLLQKMFRLNIHFPLIHTSLKGYGRYLTQAFVILNMANRDQPMLFVEVEFTSNFFYWPLQLFSLVFLMTWFIILLGGILNSLTIIKPIKELLAGIRNISTGNFEQKIFLPFEGQIGELIFSFNNMAERLKNYDYKSKEELSSAKAKAEVLVSTIADGAILLNDKLEIILINSKAKEIFNCEFLDLLGVGIDRFLPKNLQSSVMPSLKHLAKSTHVDFLPVVLSGLDLVFPAKGRRKIKIFLNQVLSKSNNKVLGISLIIRDITQEVELSLAKNYFISNISHELRTPLFNIKSFVETLEDYDRILTRKQKLSFLKTIHKEADRLTRLVDNLLNLSAIKPKQNNFLHSFYLFNLRILIYDTILPYQIKLQNKKIITYVELENGLPEIFANYDLLFQAVSNLINNAIKFSYIGSLISIRVFTLKKRQVGGVSIVRVEISDSGIGIDMSRSSEVFERFSRIDNKSYALQGTGVGLFLAKNIIEQHHSRILMHSQLSYGSTFFFDLTF

SEQ ID NO: 9341 - protein, 172 aa, Lactobacillus sakei
MATETAIFAGGCFWCMVHPFDQQPGILKVVSGYTGGHVANPTYEQVCSHTTGHTEAVEITFDPAVISYAELVEIYWRQTDPTDAMGQFQDRGDSYRPVIFVNSDQQRSIAEASKEKLIASGRFNEPIVTQIEAAKPFYPAEDYHQDFYKKEPWRAELGEVKRKAFIREKWSD

SEQ ID NO: 9342 - protein, 282 aa, Shewanella sp. ANA-3
MRISLLQCQSSRDVSANLLFIESQLEELTRERLQWDKDAPHLVVLPECSLLFGGHESQQLAYAGDSHLSPLKSALSALAARYCVYMVAGTIPALAEDGRVYSRCYLFDDKGDTLGQYDKLHLFDVDVADGTKQYRESETFCPGNHISVIDTPFGKIGLTICYDLRFPDLFRALRLAGAEVITVPSAFTKVTGEAHWQVLLQARAIETQCFILAAAQWGAHNEGSRETWGQSMVISPWGEVIAEQKTGIGWVHADIDVAEVHSIRSKMPVAQHNRFTAPNLKP

SEQ ID NO: 9343 - protein, 407 aa, Pseudomonas syringae pv. syringae B728a
MRRVVITGLGIVSCLGNDKDTVTANLRANRPGIRFNPEYAEMGLRSQVSGSIDLNLEELIDRKIFRFVGHAAAYAYLAMKDAITDSGLTDEQVSNVRTGLIAGSGGASTLNQMEALDTLREKGVKRVGPYRVTRTMGSTVSACLATPFKIKGVNYSISSACATSAHCIGNAVEQIQLGKQDIVFAGGGEEEHWSQSFLFDAMGALSTQYNETPEKASRAYDAKRDGFVIAGGGGMVVVEELEHALARGAKIYAEIVGYGATSDGYDMVAPSGEGAIRCMKMALGDIDSGAIDYINTHGTSTPVGDAKEMEGVREVFGANAPAISSTKSLSGHSLGAAGVHEAIYCLLMMENNFIAGSANIDELDPVVADMPILLKTQEDAKLDLVMSNSFGFGGTNATLVLKRWAGK

SEQ ID NO: 9344 - protein, 384 aa, Mycobacterium tuberculosis H37Rv
MRAVVIDGAGSVRVNTQPDPALPGPDGVVVAVTAAGICGSDLHFYEGEYPFTEPVALGHEAVGTIVEAGPQVRTVGVGDLVMVSSVAGCGVCPGCETHDPVMCFSGPMIFGAGVLGGAQADLLAVPAADFQVLKIPEGITTEQALLLTDNLATGWAAAQRADISFGSAVAVIGLGAVGLCALRSAFIHGAATVFAVDRVKGRLQRAATWGATPIPSPAAETILAATRGRGADSVIDAVGTDASMSDALNAVRPGGTVSVVGVHDLQPFPVPALTCLLRSITLRMTMAPVQRTWPELIPLLQSGRLDVDGIFTTTLPLDEAAKGYATARARSGEELRFCLRPDSRDVLGAHETVDLYVHVRRCQSVADLQLEGAADGVDGPSMLN

SEQ ID NO: 9345 - protein, 371 aa, Rhodospirillum rubrum
MLGGAALVLSTIGPAGALPPAPAAAGAGLGPSLALTPVFMVGEEGVLTLAPTLEIVTPAVVNIAVKATVAARPNPLLSDPLFRQFFGVPPGAEGPRERTVVSAGSGVIVDAVRGTILTNHHVVDGAEDITVTLKDRRVLKATLLGSDPGTDIAVLRVKADRLTALHLADSDRAQVGDLTIAIGNPFGLGQTVTTGVISAKGRSGVIPDGYEDFLQTDASINPGNSGGALVNSRGDLVGINTAILSSGGGSVGIGFAIPSNIARAVMEQILKDGTVRRGHLGVSIQTVSPAVAESLGLPRAAGVIIAAVERGSTAEKVGLRTGDVILAVDGRPSETAEVLRRQIGLAQIGDRVRLTVMREGKSFDLQARIGS

SEQ ID NO: 9346 - protein, 785 aa, Ustilago maydis 521
MSCWTTSAASVRAVAPRLLRAPSAASTLPSQLLATSISRVATAAASSSSSPSSSRHIFSSARLKNNTAAPSKTVSGQDISIALDDKGQIPAAPYSQLPLAGTSPSYKVHLIVHPYDHPRPVESWPSHLESVSPLLSELESRAKKGGSLEGYGISFSSGDGRTGTGTGTRSEALKPWDATTSRMMRSVPNSAQEQEQFLVYAYTTNGTMAKVGPISLATLDSGSPFRQRIDDALASAQPQTGRAKQDDETHVYVCTHGARDCRCGVAGTAVYEALKDEVRSHQASIIKSGKDAPKKVKVFAVSHVGGHAWAANALVYPHGDWYGNLRVTDSKLVLRAALAPASSMHDLDDLRERLVHWPRWRGRLGLSKAAQRDHYAEWGPPTINTAHITPRSRGTASSARSRPSLAALSTPGHAHASTSSARTYATDASDSKKKAPSARMVAFREKLAADLSIDDFAAGEVDSIMTSASASGRVQMGRTGEARLPSHLKTKIPTGANYTRIKSDLRGLGLSTVCEEARCPNIGECWGGSGGKDTATATIMIMGDTCTRGCRFCAVKTSRAPAPLDPHEPENTAEAISRWGLGYIVLTSVDRDDIADGGASHIASTISKIKAKSRKILVEALVPDFSGDMACVEKVAHSGVDVFAHNVETVERTTPMVRDRRAKYRQSLAVLLHAKQANPALITKTSIMLGCGERDDEVEQTLRDLRNAHVDVVTFGQYMRPTKRHMKVHQYKRAEHLGFLYVASGPLVRSSYKAGEFFIKNVLEQRNSAHNLYPTSEQAVQSTTS

SEQ ID NO: 9347 - protein, 199 aa, Asparagus officinalis
LDEYSKFHGYSPAVVTGKPIDLGGSLGRDAATGRGVVFATEALLAEYGKSISGLTFVIQGFGNVGSWAAQLIHERGGKVIAIGDVSGAIKNSNGIDIPALVKHKSGGGVLKDFRGSDAFDPKELLVHECDVLLPCALGGVLHRENAADVKAKYIIEAANHPTDPEADEILSKKGVVILPDIYANAGGVIVSYFEWVQNI

SEQ ID NO: 9348 - protein, 420 aa, Oryza sativa
LEAPAAIAGPCTRRPPCATAVAAGGKCSSPPPLCAHPLRLAPPAAAAAAAAADLDSGQCSNGAGNGNPIQRTSSCGSIPSGRSTSTIKRMSSAIFPSSVVAGIEPLVSFKDVPNSEKQNLFVSKLNLCCAVFDFSDPNKSSAEKDIKRQTLLDLIDYVDSSSSRFSEAVIAASSRMFAVNLFRVFPPNYRSSSSGGGEGEEEEPMFEPAWCHLQLVYELLLKFIGSSSLDAKVGKKYFDHSFIVKLLNLLDSEDPRERDCLKTILHRIYGKFMVHRPFIRKAVSNIFYHFVFETDRHNGIAELLEVFGSVISGFALPLKEEHKIFLWRVLVPLHKPKSVGVYLQQLTYCVTQFIEKDPKLASSVIIGLLRYWPITNSQKEVMFLSEIEEILETISTAEFQKCMVPLFRRIAQCIKSSHFR

SEQ ID NO: 9349 - protein, 339 aa, Pseudomonas fluorescens PfO-1
MFALMQSTRLESLHLSVDPVSGLKAVIAIHNSRLGPALGGCRYLAYPNDESAVEDAIRLAQGMSYKAALAGLAQGGGVAVIVRPAHVENRAALFEAFGRCIDQLDGRYITAIDSGTSVADMDCIAQQTQHVTSTTSAGDPAPHAAMGVFTGIRATAMARLGSDNLEGLRVAIQGLGNVGYALAEQLHAAGAELLVSDIDHGKVQLAMEQLNAHPIANDALLSTPCDILAPCGLGGVLNSHTVTQLRCSAVAGSANNQLTHLDVADQLERRGILYAPDYVINAGGLIYVSLKHRGEELTTITAHLSKISSRLTEVFAHAQAEKRSPARVADELAEKVLYR

SEQ ID NO: 9350 - protein, 359 aa, Solanum stenandrum
  misc_feature (197)..(197): Xaa can be any naturally occurring amino acid
  unsure (1)..(359): unsure at all Xaa locations
SVAIEVIVGDSIEVVRFFHSYKRGVDRVFVDHPMFLEKVWGKTGSKIYGPKAGQDYLDNELRFSLLCQAALEAPRVLNLNCSKYFSGPYGEDVLFIANDWHTALIPCYLKSMYQSRGIYLNAKVAFCIHNIAYQGRFAFSDFHLLNLPDEFRGSFDFIDGHEKPVKGRKINWMKAGILESDRVVTVSPYYAQELVSXVDKGVELDNVLRKTSITGIVNGMDTQEWNPATDKYTDVKYDITTVMDAKPLLKEALQAAVGLPVDRKIPLIGFIGRLEEQKGSDILVAAIHKFIGLDVQIVVLGTGKKKFEQEIEQLEVLYPNKAKGVAKFNVPLAHMITAGADFMLVPSRFEPCGLIQLHA

SEQ ID NO: 9351 - protein, 360 aa, Solanum stramoniifolium
WDTSVAIEVQVGDSIEIVRFFHCYKRGVDRVFVDHPMFLEKVWGKTGSKIYGPKAGQDYLDNELRFSLLCQAALEAPRVLNLNCSKFFSGPYGEDVLFIANDWHTALIPCYLKSMYQSRGIYLNAKVAFCIHNIAYQGRFAFSDFPLLNLPDEFRGSFDFIDGHEAPVKGRKINWMKAGILESDRVVTVSPYYAQELVSAVDKGVELDNVLRKTSITGIVNGMDTQEWNPATDKYTDVKYDITTVMDAKPLLKEALQAAVGLPVDRKIPLIGFIGRLEEQKGSDILVAAIHKFIGLDVQIVVLGTGKKKFEQEIEQLEVLYPNKAKGVAKFNVPLAHMITAGADFMLIPSRFEPCGLIQL

SEQ ID NO: 9352 - protein, 142 aa, Glycine max
  misc_feature (24)..(24): Xaa can be any naturally occurring amino acid
  misc_feature (113)..(113): Xaa can be any naturally occurring amino acid
  misc_feature (126)..(126): Xaa can be any naturally occurring amino acid
  unsure (1)..(142): unsure at all Xaa locations
FSFGIDAIEDVLYHIETYDVTTIXACTPICLMSRLIKSLGVKWVIPREGSSEIFGGYLYLHKAPYKEEFLREPCLWIKALDHYDRLRANRSTFGWGLEARVPFWDKACINAAXEFSPEWNMMKRDXGRIEKWVLRRAFDDEE

SEQ ID NO: 9353 - protein, 427 aa, Pasteurella multocida subsp. multocida str. Pm70
MTTSLSLFQRAQHRIPGGVNSPVRAFKGVGGTPIFIEKAQGAYLYDTEGNQYIDYVGSWGPMILGHNHPTILDAVISTAQNGLSFGAPTALEIELAELVCSLVPSIDMVRMVSSGTEATMSAIRLARGYTKRDKIIKFEGCYHGHADSLLVKAGSGALTLGQPSSPGVPADFAKHTLTCTYNDLDSVKHAFEQYPNEIACLIVEPVAGNMNCIPPQEGFLQGLRALCDQYGAVFIIDEVMTGFRVALGGAQTYYGVTPDLTCLGKVIGGGMPVGAFGGKKAIMQHIAPLGPVYQAGTLSGNPIAMAAGLACLTELKKAGNAQRLAQQTEKLALGLKALADKHHVPFVVNYVGGMFGIFFTEQKTVSSYQAVMACDTEKFNRFFHAMLAQGIYLAPSAFEAGFMSLAHSDQDIERTLQAADQVFSQLA

SEQ ID NO: 9354 - protein, 362 aa, Solanum tenuispinum
WDTSVAIEVKVGDSIEIVRFFHCYKRGVDRVFVDHPMFLEKVWGKTGSKIYGPKAGQDYLDNELRFSLLCQAALKAPRVLNLNCSKYFSGPYGEDVLFIANDWHTALIPCYLKSMYQSRGIYLNAKVAFCIHNIAYQGRFAFSDFPLLNLPDEFRGSFDFIDGHEKPVKGRKINWMKAGILESDRVVTVSPYYAQELVSAVDKGVELDNVLRKTSITGIVNGMDTQEWNPATDKYTDVKYDITTVMDAKPLLKEALQAAVGLPVDRRIPLIGFIGRLEEQKGSDILVAAIHQFIGLDVQIVVLGTGKKKFEQEIEQLEVLYPNKAKGVAKFNVPLAHMITAGADFMLVPSRFEPCGLIQLHA

SEQ ID NO: 9355 - protein, 466 aa, Yersinia pestis biovar Medievalis str. 91001
MQQHFHFDAIVIGSGPGGEGAAMGLVKQGARVAVIERYNNVGGGCTHWGTIPSKALRHAVSRIIEFNQNPLYSDNARTIKSSFADILNHADRVINQQTRMRQGFYDRNHCHMFSGDASFIDANTVNVRYADGTSDTLQADNIVIATGSRPYRPVNVDFNHERIYDSDTILQLSHEPQHVIIYGAGVIGCEYASIFRGLSVKVDLINTRDRLLAFLDQEMSDALSYHFWNNGVVIRHNEEFEQIEGTTDGVIVHLKSGKKVKADCLLYANGRTGNTSGLGLENIGLEADSRGLLKVNSMYQTALSHVYAVGDVIGYPSLASAAYDQGRIAAQAMIKGEANVHLIEDIPTGIYTIPEISSVGKTEQELTAMKVPYEVGRAQFKHLARAQIVGMDTGSLKILFHRETKQILGIHCFGERAAEIIHIGQAIMEQKGEGNTLEYFVNTTFNYPTMAEAYRVAALNGLNRLF

SEQ ID NO: 9356 - protein, 411 aa, Arabidopsis thaliana
MSSKEKPTLGGTRIKTRKRNIAAPLDPAAFSDALVQIYLDNAGDLELVARSLESSDLNFSRYGDIFFEVVFIGGRTQTGSVKSDEGERHPYSIIDCEPKREAILPSVVYIQKILRRKAFLIKNLENVTRRFLQSLELFEENERKKLAIFTALAFSQKLSGLPAETVFQPLLKDTLVAKGIVLNFVTDFFNEYLVENSLDDLISILRRGKMDDKLLEFLPPTKRTTESFAEHFTKAGLTALVEYNERKIFEVKLKEIKAVLTSQVTEEINVDEVTEMVKQQVKDAKLPETEVVHVIWDGIMNAVQWSGKNQQQNSNAVLRQVKTWAPLLNTLCSTGNMEMELMYKVQMQCYEDAKLMKVFPEVVRSLYELDVLAEDTILHWYRKGTNPKGRQTFVKGLEPFVNWLEEAEEEE

SEQ ID NO: 9357 - protein, 879 aa, Erwinia carotovora subsp. atroseptica SCRI1043
MNEQYSAMRSNVSMLGTLLGDTIKEALGENILDKVETIRKLSKSSRAGNEKHRQELLTTLQNLSNDELLPVARAFSQFLNLTNTAEQYHTISPHGEAASNPAQLSSAFKRLKESKDLSERDIRDAVESLSIELVLTAHPTEITRRTLIHKLVEVNTCLKQLDHNDLADYERNQVMRRLRQLIAQSWHTDEIRKIRPTPVDEAKWGFAVVENSLWEGVPAFLRELDEQLEQAFGYRLPVDAVPVRFTSWMGGDRDGNPNVTAEVTRHVLLLSRWKAADLFLRDIQVLVSELSMSECTPELLELAGGSEVQEPYRAIMKSLRSQLSCTLSYLEARLTGEERLPPKDLLITNEQLWEPLHACYQSLKTCGMGIIADGSLLDTLRRVRCFGVPLVRIDVRQESTRHTDALAEITRYLGLGDYESWSESDKQAFLIRELSSKRPLLPRYWEPSADTKEVLDTCRVIAKAPQGSIAAYVISMARTPSDVLAVQLLLKEAGCPFALPVAPLFETLDDLNNADDVMTQLLSIDWYRGFIQGKQMVMIGYSDSAKDAGVMAASWAQYRAQDALIKTCEKAGIALTLFHGRGGSIGRGGAPAHAALLSQPPGSLKGGLRVTEQGEMIRFKYGLPDVTISSLALYTGAILEANLLPPPEPKQEWHEVMDELSRVSCDMYRGYVRENPDFVPYFRAATPELELGKLPLGSRPAKRRPNGGVESLRAIPWIFAWTQNRLMLPAWLGAGAGLQKVVDDGKQEQLEEMCRNWPFFSTRIGMLEMVFAKADLWLAEYYDQRLVEEKLWPLGKQLRDQLAADINIVLAISNDDHLMADLPWIAESIALRNVYTDPLNVLQAELLHRSRQQKQPDADLELALMVTIAGVAAGMRNTG

SEQ ID NO: 9358 - protein, 577 aa, Zea mays
MYRAAASLASKARQAGNSLATRQVGSRLAWSRNYAAKDIKFGVEARALMLRGVEELADAVKVTMGPKGRNVVIEQSFGAPKVTKDGVTVAKSIEFKDRVKNVGASLVKQVANATNDTAGDGTTCATVLTKAIFTEGCKSVAAGMNAMDLRRGISMAVDAVVTNLKGMARMISTSEEIAQVGTISANGEREIGELIAKAMEKVGKEGVITIADGNTLYNELEVVEGMKLDRGYISPYFITNSKTQKCELEDPLILIHDKKVTNMHAVVKVLEMALKKQKPLLIVAEDVESEALGTLIINKLRAGIKVCAVKAPGFGENRKANLQDLAILTGGEVITEELGMNLENFEPHMLGTCKKVTVSKDDTVILDGAGDKKSIEERAEQIRSAIENSTSDYDKEKLQERLPKLSGGVAVLKIGGASEAEVGEKKDRVTDALNATKAAVEEGIVPGGGVALLYASKELDKLQTANFDQKIGVQIIQNALKTPVHTIASNAGVEGAVVVGKLLEQENTDLGYDAAKGEYVDMVKTGIIDPLKVIRTALVDAASVSSLMTTTESIIVEIPKEEAPAPAMGGGMGGMDY

SEQ ID NO: 9359 - protein, 175 aa, uncultured bacterium 463
MFKALMSQVRTIWTILQHSFTRAETVQYPEQKPYLAPRYRGRIVLTKDPDGEERCVACNLCAVACPVDCIALQQGVKEDGRWYPEFFRINFSRCIMCGMCEEACPTNAIQLTPDFEMCEYNRSSMVYEKEHLQIEGTGKYHDYNFYRVAGLAITGKDKGQAQNEATPIDVKSLLP

SEQ ID NO: 9360 - protein, 362 aa, Solanum torvum
WDTSVAIEVRVGDNIEIVRFFHCYKRGVDRVFVDHPMFLEKVWGKTGSKIYGPKAGQDYLDNELRFSLLCQAALEAPRVLNFNCSKYFSGPYGEDVLFIANDWHTALIPCYLKSMYQSRGIYLNAKVAFCIHNIAYQGRFAFSDFPLLNLPDEFRGSFDFIDGYEKPVKGRKINWMKAGILESDRVVTVSPYYAQELVSAVDKGVELDNVLRKTSITGIVNGMDTQEWNPATDKYTDVKYDITTVMDAKPLLKEALQAAVGLPVDRKIPLIGFIGRLEEQKGSDILVAAIHKFIGLDVQIVVLGTGKKKFEQEIEQLEVLYPNKAKGVAKFNVPLAHMITAGADFMLVPSRFEPCGLIQLHA

SEQ ID NO: 9361 - protein, 362 aa, Solanum viarum
WDTSVAVEVKVGDSIEIVRFFHCYKRGVDRVFIDHPMFLEKVWGKTGSKIYGPKAGQDYLDNELRFSLLCQAALEAPRVLNLNCSKYFSGPYGEDVLFIANDWHTALIPCYLKSMYQSRGIYLNAKVAFCIHNIAYQGRFAFSDFPLLNLPDEFRGSFDFIDGHEKPVKGRKINWMKAGILESDRVVTVSPYYAQELVSAVDKGVELDNVLRKTSITGIVNGMDTQEWNPATDKYTDVKYDITTVMDAKPLLKEALQAAVGLPVDRKIPLIGFIGRLEEQKGSDILVAAIHKFIGLDVQIVVLGTGKKKFEQEIEQLEVLYPNKAKGVAKFNVPLAHMITAGADFMLVPSRFEPCGLIQLHA

SEQ ID NO: 9362 - protein, 350 aa, Ustilago maydis 521
MSGPLVLITGITGFLSAHVLDAVLASPANYKVRGTLRSISKKDEILARLSAQDRERVEFVQVADIATSDLLAAVRGVEIIHHVASPYQLNVQDAERDLLIPAVEGTLNLLRFAKHEKSVKKIVITSSFAAVTNFKDGGPYRPGFVYTADCWNPSSYEDAIKAGGAGAFSYSVSKKLAEKAAWDYLANEKPHFEIACINPPMIYGATLQPVAKLSSLNTSSKTIYGLINSADSMPEDRLPLFCHARDVGDAHVATTEKPDGMGQRWLLCGGKFTWAHAVKFIAEQYPDLQDRLPKGWKEASANPRDLNTIVDLDTKPAQTKLGMQFRDWQITLKESLDSLLELEKRPGWKN

SEQ ID NO: 9363 - protein, 1430 aa, Mesorhizobium loti MAFF303099
MRCASEIQHEVDRRNFDVPETKRLRFRIGVHLGYVVAEGDHIAGEAVEVVAHLQTLSRPGGICVTEAVHAQAQDRLSLEFLDLGEHNLKNVARALRIYRVPLASEQPVRSPFRGLDAFEFEDADLFFGRARAIAACTARLEQQAASGTAFLLIYGMSGCGKSSLLRAGLLPSLTRPGAVAGISLWRRCLIRLSEGPDAFAVLAAALLSEAAVPELSCEVTAAQFALLCRSAPDRALAMVRQALGKAAGSAHSQIRLLVAIDQLEELFTTEKQPATREALVRLMAALAASGLVWVVGAIRSDFFHRCGEIPGFSALKDGLSSYELLPPTGPEIAQIIREPAGVAGLRFDESAELGRLDDVLQEAAAADPGSLPLLEFVLDALYQAGRERRVLTFAHYRALGGLEGAIARRADEVVDLLAPEIQEALPAVLRALTTASPGDETVTARPALLTEVAGTPARSALVRALIDARLLVSDEDAGGHVFVRVAHEALLSRWPRAGDIVNANRNFLETRERLRADAHRWYMESRNRELLLPSGKRLAEGEELLLSRREEVDDDVVEYIEASLRAHRQKAEKDRQAQLALIEAAEEAKRERLEREAERRSLAAAAANLLARRTRNAAIVAIVLALMAGAGALVAFRAQQEARWQRDQALRNHSLSLSFLSQQSAATGNTEAAILLALEALSSKDQSERPYLFDAEAALYKALLSHHQIKIFRHAAGVADAAFNSSGDHIVTASYDKTAGVWDISSGAETAVLKGHEGTVERAEFSRDGNRILTAARDGTARVWNAISGQQLFILQPVGDYPTAIFSPNGNQVLTAGENSDAALWDARTGKKIVSVSSGGYARAGFSSDGRSFATARKHSVSIWNSADGALTRSIRVNSRPYSLAFSPDGSRLLAGACGPLSYGGTSSLLDVSKGTEIAKLVDQKSDTQLNGVIFSHGGQRIATVSLDGAARIWDGASGTLHDLLGQEVSGLKLADIGADERDEEMNGAFSPDDRFLATASVNGPIRIWDVERASLVTTIAGHESLVEHLEFSPVDSNILLTASHDGTARLWDVDGALTTTLSHEYRPTFAVFSPDNVHLLTGGGDSAAHLWDALSGREIIRLDTHEIVQTATFSPDGKHVATASLGGQVRIWEIARGVETAQFQSHGGLIQIQFGRDGKSLVSASIDGTAQLWDAATGAELAVIDTSSKLPQAILSPDGRLILAAREDNSGHLLKADGAELKALVGHRDRITAAAFNPNGQLVATGSRDHTARIWSTADGASVLTLEGHTGEVTVVAFSPDGQSLLTASRDRTVRIWSVSGGLERAVLRGHSSAVDSAQFSPNGLYLVTASSEDRTVRLWATQSGRQIAVLASQDEATVRPSLTRAAFSSDGTRVAIISGEERVRIVRVFQTPNDLIDFARRTVPRELTPCERRSFFLPADPATGICPS

SEQ ID NO: 9364 - protein, 217 aa, Triticum aestivum
MAPKNALPVAVAAAADAGMEPRFRGVRKRPWGRYAAEIRDPARKARVWLGTFDTAEAAARAYDAAALHYRGPKAKTNFPVGTVAAFAHVPLPPPKALAVSPSSSTVESSSRDTPAAAPAAPAAAAPAPPPALDLSLAMPAMVAAQPFLFLDPRVAVTVAVAAPAPAPCRSAAISGMNKVASREEEQSDTGSSSSVVDASPAVGVGFDLNLPPPVEMA

SEQ ID NO: 9365 - protein, 632 aa, Podospora anserina
MNQQQQYQQPSRRTDAYSSQHDELHLPSSSSMAHQGQHPLQQQQQQLPTRQYSSGPGVPPHIKLEQSPNPQQHHHQSAGVVPNVLQPGGLQTRPPVISSNTAPVLPTMQQQQPPDYQPHQTPTKSNSMNLSHNYPRSSPAAPYEGGSGYSAYAPNTPGGAGSSSQYMSPTDSKYSQSSGSQRIPSNAPLGLADIRPRADSSLSDGIPGTTSYEHANTQSRTSNYMAPWALYAFDWCKWAPQGNSAGKVAIGSYLEDGHNYIQILDAQVSPTPSDVYSPAGSRYTMDFTRIAEATHSYPVTRLLWEPPSSQKQSTDLLATSGDHLRLWSLPSDPQVQTPGSSITSRNGRDMPITKLTPLALLSNSKTPDHTAPLTSLDWNTVTPSLIITSSIDTTCTIWDIPSLTAKTQLIAHDKEVYDVRFCANSVDVFVSCGQDGSVRMFDLRSLEHSTIIYEPTGKEERDANGGRISPTLAQQTMSHPPPLLRLATSPHDQHLLATFAQDSNVIRILDVRQPGQALLELRGHGGALNCVEWSPLRRGTLASGGDDCQVLIWDLLNNNNTSNAATISTNGAAPPTGAQAAASTDNVRSPVAAWQCEYEVGNLGWVPHLAGGEYGDWLGVSAGRGVWGVKLG

SEQ ID NO: 9366 - protein, 488 aa, Bordetella pertussis Tohama I
MFSSERAYMPVLRRTKIVATLGPATSTPERLDGLIRAGMDVARLNFSHGSAQDHRERVRLVRELAAEQGRFVALMGDLQGPKIRIARFTDQQVTLQAGQPFTLSRSHSKEAGDATIVGIDYPELVQDCRPGDELLLDDGRVVLVVDSVGAEEVHTTVTVGGPLSNNKGINRRGGGLSAPSLTDKDRTDIKLAAEMELDYVAVSFPRYGADIDEARALLRAAGSQAWIIAKIERAEAVADDDALDALIRASDGVMVARGDLGVEVGDAELVGIQKRIIQHARTLNKVVITATQMMESMVASPMPTRAEVSDVANAVLDYTDAVMLSAESASGQYPIEAVAAMARVCLGAEKHPTTTHSHHRLGETFTRCDETIALAAMYAANHFPGVKAIIALTESGHTPLIMSRIRSGVPIYCYSPHGPTQRRAALFRGVYTVPFAPAEYDPADLSNAAIDELKKRGRVAAGDWVILTKGDFYRDSGGTNGLKILKVE

SEQ ID NO: 9367 - protein, 231 aa, Shewanella sp. MR-7
MNMSQKMAAEFLGTLWLVLGGCGSAVLAAAFPEVGIGLLGVALAFGLTVLTMAFAIGHISGCHLNPAVSFGLWAGGRFPASELLPYIIAQVAGGIVGAGVLYAIASGQEGFSLAAGFASNGFGEHSPGGYSMMSVLICEIVMTLFFLLVILGATDERAPKGFAPIAIGLCLTLIHLISIPVSNTSVNPARSTGPALFVGDWAVSQLWIFWVAPILGAILAGVIYRYFNAAK

SEQ ID NO: 9368 - protein, 168 aa, Rhodospirillum rubrum
MSPLYDIEVTTLDGAPQTLADYAGKVLLIVNVASKCGFTPQYKGLEALQRRYRDRGFCVLGFPCNQFGHQEPGDAGEIKSFCTLTYDVSFPMFAKIDVNGPDAHPLYRLLKAEAKGLLGSEAIKWNFTKFLVSADGETISRFAPTDTPESLRARIEALLPAAQGPLGA

SEQ ID NO: 9369 - protein, 209 aa, Triticum aestivum
  misc_feature (89)..(89): Xaa can be any naturally occurring amino acid
  unsure (1)..(209): unsure at all Xaa locations
AAQSPTPAAMAGGSGGAGGGTGGGDSLARRAWRQYLLQLQRHPLRTKMVTAGCLAGVSDSVAQKLSGYQKIEKRRLLLKMIFGFAYGGXPFGHFLHKVLDYIFKGKKDTKTVAKKVLLEQITSSPWNNLLFLFYYGYVVEKRPFKEVKTRVKKQYLSVQLSAWMFWPVVGWINHQYVPLQFRVIVHSFVACCWGIFLNLRARAMSLKQS

SEQ ID NO: 9370 - protein, 312 aa, Carboxydothermus hydrogenoformans Z-2901
MGGIATREAYGKALVELGQENPKIVVLDADLSKSTKTSDFAKAFPERFFNMGIAEQNLMGVAAGLSTVGKIPFASTFAVFAAGRAFEIIRNSICYPKLNVKIAATHAGLTVGEDGASHQAIEDLALMRVLPNMQVFVPADAAQTRAIVKKAAEIEGPVYIRLGRSGVPEVFSPDIRFEPGRGTVLKEGKDVTIVALGIMTAKALEAAKMLEAEGIAARVVDMASLKPIDRELLVESARLTGAVVTAEEHSVIGGLGSAVAEVLSEEYPIPVVKVGVNDVFGESGTPQALLEKYGLTARDVVAAVQKALTLKR

SEQ ID NO: 9371 - protein, 529 aa, Neurospora crassa
MKSTLATLLALASVAVAENGVVNFPLNRGVPHFRVGNVRQNVKRDTYSQALINNITGGAYYAEVTVGTPGQKVSVVLDTGSSDLWVVSYKADLCTDPSIQRQWGDSCDKTYNPTKSSSYKVLEEDSFEIRYLDNSTAAGDYITDDLNIGGATIKSLQMGYATKTVRGAGILGVGYSSNVASQQRYPNLIDQFVAQKLITTKAYSLYLNDRRSDTGSILFGGIDKDKFIGDLSILPIYLAKGQAEPIHFEVEMQSVSLALTKNGKTTKIISTDPSLSQTSTIAILDSGTTLSYLPSKITDQIHTKLSVYVDEIWTGLTFIDCQYLTSNPDLRLSFTFGANATISVPVWELVLDLLGESQSELPFKMPFKNACIFGIQSTAGFQEDNFDEDWALLGETFLRSAYVVYDLTHHQIGIAQANLNSTTTDIVELSGADGGLPTGLTGVKEQQTSNDPSGNAGSGSGSSTDKDGAKETETVTAGSTAATGTAASGAKETDSAAAGLSARGGAVGALAVASLTGFLALVGGAVVAL

SEQ ID NO: 9372 - protein, 430 aa, Shewanella sp. MR-7
MTRSEALFEQAKKTIPGGVNSPVRAFNGVGGSPLFIEKADGAYIYDADGKAYIDYVGSWGPMILGHNHPKIREAVLAAVHNGLSFGAPTELEVQMAEKVIAMVPSIEQVRMVSSGTEATMSAIRLARGFTNRDKILKFEGCYHGHADCLLVKAGSGALTLGQPSSPGIPEDFAKHTLTAVYNDLDSVRTLFEQYPTEIACIIIEPVAGNMNCIPPIPGFLKGLRTMCDEFGALLIIDEVMTGFRVSRSGAQGHYGVTPDLTTLGKVIGGGMPVGAFGGRKEVMQFIAPTGPVYQAGTLSGNPIAMSAGLAQMEALCEEGLYEALSAKTKRIAEGFKAAADKHGIPMAINYVGGMFGFFFTEQEQITRFDQVTKCNIEHFRTFYHGMLDEGVYLAPSAYEAGFLSMAHGEEELRLTLEAADRVLARMKAAM

SEQ ID NO: 9373 - protein, 200 aa, Glycine max
MVQSRKFRGVRQRHWGSWVSEIRHPLLKRRVWLGTFETAEEAARAYDEAAILMSGRNAKTNFPVGENQIVGNHSSNTSSSSTTTLSAVLSAKLRKCCKSPSPSLTCLRLDTENSHIGVWQKRAGPRSDSNWIMMVELENKNNDNEGDHHQGPSSSDDSEFPVVVVDVDAQEKVKPEEESTGLDEEQKMALQMIEELLNRN

SEQ ID NO: 9374 - protein, 414 aa, Oryza sativa (japonica cultivar-group)
MAEICCEEAMSPPATATAAVAAAVSASAAAAVSSAIDRRRRRMEMRRIRIASDLELQAGEDGRPGKRQRLARTASGAPRPDEDSASERPSCGRTEEFPRYGVTAVCGRRREMEDAVSIRPDFLPASGKFHFYGVFDGHGCSHVATTCQDRMHEIVAEEHNKGASGEVAPWRDVMEKSFARMDGEVGNRASTRSDDEPACPCEQQTPSRRDHAGSTAVVAVVSPTQVVVANAGDSRAVISRAGVPVALSVDHKPDRPDELERIEAAGGRVIYWDGARVLGVLAMSRAIGDGYLKPYVTSEPEVTVTERTDDDECLILASDGLWDVVTNEMACEVVRACFHNNGPPAPAARPSGVPSSAEAAETENGGAASVKGISKAESSDKACSDAAMLLTKLALARRSADNVSVVVVDLRRGL

SEQ ID NO: 9375 - protein, 1338 aa, Kluyveromyces lactis NRRL Y-1140
MSFLKKKSSTAGHSRSGSASSILNKHVDPANISEFYPSSLDHKVTSGLKNDYSFDSSSKGSRKSSGGSTNSLTSERLLFNWDVTDPSQWTMPRIIQWFRANDFNDQWITFFKRNSISGNKFLKLLAYDNFAPYEKSLQQSKSSSYERFQYLLKKTLEENVVKGNNRNGNRIINNSRSSSESAKVSQRLSTSFSTHIRSTSESALLNIENITKDSSSSEPTTSKKQEASNYSLPLRQAKTNSASALYRRSLISLRNASSTKDNASKNDIKITIPPRPLSTTENTNKSPTTPSSVSPSHTAYTGIFRRQHKTSSSESSLFTSIFGHGVVEEPEETPKPRPVENRRIPAASTVNASTSKQSINVDDKARLWDKIKRKGQLPAEPSSQPAARIIIEEVKESPKAEPPEIVIPEEIYPKRPSDSRELFIMLTKDNSTFSPFNVQPHLGTDVSELKKAVALALGLTHSNFSIHLTDFGAEFGSQIPDGLLADFQKTSFQNIPNKLYIQDLEKKANLNPRPRTETLASQHSTAASTKSKTSVKSNASAASNGEGSSSDLTSIDDQGSSHRRAYPQTPSHYYDNSTSAETDYWSFKDSVPETISDAPHITLPKSRPSLKLNSSVLNTHASEKSTFRIIRQTSDTDIDFNKRRESPYVRVAELAPKRKAPKPPVNGNPVTSGSLPSAAAKNVSESPLESPPKLDRNGKTIYQKNKPRPPPPLTTELGSRRSVSSLSGQDLNEVKESPVQSFTPASTQVMVPQPYKGALETLKPRKSSADLSIRPRMSLRQFSRSNSSLNRKVLSTSRQTLNRTNSKPLVTSSTAADIFDENDISFADAPELSDSDDYSASSDEIIWSRDRKSISNDVPEFSFNTEDTIDLVGTDTTQVSVGATEGSDTPKKMALRPSPDVVYQNLEKFFPDADLDNPILEGLTPPPSPNADSSPPSPRGFEKSLKTKSEQQPAFLSSRGESSQFLTPVKSLKPPKRTKTIRIIAQEASEARKNEVSQKLQRKNTKMWGTKVVEITDKRTISINKSRNSRGEYKEFAWIKGEIIGKGSFGAVYLALNVTTGEMLAVKQVTVPEFSSQDESAISMVEALKSEVSTLKDLNHVNIVQYLGFEEKNGIYSLFLEYVAGGSVGSLIRMYGRFDDQLIRHLTKQVLEGLAYLHSKGILHRDMKADNLLLDNDGVCKISDFGISRKSNNIYSNSDMTMRGTVFWMAPEMVDTAHGYSAKVDIWSLGCVVLEMFAGKRPWSNFEVVAAMFQIGKSKTAPPIPDDTKDLVSPAGQSFLDQCFEIDPEMRPTADSLVGHPFCKTSSSFDFPKTKLAQFIKSNDKLNSSRLRISSQEL

SEQ ID NO: 9376 - protein, 335 aa, Agrobacterium tumefaciens str. C58
MLMEETMRQASVLAPHTNGPTVTAGEILVEIMATTVGDGFLEPQTLIGPFPSGAPAIFIDQVARCGGTAGIIAAVGDDDFGRLNIERLRRDGVDVSAITTIADRPTGSAFVRYRENGARDFVFNIAHSAASETRMTDEAQALIEKAGHVHIMGSAFAIAGIGAIILEAVKSVKARGGSVSFDPNIRKELAQGDEGRRLIDDLLAVTDLLLPSGEELQAASGLDDEEAAIEKLLAAGIGEIVLKRGANGASHFSRAHGRIDAPGLEVEEIDPTGAGDCFGATYLTCRRLGMRPGKALVYANASGAHNVTKRGPMEGAASLAELDAFMAAQLSEEVL

SEQ ID NO: 9377 - protein, 334 aa, Mycobacterium tuberculosis H37Rv
MRAVVITKHGDPSVLQVRQRPDPPPPGPGQLRVAVRAAGVNFADHLARVGLYPDAPKLPAVVGYEVAGTVEAVGDGVDPNRVGERVLAGTRFGGYCEIVNVAATDSVVLPDALSFEQGAAVPVNYATAWAALHGYGSLRAGERVLIHAAAGGVGIAAVQFAKAAKAEVHGTASPQKHQKLAEFGVDRAIDYRRDGWWQGLGPYDVVLDALGGTSLRRSYTLLRPGGRLVGYGISNMQHGEKRSMRRVAPHALSMLRGFNLMKQLEESKTVIGLNMLRLWDDRRTLEPWIAPLTKALNDGTILPIVHAIVPFAEAPEAHRILAARENVDKVVLVP

SEQ ID NO: 9378 - protein, 166 aa, Triticum aestivum
  misc_feature (148)..(148): Xaa can be any naturally occurring amino acid
  unsure (1)..(166): unsure at all Xaa locations
MAVLVARQGRELQRYSASTGGRIVVGCIPYRVRAGGDGDGEGELEVLVISSQKGHGMMFPKGGWELDESMDDAARREALEEAGVRGEMGKVLGCWHYQSRRYQTTYEGIMYPLRVTDELQQWPEMASRKRTWATVQQVMEGCQHCWMXREALEELVARHAKPQSAL

SEQ ID NO: 9379 - protein, 352 aa, Solanum wendlandii
WDTSVAVEVKVGDSIEIVRFFHCYKRGVDRVFVDHPMFLEKVWGKTGSKIYGPKAGQDYLDNELRFSLFCQAALEAPRVLNLNCCKFFSGPYGEDVLFIANDWHTALIPCYLKSMYQSRGIYLNAKVAFCIHNIAYQGRFAFSDFPLLNLPDEFRGSFDFIDGHETPVKGRKINWMKAGILESDRVVTVSPYYAQELVSAVDKGVELDNVLRKTSITGIVNGMDTQEWNPATDKYTDVKYDITTVMDAKPLLKETLQAAVGLPVDRKIPLIGFIGRLEEQKGSDILVAAIHKFIGLDVQIVVLGTGKKKFEQEIEQLEVLYPNKAKGVAKFNVPLAHMITAGADFMLVPSRF

SEQ ID NO: 9380 - protein, 208 aa, Mycoplana dimorpha
MVLAAIFFGGTPILATAMAYPLAICAACVITSIIGTFFVKLGTNNSIMGALYKGLIVTGALSILGLGAATSFTIGWGSIGTVGGIEVRGGNLFVCGLIGLVVTALIVVITEYYTGTNKRPVNSIAQASVTGHGTNVIQGLAVSLESTALPAIVIVGGIIATYQLAGLFGTAIAVTAMLGLAGMIVALDAFGPVTDNAGGIAEMSHLSP

SEQ ID NO: 9381 - protein, 225 aa, Mycoplana dimorpha
AIGSAGLGALVLFAAYSNDLSYFAANGDKYPYFANIGEISFDLSNPYVVAGLIFGGLIPYLFGGIAMTAVGRAAGSIVEEVRRQFKEKPGIMQGKDKPNYGRAVDLLTKAAIREMIVPSLLPVLAPLVVYFGVLLISGSKASAFAALGASLLGVIVNGLFVAISMTSGGGAWDNAKKSFEDGFVDKDGQRHMKGSEAHKASVTGDTVGDPYKDTAGPAVNPAIKI

SEQ ID NO: 9382 - protein, 421 aa, Streptomyces rochei
MRRVVITGIGVVAPGGVGTADFWALLTEGRTATRRITLFDASSFRSRIAAEADFDPAGHGFAPDEARRLDRVAQFALVAAREAVADSGLVLAAEGERTGVSLGTAVGCSSGLDETYAHVSESGRPLAAGSRTAEARLGDYLVPSSVAAEVARDSGALGSVAVVSTGCTSGLDALGHATELIREGSADIMVAGGAEAPITPITLASFDAIRATSARNDEPETASRPYDRTRDGFVLGEGSAVLVLEEHDRAVRRGARIYAEVSGFATRSNAYHMTGLRPDGGEMAEAIRVALDEARLNPADVHYVNAHGSGTKQNDRHETAAFKASLGQHAHRVPVSSVKSMIGHSLGAIGGLEIAASALAIAHDTVPPTANLHEADPACDLDYTPLTAREQRTDTVLSVGSGFGGFQSAMVLTSRHTGAAA

SEQ ID NO: 9383 - protein, 546 aa, Erwinia carotovora subsp. atroseptica SCRI1043
MTPSELRRLYSIVRVLLSYGLDELIPKMRLTFPLRVGRRLLFWLPNRHRNMPLGERLRLALQELGPVWIKFGQMMSTRRDLFPPAIADQLAMLQDKVEPFDGKLAREQIELAMEGIPLEEWFDDFDIKPLASASIAQVHTARLKSTGKEIVIKVIRPDILPVIKADMRLMKRLAGWLPRLLPDGRRLRPREVVMEYEKTLLDELNLLREAANAIQLRRNFENSPMLYVPEIYSDYCRESMLVMERIYGIPVSDVDALKANGTDMKLLAERGVQVFFTQVFRDSFFHADMHPGNIFISYDHPEDPQYIGIDCGIVGSLNKEDKRYLAENFIAFFNRDYRKVAELHVDSGWVPPDTNVADFEFAIRTVCEPIFEKPLAEISFGHVLLNLFNTARRFNMEVQPQLVLLQKTLLYIEGVGRQLYPQLDLWKTAKPFLESWLKQQVGLPAVFRALKEKAPFWAEKLPEIPELFYDGLRQHKMLKQSVDKLAYELRTQQARQGQSRYLLGIGATLLIGGTLLLISRVEADMVPTGLIAAGIVAWIIGWRRTR

SEQ ID NO: 9384 - protein, 220 aa, Arabidopsis thaliana
  misc_feature (198)..(198): Xaa can be any naturally occurring amino acid
  unsure (1)..(220): unsure at all Xaa locations
MASSAPPVLPISNPQTVPSAAPSSVESQPPIATPAFRNFINQITETVKNGLSKRRPWAELADRSALSKPESISDAAVRIRKNYSYFKVNYLTVATAIVGFSLVTHPFSLVFLLCLLASWLFLYLFRPTDQPIVLFGRTFSDRETLGCLILFSIFVIFLTDVGSVLVSAMMIGVALICAHGAFRAPEDLFLDEQEPAAXGFLSFLGGAASSAAPAVIAARV

SEQ ID NO: 9385 - protein, 428 aa, Sorghum bicolor
MSISVNGQSVVPPGFRFHPTEEELLTYYLKKKVASERIDLDVIRDVDLNKLEPWDIQEKCRIGSGPQNDWYFFSHKDKKYPTGTRTNRATAAGFWKATGRDKAIYASGARRIGMRKTLVFYKGRAPHGQKSDWIMHEYRLEPALDVDAAAGSASAHHAAAGAAADHHPYYTSSSPPALPTAIRGAAGDQQAAQEQEGWVICRVFKKKNLVHHGQSSGGGVTAAGSKMASAAAPMEGSPSHCSSVTVISDHTMNKHQAQAMLQHSASDDDALDHILQYMGGGGGKQPDTKPVLLDHHHHHHLAAAATTTTTACSAGGAGLYGKFMKLPPLEHAGGGGGLLPSPAGACDYGAADASGIADWDALDRLAAYELNGLSDASKNMSAFFDEPSATAAFSSSSSSVHAAAVDGDLWSLARSVSALHADLTMNNV

SEQ ID NO: 9386 - protein, 602 aa, Zea mays
MASPFSVPSLIMEEEGRFEAEVAEVESWWGTERFRLTKRPYTARDVVLLRGTLRQSYASGEMAKKLWRTLKAHQAGGTASRTFGALDPVQVTMMAKHLDTIYVSGWQCSSTHTSTNEPGPDLADYPYDTVPNKVEHLFFAQLYHDRKQREARMSLPRAERARAPYVDFLKPIIADGDTGFGGATATVKLCKLFVERGAAGVHLEDQSSVTKKCGHMAGKVLVAVSEHVNRLVAARLQFDVMGVETVLVARTDAVAATLIQTNVDARDHQFIVGATNPGLRGQSLAAVLSAGMSAGKSGRELQGIEDEWLAAAQLKTFSECVRDAIAGLGVAAQEKQRRLQEWDRATGGYDRCVSNDQARDIAASLGVTSVFWDWDLPRTREGFYRFRGSVAAAVVRGRAFAPHADVLWMETSSPNVAECTAFSEGVKAACPEAMLAYNLSPSFNWDASGMTDAEMAAFIPSVARLGYVWQFITLAGFHADALVTDTFARDFARRGMLAYVERIQREERINGVETLEHQKWSGANFYDRVLKAVQGGISSTAAMGKGKVPHFPAFFFCLEKNKPSFVHSFDVVLFTGVTEEQFKDPRPATGSSGLQVMAKSRI

SEQ ID NO: 9387 - protein, 232 aa, Zea mays
PVSTMLASSRTALRQAATKQLSLKSSVRAVSAWSQVPQGPPDAILGITEAFKADSNPKKINLGVGAYRDDKGKPYVLPSVREAEKKVVDSALDKEYAGITGVPNFTKAALKLAYGADSKPLNEDCIAVTQSISGTGALRIGGAFLERHYPGPKTIYIPTPSWANHNAVFKDSGLKVEKYRYYNKDTIGLDFEGMIADIKAMPKNSIVLLHACAHNPTGVDPTEEQWTKIADA

SEQ ID NO: 9388 - protein, 656 aa, Treponema pallidum subsp. pallidum str. Nichols
MSVCCTSSEERIERSKNLVHLVAQVAGAYAQLPAQYAKSSSGVFEITSFSSFYEHVCLFAAGLASIGCGRGDCIGLISDNRVEWLHASFGIQALGAADVPRGSDATERDLVQILGAVEARTVIVENDAQLKKLARCFDALPSVSQIVLLDAGGAYQAMKDEFVQNEDGSARKCSFFTYQDILAHGTQFRVHHPGRIEDEIGRTTRADVATIIFTSGTTGTPKGVVLSHENFLCQLIDISRRLTVCPGDIALSVLPVWHVFERISEYVVLSHAGGVAYSKPVGSVMLADLAKLNPHFLPSVPRIWEAIHDGIFKNVRKKGGVAAALFHFFLAAGKAYAYFYRSVFGLRTHTTRRAQFCAPLFACVPWLLLVPLHFLGNVLVFRKVRKKFGTSFKTAISGGGALPPNVDEFLYAIGVRVLEGYGLTETAPVIAMRSERRPVFGSVGTPCAYNEVKIVDDTGAQLPVGYKGIVLVRGKNIMQGYYKNPELTAQVLDADGWFNTGDIGYRCVGGQIVLRGRKKDTVVLRGGENVEPVPLEMSMQESRFIARAVVVGQDERYLAALIVPDEAELRLWAEAQELRTECMEELLVNPAVVKFFEQEIAKRISLENGFKIFERINRFVLLPKVFEVGVELSAKQEVMRHRVADLYAKEIAQLFS

SEQ ID NO: 9389 - protein, 766 aa, Thermotoga maritima
MHHHHHHGKPIPNPLLGLDSTENLYFQQIDPFTKAYAFGFPKIGEKREFKKALEDFWKGKITEEQFEEEMNKLRMYMVENYRKNVDVIPSNELSYYDFVLDTAVMVGAVPERFGEYRGLSTYFDMARGGKALEMTKFFNTNYHYLVPEIETEEFYLLENKPLEDYLFFKSKGIETAPWVIGPFTFLYLSKRNGEWIRRPNQMEKLLESLVSVYKEVFEKLVENGCKEILVNEPAFVCDLEKAHWDLILNVYRELSEFPLTVFTYYDSVSDYEACVSLPVKRLHFDFVSNEENLKNLEKHGFPEDKKLVAGVINGRQPWKVDLRKVASLVEKLGASAISNSCPLFHLPVTLELENNLPGGLKEKLAFAKEKLEELKMLKDFLEGKTFDLPNVSFEDFAVDLQAVERVRNLPEDSFRREKEYTERDRIQRERLNLPLFPTTTIGSFPQTPEVRKMRSKYRKGEISKEEYEAFIKEQIKKAIELQEEIGLDVLVHGEFERTDMVEFFAEKLNGIATTQNGWVLSYGSRCYRPPIIYGTVTRPEPMTLKEITYAQSLTEKPVKGMLTGPVTIMSWSYYREDIPEREIAYQIALAINEEVKDLEEAGIKIVQIDEPAFREKAPIKKSKWPEYFEWAINAFNLAANARPETQIHAHMCYSDFNEIIEYIHQLEFDVISIEASRSKGEIISAFENFKGWIKQIGVGVWDIHSPAVPSINEMREIVERVLRVLPKELIWINPDCGLKTRNWDEVIPSLRNMVALAKEMREKFES

SEQ ID NO: 9390 - protein, 146 aa, Pyrobaculum aerophilum str. IM2
MTAIKLQTRPRPGDVFTLPNGKRVEVKNIGIPHVLPPASVCDDPLCPWHGHLKVRLKLLEVTVEKVRMHKAAVVIHEWLHYIRKYNRYERRRKRMRVRVPECIEVKPGDKVIIAETRPLSKTIAWVVIGKKEDVVEWKAKHETLQA

SEQ ID NO: 9391 - protein, 366 aa, uncultured crenarchaeote 74A4
MGHWSLILGHGQKNVKESIKKQIEKSWMYGTVNEQTIKLSELISKAVPVAEKIRYVTSGTEATMYAVRLARSVTGKKIIAKIDGGWHGYTSDLLKSVNWPFKESESSGTVNDEKIISIPYNNLEGSLKILKKHSKNLAGVIIEPVLGGGGCIPATKEYLKGIQEFVHKNKSLFILDEIVTGFRFRYGCLYPTMKLDPDIVTLGKITGGGMAIGVICGKKEIMEHADTTGKKKSERAYIGGGTFSANPTSMTSGYATLNYLKTNKSTYSKINAIGDYARKELEKVFDGKVVVTGKGSLFMTHFIKNGVTEISNSTDVAKCDSEMLQKYHFKMISKDGIFFLPGKLGAISISHTKEDIEKIILASESF

SEQ ID NO: 9392 - protein, 475 aa, Pichia angusta
MVKGNVIVVSNRIPVTIKKTEDDENGKSRYDYTMSSGGLVTALQGLKNPFRWFGWPGMSVDSEQGRQTVERDLKEKFNCYPIWLSDEIADLHYNGFSNSILWPLFHYHPGEMNFDEIAWAAYLEANKLFCQTILKEIKDGDVIWVHDYHLMLLPSLLRDQLNSKGLPNVKIGFFLHTPFPSSEIYRILPVRKEILEGVLSCDLIGFHTYDYVRHFLSSVERILKLRTSPQGVVYNDRQVTVSAYPIGIDVDKFLNGLKTDEVKSRIKQLETRFGKDCKLIIGVDRLDYIKGVPQKLHAFEIFLERHPEWIGKVVLIQVAVPSRGDVEEYQSLRAAVNELVGRINGRFGTVEFVPIHFLHKSVNFQELISVYAASDVCVVSSTRDGMNLVSYEYIACQQDRKGSLVLSEFAGAAQSLNGALVVNPWNTEELSEAIYEGLIMSEEKRRGNFQKMFKYIEKYTASYWGENFVKELTRV

SEQ ID NO: 9393 - protein, 836 aa, Arabidopsis thaliana
MDHNSPKSRRSRKPEPKPDIYSTFVVHSDSDSDQGRDRDKRKAKPEEDENVDLYATMVYKGDSDGEGEEDDDDDSMLPPLLKRLPKDFGGGASLDYDDDDGDESGDFGTMIVKTDRSSHSKKNSPYSSKPRMGVSPRRRARGGDEESSDEEDEEEDDDDDDGDYGTFVVKSKDKKGKKKDKEIDMTTMGRAVASMQKSNFGGKTRKLDPSSSSSKLHGEDNRKMQQQNSKMSTTSLPDSITREDPTTKYEFLNELGKGSYGSVYKARDLKTSEIVAVKVISLTEGEEGYEEIRGEIEMLQQCNHPNVVRYLGSYQGEDYLWIVMEYCGGGSVADLMNVTEEALEEYQIAYICREALKGLAYLHSIYKVHRDIKGGNILLTEQGEVKLGDFGVAAQLTRTMSKRNTFIGTPHWMAPEVIQENRYDGKVDVWALGVSAIEMAEGLPPRSSVHPMRVLFMISIEPAPMLEDKEKWSLVFHDFVAKCLTKEPRLRPTAAEMLKHKFVERCKTGASAMSPKIEKSRQIRATMALQAQSVVAPSLEDTSTLGPKSSEELGITVPSKPPQNSTEAPLTSTLNRQHITGNTVLAGEGGDFGTMIVHGEDETEESDSRSQLVREKESSSSQFEGVPREFPGEELPDSWIHDKKKPPAIDLPVEASISQSMQASSSHEHRTKLHNIAGTQMEGGSDASGSTLKNETVGRKAFALQDKLWSIYAAGNTVPIPFLRATDISPIALLSENMIGGMQQDGNGTVAVEALQELFTSSDPQSKKGRRGQNEMPLPPSVYQRLTTSSSLMNLAQVLAYHRACYEEMPLQELQATQEQQTIQNLCDTLRTILRL

SEQ ID NO: 9394 - protein, 367 aa, Mycobacterium tuberculosis H37Rv
MAIAETDTEVHTPFEQDFEKDVAATQRYFDSSRFAGIIRLYTARQVVEQRGTIPVDHIVAREAAGAFYERLRELFAARKSITTFGPYSPGQAVSMKRMGIEAIYLGGWATSAKGSSTEDPGPDLASYPLSQVPDDAAVLVRALLTADRNQHYLRLQMSERQRAATPAYDFRPFIIADAGTGHGGDPHVRNLIRRFVEVGVPGYHIEDQRPGTKKCGHQGGKVLVPSDEQIKRLNAARFQLDIMRVPGIIVARTDAEAANLIDSRADERDQPFLLGATKLDVPSYKSCFLAMVRRFTNWASRSSMVIFSMRLATASTRRPAVGLSAKAFSAWSPTRSTRGGRTASSRSTAFSTRSSRGSWRPGRTTRA

SEQ ID NO: 9395 - protein, 398 aa, Mycobacterium tuberculosis H37Rv
MTYGEAVADVLEFGQSEGEPIGMAPEEWRAFAARASLHAARAKAKELGADPPWDCELAKTPEGYYQIRGGIPYAIAKSLAAAPFADILWMETKTADLADARQFAEAIHAEFPDQMLAYNLSPSFNWDTTGMTDEEMRRFPEELGKMGFVFNFITYGGHQIDGVAAEEFATALRQDGMLALARLQRKMRLVESPYRTPQTLVGGPRSDAALAASSGRTATTKAMGKGSTQHQHLVQTEVPRKLLEEWLAMWSGHYQLKDKLRVQLRPQRAGSEVLELGIHGESDDKLANVIFQPIQDRRGRTILLVRDQNTFGAELRQKRLMTLIHLWLVHRFKAQAVHYVTPTDDNLYQTSKMKSHGIFTEVNQEVGEIIVAEVNHPRIAELLTPDRVALRKLITKEA

SEQ ID NO: 9396 - protein, 279 aa, Triticum aestivum
  misc_feature (212)..(212): Xaa can be any naturally occurring amino acid
  unsure (1)..(279): unsure at all Xaa locations
GAAANLVGKSRVQLKPICPTSSPPLVPVPSLPDPPAATARWRQGSPSCRVRISSTTCRPTPSCWAATARNPRWMWISPASVAGMNISRHHARIFYDFQRRRFALDVIGKNGCLVEGVLHLPGNPPVKLDSQDLLQIGDKKFYFLLPTRSIFASFAARQAPVIPPQIPPLAYARPGHPRVPDFHDRFSEGDYGRDSDDIGNGVGEGGMKGQLXRPRSLPEIWTLWWAQNHVEALEHWVKPQIPNKSGVKGCGQHHLKGKKGVRLLLEVVFNPVAPENGCL

SEQ ID NO: 9397 - protein, 160 aa, Raphanus sativus
MESEGKIVFTEEQEALVVKSWSVMKKNSADLGLKLFIKIFEIAPTAKKLFSFLRDSPIPAEQNPKLKPHAMSVFVMCCESAAQLRKTGKVTVKETTLKRLGANHSKYGVVDEHFEVTKYALLETIKEAVPEMWSPEMKSAWGQAYDHLVAAIKAEMKPSH

SEQ ID NO: 9398 - protein, 284 aa, Methanocaldococcus jannaschii DSM 2661
MEWMIMKLAEKFEELKNKGEKAFVAFYVGGDPNLEISEKALEVICKHADIVEIGIPFSDPVADGITIQKADVRALNSGMNPLKAFELAKKLNEKAPNVPKVFLTYYNIIFKMGEEEFVKKCKEAGVSGIIVPDLPIEEADSLYNYCKKYGVDLIFLVAPTTPDERLKKILEKCSGFVYVVSVTGITGAREKVAEETKELIKRVKKFSKIPACVGFGISKREHVEEITEIADGAIVGSAIVKIVEKHLDENGQIKDEEKFLKELEEFVKNLKEGTKKKAKVAIKN

SEQ ID NO: 9399 - protein, 256 aa, Clostridium thermocellum ATCC 27405
MNKLERAFSNGKAFIPFITAGDPSLEITEQLVYRMAEAGADLIELGIPFSDPVAEGPVIQEADYRALSAGTTTDKIFDMVGRIRKSCDIPIAFMTYANPIFTYGSEKFLKRCGETGIDALIVPDIPFEEKEELAPFCKEYDVRFISMIAPTSKERIRMIAREAEGFIYCVSSMGVTGVREKIGDDAKEMIKIVKEVRDIPCAVGFGISTPEQAAQMAGFSDGVIVGSAIVKIIAQYGAECIPYVEEYVRKMKNAIK

SEQ ID NO: 9400 - protein, 595 aa, Nicotiana tabacum
MAVDSVLSSPLGPPACEKDAKALQFIEEMTRNADAVQERVLNEILTRNSQTEYLKRFKLDGVSDRETFKNKIPVVTYEDLQPEIQRIANGDRSPILSAHPISEFLTSSGTSAGERKLMPTIKEELDRRQLLYSLLMPVMNLYVPGLDKGKGLYFLFIKSETKTPGGLLARPVLTSYYKSEHFKRRPHDPYNVYTSPNEAILCADSFQSMYTQMLCGLYEREQVLRLGAVFASGLVRAIRFLQLHWPQLAHDIRTGTLNPEITDPSICERMGLVMRPNPKLADFVTDECSKENWEGIITRIWPKTKYLDVIVTGAMAQYIPTLDYYSGGLPKACTMYAASECYFGLNLNPMCKPSEVSYTIMPNMGYFEFLPHDPNSSRDSTRNLVDLVDVEVGKEYELVITTYAGLYRYRVGDILRVTGFHNSAPQFHFVRRKNVLLSIDSDKTDEAELQRAVENASKLLKEFNTSVVEYTSYADTKTIPGHYVIYWELLMKDLNNSPSDEVLNKCCLAMEESLNTVYRQGRVACNSIGPLEIRVVKNGTFEELMDYAISRGASINQYKVPRCVSFAPILELLDSRVMSRHFSPSLPQWTPERRH

SEQ ID NO: 9401 - protein, 397 aa, Neisseria meningitidis MC58
MFFKHIEAAPADPILGLGEAFKAETRPEKVNLGIGVYKDASGATPLVKAVKEAEKRLLESETTKNYLTIDGVADYNAQTQILLFGKDHEIIASRRAKTAQSLGGTGALRIAAEFAKRQLNAQTIWISNPTWPNHNAIAKAVGIQDKPYRYYDAAKHGLDWDGMIEDLSQAQKGDIVLLHGCCHNPTGIDPTPEQWETLAKLSAEKGWLPLFDFAYQGFGNGLEEDAYGLRVFLKHNTELLIASSYSKNFGMYNERVGAFTLVAEDEETAARAHSQVKTIIRTLYSNPASHGANTIALVLKNDDLKAQWIAELDEMRGRIKAMRQKFVGLLKAKGASQNFDFIIKQNGMFSFSGLTPEQVDRLKNEFAIYAVRSGRINVAGITDNNIDYLCESIVKVL

SEQ ID NO: 9402 - protein, 225 aa, Triticum aestivum
AYSLKMDKKDACAITYFGDGGTSEGDFHAALNFAAVMEAPVIFFCRNNGWAISTPTTEQFRSDGVVIRGQAYGIRGIRVDGNDALAVYSAVHAAREMAITEGRPILVEALTYRVGHHSTSDDSTKYRPVDEIEHWRTARDPISRYRKWVQGNDWWSDAEESELRSRVRKELLQAIQVAERMPKPPVADLFTDVYDKIPSNLCEQEQLLRDTIMKHPADYPTDVPV

SEQ ID NO: 9403 - protein, 221 aa, Zingiber officinale
DDLPDSIDWRENGAVVPVKNQGGCGSCWAFSTVAAVEGINQIVTGDLISLSEQQLVDCTTANHGCRGGWMNPAFQFIVNNGGINSEETYPYRGQDGICNSTVNAPVVSIDSYENVPSHNEQSLQKAVANQPVSVTMDAAGRDFQLYRSGIFTGSCNISANHALTVVGYGTENDKDFWIVKNSWGKNWGESGYIRAERNIENPDGKCGITRFASYPVKKGTN

SEQ ID NO: 9404 - protein, 326 aa, Pseudomonas fluorescens PfO-1
MPMKKTVLAFSRITPPMIERLQQDFDVIVPNPKNGDINAQFNEALPHAHGLIGVGRKLGKAQLENAAKLEVVSSVSVGYDNYDLAYFNERGIMLTNTPDVLTESTADLAFALIMSSARRVAELDAWTKAGQWQASVGAPLFGCDVHGKTLGIVGMGNIGAAVARRGRFGFNMPIIYSGNSRKTELEQELGAQFRSLDQLLAEADFVCLVVPLSDKTRHLISHRELALMKPDAILVNISRGPVVDEPALIEALQNNRIRGAGLDVYEKEPLAESPLFQLKNAVTLPHIGSATNETREAMANRALTNLRSALLGERPQDLVNPQVWRG

SEQ ID NO: 9405 - protein, 266 aa, Zea mays
MGRRACCAKEGVKRGAWTAKEDDTLAAYVKAHGEGKWREVPQKAGLRRCGKSCRLRWLNYLRPNIKRGNISYDEEDLIVRLHKLLGNRWSLIAGRLPGRTDNEIKNYWNSTLGRRAGAAGASRVVFAPDTGSHATPAASGSREMTGGQKGAAPRADLGSPGSAAVVWAPKAARCTGGLFFHRDTPHAGETETPTPMMMAGGGGGEARSSDDCSSAASVSPLVGSSQHDPCFSGDGDGDWMDDVRALASFLESDEEWLRCHTAEQLV

SEQ ID NO: 9406 - protein, 171 aa, Brassica napus
RPTRPVTRLLKALEAPKDARIYWAGGEPLGGKEALEPLTKEFPHLYNKHDLALPGELEPFAKKASVMAAIDYIVCEKSDVFIPSHGGNMGHALQGQRAYAGHKKYITPNKRHMLPYFMNASLPESEFNRIVKDLHRESLGQPELRTGRGGKDVTKHPVSECMCSDRQQQQQ

SEQ ID NO: 9407 - protein, 326 aa, Streptomyces rochei
METRQLLRTMVRIRCIEEEIADVYRDEQQMRTPVHLSIGQEAVAVGVCAALRTEDVVYSGHRCHAHYLAKGGGLGAMVAELYGRETGCAAGRGGSVHLVDEAAGFGASSAILGEMISVATGAAWAFARQEAPRVAVTFFGDGASEEGVFHESLNFAALHRLPVVYVCENNQYSLSSPLAARQPPGTSISGRARGYGIPAARVDGNDVAAVHAAAVTAVEHCRSGTGPYFLELDTYRWREHVGPGWDHECGARRPDEVLSWTKRCPIRRAADALRGADPDVDEWITAWEREFRAETHAAIAAAEAAPFPRVEDLLVGTYGDRGTHAG

SEQ ID NO: 9408 - protein, 387 aa, Erwinia carotovora subsp. atroseptica SCRI1043
MEKVVIVDAVRTPMGRSKGGAFRQVRAEDLSAHLMRSLLSRNTALDAREIDDIYWGCVQQALEQGFNVARNAALLAEIPVSVPATTVNRLCGSSMQALHDAARAIMVGDANVCLIGGVEHMGHVPMNHGVDFHPGLSRTIAKAAGMMGLTAEMLARMHNISREMQDQFAARSHQRAYHATQSGAFRHEIVPTAGHDADGALQRFDYDEVIRPDTTIDSLAALKPAFDPVNGTVTAGSSSALSDGASAMLIMSESRAASLGLPVRARIRAMAVVGCDPSIMGYGPVPATKLALKRAGLSLADIGIFELNEAFAAQTLPCIKDLGLLEQLDEKVNLNGGAIALGHPLGCSGARISTTLINLMESRDAQFGVATMCIGLGQGIATVFERA

SEQ ID NO: 9409 - protein, 258 aa, Zea mays
IENNTSRQVTFCKRRNGLLKKAYELSVLCDAEVALIVFSSRGRLYEYANNSVKATVERYKKAHTVGSSSGPPLLEHNAQQFYQQESAKLRNQIQMLQNTNRHLVGDSVGNLSLKELKQLESRLEKGISKIRARKSELLAAEISYMAKRETELQNDHMTLRTKIEEGEQQLQQVTVARSVAAAAAATNLELNPFLEMDTKCFFTGGPFATLDMKCFLPGSLQQMLEAQQRQMLATELNLGYQLAPPGSDAANNNPHHQF

SEQ ID NO: 9410 - protein, 339 aa, Medicago truncatula
MGSVSETVCVTGASGFIGSWLVMRLMERGYTVRATVRDPDNMKKVKHLLELPGANSKLSLWKADLGEEGSFDEAIKGCTGVFHVATPMDFESKDPEKEVINPTINGLLDIMKACKKAKTVRRLVFTSSAGTLDVTEQQNSVIDETCWSDVEFCRRVKMTGWMYFVSKTLAEQEAWKFSKEHNIDFVSIIPPLVVGPFIMPSMPPSLITALSLITGYEAHYSIIKQGQYIHLDDLCLAHIFLFENPKAHGRYICCSHEATIHEVAKLINKKYPEFNVPTKFKDIPDDLEIIKFSSKKITDLGFIFKYSLEDMFTGAIETCREKGLLPKVTETPVNDTMKK

SEQ ID NO: 9411 - protein, 277 aa, Streptococcus mutans UA159
MIIDDLLTKKIIKPRPLNSHKGTFGRVLLIGGNYPYGGAIIMAALACVNSGAGLVTVATHKDNITALHSHLPEAMAFDMVEKDRLSEQITAADVVLMGPGLAEDDLAQTTFDVVWQAIEPKQTLIIDGSAINLLAKRKPAIWPTKQIILTPHQKEWERLSGLTIPEQIEAATQTALAHFPKETILVAKSHQTKIYQGQKIGHIQVGGPYQATGGMGDTLAGMIAGFVAQFHTDRFEVAAAAVFLHSYIADQLSKEAYVVLPTRISAEITRVMKEMSE

SEQ ID NO: 9412 - protein, 597 aa, Candida albicans
MTTPLSSYSTTVTNHHPTFSFESLNSISSNNSTRNNQSNSVNSLLYFNSSGSSMVSSSSDAAPTSISTTTTSTTSMTDASANADNQQVYTITEEDSINDINRKEQNSFSIQPNQTPTMLPTSSYTLQRPPGLHEYTSSISSISSTSSNSTSAPVSPALINYSPKHSRKPNSLNLNRNMKNLSLNLHDSTNGYTSPLPKSTNSNQPRGNFIMDSPSKKSTPVNRIGNNNGNDYINATLLQTPSITQTPTMPPPLSLAQGPPSSVGSESVYKFPLISNACLNYSAGDSDSEVESISMKQAAKNTIIPPMAPPFALQSKSSPLSTPPRLHSPLGVDRGLPISMSPIQSSLNQKFNNITLQTPLNSSFLINNDEATNFNNKNNKNNNNNSTATTTITNTILSTPQNVRYNSKKFHPPEELQELTSINAYPNGPKNVLNNLIYLYSDPAQGKIDINKFDLVINVAKECDNMSLQYMNQVPNQREYVYIPWSHNSNISKDLFQITNKIDKFFTNGRKILIHCQCGVSRSACVVVAFYMKKFQLGVNEAYELLKNGDQKYIDACDRICPNMNLIFELMEFGDKLNNNEISTQQLLMNSPPTINL

SEQ ID NO: 9413 - protein, 457 aa, Lactobacillus gasseri
MSKNNSETSEIKTMKRSLTNTHIQLIALGGTIGTGLFLGVGNSIELAGPAVIFIYCLVGFFLFLLMRALGELILSDIKKNTYIDFITEYLGKSIGTTTGYLYWFSWLTLAMAEITALGIYFQYWWPNLQSWIPGLITLLVLLSINLISARVFGNLEFSFAIIKIVTIIAFVILVFYLLITNSATKYGHVSWQNMVIDGGIFAKGPKGFLLGFQMVIFSFIGVELIGLTAAEAKEPKKTITRAIDQLPIRIILFYVLAILSILLAIPWDKVSTSSSPFVQALGATGIKNAGSIINFVVISAAISSTNSFIYSAGRLLFSINYKGKTKLSKHLGKLDRRQLPKNALIFSTILIALAPLLNFFLKDTFTFISATATSMFLVIWSIMIITHMTYRKKTPENELPTFKMPLYPLSDVAVLTFFLAMIIILLIFPNYRIPMISAGIIFVVLVCITHFIQKKMN

SEQ ID NO: 9414 - protein, 154 aa, Carica papaya
MSLIPSFFGNRGSSIFDPSSLDVWDPFKDFPFPSSSISRENSAFVNTSVDWEETPEAHVFRADLPGLKKEEVKVELEDDRVLQISGERHVEKEDKNDTWHRVERSSGKFSRRFRLPENVKMDQVKASMENGVLTVTVPKAEAKKPDVKAIEISG

SEQ ID NO: 9415 - protein, 522 aa, Neurospora crassa
MAWSKTTRIQVMLAIDVMFFLLELSVGLAVGSLALLADSFHMLNDIISLLVGLWALSLTKRATTDQFSYGWLRAEILGAFFNAVFLIALCVSIVLEALGRFINPPTIDNPKLILIVGSLGLASNLVGFVVLGGHGHSHGPGGHDHGHDEHGHDHADAHEHNHGYENSAVAEEGRAGAASDARNHQTGRARKSSNARHARFTSIEDMQIYPASFRQEIIEASRSQPEESSSENSSDNENGGHEDTNTENTPLIGGSNGHNHQHYGAHSFSSKKGRRNSNVHREHNHTKPKKASKGGHGHSHADMGMNAMVLHVIGDALGNVGVIATALIIWLTNWPGRFYADPAVSLFITVIILRSAIPLTLAASKILLQATPEHIDLKQIREDIQDLEGVVSCHHVHVWQLDDTSLVASLHIQVDFPISAAGGDKWMELSRQVRQCLHEYGIHSATIQPEFCLDMTHNHTEEAATSPRPDDSSSSLPGCGKADGKCLLACVEDCSGRGCCVVPGVSRPESTHSHDGDGHHHH

SEQ ID NO: 9416 - protein, 470 aa, Escherichia coli K12
MTRYQHLATLLAERIEQGLYRHGEKLPSVRSLSQEHGVSISTVQQAYQTLETMKLITPQPRSGYFVAQRKAQPPVPPMTRPVQRPVEITQWDQVLDMLEAHSDSSIVPLSKSTPDVEAPSLKPLWRELSRVVQHNLQTVLGYDLLAGQRVLREQIARLMLDSGSVVTADDIIITSGCHNSMSLALMAVCKPGDIVAVESPCYYGSMQMLRGMGVKVIEIPTDPETGISVEALELALEQWPIKGIILVPNCNNPLGFIMPDARKRAVLSLAQRHDIVIFEDDVYGELATEYPRPRTIHSWDIDGRVLLCSSFSKSIAPGLRVGWVAPGRYHDKLMHMKYAISSFNVPSTQMAAATFVLEGHYHRHIRRMRQIYQRNLALYTCWIREYFPCEICITRPKGGFLLWIELPEQVDMVCVARQLCRMKIQVAAGSIFSASGKYRNCLRINCALPLSETYREALKQIGEAVYRAME

SEQ ID NO: 9417 - protein, 104 aa, Ashbya gossypii ATCC 10895
MSFLKSAKSIVPLMDRVLVQRIKAEDKTSSGLYLPEKNVEKLNQATVLAVGPGYTDAQGRQVSPSVQVGDKVLIPQFGGSSIKLGKDDEVLCSATRRSWPRSQE

SEQ ID NO: 9418 - protein, 263 aa, Glycine max
  misc_feature (203)..(203): Xaa can be any naturally occurring amino acid
  unsure (1)..(263): unsure at all Xaa locations
TQLIKHTRTITYLYLNITSLMEAERDKYKMINFEETELRLGLPLSGNETLKNTCSTGKRVFSDTAVDLKLNLSSTSNSASSDLAKEKNITAAAPPANDPAKPPAKAQVVGWPPVRSFRKNIVQRSNNNEGEKAATSSSNNVNTGAAFVKVSMDGAPYLRKVDLKLYKSYQELLDALAKMFSSFTIDKCGSQGMKDFMNESKLXDLFNGSDYVPTYEDKDADWMLVGDVPWEMFVESCKRLRIMKGSEAIGLAPRAVEKCKNRS

SEQ ID NO: 9419 - protein, 152 aa, Lycopersicon esculentum
MSSFSEEQEALVVKSWGSMKKDAGEWGLKFFLKIFEIAPSAKKMFSFLKDSNVPLDQNPKLKIHAKSVLVMTCEAAVQLRKAGKVVVRDSTLKKIGATHFKYGVVDEHFEVTKYALLETIKEASQEMWSVEMKNAWGEAYDQLVSAIKTEMK

SEQ ID NO: 9420 - protein, 441 aa, Frankia sp. CcI3
MAVRGSRGPVPGDGGPPLVGYTLRYLHDPAQHWRQRYDRYGPVSWERTFGLRVVSLLGPDATGLALRNHEQAFANGPGQQRIAGPFFRRGLSMLDFDEHRHHRRILAGAFAPDRLRGYLAGMNPSIERGVAGWRPGARFQVYPAVKQLTLELATRIFMGERLGPEADRFNAALFACIRAPGAVVRVPAPGLRWSRGLAGRRYLEEFLRLRVPAKRAGSGTDMFSRLCHAEAEDGSRLSDDDVVNHMILMMVAAHDTSTITMTSMSYYLARHPEWQQRCREESLALGTPAVDHADLDRLPSLALVMKEALRLVTPVPILLRATVKDIDVLGVTVPAGTVAALALAFTHQMPEYWPSPERFDPERFADHRREDKVHPYAWQPFGGGPHTCIGLHFAGQQVKAILHQMLLRYRWSLAPGYRISLDRFPLPVPRDGLPVQLEKIT

SEQ ID NO: 9421 - protein, 276 aa, Kluyveromyces lactis NRRL Y-1140
MAGIGESRSELLSWLNDLLKLDYTKVEQCGTGAAYCQIMDSIYGDLPMNRVNFCAGSEYEYFTNYKILQSCFTKHKIEKSVLVERLVKCRFQDNLEFLQWIKKFWTQHKDESEYDAEVRRKGRAGPSNPSAVSGNKRPVSSSTASKPPIRHIRSNVIQNNIRKSSNEQLLSLQTELSETRNQLSELEKECSQYKELNTAYLKERDFYFGKLRDIEIIAQSTQDLCDEGVYENDKELRPFLNRIQQILYATEEQTEPFVEENVEQASTNPIIDEETF

SEQ ID NO: 9422 - protein, 240 aa, Nicotiana tabacum
MTSVMGAECDKIQLDYEAETELRLGLRSAINGNEGEMTSKNNGKRVFSETVDLKLNLSSKDSTVDNQVDNIKEKKNIAPTDPAKPPAKAQVVGWPPVRSFRKNVLTVQKNSTGNGESSGGGAAFVKVSVDGAPYLRKVDLKMYKSYQQLSDALGKMFSSFTIGNCGTHGFKDFMNESKLIDLLNGSDYVPTYEDKDGDWMLVGDVPWEMFVDSCKRLRIMKGSEAIGLAPRAVEKCKNRS

SEQ ID NO: 9423 - protein, 589 aa, Clostridium thermocellum ATCC 27405
MKKKIFKYYLLLILIILSVTVIFIPKVSRKFYTQEVENKLEGIAFSIEYYLLNEAKNGEIDFDFIAKDYAAKYNQNSTFQGESLRITFISYDGKVLGDSDANFNQMENHLSRKEIQDALKGNVGKDIRSSKTLKLDLLYMAIPVEELNVIARVSVPLVQIKKINRLIWLYSILIFIMALIITVIVSLRIAGLVIRPLNDIISVSKEITNGNYSRRIKLKSKDELGQLAVHFNKMASKLERTISDLNTKKIELESIVESITNGIVAVDGNNKVILINPAAFTVFNLDADAEILGDDIENHIKNSQINSLLKDAIQKNKPLEAEVAIDGRVLLVNASPIRPKDSDIDNSGGIVFIQDITKVRKLEQIRTEFVSNVTHELKTPITPIRGFIETLKNGAMNNPVVAERFLEIIDIEAERLHELINDILLLSEIETKLKDTNLEIFDLKSMVDDVFKVMQNIAKEKKISLNNNVRDEVLMKANINRMKQLIMNLVDNGIKYNVQNGSVSVDGYREDGKVVISVKDTGIGIPSAHIPRIFERFYRVDKGRSRGMGGTGLGLSIVKHIVNLYNGEIKVNSVVGEGTEFIVKIPCQP

SEQ ID NO: 9424 - protein, 236 aa, Codonopsis lanceolata
MLGVFSSSIMSPPEELVAAGSRTPSPKITATALVNRFLKSNASAVSMQVGDDVHLAYTHHNESPSAPRSFAVKDEIFCLFEGALDNLGSLKQQYGLSKSANEVVLVIEAYKALRDRAPYPPNHVVGHLEGNFAFVVFDKSTSTLFVATDQAGKVPLYWGITADGYVAFANDADLLKGACGKSLASFPQGCFYSTAVGELRCYENPKNKITAVPATEEEIWGAKFMVEGPGVLTATE

SEQ ID NO: 9425 - protein, 153 aa, Streptococcus dysgalactiae subsp. equisimilis
PMAYVLWNHFMNINPKTSRNWSNRDRFILSAGHGSAMLYSLLHLAGYDLSVEDLKNFRQWGSKTPGHPEVNHTDGVEATTGPLGQGIANAVGMAMAEAHLAAKFNKPGFDIVDHYTFALNGDGDLMEGVSQEAASMAGHLKLGKLFLLYDSND

SEQ ID NO: 9426 - protein, 347 aa, Eucalyptus gunnii
MRASMLRLIRSRSSSAAPRPHLLRRAYGSESVPERKVAVLGAAGGIGQPLALLMKLNPLVSQLALYDIAGTPGVAADVGHINTRSEVAGYVGEEQLGQALEGSDVVIIPAGVPRKPGMTRDDLFNINAGIVKSLCTAIAKYCPNAVVNMISNPVNSTVPIAAEIFKKAGTYNEKKLLGVTTLDVVRAKTFYAGKAKVPVEEVNVPVVGGHAGITILPLFSQAVPKANLADEDIKALTKRTQDGGTEVVEAKAGKGSATLSMAYAGALFADACLKGLNGVPDVVECSFVQSSIITELPFFASKVKLGKNGVEEVLELGPMSDYEKQGLEILIPELKASIEKGIKFANQ

SEQ ID NO: 9427 - protein, 220 aa, Nicotiana tabacum
MERTATYVKDLNLEATELRLGLPGINEPEKQSSSASTSAKYSKKRTSSEMDNSSSGKENEQDSAPAPKAQVVGWPPVRSFRKNVLTVQKKSTGNGESSSGGAAFVKVSVDGAPYLRKVDLKMYKSYQQLSDALGKMFSSFTIGNCGNHGFKDFMNESKLIDLLNGSDYVPTYEDKDGDWMLVGDVPWEMFVDSCKRLRIMKGSEAIGLAPRAVEKCKNRS

SEQ ID NO: 9428 - protein, 150 aa, Zea mays
  misc_feature (121)..(121): Xaa can be any naturally occurring amino acid
  misc_feature (134)..(134): Xaa can be any naturally occurring amino acid
  unsure (1)..(150): unsure at all Xaa locations
HLYHPQHILYRQKEQFSDGVGYNWIDGLKSFTEQQVTDEMMNNAAQMFPYNTPVNKEAYYYRMIFERLFPQDSARETVPWGPSIACSTPAAIEWVEQWKASNDPSGRFISSHDSAATDHTXAVSRRWPTAAATXANGTVNGKDVAVAIAV

SEQ ID NO: 9429 - protein, 149 aa, Codonopsis lanceolata
MAEQLTEEQIAEFKEAFSLFDKDGDGCITTKELGTVMRSLGQNPTEAELQDMINEVDADQNGTIDFPEFLNLMARKMKDTDSEEELKEAFKVFGKDQNGYISAAELRHVMTNLGEKLTDEEVDEMIREADMDGDGQVNYEEFVRMMLAK

SEQ ID NO: 9430 - protein, 426 aa, uncultured bacterium 463
MSTSQQLFERASKHIPGGVNSPVRAFKAVGGTPVFIERSEGACIFDSEGKRYIDYVLSWGPMLMGHNHPAVREAVVRQSEKGLSFGAPTELETQLADRICNIMPNMDMVRMVNSGTEATMSAIRLARGYTGRDTIVKFEGCYHGHSDSLLVKAGSGALTLGVPSSPGVPAALADHTMTLTFNDPEGVRAAFAEHGDKIACVIVEPVAGNMSCIPPSPGFLETLREVCDNSGAVLIMDEVMTGFRFGLQGAQGFYGIEADLTALGKVIGGGMPVGAFGGKREIMEQIAPLGPVYQAGTLAGNPIAMAAGLATLEVISAEGFYEPVFKRTEQLCAGLREAANENGVAFTTNSAGTMFGGFFTESSKIENYAQVMACDTERFNRFFHMMLQAGIYLAPASYEAGFLSSAHTDADIEATVDAARSAFAAL

SEQ ID NO: 9431 - protein, 613 aa, Arabidopsis thaliana
MRMFSLQKMAMAFTLLFFACLCSFVSPDAQGDALFALRISLRALPNQLSDWNQNQVNPCTWSQVICDDKNFVTSLTLSDMNFSGTLSSRVGILENLKTLTLKGNGITGEIPEDFGNLTSLTSLDLEDNQLTGRIPSTIGNLKKLQFLTLSRNKLNGTIPESLTGLPNLLNLLLDSNSLSGQIPQSLFEIPKYNFTSNNLNCGGRQPHPCVSAVAHSGDSSKPKTGIIAGVVAGVTVVLFGILLFLFCKDRHKGYRRDVFVDVAGEVDRRIAFGQLKRFAWRELQLATDNFSEKNVLGQGGFGKVYKGVLPDNTKVAVKRLTDFESPGGDAAFQREVEMISVAVHRNLLRLIGFCTTQTERLLVYPFMQNLSLAHRLREIKAGDPVLDWETRKRIALGAARGFEYLHEHCNPKIIHRDVKAANVLLDEDFEAVVGDFGLAKLVDVRRTNVTTQVRGTMGHIAPEYLSTGKSSERTDVFGYGIMLLELVTGQRAIDFSRLEEEDDVLLLDHVKKLEREKRLGAIVDKNLDGEYIKEEVEMMIQVALLCTQGSPEDRPVMSEVVRMLEGEGLAERWEEWQNVEVTRRHEFERLQRRFDWGEDSMHNQDAIELSGGR

SEQ ID NO: 9432 - protein, 335 aa, Crocosphaera watsonii WH 8501
MKETLTLLSPKDNQNYSEVYLSVIVPIFNEVESLPVLIAKIADVLQESKRSYEIIAVDDGSQDGSAELLQKLARSRHDLVAIIFRRNYGQTPAMAAGFQYAKGKIMITLDGDLQNDPADIPKLVAKVEEGYDLVSGWRKNRQDNRLTRLLPSKIANWMIGGVTGVKLHDYGCSLKAYRREVISDMNLYGELHRFLPALAYIEGAKITEIPVRHHARRFGQSKYGLGRTFRVVMDLLTIFFLKKFLTRPMHIFGLGGLILLITGLLLGTYLTFLKLIIGLSIGHRPLLILAVLLILTGIQLLISGLLAELIMRTYHESQKRPIYRVRQVVKPSDIK

SEQ ID NO: 9433 - protein, 155 aa, Codonopsis lanceolata
MALIPSIFGGRRSNVFDPFSHDIWDPFQGLSSALANARDQETAAIANTRIDWKETPEAHVFKADLPGLKKEEIKVEVEDGRVLQISGERSKEQEEKTDTWHRVERSVGKFHRRFRLPENAKVDQVTASMENGVLTVTVPKKEEKEPEVKAIDISG

SEQ ID NO: 9434 - protein, 493 aa, Treponema denticola ATCC 35405
MRKLKNPLSAMAGILLIMLVSVVFLSARCSSNPENASTVYADPGLKTELSKESVSALESLQKANRELTSMILPSVVTLDVVETRKVQNNIDGFPWFFFNRPQDQKDGQGEREYEAEGMGSGVIVRKTGKTYYVLTNQHVTGNAKTISVMLYNGDKVQGKLIGSDQRKDVALVSFDYDKDLRVAVLGDSNTVQVGDLTYAIGAPMGYVSTVTSGIVSAVGRSGGPNRNNINDFIQTDAAINQGNSGGPLVNIYGEVIGINNWIVSSSGGSQGLAFSIPINNLKKAIDDFITSGEIKYGWLGVQLLEINDKFRESLNLKDIEGAFAGQVFLGSPADKGGIKPGDYITEVNSTKVKSVDDILRVIADLKPGESSSFKILRKGKEISATVKIEERDEKNVADSSKLWPGFVPSPLTEEIIKQLELKKGQNGVLVTSLQAKSPAAVMSLQPGDLIVKVNGKDVKDVLSFYDELSNAKGEIWFDFIREGHNLVTPKIKR

SEQ ID NO: 9435 - protein, 302 aa, Methanococcus maripaludis S2
MVKIDVVSGYLGSGKTTFIKHLLNACGNEKVIVIENEFGEIAIDGDLIKNEGFEVYELQQGCICCSIRSNFIEALGKIVDEFEPDRIIVEPTGMGLLSEIIGILSIPKIKQISEINSLTTVVDAENYLEEVEGFGEFFKDQIKNADRLIISKAQFMNYQEIDKILSSLRELNPNSLIVTQNWEFMAPEEFLKILDNSSENSGKIYRGNVEAAMKGVSSIGLEFTESFKEKDIENIILELKSGKYGQIMRGKGFLNIDDKTMEFNYVGNDCKLELLNTKKDQKICIIGKNLEKEAVSELFNNL

SEQ ID NO: 9436 - protein, 605 aa, Triticum monococcum
MAALVTSQLATSGAVLGITDRFRRAGFQGVRPRSPADAALGMRTVGASAAPKQQSRKAHRGTRRCLSVVVRATGSGGMNLVFVGAEMAPWSKTGGLGDVLGGLPPAMAANGHRVMVISPRYDQYKDAWDTSVVSEIKVADEYERVRYFHCFKRGVDRVFVDHPCFLEKVRGKTKEKIYGPDAGTDYEDNQLRFSLLCQAALEVPRILDLNNNPYFSGPYGEDVVFVCNDWHTGLLACYLKSNYQSNGIYRTAKVAFCIHNISYQGRFSFDDFAQLNLPDRFKSSFDFIDGYDKPVEGRKINWMKAGILQADKVLTVSPYYAEELISGEARGCELDNIMRLTGITGIVNGMDVSEWDPTKDKFLTVNYDVTTALEGKVLNKEALQAEVGLPVDRKVPLVAFIGRLEEQKGPDVMIAAIPEIVKEEDVQIVLLGTGKKKFERLLKSVEEKFPSKVRAVVRFNAPLAHQMMAGADVLAVTSRFEPCGLIQLQGMRYGTPCACASTGGLVDTIVEGKTGFHMGRLSVDCNVVEPADVKKVVTTLKRAVKVVGTPAYHEMVKNCMIQDLSWKGPAKNWEHVLLELGVEGSEPGIVGEEIAPLAMENVAAP

SEQ ID NO: 9437 - protein, 474 aa, Pseudomonas aeruginosa PAO1
MHTLKRCMAAMVALLALSLAMTARAELPDFTPLVEQASPAVVNISTRQKLPDRAMARGQLSIPDLEGLPPMFRDFLERSIPQVPRNPRGQQREAQSLGSGFIISNDGYILTNNHVVADADEILVRLSDRSEHKAKLIGADPRSDVAVLKIEAKNLPTLKLGDSNKLKVGEWVLAIGSPFGFDHSVTAGIVSAKGRSLPNESYVPFIQTDVAINPGNSGGPLLNLQGEVVGINSQIFTRSGGFMGLSFAIPIDVALNVADQLKKAGKVSRGWLGVVIQEVNKDLAESFGLDKPSGALVAQLVEDGPAAKGGLQVGDVILSLNGQSINESADLPHLVGNMKPGDKINLDVIRNGQRKSLSMAVGSLPDDDEEIASMGAPGAERSSNRLGVTVADLTAEQRKSLDIQGGVVIKEVQDGPAAVIGLRPGDVITHLDNKAVTSTKVFADVAKALPKNRSVSMRVLRQGRASFITFKLAE

SEQ ID NO: 9438 - protein, 330 aa, Lactobacillus gasseri
MRVLVIGGAGYIGSHAVRKLIEEGNDVVVLDSLYTGHRKAVDKKAKFYQGDIEDTNLVSKILRDENIDAVMHFAAYSLVPESVKKPLKYYDNNVSGMISLLQAMDDAKVKYLVFSSSAATYGIPKTLPITEDTPLDPINPYGETKMMMEKIMHWADKADGIKSIALRYFNVAGASSDGSIGEDHGPETHLIPNILKSAISGDGNFTIFGDDYDTKDGTNVRDYVQVEDLIDAHILALKHVMETNKSDVFNLGTAQGYSNLEILEAAKKVTGIDIPYTIGPRRGGDPDSLVADSSKARKVLGWKPKHENVDDVIATAWNWHKSHPKGYEDK

SEQ ID NO: 9439 - protein, 443 aa, Lactobacillus gasseri
MKTIKNIIIGFGKGGKTLAKFLAQKSEEVLVIEKSNKMYGGTCINIACLPSKRLIIEAANGVSYVDAVSGKNEMTAQLRNKNYHMLADEQTVTVLDGEAHFIADHEIEVVLTNGKKEQFKGERIFINTGAVPVMLPIPGLKESKYILDSTQAMDEKKMPENLTIIGAGYIGLEFASMFAKYGSKVTVLDHSREFLSREDDDISQLVKKDLEDAGVHFELGADIEEIIDEENEAKVRYQINGQEKEISANRILAATGRKPNIENLGLENTSIEITDRGAIKVDDFLRTTVDNVWAIGDVKGGLQFTYISLDDFRIIKDQLFGTGARMISDRKVVPYSVFISPALSQVGLNEKQARNQNKEYKLFKLPVAAIPKAKVAKDSRGLFKALVDPETEEILGATLYGIESYELINLISLAMKAHLSYTVLRDQIYTHPTMSEAFNDLFK

SEQ ID NO: 9440 - protein, 227 aa, Neisseria gonorrhoeae FA 1090
MELVFIRHGQSEWNAKNLFTGWRDVKLSEQGLAEAAAAGKKLKENGYEFDIAFTSVLTRAIKTCNIVLEESDQLFVPQIKTWRLNERHYGRLQGLDKKQTAEKYGDEQVRIWRRSYDTLPPLLDKDDAFSAHKDRRYAHLPADVVPDGENLKVTLERVLPFWEDQIAPAILSGKRVLVAAHGNSLRALAKHIEGISDEDIMGLEIPTGQPLVYKLDDNLKVIEKFYL

SEQ ID NO: 9441 - protein, 435 aa, Magnaporthe grisea 70-15
MTVLPLEPEFSQAYNELAGTLEDSTLFEKYPELRTALSVVSIPERVIQFRVVWEDDSGALRVNRGYRVQFSSALGPYKGGLRLHPSGGADFDPKGKSDAEIRRFCVAFMTELSKHIGADTDVPAGDIGVGGREIGYMFGAYRKLRNRFEGVLTGKGLDWGGSLIRPEATGYGLVYYVGHMLEYAGVGGWAGKRVAISGSGNVAQYAALKIMELGGTVVSLSDSRSALVAVEGGRTITEADVKRVMELKDRRRPLSDLLPESEEGGSTSPGGLKHLPGARPWTHVGKVDVALPCATENEVSKEEAEALVAAGCRFVAEGSNMGCEQGAIDVFEANRRSKGKGDAVWYAPGKAANCGGVAVSGLEMGQNSSRLKWSREKVDKELANIMETAFRTGLDTAKEYVNRASDDELPSLVAGSNIAGFVKVARAMQAQGDWW

SEQ ID NO: 9442 - protein, 331 aa, Ralstonia solanacearum
MRPSVLVTRATFPDIANRLREHFDVTDNPSDAILSPSELIARLQGKQGVMSTGSERIDAALLDACPQLKAVCNVGVGYNNIDVAACTARGVVVSNTPDVLTQTTADFGFALMLATARRITESERFVRRGEWQKTGIHDQMLGSDIYGATLGILGMGRIGQAIARRAALGFEMQVIYHNRSPLEAETEARAHARYVDKDTLLRESDHLILVLPYSPEAHHTIGAAELARMKPTATLTNIARGGIVDDAALAQALRQGTIAAAGLDVFEGEPRIHPDLLALDNIVLTPHIGSASVNTRRAMAALTVDNLIAALGYGPRAGQPPTPVNPQVLQQ

SEQ ID NO: 9443 - protein, 252 aa, Aeropyrum pernix K1
MAIARPGFSVYLTIAWPSPDTFLEIASTLKGCVDYLELGIPTPKPLYDGPTIRLTHLKAVESGYSGPKTLSLAEEASQEAGVPYIVMAYATEQPWSFSEVLREASRKGALSVLPPDLPFELPGHVEWYVEESRRLGMEPSLFASPKFPHRWLDRYRRLDPLLIYLGLQPATGVKLPLAFLRNVKTARKIVGQVYMLAGFSIKSPEDALRVLEAGADAVVVGSEVARLVSSGRLGEARHLACSIRAAISERGG

SEQ ID NO: 9444 - protein, 428 aa, Pyrococcus horikoshii OT3
MHEDVQLNIYVHSQEGIGMEENIKSMLGDVERFFSKKALEMRASEVRELLKLVETSDIISLAGGLPNPKTFPKEIIRDILVEIMEKYADKALQYGTTKGFTPLRETLMKWLGKRYGISQDNDIMITSGSQQALDLIGRVFLNPGDIVVVEAPTYLAALQAFNFYEPQYIQIPLDDEGMKVEILEEKLKELKSQGKKVKVVYTVPTFQNPAGVTMNEDRRKYLLELASEYDFIVVEDDPYGELRYSGNPEKKIKALDNEGRVIYLGTFSKILAPGFRIGWMVGDPGIIRKMEIAKQSTDLCTNVFGQVVAWRYVDGGYLEKHIPEIRKFYKPRRDAMLEALEEFMPEGVKWTKPEGGMFIWVTLPDGIDSKKMLERAIKKGVAYVPGEAFYAHRDVKNTMRLNFTYVDEDKIMEGIKRLAETIKEELKA

SEQ ID NO: 9445 - protein, 258 aa, Ralstonia solanacearum
MTPPNLNLFDLSGRTALITGASSGIGFALAGGLARAGARVVLNARGPEKLAQAADSLRAQGADVHTAAFDVTQSTAVAEGIARVEAELGPIDILVNNAGMQRRAPLEQFETDQWHELMKTNVDSVFLVGQAVARYMIPRGRGKIINICSVQSELGRPGIAPYTASKGAVKMLTKGMAIDWGPHGLQVNGLGPGYFKTELTQALVANAEFTAWLVGRTPSRRWGDVEDLTGAAIFLASKASDFVNGHILYVDGGVTATL

SEQ ID NO: 9446 - protein, 608 aa, Ashbya gossypii ATCC 10895
MSNANHHHQQQKMYTGGRNMPHGMHRPGSIPIGQRIGKYQVIKTLGEGSFGKVKLAHHVSTGQKVALKIINKKVLAKSDMQGRIEREISYLRLLRHPHIIKLYDVIKSKDEIIMVIEYAGNELFDYIVQRDKMSENEARRFFQQIISAVEYCHRHKIVHRDLKPENLLLDEHLNVKIADFGLSNIMTDGNFLKTSCGSPNYAAPEVISGKLYAGPEVDVWSSGVILYVMLCRRLPFDDESIPVLFKNISNGVYSIPKFLSQGAANLIKRMLIVNPLNRITIHEIMEDEWFKVDLPDYLVPVDMKADATSKPGTDDERIDEALVAVLANTMSYDKDEIYEALEDPNQTDPTVLEIRDAYLLLKENKSLIDGLRSNKQKLDQLDTFLSQSPPTFESHSQLGPGSGFQAALGGSQHGDQNPHQVKRLASRQRTYQLSFSEQQDEDSTIAILPSSLPQIHRANMVAQGSPAAVKISPLSNKKSKTRWHFGIRSRSYPLDVMGEIYLALKNLGAEWAKPSEEDLWTIRVRWKYDVGTQQNERIPDLMRMVIQLFQIETNNYLVDFKFDGWESSSGNPISSSSTDDEMSTFSAYPFLHLTTRLIMELAVNSQSS

SEQ ID NO: 9447 - protein, 341 aa, Arabidopsis thaliana
MDNSAPDSLSRSETAVTYDSPYPLYAMAFSSLRSSSGHRIAVGSFLEDYNNRIDILSFDSDSMTVKPLPNLSFEHPYPPTKLMFSPPSLRRPSSGDLLASFGDFLRLWEINEDSSTVEPISVLNNSKTSEFCAPLTSFDWNDVEPKRLGTCSIDTTCTIWDIEKSVVETQLIAHDKEVHDIAWGEARVFASVSADGSVRIFDLRDKEHSTIIYESPQPDTPLLRLAWNKQDLRYMATILMDSNKVVILDIRSPTMPVAELERHQASVNAIAWAPQSCKHICSGGDDTQALIWELPTVAGPNGIDPMSVYSAGSEINQLQWSSSQPDWIGIAFANKMQLLRV

SEQ ID NO: 9448 - protein, 411 aa, Shewanella sp. MR-7
MYTMDSNKMKRVVITGMGVVSSIGNNKQEVTESLKAGRSGITHSAQFEEMQLRSHVWGNIKLDPSELIDRKALRFMGDAAAYAYIAMQEAIKDAQLTEEQYSDPRVGLIVGTGGASSSNQVQAADILREKGVKRVGPYIVPRIMSSTASACLATPFKIKGMNYSISSACATSAHCIGHAVELIQMGKQDMVFAGGSEEVDWTLTMGFDAMGALSTKYNDTPEKASRTYDADRDGFVISGGGGILIVEELEHALARGAKIYAEVIGYGASSDGYDMVAPSGEGAVRCMQMALADVDTPIDYINTHGTSTPVGDVRELEALREVFKDKCPPVASTKSMTGHALGAAGVHEAIYSLIMMENSFIAPSINIDNLDEAAKDMPIVREYRDAELNTVMSNSFGFGGTNATLVMRKYK

SEQ ID NO: 9449 - protein, 266 aa, Cyanidium caldarium
MKNSIKNIFESERGLLLLPFVSLGTPNTQINKQAIIAMDKNGANIIELGIPYSDPVADGPVIQDAYNKAIKNGVNIRKAFKILMNLKGKIKSPIIVFIYYNQLLNYGINKFLEKLIQLEVQGIIVPDLPYDESQILKKKCTINNIALISLIALTSSFSRIKKIARNAEGFLYLISKTGVTGGTGKLMNKLKIIIKTIQKLTSKPVVVGFGINSRRQIKQLIEWNSNGIVIGSPCVQILLQSSKEVCVIKLSGLIKQIKESTSSTSN

SEQ ID NO: 9450 - protein, 828 aa, Fusobacterium nucleatum subsp. nucleatum ATCC 25586
MQIVTDKNKVALYYKDIAVTYKEFILNTKKIKQFTKIKEFTNNMIYMENRPELLYSFFAIWDSRATCVCIDASSTAVELTYYIDNSDVVKIFTTKMQVEKVKGALSILSKQIEIIVVDEINLSEIKIDENSSENLVINSPEKEDTALILYTSGTTGKPKGVMLTFDNILANVDSLDVYKMYEETDVTIALLPLHHILPLLGTGVMPLLYSATIVFLEDISSVALIDAMKKYKGTMMIGVPKLWEVMHKKIMDTINSKAITRFIFKLAKKVNSLSFSKLIFKKVSEGFGGHIKFFVSGGSKLNPQITKDFYTLGIKICEGYGMTETSPIISYTPKNNIVFDSAGKVIKDVEVKIADDNEILVKGRNVMKGYYKNPEATVEIIDKDGWLHTGDLGKLVNDYLYITGRKKEMIVLSNGKNINPIEIETKISSMTNLISEIVVTEYNSILTAVIHPDLEKVKEEKVDNIYENLKWEVVDKYNQKTPDYKKILDVKIINEDFPKTKIGKIKRFMIADMLDGKIEKQERKPEPDFEEYNKIKKYLVDIKGKDVYFDSHIEIDLGMDSLDMVEFQYFLDLNYGIKEENLISKYPTLLELANYIKGNRNQEKIGNLDWKEIVNKDTTAKLPSSSFIAIIFKFLSFIFFKTFFRVKVKGKEKIEKDKPTIFVANHQSFLDGFLFNYSVPLKVLKKTYFLATVIHFKSSIMKFMADSSNVVLVDMNKDIAEVMQILAKLLKENKNIAIYPEGLRTRDGKMNKFKKSFAILAKELNIDVQPYVIDGAYDLFPAGKKFPRPGKIRVEFLDKIKVEKLTYDEIVNEAYSVIKNKIESDTEN

SEQ ID NO: 9451 - protein, 516 aa, Methanocaldococcus jannaschii DSM 2661
MMCGINGIIRFGKEVIKEEINKMNKAIKHRGPDDEGIFIYNFKNYSIGLGHVRLAILDLSEKGHQPMGYNVDEDKIIYRDDELDRADIIIVYNGEIYNYLELKEKFNLETETGTDTEVILKLYNKLGFDCVKEFNGMWAFCIFDKKKGLIFCSRDRLGVKPFYYYWDGNEFIFSSELKGILAVKEINKKENINKDAVELYFALGFIPSPYSIYKNTFKLEARQNLIFDLDKREIRKYYYWELPDYKPIYDKKKLIEEGKKLLYDAVKIRMRSDVPVGAFLSGGLDSSTVVGVMREFTDLSKLHTFSIGFEGKYDETPYIKIVVDYFKTQHHHYYFKERDFEELIDKYSWIYDEPFGDYSGFPTYKVSEMARKFVTVVLSGDGGDEVFGGYMTHLNGYRMDFIRKLPKFLRVVGSKLPVKKDLNGIANLYLLKEAFRLSLINPEEFYAESIKEDAIRPEIYKKWTIEKLRYCLNKGDNKLGEALRIFDLLFNTLCDNFLVKVDRASMLTLWKLEVHF

SEQ ID NO: 9452 - protein, 153 aa, Streptococcus dysgalactiae subsp. equisimilis
PMAYVLWNHFMNINPKTSRNWSNRDRFILSAGHGSAMLYSLLHLAGYDLSVEDLKNFRQWGSKTPGHPEVNHTDGVEATTGPLGQGIANAVGMAMAEAHLAAKFNKPGFDIVDHYTFALNGDGDLMEGVSQESASMAGHLKLGKLVLLYDSND

SEQ ID NO: 9453 - protein, 503 aa, Neisseria meningitidis MC58
MKWLKRLTVIVGTFYRYRLAGLCASLMGSGWICALLKMMPQSSKLKNEPPAVRLRLALESLGPIFIKFGQVLSTRPDLIPHDYAVELAKLQDKVPPFDARLSREQIEKSLGQSIEKLYAEFETEPIASASIAQVHKARLHSGEQVAVKVLRPNLLPVIEQDLSLMRFGAGWVERLFADGKRLKPREVVAEFDKYLHDELDLMREAANASQLGRNFQNSDMLIVPKVFYDYCTSDVLTIEWMDGTPVSDIAKLKADGIDLHKLADYGVEIFFTQVFRDGFFHADMHPGNILVAADNRYIALDFGIVGTLTDYDKRYLAINFLAFFNRDYRRVATAHIESGWVPADTRAEELEAAVRAVCEPVFNKPISQISFGLVLMRLFEVSRRFNVEIQPQLVLLQKTLLNIEGLGRQLDPDLDLWKTAKPFLVKWMNGQVGPKALWRNLKNEAPDWAQIIPSLPRKISALIDENRQQEMRDAYIHLVKVQQRQSLWLAVIAVVLLLILLLK

SEQ ID NO: 9454 - protein, 409 aa, Streptococcus agalactiae A909
MKKKLVSSLLKCSLIIIVSFAGGAFASFVMNHNDNIPNGGVTKTSKVNYNNITPTTKAVKKVQNSVVSVINYKQQESRSDLSDFYSHFFGNQGGNTDKGLQVYGEGSGVIYKKDGKNAYVVTNNHVIDGAKQIEIQLADGSKAVGKLVGSDTYSDLAVVKIPSDKVSNIAEFADSSKLNIGETAIAIGSPLGTEYANSVTQGIVSSLKRTVTMTNEEGQTVSTNAIQTDAAINPGNSGGALINIEGQVIGINSSKISSTSNQTSGQSSGNSVEGMGFAIPSNDVVKIINQLESNGQVERPALGISMAGLSNLPSDVISKLKIPSNVTNGIVVASIQSGMPAQGKLKKYDVITKVDDKEVASPSDLQSLLYGHQVGDSITVTFYRGENKQTITIKLTKTSKDLAKQRANN

SEQ ID NO: 9455 - protein, 349 aa, Zea mays
PRLLFLLLSAQRRARRGAGRKSVAISPELMQSRNRIYLRGTVSKDLLTHKQVIQLSRKIKDGIWLQHQRSKLKEKLGNEPSYKQLAQSLRISAPELRARMRESFLAREMLTMSNIRLVISIAHKYDNLGVDLADLIQGGLIGLLRGIEKFDASRGFRISTYVYWWIRQGVSRALADNSKTFRLPTYLHERLLAIRGAKYALEDQGIAPTIENIAESLNISVKKVHNATEAVHKVLSLDQQAFPSLNGLPGDTLHSYIEDQNVANDPWHGFEEMYLKEEVNNLINSNLNERERDIIRLYHGIGKQCHTWEDISRQFGLSRERVRQVRLVAMEKLKHAARRKHLNALLEDY

SEQ ID NO: 9456 - protein, 433 aa, Carboxydothermus hydrogenoformans Z-2901
MARRIIQVEEKLPLLETLPLSFQHLMAMFGATVLVPLLFKIDPAIALLMNGIGTLLYTYITRGGIPAYLGSSFAFIAPTLLIMSKWGYPVAQSGFIFFGLFFIVVSGIIYIAGTKWIDIVLPPPVMGAVVAVIGLELAPVAAQMAGIAPSGQNWTMNPKVVMVSMFTLLVAIIGSVVFRGFLQIIPVLIAIIAGYFFAWTQGMVDFSLVAKAPWFKIPTFSTPQFNLNAIIVMAPAALVVLAEHIGHLIVTGNIVERDLVKKPGLHLSLFADGVTNVISGFTGSPPNTTYGENIGVMAITRVYSVWVIRGAAVLAIILSLIGKLAAAIQTIPRPVMGGISLLLFGVIAVSGIRMLIEQMVDYGKNVNLVLSAVVFIVGVSGAKVTLGTVEIKGMALAAVVGVILSLIIHGLNYLGLLNENLTVSENLVRKNES

SEQ ID NO: 9457 - protein, 223 aa, Oryza sativa
  misc_feature (40)..(40): Xaa can be any naturally occurring amino acid
  unsure (1)..(223): unsure at all Xaa locations
SKAGFKKLDSTFHSQVIFGYQASTIDWAVYFAISMGPSSXYPNVARWFTHIDALLRLSGVTADGQGVKVESTAVLQLSTPDVADAKAPAADDADDDDVDLFGEETEEEKKAAEERAAAVKASGKKKESGKSSVLLDVKPWDDETDMTKLEEAVRNVKMEGLLWGASKLVPVGYGIKKLQIMMTIVDDLVSVDSLIEDYFYTEPANEYIQSCDNCCVLQDLDLP

SEQ ID NO: 9458 - protein, 153 aa, Streptococcus dysgalactiae subsp. equisimilis
PMAYVLWNHFMNINPKTSRNWSNRDRFILSAGHGSAMLYSLLHLAGYDLSVEDLKNFRQWGSKTPGHPEVNQTDGVEATTGPLGQGIANAVGMAMAEAHLAAKFNKPGFDIVDHYTFALNGDGDLMEGVSQEAASMAGHLKLGKLVLLYDSND

SEQ ID NO: 9459 - protein, 345 aa, Escherichia coli K12
MESRIMSTMNVLICQQPKELVWKQREIPIPGDNEALIKIKSVGICGTDIHAWGGNQPFFSYPRVLGHEICGEIVGLGKNIADLKNGQQVAVIPYVACQQCPACKSGRTNCCEKISVIGVHQDGGFSEYLSVPVANILPADGIDPQAAALIEPFAISAHAVRRAAIAPGEQVLVVGAGPIGLGAAAIAKADGAQVVVADTSPARREHVATRLELPLLDPSAEDFDAQLRAQFGGSLAQKVIDATGNQHAMNNTVNLIRHGGTVVFVGLFKGELQFSDPEFHKKETTMMGSRNATPEDFAKVGRLMAEGKITADMMLTHRYPFATLAETYERDVINNRELIKGVITF

SEQ ID NO: 9460 - protein, 154 aa, Zea mays
MSLVRRGSVFDPFSVDLFDPFDSVFRSIVPSSSSAAAASETAAFASARIDWKETPEAHVFKADLPGVKKEEVKVEVEDGNVLLISGQRSREKEDKGDKWHRVERSSGQFVRRFRLPENAKTEEVRAALENGVLTVTVPKAEVKKPEVKSIQISG

SEQ ID NO: 9461 - protein, 228 aa, Nostoc punctiforme PCC 73102
MLAAILFDLDGTIVNTDPIHYRAWREMLLNYSLEIDETFYKSRISGRLNPEIVKDILPQLSTTEGQKFADEKEALFRKLASNLKPLNGFSELLAWTETHELKRALVTNAPRLNAEFMLEVLGIKEAFHTVVVADDCVAGKPDPAPYQVALNKLAISAEEAIALEDSPSGIRAAVSADIRTIGIASTHDPQFLQEVGAFMAIPDFTDLQLWTLLNSLIEPDLSAIASNL

SEQ ID NO: 9462 - protein, 279 aa, Mesorhizobium loti
MPRAGSNVGLAERAYRIRRHAVRMGQVQGQGYVGQALGVADVLAVAYFHALRYRPTDTRWEGRDRFLLSIGHYAIALYAALIEAGVLPEEELETYGTDDSRMPMSGMAAYTPGMEITGGSLGHGLGIAVGMCLGLKRKRSGSFVYNLMSDGELGEGSTWEAAMSAAHHRLDNLIAIVDFNNQQADGPSTAMLSSEPVTDKFEAFGWHAQRVDGNDIEAVRMAFDLARGLKEPRPRVIVCDTRMAKGVPFLESRDIAHFIRVEPHEWTLALEALERGRSH

SEQ ID NO: 9463 - protein, 588 aa, Pseudomonas aeruginosa
MPAILSSRQRIALRLAWRFMAPYRWRMLGALVALLFTAAITLSLGQGIRLLVDQGFLTASPELLNRYILLFFVLVLGLAVGTFVRFYLVSWIGERFVADIRKRVFDHLIELHPGFYETNRSSEIQSRLTADTTLLQTVIGSSLSMALRNALMLVGGVLLMFVTNAKLTSIVVLALPLVIAPILLFGRRVRSLSRESQDRVADVGSYVGETLGQIKTVQAYNHQAQDRQRFAGTVERAFDTARKRIAQRAWLITVVIVLVLGAVGIMLWVGGRDVIAGSISAGELAAFVFYSLIVGMAFGTLSEVIGELQRAAGAAERIAELLRARSEIRPPAQPRKLAARVSGRIELQAVRFAYPTRPEHWAIDDISLAVELGETLALVGPSGAGKSTLFDLLLRFFDPQQGRLLLDGQPIVELDPADLRRSFALVSQNPALFFGSVEENIRYGRPHASAAEVEAAARAAHAHEFILGLPQGYATHLGEGGIGLSGGQRQRLAIARALLVDAPVLLLDEATSALDAESEHLIQQALPGLMSGRTTLMIAHRLATVQSADRIAVIDQGRLVAIGSHARLIAENPLYARLAELQFAAGGR

SEQ ID NO: 9464 - protein, 358 aa, Cordyceps bassiana
MAEFVRAQIFGTTFEITSRYSDLQPVGMGAFGLVCSARDQLTNQNVAVKKIMKPFSTPVLAKRTYRELKLLKHLRHENVISLSDIFISPLEDIYFVTELLGTDLHRLLTSRPLEKQFIQYFLYQIMRGLKYVHSAGVVHRDLKPSNILVNENCDLKICDFGLARIQDPQMTGYVSTRYYRAPEIMLTWQKYDVEVDIWSAGCIFAEMLDGKPLFPGKDHVNQFSIITELLGTPPDDVINTIASENTLRFVKSLPKRERQPLRNKFRNADDSAIDLMERMLVFDPKKRITAAEALSHDYLAPYHDPTDEPVAEEKFDWSFNDADLPVDTWKIMMYSEILDYHNVEAGASGLEDGSVPAQ

SEQ ID NO: 9465 - protein, 251 aa, Treponema pallidum subsp. pallidum str. Nichols
MKLVLIRHGESEWNRLNLFTGWTDVPLTPRGESEAQEGGRVLQEAGFDFDLCYTSFLKRAIRTLNFVLQALDREWLPVHKSWKLNERHYGDLQGLNKTETAQKYGEQQVRVWRRSFDVAPPPLTVGDARCPHTQASYRGVCASGRTPVLPFTESLKDTVARVVPYFEEEIKPQMISGQRVLIVAHGNSLRALMKHIESLDETQIMEVNLPTGVPLVYEFEADFTLCGKRFLGNEADVAARAQAVADQGKSN

SEQ ID NO: 9466 - protein, 344 aa, Ralstonia solanacearum
MDALVIHAANDLRIEDIDTPEVQPDQLRVQVRFGGICGSDLHYYNHGGFGTVRVKEPMVLGHEVAGRVEEIGPGVHRHAKGDRVAISPSRPCGQCHYCQQGLQNHCLDMRYYGSAMRTPHVQGAFRREIVIDESQAHRLADTLSDQEGAMAEPLSVALHAVRRAGPLLGKRVLVTGCGPIGALIVVAARRAGAAEIIVTDMGAYPLKAAVAVGADVTINVAEQPDGLKPYTTDKGQIDVLFEASGNERALRGAIDALRPRGIIVQVGLGGEMTLPLNAIVAKELELRGAFRFHEEFAMAVELLNKGLVDVKPLISATVPYRNAAHAFALAGDRTQAMKVLLDFQ

SEQ ID NO: 9467 - protein, 494 aa, Neurospora crassa
MAPKLKDPSLFKKDVCYVNGEWVKAHSGKTFEVNATGKLIGTCPEFDAQDTKKAIDAAETAFETFRHKTGRERSKLLRKWYDLMVENHDDLTTLITLENGKPLADAKGEVTYAANFFEWFSEEAPRIYGDTIPSSVPGNRVWTIKEPVGVCGLITPWNFPAAMITRKVGPALAVGCTVVCKAPGETPFTALAIAELAHRAGIPPGVVNVITALENTPEVGSTLTTDPVVRKISFTGSTAVGKLLMKQCSGTLKKLSLELGGNAPFIVFDDADVDAAVTGAIASKFRSSGQTCVCANRIYVQRGIYDEFSQKFAEQVKNNFRVGNGFEEGVTHGPLIHHRAIEKVEQHVRDAEKKGAKVVVGGHRLESLGPNFYEPTVITGMTPDMAMASEETFGPVAGLFPFDTEDEVVKLANATQVGLAGYFFSRDIHRCVRVAEHLEVGMVGINTGLISDPASPFGGVKESGFGREGSLYGIGEYQVTKMVTVGGMGQPLQK

SEQ ID NO: 9468 - protein, 230 aa, Streptococcus mutans UA159
MVKLVFARHGESEWNKANLFTGWADVDLSEEGTQQAIDAGKLIKEADIKFDLAFTSVLTRAIKTTNLALEYSDQLWVPVEKSWRLNERHYGGLTGKNKAEAAEKFGDEQVHIWRRSYDVLPPAMAKDDPYSAHTDRRYANLDDTVIPDAENLKVTLERALPYWEDKIAPALKDGKNVFVGAHGNSIRALVKHIKQLSDDDIMGVEIPNFPPLVFEFDENLNVTAEYYLGK

SEQ ID NO: 9469 - protein, 441 aa, Thermotoga maritima MSB8
MIGYQIYVRSFRDGNLDGVGDFRGLKNAVSYLKELGIDFVWLMPVFSSISFHGYDVVDFYSFKAEYGSEREFKEMIEAFHDSGIKVVLDLPIHHTGFLHTWFQKALKGDPHYRDYYVWANKETDLDERREWDGEKIWHPLEDGRFYRGLFGPFSPDLNYDNPQVFDEMKRLVLHLLDMGVDGFRFDAAKHMRDTIEQNVRFWKYFLSDLKGIFLAEIWAEARMVDEHGRIFGYMLNFDTSHCIKEAVWKENTRVLIESIERAVIGKDYLPVNFTSNHDMSRLASFEGGFSKEKIKLSISILFTLPGVPLVFYGDELGMKGVYQKPNTEVVLDPFPWNESMCVEGQTFWKWPAYNGPFSGISVEYQKRDPDSILSHTLGWTRFRKENQWIDRAKLEFLCKEDKFLVYRLYDDQHSLKVFHNLSGEEVVFEGVKMKPYKTEVV

SEQ ID NO: 9470 - protein, 513 aa, Physcomitrella patens
MAIGKVLGCAGFQHSAVPTLREPVRLRAQCRRRGKTVSMSVQKTSKTVQQAEKMSQEFRQSSSTPLPLLHQVADALVQEMYAGLASEGGSDQLKMLPTYVENLPSGSEKGLFYAVDLGGTNFRVLRVELGGKTGQILSQEFKEVVIPPELMVGTGKDLFDFIAGTLASFVDTEDESIKAHFVQSGKTRESGFAFSFPVRQTSVKSGIVIHWTKGFKVDDAVGKDIVKQFQDAISRSNHQIMISALVNDTVGTLAGGRFNFDEETMIGCIIGTGTNACYVERADAVHKWDEPLPKSGEMVINMEWGNFRSPYLPRTFADETVDKDSVNPGDQWFEKMISGMYLGEIVRLVLARMAKEAELFGGNVPVKLLERLTLGTPHVSKIHLDNSPDLDVVAKVLKDVFEIETTTLEERKIVHEVCDIMGERGGRLAAAGLYGILKKIGRTGKSRNGSKKKTVIAMDGGLFEHHVRYRSYMEEALQELMGSDAAYEVALRLQNDGSGIGAALLAASHSHFK

SEQ ID NO: 9471 - protein, 296 aa, Zea mays
QAAGGQDRCPSTTCRVPRQARREEAVSLPSAAAMAGAEVGEDKYRSFIHGEGERDTVWRYGAPPNYDVVNKLFEEERTQVHSRPIHPRLTLTSLLSSMDYIHGRFSWREVQVWPEGSLEEKVQRLLKSWEMELVHKARPEDQKTVNSEKYSASTNGMSALTRAEVMAIGGYNNFLRTKLPPEHRIYDPDSETVESAMATFTTAFPRGFAIEVLDVYSGPPRIAFKFRHWGYMEGPFKGHPPHGQRVELFGVCIFHVDEDMKVDKSEYFYERGNFLAGFLSAPAPDGSGGCPVMRGN

SEQ ID NO: 9472 - protein, 721 aa, Pyrobaculum aerophilum str. IM2
MNMISYALLGVILGISGVIYAVYLAVWVLRQDPGNEKMRFISQAIATGARAYLFRQYRTLAVLLVILAVLILVAIDMPRRTFGLTALAFIVGALGSMLAGYLGMYVTTRSASRVAQAAATGGMGKALLVSWRAGAVMGLSLASIALLLISGFYLVFRSVLPDDWAVPLVALGFGASLVTLFMRVGGGIYTKAADLGADLVGKVEAGIPEDDPRNPGVIADNVGDNVGDVAGMAADVYESYIVTVTAAIFLAAILGLPTQFIEAIILFAALALVATFAGVNLLKTTGVKHPLSSISLAIYATIGLSVVLFFIGAFTLGLDSTKALALAATTSLGAVIAPLIVKITDYYTSYNYGPVRKIAEQAKISPATVIITGYGVGLMSAIPVIAVIVAVLGISYMIGYYTVPVSGFGELSKYLAGIFGTAMASVGLLVVAGIIITADSYGPVSDNAGGVVEMAGLPDEVREITDVLDSVGNTTKATTKGYAIASAALAALVLFIALIFEIVYSASKILGKGIVDMISESLSGLQLINANVLIGAFLGVALVYFFSSRTLEAVGRTAMEIVEEIRRQFREKPGILEWKEQPDYARVVDIATRRALGEFLIPGLAAIVLPLITGLLLGWNALAGLIMGAIVAGVPRALLMANAGGAWDNAKKYIEIQGLKKTEMHKAAVIGDTVGDPMKDTVGPSLNPLIKVLNTLSVVFTYVIVSTNIALGIWPSGLLPF

SEQ ID NO: 9473 - protein, 503 aa, Triticum aestivum
MEAGGKDGNPLKNYRIGKTLGIGSFGKVKIAEHIKTGHKVAVKILNRRKIKNMEMEEKVKREIKILRLFMHPHIIRLYEVIEAPADIYVVMEYVKSGELFDYIVEKGRLQEEEARRFFQQIISGVQYCHRNMVVHRDLKPENLLLDNNCDVKIADFGLSNVMRDGHFLKTSCGSPNYAAPEVISGKLYAGPEVDVWSCGVILYALLCGTLPFDDENIPNLFKKIKGGIYTLPSHLSGPARDLIPRMLVVDPMKRITIREIREHPWFEAQLPRYLAVPPPDTAQQVKKIDEESLVKVISLGFDKNLLVESIHNRLQNEATVAYYLFLDNKSRTTTGYLGAGYQEAMESSFSPITPSETQSPAHGNRQQPYMESPVGLRPHFPADRKWALGLQSRAHPREVMTEVLKALQELNVYWKKIGHYNMKCRWSPPGFPGQENMSHTNYNFSAEPIETDDLGDKLNLIKFELQLYKTRDEKYLLDLQRASGPHLLFLDLCAAFLAQLRVL

SEQ ID NO: 9474 - protein, 883 aa, Escherichia coli CFT073
MNEQYSALRSNVSMLGKVLGETIKDALGEHILERVETIRKLSKSSRAGNDANRQELLTTLQNLSNDELLPVARAFSQFLNLANTAEQYHSISPKGEAASNPEVIARTLRKLKNQPELSEDTIKKAVESLSLELVLTAHPTEITRRTLIHKMVEVNACLKQLDNKDIADYEHNQLMRRLRQLIAQSWHTDEIRKLRPSPVDEAKWGFAVVENSLWQGVPNYLRELNEQLEENLGYKLPVEFVPVRFTSWMGGDRDGNPNVTADITRHVLLLSRWKATDLFLKDIQVLVSELSMVEATPELLALVGEEGAAEPYRYLMKNLRSRLMATQAWLEARLKGEELPKPEGLLTQNEELWEPLYACYQSLQACGMGIIANGDLLDTLRRVKCFGVPLVRIDIRQESTRHTEALGELTRYLGIGDYESWSEADKQAFLIRELNSKRPLLPRNWQPSAETREVLDTCQVIAEAPQGSIAAYVISMAKTPSDVLAVHLLLKEAGIGFAMPVAPLFETLDDLNNANDVMTQLLNIDWYRGLIQGKQMVMIGYSDSAKDAGVMAASWAQYQAQDALIKTCEKAGIELTLFHGRGGSIGRGGAPAHAALLSQPPGSLKGGLRVTEQGEMIRFKYGLPEITVSSLSLYTGAILEANLLPPPEPKESWRRIMDELSVISCDLYRGYVRENKDFVPYFRSATPEQELGKLPLGSRPAKRRPTGGVESLRAIPWIFAWTQNRLMLPAWLGAGTALQKVVEDGKQSELEAMCRDWPFFSTRLGMLEMVFAKADLWLAEYYDQRLVDKALWPLGKELRNLQEEDIKVVLAIANDSHLMADLPWIAESIQLRNIYTDPLNVLQAELLHRSRQAEKEGQEPDPRVEQALMVTIAGIAAGMRNTG

SEQ ID NO: 9475 - protein, 343 aa, Mesorhizobium loti MAFF303099
MKTVYSPLHAGHAGQMELVTSAIVPGFEKPSRAEFIKARVESENLGPIVLPLEHDLAAAKRIHKSDYVDFLPTVWPQWVASGHEGTAMPFTWPTRGLRGDVPPKRVDALLGYYSFDAGATFVEGTWAAIKSSYDVALTAAGLVKGGERSAFALCRPPGHHAGAGFMGGYCYINNAAVAAQWFLDQGAKRISILDVDYHHGNGTQEIFYDRADVQVLNLHGDPLVEYPFFLGHADERGAGDGEGFNINYPMPFGTDWDAWNASLEDACGKLAAYAPDIVIVSLGVDTFEKDPISQFKLTSPDYPKIGRRIAKLGLPTLFVMEGGYAVEEIGINAVGVLTGFEDR

SEQ ID NO: 9476 - protein, 834 aa, Ashbya gossypii ATCC 10895
MTIEKEVERRLADGLEGVVISGSPRQGGGEEQSEPSSAPTAEDSDPEQTAVEDQRAERSQARHEEVPKGNTAISQLEQLENTNLLTVRIKWVNPENLMDDHKSQLLNRNNDAILCSRGIPINPSIIENYEYFFDRKRLEILKEHADVYTFESGTEEFMRSYEDGSSTWLYDLVVQAQFKAFQDLCAARNQIKENLEKSDHVEAWSISQNPHALTHPGNLYIRGIPKDLSVDDLIPIFSKFGTVLSLKIIIDGNTRESLGYGFISYPLGSQAARCIKELNGNLMNGSPLFINYHVERKERERIHLDHLKEDNDDERFRGVFVGNLPTEYEDGTLITPEQVFNKFNHILDPVDILSYYFPKRNSNTNIEYKDDDSTSPTSSSKENAETCDSQNEDSPLKGYGFIKFSTHDMALKAIDKLNSFTWLGHSLVVNKAVQNKTLYNNHSHYRTSSTRASISSRQSSLSGIPFFGPATPATSTLHHPPPPAFTMFAKPYSVSPTNSEVLLADRSPARSGSSNDGSPRVNTIPQVPLYGAQTQSHSPESLTAPGSRQGSLYLPSCPPMYTSAGTLMSSHPQFGHSAAHAAAAAFGGLPIPTRDQQESNLYVKHIPLSWRDEDLNDFYSQYGEIISAKIITVGGSKNEIGESKALEDVPVGTSRGYGFVCFKNPLDASRAMMATDRFQVGTNHVLYVSFAQKRGKSVSAGSGSSAGSHQPMSSSGRSSSHGSYHHGHGGSRQSPYDSIMGNYNPKFLNAMIQQQNQHLNGSPGTHSPTMMSQRNSWAPNQQAPYLVPVVMAPPPLTVPRSSPAMSSPKRSPDYNGTADSTVIDATPECGTLDA

SEQ ID NO: 9477 - protein, 540 aa, Penicillium marneffei
MASTNFDLEDQKYLEDVNAVKQWWTDSRWRYTKRPFTAEQIVAKRGTLKIEYPSNTQAKKLWKILEERFNDKTVSYTYGCLEPTMLTQMIKYLDTIYVSGWQSSSTASSTDEPSPDLADYPMNTVPNKVNQLFMAQLFHDRKQREERITTPREKRSSVQNYDYLRPIIADADTGHGGLTAVMKLTKLFVERGAAGIHIEDQAPGTKKCGHMAGKVLVPISEHINRLVAIRAQADIMGTDLLAIARTDSEAATLITSTIDYRDHAYLLGSTNPSLQPLNDLMVAAEQSGKSGEQLQAIEDSWIAQAGIKKFDDAVIDTINQGSFANKKELINRYLTAAKGKSNSEARAIAKGITGMDIYWNWDAPRTRGGFYRYQGGTQCAVNRAVAYAPFADLIWMESKLPDYKQAKEFADGVHAVWPEQKLAYNLSPSFNWKAAMSKEEQLTYIKRLGKLGYCWQFITLAGLHSTALISDQFASAYAKQGMRAYGELIQEPEMERKVDIVTHQKWSGANLIDHSLAMVTGGISSTAAMGKGVTEDQFKS

SEQ ID NO: 9478 - protein, 185 aa, Arabidopsis thaliana [sequence omitted]

SEQ ID NO: 9479 - protein, 348 aa, Ashbya gossypii ATCC 10895
MQGIRRYAAHASEGAPPDRSLDGSAYAGHTSCPDLFQISRAARLFSAGARYGTVLQNVRAASLISELASSLKAAAAGEFNGGRWRGQPGQLQAMVAVYAYPDTDALAQDLGEYIVAQQDAALAAHGQFAVAVSGGSLVGVLAAALLHGPAAARVRWAQWHVFFCDERLVPLEHAESNYHALRTQLLDPLAAAGALGPVVHSFNEALLGQGANERIAEAYEAQLPAALDLALLGAGPDGHTASLFPGPAHAWMLDERRARVLWCRDSPKPPADRITLTLPALEAAAAVAFVAEGTAKRPVLERALVRRDPALPCAVVTARCARVAWFTTAATVQDLPLQTAAYCASSRT

SEQ ID NO: 9480 - protein, 379 aa, Arabidopsis thaliana
RESPAEHGYYMPAEWDSHAQTWIGWPERQDNWRHNALPAQRVFADVAKAISKFELVTVCASPAQWENARKQLPEDIRVVEMSMNDSWFRDSGPTFIVRKRPVKLSSLNRNIAGIDWNFNAWVGANDGCYNDWSHDLLVSRKILALERIPRFQHSMILEGGSIHVDGEGTCLVTEECLLNKNRNPHMSKEQIEEELKKYLGVQSFIWLPRGLYGDEDTNGHIDNMCCFARPGVVLLSWTDDETDPQYERSVEALSVLSNSIDARGRKIQVIKLYIPEPLYMTEEESSGITQDGEAIPRLAGTRLAASYVNFYIANGGIIAPQFGDPIRDKEAIRVLSDTFPHHSVVGIENAREIVLAGGNIHCITQQQPAEPTSVAENGH

SEQ ID NO: 9481 - protein, 476 aa, Magnetococcus sp. MC-1
MVQHSPTVIVWFRRDLRLSDNPALLAATAMGQVLPVYIHENNQQEGGGGAWRWGLQQALAALNADLQGKLCCYVGDPARLLPEVAHAVGATGVYWNRLYTPQAIKRDRAIKQSLIERGLQVRSFNGSLLWEPWQVLKADKTPYKVFTPYYRRGCLVQDVPRQPMDAPPTVTWATLPAAAPAPSMQALDALLLGDVSWHKKWHGIWSMGEEAAQTRFEHFLSHGLACYDQGRDFPGRDCTSRLSTALQYGLLSPNQVWYGLEHAKADEHSVDKFRSELAWREFAYYQLFHFPSLPHKNFQPKFDHFPWLEDEVALGRWQTGQTGIPIVDAGMRELWQTGVMHNRVRMLVGSFLVKNLLLDWRAGAAWFKDCLVDYDLAINSASWQWVAGCGADAAPYFRIFNPVTQGEKFDRNGTYTRRFVPELANLPDQYLFKPWMAPASILRQAGVRLGQDYPEPLVDLAASRAQALAAFQALKI

SEQ ID NO: 9482 - protein, 195 aa, Triticum aestivum
MTGKKRKAEAARLDETDRAMYGAFRGAANSLSQLYTLAMGGQKLSFQAGERHAMEKLYEWILRQHENGLRLTVADIASHVQHEIQYGGDNPLASPRSQYASQSTQATVHMPNTSNHQPSASLFALGNPGLTQPKNSAVFSNALSSPVRRGLQPYHLDQGGDAGYFANGLAREPNPTASNDSSMDMHSDSPAHDSS

SEQ ID NO: 9483 - protein, 394 aa, Zea mays
  misc_feature (351)..(351): Xaa can be any naturally occurring amino acid
  misc_feature (362)..(362): Xaa can be any naturally occurring amino acid
  unsure (1)..(394): unsure at all Xaa locations
VRPAEGKPQQINRPITRSFGAQLVKNVQANAAIKNAAILPARHAPRQERKAPAKQPPPEDVIVLSSDSEQSRTQLESSASSVRSRKKVINTLSSVLSARSKAACGITDKRRQVVVIEDIDKLDVNNELAVVEYIEDIYTFYKIAQHDRRPCDYIDTQVEINPKMRAILAGWIIEVHHKFELMPETLYLTMYIIDQYLSLQPVLRRELQLVGVSAMLIACKYEEIWAPEVNDFILISDSAYSREQILSMEKGILNSLEWNLTVPTVYMFLVRFLKAATLGNKVEKEMENMVFFFAELALMQYGLVTRLPSLVAASVVYAARLTLKRAPLWTDTLKHHTGFRESEAELIECTXRCWSAHTRRPXADSKLRAVYKKYSSEQFGGVALRPPAAAVEIK

SEQ ID NO: 9484 - protein, 422 aa, Zea mays
MIRPGSKDSQNYDNNNQRVHPQPIDENMNQNGDSMDTVIGRIFNNISSLKSAYIQLQEAHTPYDPDKIQEADKLVIEELTRLSELKHAYREKHPKPIAASPQDSRLLSEIQEQQNLLKTYEVMVKKFQSQIQTRDTEITHLQQQIDEAKLRKSKLEKKLKQRGLLNRESEESDEEENYFSIELTPSLFTSAVDNAYQSIHDFSKPLINMMKAAGWDLDGAASAIEPGVVYTRRAHKKFAFESYICQRMFSGFQEESFSIKDSNISVSNEAFFHQFLAVRAMDPLDVLSQNPDSVFGKFCRSKYLSLVHQKMEGSFFGNVDQRNYVMSGGHPRTPFYQAFLKLAKSIWLLHRLAHSFDPKAKVFQVKKGSEFSDIHMESVVKDIILEDVAERPKVGLMVTPGFLIGTSIIQSRVYLSGAKCAD

SEQ ID NO: 9485 - protein, 542 aa, Clostridium thermocellum ATCC 27405
MSVKYIFVTGGVVSGLGKGITAASLGRLLKARGLRVTIQKFDPYINVDPGTMSPYQHGEVFVTDDGAETDLDLGHYERFIDENLSKNNNVTTGKIYWSIISKERKGDFLGGTVQVIPHVTNEIKNRIYLVGKEGKTDVVITEIGGTVGDIESLPFLEAIRQVASDVGRENVVYIHVTLVPYLSKSGELKTKPTQHSVKELRSLGIQPDIIVCRTEKRLSKELKDKIGLFCNIPGEWVIQNLDAESLYEIPLMLEEEGLANIVCERLNLGCVKPDMTEWCELVNRQKNLSKSLTIALVGKYVELHDAYLSVVESLNHGGIYNDAEVKIKWVNSEELTEDNLEETLCDVDGILVPGGFGDRGIEGKILAAKYARENKVPYFGICLGMQMAVVEFARNVAGLKMANSSEFDANSPHPVIDLMPEQKDIDEKGGTMRLGLYPCKIIKDSSAYRIYESELIYERHRHRYEFNNEYRELLTSKGLILAGLSPSEKLVEIIELKDHPWFIGVQFHPEFKSRPNRPHPLFKDFIRAAVERRYKQQENKND

SEQ ID NO: 9486 - protein, 147 aa, Nanoarchaeum equitans Kin4-M
MDVSTQRRMAAEILKVGLDRVWIDPNHLKEVAEALTKDDIRELIKRGIIKKLPIEGQSRKRARELHEKKKKGRRRGPGSRKGKRTARADPKRQWINKVRAQRKLLKELKEKKIIDNKTYWDLYKKVKGNLFKSRSHLLLYLKQKGIM

SEQ ID NO: 9487 - protein, 210 aa, Eucalyptus occidentalis
MVRGKIQLRRIENTTSRQVTFSKRRNGLLKKAYELSVLCDAEVAVIIFSQKGRPYEFSSNSEIQKTIDRYRRSTYDMDTYKTNLDQCILHLKQETTDMERKIELLEVSLRKLSGECLGSCSIDEIQMIGDQLERSLSSIRARKAQLFDDQIQHLQAKERSLKEENAKLLAKCLANPGQSTAHPRAAALHSRSSRSTDVETRLFIGLPELN

SEQ ID NO: 9488 - protein, 458 aa, Elaeis guineensis
MTDSFAHCASHINYRHKMKTMFIFSTPCCSPSTAFFSPFRASNSKPLRSTLSLRSSISSSSITSTSHCSLAFNIVKHKEKNVVSANMTSSVSSRTFLNAQNEQDVLSGIKKEVEAGTLPASIAAGMEEVYLNYKSAVIKEWRSQSNRNCINKIRLPLIDRIFLDVKEPFVFEAHHKAKREPFDYYMFGQNYIRPLVDFETSYVGNMPLFIQMEEQLKQGHNIILMSNHQSEADPAIIALLLEMRLPHIAENLIYVAGDRVITDPLCKLFSIGRNLICVYSKKHMLDNPELVDMKRKANTRSRKEMAMLLRSGSQIIWITPSGGRDRPVANSGEWAPAPFDSSSVDNMRRLVDHSSPPGHIYPLAILCHDIMPPPLKVEKEIGEKRIISYHGTGISTAPEISFSNTTAACENPEKAKDAYTKALYDSVTEQYDVLKSAIHGKKGLQASTPVVSLSQPWK

SEQ ID NO: 9489 - protein, 1060 aa, Pseudomonas aeruginosa PAO1
MFKASHVLQGEDQTRSAAEFFPVISANYAVDEEAYLGELLQLADPGPDGIEAIRRNARALIETVRSRDNAVDTLDALLRQYSLDTQEGLMLMCLAEALLRVPDAATADALIRDKLSAADWQRHLGQSDNVLVNFAAWGLVMTGKVVNIDERTDGRAPSVISRLVQRSGEPVIRAAMNQAMKLMGKQFVLGRTISEALKNGRPCREQGYTYSFDMLGEAALTAADAEKYMADYRQAIDTVGAEPQVGPGPRPSISIKLSALHPRYEVAQRERVLSELFANVLELAVRARKLNVGITIDAEEADRLELSLELYEKLMRDPAIAGWGEFGLVIQAYSKRCLPVLVWLTLLGRELGARIPLRLVKGAYWDSEIKQCQVQGADGYPVYTRKEGTDTSYLACARYLLSEHTRGVIYPQFASHNAHTVTAILALADEARAAGGEERDFEFQRLHGMGDALYDTVIEKYRRNVRIYAPVGAHKDLLPYLVRRLLENGANSSFVHKLVDPRVPVETLIQHPVTQLRQFKTLANDRIPLPQAIFGAGRKNSQGINMNIQNQWNELELAYKPHLTRQWQAAPIVNGEKLSGPAHEVRCPYDLERLVGSVQYASAEQAGKALDVLQAAWPRWSATPVDERAGILERLADLLEAQRGELMALCTLEAGKSLQDGIDEIREAVDFCRYYAQQARQRLVREELRGPTGERNELFYEGRGIFACVSPWNFPLAIFLGQISAALVAGNTVLAKPAEQTSLIAARTVELMFEAGLPKDVIALLPGDGATLGGVFCRDARVAGVAFTGSTDTARIINRQLAEKPGAIATLIAETGGQNAMIVDSTALPEQVIKDAVQSAFTSAGQRCSALRVMYVQQDIAERVIELLKGAMAELKVGPTEVRVSDVGPVIDAEAKAGLEQHIAALKAAGKLIAETKVPGNLNGHFVAPVAFEISGIDELKKENFGPVLHVVRYAAQDLEKVVQAINATGFGLTMGVHSRNEETARRIEELARVGNLYINRNQIGAVVGVQPFGGHGLSGTGPKAGGPNYLLRFVSERTTSVNTTAVGGNASLLSLADAE

SEQ ID NO: 9490 - protein, 399 aa, Ralstonia solanacearum
MPNAEAFYAFIRTELDAIREAGLFKQERVIASPQGARVRTIDGREVINLCANNYLGLSSHPRVIDAAHEALRTHGFGLSSVRFICGTQDLHKTLEARLSAFLGTEDTILYGSAFDANGGLFETLLGAEDAVISDALNHASIIDGIRLCKARRYRYQHNDLDDLRAQLTQARADGARHLLVFTDGVFSMDGTIARLDEMRSICDAHGALLGIDECHATGFLGPRGRGTHELRGVFGKVDIITGTLGKALGGASGGFTSARKEVVALLRQRSRPYLFSNTVAPAIIGASIAVLDILEGSTELRDRLERNTRFFRAGLEALGFDVKPGEHPIIPIMVYDADKAQQLAQRLLELGVYVVGFFYPVVPKGQARIRVQMSAVHDEAALQAALGAFGQAGHELGLI

SEQ ID NO: 9491 - protein, 376 aa, Glycine max
MVMHLNGTPCALGFHMPAEWETHAQCWMGWPERADNWRDGAVHAQRVFARVASAISRFESVTVCVSSAQWENARSQLPEHIRVVEMNMNDSWFRDIGPTFVMRRSTTPESGDAVSRIAGIDWNFNSWGGLEDGCYCDWSLDLLVAKKILGIEKIPRFSHSMVLEGGSIHVDGEGTCLTTEECLLNKNRNPHLSKNQIEDELKTYLGIRKVIWLPRGLYGDDDTNGHIDNMCCFVRPGVVMLSWIDDETDPQYERSVEAYSLLSNETDANGRKFEIIKLHVPSPLYMTEDEAAGVSLDNEAKPRLPGTRLAASYVNFYIANKAIIAPQFGDKKWDDEAVRVLSKAFPHHEVVGIEGAREIVLAGGNIHCITQQQPAI

SEQ ID NO: 9492 - protein, 147 aa, Thermotoga maritima MSB8
MLLGRREDIFRPFRELQREIDRLFDDFFRTEVRPAKEFFAPDMDVYETDDEVVIEVEIPGIDRKDVKITVEENILKISGEKKLEREQKGKNYYYVERSAGKFERAIRLPDYVDVEKIKAEYKNGVLTIRVPKKEERKKKVIEVEVQE

SEQ ID NO: 9493 - protein, 528 aa, Triticum aestivum
  misc_feature (212)..(212): Xaa can be any naturally occurring amino acid
  misc_feature (229)..(229): Xaa can be any naturally occurring amino acid
  misc_feature (244)..(244): Xaa can be any naturally occurring amino acid
  unsure (1)..(528): unsure at all Xaa locations
YNKFVQKSRLVPARNSRDIVDPRVRGGGGHDEPPQRPKQQLPRDSRGSLEVFNPSSAAAFRPAASPFRQDDDDNIDDVDRATQRAAEWGLVLQTNEHTGRPQGVSARSSGGGSARSSSDDKAVAGAGIPRVSEELRAALSAFQQTFVVSDASRPGHPIMYASAGFFNMTGYTSKEVVGRNCRFLQGSGTDPAEIAKIRQALADGSNYCGRVXLNYKKDGTAFWNLLTIXAPIKDEDGRVLKFIXGMQVEVSKYTEGNQDTGVRPNGLPESLIKYDARQKDQARSSVSELLLALKNPRSLSESSNSTFKRKSQESVGVLTGDGTGHASAESGSRRTSRTGARSSLQKISEVPEGGNKTRKSGLFSLMGLLGMGHGNVEKNMLKPRDEDPLLDSDDERPESFDDELRRKEIRRGIDLATTLERIEKNFVITDPRLPDNPIIFASDSFLQLTEYSREEILGRNCRFLQGPETDRATVRKIRDAIDNQTEVTVQLINYTKSGKKFWNLFHLQPMRDQKGDVQYFIGVQLDGT

SEQ ID NO: 9494 - protein, 692 aa, Neurospora crassa
MVSRFLGATVPLAAAILPGARALYVNGSVTAPCDSPIYCYGELLHQVELARPFSDSKTFVDMPTIKPVDEVLEAFSKLTLPLSNNSELHEFLSTYFGPAGGELEAVPTDQLHVSPTFLDNVSDDVIKQFVDSVINIWPDLTRKYVGAGELCTGCADSFIPVNRTFVVAGGRFREPYYWDSFWILEGLLRTGGAFTEISKNIIENFLDLVEQIGFVPNGARLYYLDRSQPPLLTQMVRIYVEHTNDTSILERAVPVLKKEWEWWTTNRTVEVTADGKTYSLQRYHVDNNQPRPESYREDYITANNNSYYATSGIIYPETTPLNDTQKALLYANLASGAESGWDYSSRWLKNPGDAARDVYFPLRSLNVLEIVPVDLNSILYQNEVTIGKFLAQQGSKDEAEEWAKKAEERSEAMYKLMWNSTLWSYFDYNLTSSSQNIYVPADPQVFPFEQPSGTPEGYQVLFSVNQMFPFWTGAAPDQLKGNPLAVKLAFERIKNLLDNKAGGIPATNFVTGQQWDEPNVWPPLMHVLMDGLLNTPATFGEDDPAYQETQTLALRLAQRYVDSTFCTWYATGGSTSETPKLQGLGSDLKGIMFEKYSDNSTNVAGSGGEYEVVEGFGWTNGVLIWAADKFGDKLKRPDCGDITPAQVGKRADITMEKRAVELDVFDAKFTKKFARKGKLEKLKAKFKRRAAI

SEQ ID NO: 9495 - protein, 161 aa, Zea mays; identical to SEQ ID NO: 923

SEQ ID NO: 9496 - protein, 466 aa, Escherichia coli CFT073
MPHSYDYDAIVIGSGPGGEGAAMGLVKQGARVAVIERYQNVGGGCTHWGTIPSKALRHAVSRIIEFNQNPLYSDHSRLLRSSFADILNHADNVINQQTRMRQGFYERNHCEILQGNARFVDEHTLALDCPDGSVETLTAEKFVIACGSRPYHPTDVDFTHPRIYDSDSILSMHHEPRHVLIYGAGVIGCEYASIFRGMDVKVDLINTRDRLLAFLDQEMSDSLSYHFWNSGVVIRHNEEYEKIEGCDDGVIMHLKSGKKLKADCLLYANGRTGNTDSLALQNIGLETDSRGQLKVNSMYQTAQPHVYAVGDVIGYPSLASAAYDQGRIAAQALVKGEANAHLIEDIPTGIYTIPEISSVGKTEQQLTAMKVPYEVGRAQFKHLARAQIVGMNVGTLKILFHRETKEILGIHCFGERAAEIIHIGQAIMEQKGGGNTIEYFVNTTFNYPTMAEAYRVAALNGLNRLF

SEQ ID NO: 9497 - protein, 326 aa, Zea mays
MENPPSILVTPMAPAMSAQFTRITFSNLFVRRAGPGSTELTVEGRPSDQLGRRNLTDSPVFDGRGPDASLVARVQGVATQMGDVRQLYTVVFQERPLKGSTLVTEGAMTEGSDEWAIYGGTGVFAMARGVIRRTFLADTSGGNSDELAVEVLCPVFRPAAFGSSSSQPAAKDISSTVVVTKVGVWGGEGGSAQDIATTEPPRRLQSLTVRAGVAVDSIEFTYSTDTGGQTRTAGRWGGLGGNVRKLDLGDAEYVKEVSGTYGAFEGATTLTSFRIVTSTARAWGPWGIESGTRFCITAPIGSSIVGFYGRATTRLVAAIGVYLRQL

SEQ ID NO: 9498 - protein, 354 aa, Hebeloma cylindrosporum
MAYRYHNDLLAPYLALPQGDKIQAEYVWVDGDGGLRSKTTTVSKKVTDIGSLRIWDFDGSSTNQAPGHDSDVYLRPAAIFKDPFRGGDNILVLAETYNSDGTPNRTNFRHHAAKVMEQAKEDVPWFGLEQEYTLFDADGSPYGWPKGGFPGPQGPYYCGAGTGKVFARDLIEAHYRACLYSGINISGINAEVMPSQWEFQVGPCEGISMGDHLWMARYLLVRIAEQWAVKVSFHPKPLQGDWNGAGCHTNYSTKAMREPGGMKVIEEAIEKLSKRHDEHIAVYGEDNDLRLTGRHETGHIGAFSSGVANRGASIRVPRHVAAQGYGYLEDRRPASNIDPYRVTSIIVETTLLNA

SEQ ID NO: 9499 - protein, 434 aa, Oryza sativa
ACVFPFFISAKLEINKSKIFMEHATCDDVHEHAINVSHGETASTSTSHQDLHSDSDDSHQDDRPSTSTQTPSPQSSASTSPTAYNTRNLSFPRRDSMYGHGRSIWNSGLWISFELVIYVVQIVAAIFVLVFSRDEHPHAPLFAWIIGYTIGCIASIPLICWRCAHRNRPSEQEPEQPPAAYPNLTSSQSSEGRNQRSSGTVLHFGCITISCPRPSILAYHFKTAVDCFFAVWFVVGNVWIFGGHSTLSDSQEAPNMYRLCLAFLALSCVGYAIPFVMCAAICCCFPCLISLLRLQEDLGHTRGATQELIDALPTYKFKPKRSKMWVDHASSSENLSEGGILGPGTKKERIVSAEDAVCCICLTKYGDDDELRELPCTHFFHVQCVDKWLKINAVCPLCKTEIGGVVRSFFGLPFGRRRVDRMAGRGIASSRFTV

SEQ ID NO: 9500 - protein, 741 aa, Arabidopsis thaliana
MASTSSLALSQALLARAISHHGSDQRGSLPAFSGLKSTGSRASASSRRRIAQSMTKNRSLRPLVRAAAVETVEPTTDSSIVDKSVNSIRFLAIDAVEKAKSGHPGLPMGCAPMAHILYDEVMRYNPKNPYWFNRDRFVLSAGHGCMLLYALLHLAGYDSVQEEDLKQFRQWGSKTPGHPENFETPGIEVTTGPLGQGIANAVGLALAEKHLAARFNKPDAEVVDHYTYAILGDGCQMEGISNEACSLAGHWGLGKLIAFYDDNHISIDGDTEIAFTENVDQRFEALGWHVIWVKNGNTGYDEIRAAIKEAKTVTDKPTLIKVTTTIGYGSPNKANSYSVHGAALGEKEVEATRNNLGWPYEPFQVPDDVKSHWSRHTPEGATLESDWSAKFAAYEKKYPEEASELKSIITGELPAGWEKALPTYTPESPGDATRNLSQQCLNALAKVVPGFLGGSADLASSNMTLLKAFGDFQKATPEERNVRFGVREHGMGAICNGIALHSPGLIPYCATFFVFTDYMRGAMRISALSEAGVIYVMTHDSIGLGEDGPTHQPIEHIASFRAMPNTLMFRPADGNETAGAYKIAVTKRKTPSILALSRQKLPHLPGTSIEGVEKGGYTISDDSSGNKPDVILIGTGSELEIAAQAAEVLRKDGKTVRVVSFVCWELFDEQSDEYKESVLPSDVSARVSIEAASTFGWGKIVGGKGKSIGINSFGASAPAPLLYKEFGITVEAVVDAAKSFF

SEQ ID NO: 9501 - protein, 394 aa, Candida albicans SC5314
MKAIVYHDRGDIRYDPNFPDPQIIRSDDVKIKVHYCGICGTDLKEYSDGPIFFPPKGELNEISQMESIQVMGHEISGEVIAIGDDVTNVKVGDKVVVEVTGTCLDRHRYQDPKNGDSPKPNCPSCVSGNYNACDYLALIGCGFANGGCAEYLVVASSKVIAFDQNKIPMDIAALIQPIAVSWHAVKVSNFKPGSNALILGGGPIGLTTIFALKGNQVSQIVLSEPALARRQLAEKLGVITYDPTGKSIEQCVEDLKKLSPGGYGYEYSYDCSGVKATFETGLKTLKIRGCATNVAIWAHKSIPLYPMEITLSEKMLTGSICFVKKDFEESIKAIENGLISIDELKMLITSKIHLQDGIEKGFLELINHKEKHIKILFSPKSEYLLCNGVNDSNK

SEQ ID NO: 9502 - protein, 404 aa, Dechloromonas aromatica RCB
MKRRVVITGLGLVSPLGDTPDQVFESVMSGRSAVELWSDDEIDPPAVVARSPFDVSRWFNRLQLAGVDRVSQLAVAAAEMARADAGLAALDENSGVYVGSGMGGAAAIEKAFNNHLESGRVPPLTVPAFMPNAPAAHVAMRAGIHGPVFTYSIACASSAVAISEAAKAVSRGEIDYALAGGSEALLVPSVIRAWQALQTLASPTGDDPSKACQPFSKDRSGLVLGEGSAFLVIESLDSALARGARIYAELAGSGISCDATHLTKPDAAGQVRALHAALRDSGLSPTEIGYCNAHGTATLVGDVIECEALRQVWGNDIDQLAVSSTKSMHGHLLGAAGALEAVITTLAVARGALPPNMNMTEQDPACGIRVVTEPGTPAPDLKAAISNSFAFGGTNAVLVFRRID

SEQ ID NO: 9503 - protein, 974 aa, Arabidopsis thaliana
MSLCGHTSPVDSVAFNSEEVLVLAGASSGVIKLWDLEESKMVRAFTGHRSNCSAVEFHPFGEFLASGSSDTNLRVWDTRKKGCIQTYKGHTRGISTIEFSPDGRWVVSGGLDNVVKVWDLTAGKLLHEFKCHEGPIRSLDFHPLEFLLATGSADRTVKFWDLETFELIGTTRPEATGVRAIAFHPDGQTLFCGLDDGLKVYSWEPVICRDGVDMGWSTLGDFCINEGKFIGCSYYRNSVGIWVSDISELEPYGAVSEDKNECMVKRFSVLNDQSERMGSGPRGSVSPDYETREIKNIYVDSTGGNLNVAQNPGSLKATLPLESGKVATMVSEKQNAAYFGPAGDKYSSTSRDSDSGEESSYSERESIPFSRTKSGMLLRPAHVRKTLAKFEESKQSAVVQSATRKKSGLAVEEEPQTQNAFLSEQNASKPFDAEDSIIKGITNKFEKALSSEPPTDEANRMFLKPPRIHRSSNSKYNDTRRAMSADPATFGKGGMENSGDVEDIPSKTERVLSREKPGDEQKNTEYPSGSRELNPVKIVEGVNVVSGRTRSLVEKFERGEKTTHTEGASTTIEQNNNAVQEDPRKTSRQTGETPVISTRRARSTPARVMPIVLNRDSNVTSDEPPLTQPARTSSFPVMPVILNQASNVTYDEPSVALTQESRTSHARILPVTFNQATNITSEEASVTLRRQRRNSAARVRPVLLSQATSHECPVTSVRPLRTSPARVMPTKLNQSVNMTSDTSHIASMHRVSPTQMLATPTVIDQVADMTLDETHATQIQPACDNMPQKEEPNISDREDDSDITENLMLTHNEFLSTLQSRLTKLQIVRHFWERSDVKGAIGALRKLTDQSVDVISILTEKIEILTLDMFSQLVPVLTSLLGSRTERPVNVSLDMLLKLVAVFGTVIRSTVSAPRIVGVDLHANERNLPNLFCGTAQDSKNSSSSRKKRRSNNKKGSRTKPSSSRTIAASKTKN

SEQ ID NO: 9504 - protein, 394 aa, Oryza sativa (japonica cultivar-group)
MAMPYASLSPAVADHRSSPAAATASLLPFCRSTPLSAGGGGVAMGEDAPMTARWPPAAAARLPPFTAAQYEELEQQALIYKYLVAGVPVPPDLVLPIRRGLDSLAARFYNHPALGYGPYFGKKLDPEPGRCRRTDGKKWRCSKEAAPDSKYCERHMHRGRNRSRKPVETQLVAQSQPPSSVVGSAAAPLAAASNGSSFQNHSLYPAIAGSNGGGGGRNMPSSFGSALGSQLHMDNAAPYAAVGGGTGKDLRYTAYGTRSLADEQSQLITEAINTSIENPWRLLPSQNSPFPLSSYSQLGALSDLGQNTPSSLSKVQRQPLSFFGNDYAAVDSVKQENQTLRPFFDEWPKGRDSWSDLADENANLSSFSGTQLSISIPMASSDFSAASSRSTNGD

SEQ ID NO: 9505 - protein, 528 aa, Zea mays
MATLPLLLHLLWEASPWARAGAATAAVVLVWLAAWTLEWAWWTPRRLDRALRAQGLKGTRYRLLTGDVRENARLNREARTKPLPLGSHDIIPRVLPMFHNAVKENGTNSFTWFGPIPRVIIPDPELMREVLSNKFGHFGKPLFSRVGKLLANGLANHEGEKWAKHRRILNPAFHHEKIKGMLPVFATCCADMINRWENSMSSKEPSEMDVWPEFQNLTGDVISRTAFGSNYQEGRNIFQLQGEQAERLIQSFQTIFIPGYWFLPTKNNRRMKEIDREIRKILHGIIRKRERAFIDSEGTNDDLLGLLVESNMRESNGNAKLGMTTEDIIEECKLFYFAGMETTSVLLTWTLILLSMHPEWQEQAREEVLNHFGMGTPDFDNLNRLKIVTMILYEVLRLYPPVVFLSRRTYKEMELGGIKYPSGVSLLLPIIFIHHDPNIWGKDASEFNPQRFEDGISNATKHQAAFFPFGWGPRICIGQNFALLEAKMALSTILQRFSFELSSSYTHAPYTVITLHPQHGAQIRLKKL

SEQ ID NO: 9506 - protein, 150 aa, Arabidopsis thaliana
MSKRKTKEPKVDVVTLGPSVREGEQVFGVVHIFASFNDTFIHVTDLSGRETLVRITGGMKVKADRDESSPYAAMLAAQDVAQRCKELGITAMHVKLRATGGNKTKTPGPGAQSALRALARSGMKIGRIEDVTPIPTDSTRRKGGRRGRRL

SEQ ID NO: 9507 - protein, 156 aa, Nicotiana benthamiana
MQIFVKTLTGKTITLKVESSDTIDNVKAKIEDKEGIPPYQQRLIFAGKQVEDGCTLADYNIQKESTLHLVLRLHGGAKKRKKKTYTKPKKIKHKKKKVKLAVLQFYKVDDSGKVQRLRKECPNAKCGAGTYMANHFDRYYCGKCGLTYVYNKAGAD

SEQ ID NO: 9508 - protein, 471 aa, Pseudomonas aeruginosa PAO1
MSSVGEQKVQDGSLKRELGERHIRLMALGACIGVGLFLGSAKAIQMAGPAIMISYILGGLAILVIMRALGEMAVHNPVAGSFSQYAKDYLGPLAGFITGWNYWFLWLVTCVAEITAVAVYMGIWFPDVPRWIWALAALASMGTINLIAVRAFGEFEFWFALIKIVTILAMVVVGIGMIAFGFGNDGIATGISNLWAHGGFMPNGIQGVLMSLQMVMFAYLGVEMIGLTAGEARNPTKTIPSAINSVFWRILLFYVGSLFVIMSLYPWNEIGTQGSPFVMTFERMGIKTAAGIINFVVITAALSSCNGGIFSTGRMLYSLAQHRQAPAFFGKASRSGVPRRALILSILALLLGVLLNYLVPEKVFVWVTSIATFGAIWTWAMILLAQLRFRKTLSPAECDKLQYRMWLYPVSSYLALAFLVMVVVLMAFFEDTRIALYIGPPFILLLTVLYYAFNLAPKEPAGTGSVSRAAS

SEQ ID NO: 9509 - protein, 374 aa, Oryza sativa (japonica cultivar-group)
MADLADEDPPVLLDRASRATRGKRITKLLEDEVEQDEVFWNQDALKEDEEDDNYEEEQDAGDEFDSDFGEDESEPDDEPEKEVRERLPIKKRLIFPGKTMKKINAKKKKKVVPKLEDDSKTDKYSDQQSPSKQTDIPDELETGEKTIRKSTRTSVIVRQAEREAIRAEKEATMKVPVIKKKKEGEEKRMTQEEMLLEAAETEIINLRNLERVLAREEEVKKKAVVHKAVYEGPTIRFCSRDAYYQFCAELGESRLEFINGASFGSELCTTSAPYPEKSICAVTGLPAKYRDPKTGLPYATKEAFKIIRESFLKEEADRKRPNLANMGELFESITGEYSTPKKRRIEARSPSISSDQRHGGRFRRIPALDLLDED

SEQ ID NO: 9510 - protein, 119 aa, Glycine max
MAKSSFKLEHPLERRQAESARIRDKYPDRIPVIVEKAERSDIPDIDKKKYLVPADLTVGQFVYVVRKRIKVSAEKAIFVFIYNTLPPTAALMSSIYEENKDDDGFLYMTYSGENTFGSH

SEQ ID NO: 9511 - protein, 419 aa, Thermus thermophilus
MPLKAYRPPEDPGLWDTYLEWLERALKVAGVHPTTLEYLAHPKRLVTLSLPVVMDDGKVRIFQGYRVVHDIARGPAKGGVRLDPGVTLGQTAGLAAWMTLKAAVYDLPFGGAAGGIAVDPKGLSPRELERLVRRYTAELVGLIGPDSDILGPDLGADQQVMAWIMDTYSMTVGSTVPGVVTGKPHALGGSEGRDDAAGLGALLVLEALAKRRGLDLRGARVVVQGLGQVGAAVALHAERLGMRVVAVATSMGGMYAPEGLDVAEVLSAYEATGSLPRLDLAPEEVFGLEAEVLVLAAREGALDGDRARQVQAQAVVEVANFGLTPEAEAYLLGKGALVVPDLLSGGGGLLASYLEWVQDLNMFFWSPEEVRERFETRVARVVDAVCRRAERDGLDLRMGALALALERLDEATRLRGVYP

SEQ ID NO: 9512 - protein, 449 aa, Thermotoga maritima MSB8
MYDAVIIGGGPGGYVCAIKLAQLGKKVALVEKDALGGTCTNRGCIPTKAMLTVSHLMDEMKEKASKYGLKVSGVEYDVAAIMKHVQKSVMMSRKGIEYLLKKNGVEVFKGTAVVENKNTVVVQETGEKLEAKNLVLAHGSVPSVFSPFDIDGVWTSDDVFNLKEFPKSLVIVGGGVIGVEFATFFGSFGVDVTIVEIAEHILPYEDSDVAEEVKKALKRKGVKILEKTKISSLSKVDDGFEVALENGETLKAEKVLLAAGRKPNIPEDVKALGVKIEKGVVTDSRMRTNVENVYAIGDIRSGIMLAHVAMYEGIVAAKNIAGEEEEMDYSAVPSIIFSSPEVASVGVREKDVNPEEVVISKFPVSANGRARTMLENIGFAKVIADKKDGTVLGMSIVSPSATDMIMEGVIAVKFRMKAEDLEKAIHPHPTLTETILGALEGVSGKPIHL

SEQ ID NO: 9513 - protein, 599 aa, Haemophilus somnus 129PT
MQTVNVDIAIVGAGGGGLRSAIAAAEANPNLKIALVSKVYPMRSHTVAAEGGAAAVIKDEDSYDKHFHDTVAGGDWLCEQDVVEYFVQHSPVEMTQLERWGCPWSRKVDGDVNVRRFGGMKIERTWFAADKTGFHLLHTLFQTSIQYPQIQRFDEHFVLDILVDDGHARGMVAMNMMEGTLVQINANAVIIATGGGCRAFRFNTNGGIVTGDGLSMAYRHGVPLRDMEFVQYHPTGLPNTGILMTEGCRGEGGILVNKDGYRYLQDYGLGPETPIGKPENKYMELGPRDKVSQAFWQEWRKGNTLKTAKGVDVVHLDLRHLGEKYLHERLPFICELANAYEGVDPAKAPIPVRPVVHYTMGGIEVDFNSETRIKGLFAVGECASSGLHGANRLGSNSLAELVVLGRVAGEYAAQRAIEAQPANRSAVDAQAQDVIHRLEELYNQEGTESWSQIRDEMGDSMEEGCGIYRTQESMQQTVDKIAELKERYKHIRIADRSSVFNTNVLYTVELGYILDVAQSIANSAIERKESRGAHQRLDYTERDDVNYLKHTLAYYNADGAPRIEYSDVKITKSQPAKRVYGAEAEAQEAAAKAKEQANG

SEQ ID NO: 9514 - protein, 521 aa, Arabidopsis thaliana
MYSAIRSLPLDGGHVGGDYHGPLDGTNLPGDACLVLTTDPKPRLRWTTELHERFVDAVTQLGGPDKATPKTIMRTMGVKGLTLYHLKSHLQKFRLGRQAGKESTENSKDASCVGESQDTGSSSTSSMRMAQQEQNEGYQVTEALRAQMEVQRRLHDQLEVQRRLQLRIEAQGKYLQSILEKACKAFDEQAATFAGLEAAREELSELAIKVSNSSQGTSVPYFDATKMMMMPSLSELAVAIDNKNNITTNCSVESSLTSITHGSSISAASMKKRQRGDNLGVGYESGWIMPRNMLCCCVNSENNKKYAELDAKLARKMVESRSIYPGHRSLKSMDSIIMKFPKLREGLRNIRSVFESYDNDTNGTIDIEELKKCLEELKLSLSDEEVKGLYSWCDVDGSKGIQFNEFIVLLCLIYLLAKPSSESSTESREMGPKLVESIFDPIVEVFLFLDKDGKGKLNKADVIKTLNNEDYPLERSPSHVTNMRFEEMDWGRKGKVGFREFLFAFMSWVGLDDADDDFMSS

SEQ ID NO: 9515 - protein, 666 aa, Arabidopsis thaliana
MTSQKRFIFEVEAAKEATDGNPSVGPVYRSTFAQNGFPNPIDGIQSCWDIFRTAVEKYPNNRMLGRREISNGKAGKYVWKTYKEVYDIVIKLGNSLRSCGIKEGEKCGIYGINCCEWIISMEACNAHGLYCVPLYDTLGAGAVEFIISHAEVSIAFVEEKKIPELFKTCPNSTKYMKTVVSFGGVKPEQKEEAEKLGLVIHSWDEFLKLGEGKQYELPIKKPSDICTIMYTSGTTGDPKGVMISNESIVTITTGVMHFLGNVNASLSEKDVYISYLPLAHVFDRAIEECIIQVGGSIGFWRGDVKLLIEDLGELKPSIFCAVPRVLDRVYTGLQQKLSGGGFFKKKVFDVAFSYKFGNMKKGQSHVAASPFCDKLVFNKVKQGLGGNVRIILSGAAPLASHIESFLRVVACCNVLQGYGLTESCAGTFATFPDELDMLGTVGPPVPNVDIRLESVPEMNYDALGSTPRGEICIRGKTLFSGYYKREDLTKEVFIDGWLHTGDVGEWQPNGSMKIIDRKKNIFKLAQGEYVAVENLENVYSQVEVIESIWVYGNSFESFLVAIANPAQQTLERWAVENGVNGDFNSICQNAKAKAFILGELVKTAKENKLKGFEIIKDVHLEPVAFDMERDLLTPTYKKKRPQLLKYYQNVIHEMYKTTKETLASGQ

SEQ ID NO: 9516 - protein, 533 aa, Bacillus halodurans C-125
MKDQNQDPNKRSDNETDETLTNRQGHPVTNNQHVRTVGDRGPTTLENYDFLEKISHFDRERIPERVVHARGAGAHGYFESYGTYGDEPISKYTRAKVFTEKGKQTPVFVRFSSVIHGGHSPETLRDPRGFAVKFYTEDGNWDLVGNNLKIFFIRDPLKFPDLVHAFKPDPVTNVQDGERIFDFISQTPEAMHMITFLFSPWGIPANYRMMQGSGVNTYKWVNEEGNAVLVKYHWEPKQGIKNLTQKEAEAIQAKNFNHATLDLYEAIEDGDYPEWELYVQIMSDDAHPELDFDPLDPTKLWYKDQFPWVPVGRMVLNKNPENYFAEVEQAAFGTGVLVDGLDFSDDKLLQGRTFSYSDTQRYRVGANYLQLPINAPKKRVATNQRDGQMEYHVDIGPKQNPHVNYEPSLLNGLKEAKQDGQDHTPYVEGELQRASIDRQNDYGQAGETYRRLSDWERDDLILNLVNTLAPCHEDIQKQMIDHFSQCDPEYGRRVKEGLEKQKGADTHRQPQGGADGDAAMHAAEALGHPSDPY

SEQ ID NO: 9517 - protein, 1237 aa, Synechocystis sp. PCC 6803
MPFEDALAIVNAAMQTLLGRQLSDIETLIFEGSWQSKTYPQIADGAGYSINYLTTDVGPKFWKVLSQALGEPVNKKNFKAAIRRYCVVQSGGEWESEGFQTQLPSYPSILSWGEAPDVSQFYGREEEQALLQRWIEAERCRLIAVLGMGGIDKSTLTTKVVQGFVQGDGVEEWEGDNINIKKIQNPLQEGQSPTKFKIQHLPSSPATPFTHIIWRSLRNAPPLEALLAELIDLLSEHQETVGDRARLLHWLRKTRCLIVLDNLETILQAGDHAGYYRDGYGDYGELIQLLGETPHQSCVLLTSREKPAEIAVLEGLDGNTRTLQLSGSVATAIAIIQQKGLQGTEEQQQVLCDRYSYNPLALKIVSTTIQDLFDGDISAFLTEDAVIFNSIRRLLDAQFQRLTELEQAIIIWLAINRDWTAIAELAADLVPPVPKVKLLEALESLRWRGLIETQDKRYTLQPVVMEYVTERFIEQINQELEMGQPQYWQQFALLKLTVRDHITETQRRLIVHSTAAQFGDCFPSPELQRQQLQTVLTAIRESVIAGYGVGNLINLSNALDLDLAGFDFSQLTIRQADLRHRLFQHLNFAQANFRDSAFKQTFGSIFSLSYSPAGDYLITGDDVGVVRLWKSAEMQPMQSYPLHRSYVWDLRPSADGRWLATCSEDQTVKITNLATGQLQATLVVAPTIARAIVWIGPDCLAIGGIDGHIRLWYPFTEQAPVLVTAHTDIVNSLSWDANSNLLASSSSDSTVKLWDVETGICHRIWREAVPVRWATWSPDGHTLAISREDGGIVLWNPHSDQAPRYLNGHPETVWSLDWNPDGAWLASSSHDATVRLWDVVTGRCRRILRSHQNWVWYARWHPHQPRIISGGHDGTLKLWDTGTGQCLKSLTGHMANIRAIAPAPDGQTLALGCDDTIVRLCGADSPPSFIHAFGHSHLISDLCWNPTGENLASASHDCNLRVWQRSPLRCTQVLKGHTNWVWSVDWHPTQDLLASGSVDSTIRLWYPTQSTPVKTLMAQTSWILSVRWHPTGRWLASAAGDFTIGLWNSKTWECTHLLTGHTHWIWCLAWSPNGQYLASGGYDNTVFIWKVEKEVTSLRTLEHPTILSAIAWHPDGELLATSCHDGNIRLWHWQTGQCVTRISGHQGEILTLKFSPDGKRLYSSSQDETWKTWDWQTGTCLASDRLDRPYEGMNISEVRGLTEVRKAALRALGATEGSQPPGDLVRWLRKTEQGRKL

SEQ ID NO: 9518 - protein, 275 aa, Glycine max
MLEGLDEEGCVEEPGHHSEKKRRLSVDQVKALEKNFEVENKLEPDRKLKLAQELGLQPRQVAVWFQNRRARWKTKQLERDYGVLKANYESLKLNYDTLQQDHEALLKEIKELKSRLVQEENNNNTESDVSVKEEMLTTTLCETAIPGSDTKELSYECFNKSDEVGGGSSVFHVDFKDGSSDSDSSAILNEENNNHSPNNNAAISSCGVLQSHGLLLSPSSSSMNNCFQFQKQYQTTTTQYVKMEEHNFLSADEACNFFSDEQAPTLQWYCSEEWS

SEQ ID NO: 9519 - protein, 377 aa, Lilium hybrid division I
MENVKGPVVVTGASGYVGSWLVMKLLQYGYTVRATVRDPRDLRKTKPLLDLPGADERLTIWKADLSEDGSFDEAINGCTGVFHVATPMDFDSEDPENEVIKPTINGVIGIMKSCKKAGTVKRIIFTSSAGTVNVHEHQMPEYDESSWSDIDFIRRVKMTGWMYFVSKILAEKAAWDFAKENDIQFISIIPTLVVGPFITTTMPPSMLTALSLITGNEAHYSILKQIQLVHLDDVCNAHIFLFENPEAIGRYICSSYDTTIYDLARKIKDRYPQYAIPQKFEGIDDQIKPVHFSSKKLIDLGFKYQYTFEEMFDEGIRSCIEKNLIPRQTQERYYADDKLNLCCTKMTNDKLDLGGMKLNSLDEIVRGHNEQVSVALQ

SEQ ID NO: 9520 - protein, 627 aa, Listeria monocytogenes str. 4b H7858
MAYALWSRVLNTNPKNSHWFNRDRFVLSAGHGSMLLYSLLHLSGFKLELEDLKNFRQWESKTPGHPEYRYTDGVDATTGPLGQGIAMAVGMAMAERHLEAKYNKDGFPVVDHYTYALCGDGDLMEGVASEAASYAGHQQLGRLVVLYDSNDISLDGDLDKSFSENVKQRFEAYGWEHLLVKDGNDTAEILAAIEKAKQNTSQPTMIEVKTVIGFGAPNAGTSKVHGAPLGDEGILEAKKAYGWNYEEKFFVPEEVTARFKETIGERGEKAETAWNELFASYKAEYPELAKQLEDSLNNKLPADWDEDLPVYDDSKALASRASSGEVINALAGKIPTIFGGSADLAGSNNTTIKTDGEFTKATPAERNIWFGVREFAMGAALNGMALHGGLQVYGGTFFVFSDYVRAAIRLSAIQHLPVTYVMTHDSIAVGEDGPTHEPIEQLASLRAMPGLSVIRPADGNEVVEAWKLAITSTSTPHVLVLTRQGLPTLPNSAKLTAEGVKKGAYVISPAKGDVPEAIILASGSEVNLAIEAQKELQAQGTDVSVVSVPSFDLFEQQSAEYKESVLPNAVRKRVAVEMGASFGWERYVGLDGKVIGIDKFGASAPGETVIKNYGFTVENVVNTVKSL

SEQ ID NO: 9521 - protein, 511 aa, Oryza sativa
  misc_feature (210)..(210): Xaa can be any naturally occurring amino acid
  unsure (1)..(511): unsure at all Xaa locations
MAAVAVPPLSAWLVAARSSTQAECGGADEHHHHHHQQQHQCCVGGGSSTVMFGPRRRRFLGGGARRRGAARSGMAMAVALQPERRTVEKKPDVKQRRVVITGMGVVTPLGHDPDVFYNNLLDGVSGISEIERFDCSTFPTRIAGEIKSFSTDGWVAPKLARRMDKFMLYLITAGKKALEHGGLTEELRNELDKTRCGVLIGSAMGGMKVXFLVFNDAIEALRVSYKKMNPFCVPFATTNMGSAILAMDLGWMGPNYSISTACATSNFCILNAANHIRRGEADVMLCGGSDAPLIPIGLGGFVACRALSQRNSDPTKASRPWDVDRDGFVMGEGAGVLVLEELEHAKQRGAKIYAEFLGGSFTCDAYHMTEPHPEGRGIILCIEKALADSGVAREEINYVNAHATSTQSGDLKEYEAIVRCFGQNPQLRVNSTKSMTGHLIGAAGGIEAVAAIQAIRTGWVHPNLNLENPEKIVDVGVLVGSQKERCKVNVALSNSFGFGGHNSSILFAPFK

SEQ ID NO: 9522 - protein, 448 aa, Pyrobaculum aerophilum str. IM2
MPKWHWPISPDDVPKIVVEPPGPKALEIVKRDEELIMQSFARWYPLVIARGYGPVVEDVDGNLYVDFNSGIAVTNVGHAHPKVVEAIKRQAELFLHYSLTDFYYEIAVKLAERLVSIAPISGRKKVFFTNSGTESVEGVLKIARGYFKGQRPYVIAFLGAFHGRTYGSMSLTASKPVHRRHFSPLVPNVIHAPYPHPVRCPFKASDPEECGEYALAFIEDWIFKRLVDPSEVSLVIIEPIQGEGGYVVPPKNFIQGLRKLTQKHGILFAVDEVQTGFGRTGKWFAVEHFGVEPDLIATAKAIAAGLPLGAIIGRAEVMSLPRGAHANTFGGNPVAAAAALASIEVIEEEGLLHHAQTLGEELKKFFKDEVGEKHDVRGLGLMIGIELLDERKKPAGYLDEVLLKAFKRGVAVIGAGISTVRVAPPLVIPRDMALRAAALITEILRRYR

SEQ ID NO: 9523 - protein, 326 aa, Sinorhizobium meliloti 1021
MKAIEFRRFGSPDVLQSVDVATPSPGRGEALVRVGAVGVNYFEVLMRQDRYAVTPELPMIPGVEVAGVVVAVGEDLSQDIIGSRVAVPMFAHGRGTGGYAEYVSVDAAMLVPIPDGLSFEAAVALMVQGLTALYLVRQSSLQNKTLLISAAAGGVGSLLVQLARDGGARTIVAVASSQKKLDSARGLGAHLGINYAAPDWTATLREALNGGGVDILYDFVGGEFTHAAIDLLVPAGELVFGALGRFALSGRQVESMFALNQSLRGFALLPLLNLAGLKADLTELFTRAQEGALTVAIDSRFSLDRAADAHRAIESRRTIGKVVLVP

SEQ ID NO: 9524 - protein, 364 aa, Glycine max
MNAMVETYGQEVALHANEKLSIDSFTLMCVIGKGSYAEVILARKKDTGKIYALKILKKKKIEQRNQKEHVRTERNILTEMNHPFLIKMAFAFQTEKKLYFALEYCPGGELFNLLQKKRRFSEDHARFYATQIVLALEHLHKYDIIYRDLKPENVLIDSDGYIRLTDFGLSKTGIQGNKGAYSVCGTPEYLAPEILFQRGHGKAVDWWTLGAILFEMLTGLPPFYTNNREELFQKIKYYALKYPPYLSPNARALLDGLFQKEPSKRLGSGTTGAEEIKAHPWFHGVDWNMIYNKEFKAPFTPVIKNDVDVSNFDAEFTEAPIGSLGSITDTTADVDASYTGWSYCGNELEQQGQGLDRPSTMEIE

SEQ ID NO: 9525 - protein, 520 aa, Mesorhizobium loti MAFF303099
MTGIALSPIGALWGIVGAKTHGTVEMGAALTHRGCYMAMEEGPTFSFGARHSAEIWPISVDDDIAVVYSGFPFVVDEETRTPRYLSAEDIRTEFLRFGADFFRVLCGHYAIAVYCYTRHRLILVRDAFGVQSLSWASSNENFAFSTEYKALLSLPWVERNLDHDAARGFVDDGWAPAGRTFLRHISMVLPGSILIWQNGNLETIHLRQDLCKTRPPFRPISVRHVEMTVRETIGWQANDFSPRYGVMLSSGVDSAVIAATLRRIRRDSEIHTFTVGYGYDDPEIIGASATASVLGTQHHEIIVRPDALTALLTDTIVAVDNPGGYEEFPCLYALHQEARQFVDIIFSGNAADTLFAGMPYHRDLLSTDDAIYRRLCNDLTVRDERLAAQELLAGRHGLNFRMPYAERILIDLALEIPDFQKLSPENDKIIFREAARQILPDEITMRPKRIQHLLYDDSMCSWLAERIEWICSSSLLRTHSLGELEGAAILPPRNLELTEESFKAAWNVVALATWASIYLA

SEQ ID NO: 9526 - protein, 546 aa, Leptospira interrogans serovar lai str. 56601
MAKDIEYNETARRKLLEGVNKLANAVKVTLGPKGRNVVIDKKFGAPTITKDGVTVAKEIELEDPLENMGAQMVKEVSTKTNDVAGDGTTTATILAQSIINEGLKNVTAGANPMSLKRGIDKAVTAAVESIQKRAVKIENKKDIANVASISANNDNTIGNLIADAMDKVGKDGVITVEEAKSIETTLDVVEGMQFDRGYISPYMVTDAESMVATLNDPFILIYDKKISSMKDLIHILEKVAQAGKPLVIISEEVEGEALATIVVNTLRKTISCVAVKAPGFGDRRKSMLEDIAILTGGQVISEDLGMKLENTTLQMLGRANKVTVDKENTTIIEGKGQTKEIQGRIGQIKKQIEDTTSEYDREKLQERLAKLAGGVAVIHVGAATEVEMKEKKARVEDALSATRAAVEEGIVPGGGLTLLKAQEAVGSLKLDGDEATGAKIIFRALEEPIRMITSNAGLEGSVIVEHAKAKKGNEGFNALTMVWEDMIQAGVVDPAKVVRSALQNAASIGSMILTTEVTITDKPDKDAPNPMAGMGGGGMGGMGGMM

SEQ ID NO: 9527 - protein, 168 aa, Sinorhizobium meliloti 1021
MNVRDLIPWGRAQGQVPASYRDNDRNPFLALHREMNRLFDDAFRSFETRLPISGFSGFAGGWPSVEVSDRDKEIKVTAELPGLDEKVVELSLSDGVLSLRGEKRAETEDQENQFSERYYGRFERRIALGYEVDESKVNATFRNGVLTVTLPKTEQAQSKAKRIAINGR

SEQ ID NO: 9528 - protein, 375 aa, Capsicum annuum
MVDANMGAAGGQFPEFPNIVTHGGQYVQYDIFGNFFEITTKYRPPIMPIGRGAYGIVCSVFNAELNEMVAVKKIANAFDNYMDAKRTLREIKLLRHLDHENVIGLRDVIPPPLRREFSDVYIATELMDTDLHQIIRSNQGLSEDHCQYFMYQLLRGLKYIHSANVIHRDLKPSNLLLNANCDLKICDFGLARPNLENENMTEYVVTRWYRAPELLLNSSDYTEAIDVWSVGCIFMELMNRKPLFAGKDHVHQIRLLTELLGTPTESDLSFLRNEDAKRYIRQLPQHPRQQLAKVFPHVNSLAIELVDKMLTLNPTGRITVEEALAHPYLAKLHDAADEPVCPVPFSFDFEQQGIGEEQIKDMIYQEALVLNPEYA

SEQ ID NO: 9529 - protein, 394 aa, Capsicum annuum
MDGPAQQTDTVMAEAAAAQQPAPPSQPVAGIDNIPATLSHGGRFIQYNIFGNVFEVTAKYKPPIMPIGKGAYGIVCSALNSETNEHVATKKIANAFDNKIDAKRTLREIKLLRHMDHENIVAIRDIIPPPQREAFNDVYIAYELMDTDLHQIIRSNQGLSEEHCQYFLYQILRGLKYIHSANVLHRDLKPRNLLLNANCDLKICDFGLARVTSETDFMTEYVVTRWYRPPELLLNSSDYTAAIDVWSVGCIFMELMDRKPLFPGRDHVQQLRLLMELIGTPSEAEMEFLNENAKRYIRQLPLYRRQSFVEKFPHVNPAAIDLVEKMLTFDPRRRLTVEDALAHPYLTSLHDISDEPVCTTPFSFDFEQHALTEEQMKELIYREGLAFNPEYQHM

SEQ ID NO: 9530 - protein, 1067 aa, Arabidopsis thaliana
MAEENRKDRGVSSTVAIPSGLNRIKTRLASSGPRPEDSSDTVLKPPFNRNQKTIVPRGHGRTTGSSKQERKGTKLSRWLASYKPKYSCHPPKYACSSTTSSEEIKLRGKNSGKDEEKMIKISETNPPCSKSMGIKSFSHELGPRGGVQTPYPRPHSYNDLKELLGSLHSRFDVAKETVDKKLDVFVRDVKEAMEKMDPSCPEDREMAEQLLDVARACMEMTSAQLRATCESIVQDLTRKRKQCQAGLVKWLFSQLLFILTHCTRVVMFQKETEPIDESSFRKFKECLERIPALETDWGSTPRVDDSGSGYPEYQRNEAGQKFKRRDKESLESETALDYVVPNDHGNNAAREGYAAAKQEFPSHEPQFDSKVVEQRFYLSDEYEDKMSNEPGKELGGSDYVICRICEEEVPLFHLEPHSYICAYADKCEINCVDVDERLLKLEEILEQIIDSRSLNSFTQAGGLENSVLRKSGVASEGCSPKINEWRNKGLEGMFEDLHEMDTAFIDESYTYPIHLKSHVGAKFCHHATSSSTGSITSVSSTNTPRTSHFDSYWLERHCPEQEDLRLMMDLSDIARCGASTDFSKEGSCDYIMACMQDIQAVLKQGKLKALVIDTFGGRIEKLLCEKYLHARELTADKSSVGNIKESEDVLEHASATPQLLLKDRISIDDFEIIKPISRGAFGKVFLARKRTTGDFFAIKVLKKLDMIRKNDIERILQERNILITVRYPFLVRFFYSFTCRDNLYLVMEYLNGGDLYSLLQKVGCLDEEIARIYIAELVLALEYLHSLKIVHRDLKPDNLLIAYNGHIKLTDFGLSKIGLINNTIDLSGHESDVSPRTNSHHFQKNQEEERIRHSAVGTPDYLAPEILLGTEHGYAADWWSAGIVLFELLTGIPPFTASRPEKIFDNILNGKMPWPDVPGEMSYEAQDLINRLLVHEPEKRLGANGAAEVKSHPFFQGVDWENLALQKAAFVPQPESINDTSYFVSRFSESSCSDTETGNNSGSNPDSGDELDECTNLEKFDSPPYYLSLINFSFKNLSQLASINHDVLLQKDPAKGGGDSPFKSHGT

SEQ ID NO: 9531 - protein, 784 aa, Stevia rebaudiana
MNLSLCIASPLLTKSSRPTALSAIHTASTSHGGQTNPTNLIIDTTKERIQKLFKNVEISVSSYDTAWVAMVPSPNSPKSPCFPECLNWLINNQLNDGSWGLVNHTHNHNHPLLKDSLSSTLACIVALKRWNVGEDQINKGLSFIESNLASATDKSQPSPIGFDIIFPGLLEYAKNLDINLLSKQTDFSLMLHKRELEQKRCHSNEIDGYLAYISEGLGNLYDWNMVKKYQMKNGSVFNSPSATAAAFINHQNPGCLNYLNSLLDKFGNAVPTVYPLDLYIRLSMVDTIERLGISHHFRVEIKNVLDETYRCWVERDEQIFMDVVTCALAFRLLRIHGYKVSPDQLAEITNELAFKDEYAALETYHASQILYQEDLSSGKQILKSADFLKGILSTDSNRLSKLIHKEVENALKFPINTGLERINTRRNIQLYNVDNTRILKTTYHSSNISNTYYLRLAVEDFYTCQSIYREELKGLERWVVQNKLDQLKFARQKTAYCYFSVAATLSSPELSDARISWAKNGILTTVVDDFFDIGGTIDELTNLIQCVEKWNVDVDKDCCSEHVRILFLALKDAICWIGDEAFKWQARDVTSHVIQTWLELMNSMLREAIWTRDAYVPTLNEYMENAYVSFALGPIVKPAIYFVGPKLSEEIVESSEYHNLFKLMSTQGRLLNDIHSFKREFKEGKLNAVALHLSNGESGKVEEEVVEEMMMMIKNKRKELMKLIFEENGSIVPRACKDAFWNMCHVLNFFYANDDGFTGNTILDTVKDIIYNPLVLVNENEEQR

SEQ ID NO: 9532 - protein, 323 aa, Sporidiobolus salmonicolor
MVGTTTLNTGASLELVGYGTWQAAPGEVGQGVKVAIETGYRHLDLAKVYSNQPEVGAAIKEAGVKREDLFITSKLWNNSHRPEQVEPALDDTLKELGLEYLDLYLIHWPVAFPPEGDITQNLFPKANDKEVKLDLEVSLVDTWKAMVKLLDTGKVKAIGVSNFDAKMVDAIIEATGVTPSVNQIERHPLLLQPELIAHHKAKNIHITAYSPLGNNTVGAPLLVQHPEIKRIAEKNGCTPAQVLIAWAIVGGHSVIPKSVTPSRIGENFKQVSLSQEDVDAVSKLGEGSGRRRYNIPCTYSPKWDINVFGEEDEKSCKNAVKIK

SEQ ID NO: 9533 - protein, 230 aa, Arabidopsis thaliana
  misc_feature (113)..(113): Xaa can be any naturally occurring amino acid
  unsure (1)..(230): unsure at all Xaa locations
MMGSVELNLRETELCLGLPGGDTVAPVTGNKRGFSETVDLKLNLNNEPANKEGSTTHDVVTFDSKEKSACPKDPAKPPAKAQVVGWPPVRSYRKNVMVSCQKSSGGPEAAAFXVKVSMDGAPYLRKIDLRMYKSYDELSNALSNMFSSFTMGKHGGEEGMIDFMNERKLMDLVNSWDYVPSYEDKDGDWMLVGDVPWPMFVDTCKRLRLMKGSDAIGLAPRAMEKCKSRA

SEQ ID NO: 9534 - protein, 519 aa, Trametes sp. I-62
MAKLQFSNFFVTLAVVTGALAAVGEADLTITNAVVAPDGFSRDAVVVNGVFPGPLITGKKGDRFQLNVIDNLTNHTMLKSTSIHWHGFFQAGTNWADGPAFVNQCPISTGHAFLYDFHVPDQAGTFWYHSHLSTQYCDGLRGPIVVYDPLDPHAFRYDVDDESTVITLSDWYHTAATLGLGSRLGADATLINGLGRSSSTPTANVTVINVQHGKRYRFRLVSLSCDPNHTFSIDGHNLTVIEVDGVNSKPLTVDSIQIFAAQRYSFVLNANQTVGNYWIRANPNFGTTGFAGGINSAILRYQGAPIIEPTTVQTTSVIPLVETNLHPLVPTIVPGLPVSGGVDKAINLGFNFNGTNFFINNATFTPPTVPVLLQILSGASTAQDLLPPGSVYPLPAHSSIEITLPATTLAPGAPHPFHLHGHVFAVVRSAGSTAYNYVDPIFRDVVSTGTPAAGDNVTIRFHTDNPGPWFLHCHIDFHLEAGFAIVFAEDVADVKAANPVPKAWSDLCPTYDALAEGDL

SEQ ID NO: 9535 - protein, 157 aa, Chlamydomonas reinhardtii
MALSNYVFGNSAADPFFTEMDRAVNRMINNALGVAPTSAGKAGHTHAPMDIIESPTAFELHADAPGMGPDDVKVELQEGVLMVTGERKLSHTTKEAGGKVWRSERTAYSFSRAFSLPENANPDGITAAMDKGVLVVTVPKREPPAKPEPKRIAVTGA

SEQ ID NO: 9536 - protein, 184 aa, Lilium hybrid division I
MDRKVGTNEDVEVRKGPWTMEEDLILINYIANHGDGVWNTLARSAGLKRTGKSCRLRWLNYLRPDVRRGNITPEEQLLIMELHDRWGNRWSKIAKELPGRTDNEIKNFWRTRVQKKSKNGESSEGQISMLSDETSAMQMEDVDVGVSQTSYDQGQTSNNLDAFEIPFEPGDNLLSVEELWAMQY

SEQ ID NO: 9537 - protein, 520 aa, Trametes sp. I-62
MSRFHSLLTFIVASLASSALASIGPVADMTISNAEVSPDGFARQAVVVNGVTPGPLVKGNMGDRFQLNVIDNLTNHTMLKSTSIHWHGLFQHGTNWADGPAFVNQCPVSAGHSFLYDFQVPGQAGTFWYHSHLSTQYCDGLRGPLVVYDPHDPHKSRYDVDNDDTVITLADWYHVAAKRRSAFPLGADATLINGLGRSPTTPSADLAVINVTQGKRYRFRLVSLSCDPNHTFSIDGHNMTIIEVDSVNSQPLVVDSIQIFAAQRYSFVLNANQAVDNYWVRANPSFGNVGFSGGINSAILRYAGAPAIEPTTNQTTSVIPLNEVNLHPLAPTPVPGKAVAGGVDTPINMAFSFNGTNFFINGASFVPPTVPVLLQILSGAQSAQDLLPSGSVYVLPSNASIEISFPATAAAPGVPHPFHLHGHTFAVVRSAGSTEYNYDNPIFRDVVSTGTPAAGDNVTIRFQTNNPGPWFLHCHIDFHLEAGFAVVMAEDTPDVKAVNPVPQSWSDLCPIYDALDASDQ

SEQ ID NO: 9538 - protein, 779 aa, Neurospora crassa
MSESDKYELLEKIGHGSFGIIRKVRRKADGMILCRKEISYLKMSQKEREQLHAEFSILSTLRHPNIVGYYHREHLKATQDLHLYMEYCGNGDLGRVIRNLIKNNQYAEESFVWSIFSQLVTALYRCHYGVDPPEVGKTVLGLGSTARPKPPSGGMTILHRDLKPENVFLGEDNSVKLGDFGLSKVMQSHDFASTYVGTPFYMSPEICAAEKYTLKSDIWSLGCIIYELCAREPPFNAKTHYQLVQKIKEGKIAPLPSVYSGELFATIKDCLRVNPDRRPDTATLLNLPIVRLMRKEKEVVEFSRTLRTKEETLNKRIRELDSKLSALETEKSSIRAEIDASLRREWEVKARLEIDRLVAQEIESLQQKFEQEVQARVEAELQRHGRGPMFNSHGQQGSFSSTAATLVSDYNLSSVGSGDGDFPSTTDITDISIAESTDGSDITKKIPRTPFHRAQTYSSAPAESVLGTPMDIEMASPSPITIASLSLSPRRMALTKAPTTNPRMIFGEEPTSTDKSNWEVPRETEMIDSGDESEAEALVPSPKRITKSSKNPFSTVTTRSRPSLNSQQNSNVLPIHGLRSKQTLATRSKTVSGVSSIGQHPLRSAPSAPSLRDRKPSPTRRLSRIPSVTGVGRRLSANNINNSSNGGSDAPSSTVTSNITVRTRGLKRMSSTCDESSFSQQQNNQPQQSLPQAPPLKKIGLMAAKNIRGSSLVELHQARAGGRPISAIISNEAKLRAFKEHATIAASAVDSSSSSSSSSGQSQLPTRPRSQPPTDNRKL

SEQ ID NO: 9539 - protein, 421 aa, Arabidopsis thaliana
MDALTSSLVRSPIVPSRTSDNGSGSMFLTASGPGFTRSGSSRLQLRLRQNASARSSRSLQSLTTTAKTRRSFVVRASSASNDASSGSSPKPIAPLQLQSPAGQFLSQILVSHPHLVPAAVEQQLEQLQTDRDSQGQNKDSASVPGTDIVLYRRIAELKENERRRTLEEILYALVVQKFMEANVSLVPSVSPSSDPSGRVDTWPTKVEKLERLHSPEMYEMIHNHLALILGSRMGDLNSVAQISKLRVGQVYAASVMYGYFLKRVDQRFQLEKTMKILPGGSDESKTSVEQAEGTATYQAAVSSHPEVGAFAGGVSAKGFGSEIKPSRLRSYVMSFDAETLQRYATIRSREAVGIIEKHTEALFGKPEIVITPEGTVDSSKDEQIKISFGGMKRLVLEAVTFGSFLWDVESHVDARYHFVLN

SEQ ID NO: 9540 - protein, 354 aa, Petroselinum crispum
MKKGNLGPGLKLSLPPPDEDSLTKFLTQSGTFMDGDLLVNRDGVRIVSQTDVQAAPPIQATDNQLSLADFDAIKVVGKGSGGIVRLVQHKWTGQFFALKVIQMNIQESARKQIAQELKINQSSQCLNVVVCYQSFYDNGAISIILEYMDGGSLADFLKIVKNIPEPYLAAIFKQVLKGLWYLHHEKHIIHRDLKPSNLLINHRGEVKITDFGVSAILATTSGQANTFVGTYNYMSPERISGGQHGYSSDIWSLGLVLLECATGYFPYSPPEQDEGWSNVFELMDTIVNQAPPCAPPDEFSPEFCSFVSACVQKDPRKRPSANELLRHPFINMYEHLNIDLAGYFTEAGSPLATL

SEQ ID NO: 9541 - protein, 146 aa, Medicago sativa
MASDSFTDKNAVFRKLKTKSENKSCFDCNAKNPTWASVTYGIFLCIDCSAVHRSLGVHISFVRSTNLDSWSPEQLKMMSFGGNSRAQVFFRQHGWNGDGKVEAKYTSRAAELYKQLLSKEVAKSMSEEAALSAPPAASSQSAQGAN

SEQ ID NO: 9542 - protein, 366 aa, Aeropyrum pernix K1
MVLKIVYHEDFLKHSPDPYDHPENPSRLVEAVRGLEESGVYKHLEAVTPPVGDVGLYTRVHSPAYLRHVLSTAESGLDWLDPDTYVGPGTLVALKRLGGASVEVYNIVRSGGEALLLGRPPGHHAGIRGRALGAPTAGFCIVNTAALIARMLSEQGKTVILDFDLHHGNGTQEIFYDDPDVYHVDVHQDPTTIYPGTGFPEDIGEGDAKGTKINIILPPNSGDDIYVSAARLALGILERLEPDYIVVSAGFDAYRGDNAFTVMRGGTAMYYLIGSELSRMARRGVAAVLEGGYGVGLRRALPAFAAGLANLENPYPDTEEESPPSVKRMYVAGLKRLAAAIKGLNRVVEEAVLEELERGGWEKRYG

SEQ ID NO: 9543 - protein, 422 aa, Candida albicans SC5314
MTDYSNSKSLFLGFDLSTQQLKIIITDENLTPLDTYNVEFDSQFKSKYTKINKGVITGDDGEVISPVAMWLDAINYVFDEMQKSKFPFDKVVGISGSGQQHGSVYWSGEANELLNDLIPCKELSSQLQDAFSWGYSPNWQDHSTVKEAEDFHKAIGKEHLAEISGSRAHLRFTGLQIRKFITRSHSKEYESTSRISLVSSFVTSILLGEIAPLEESDACGMNLYDIQKSQYDEELLALAAGVHTEIDNVSKEDPKYKKSIDQLKQKLGEISPITYKSSGKISKYFVDTYGFNSDCKIYSFTGDNLATILSLPLQPNDCLISLGTSTTVLIITSNYEPSSQYHLFKHPTLPDHYMGMLCYCNGSLAREKARDQVNKKHNVSDNKSWDKFNEILDHNKDFNGKLGIYFPLGEIIPQAPAQTIRA

SEQ ID NO: 9544 - protein, 257 aa, Triticum aestivum
MRIQCDACEGAAATVVCCADEAALCARCDVQIHAANKLASKHQRLPLEDAAAAAGLPRCDVCQDKPAFVFCVDDRALFCRDCDDSIHVQGTLSANHQRYIATGIRVGFSSVCSAHADTHPPPSKPKAPQIAAVPRAAPVSAAAQEVPSSPFLPSSGWAVEDLLQFSDYESSDKKGSPSPLGFKELEWFADIDLFHDDQAPAPKWGGTAAEVPELFASPQPASNAGFYKTAGARQSKKARVELPDDDDEDYLIVPDLG

SEQ ID NO: 9545 - protein, 434 aa, Xanthomonas campestris pv. campestris str. ATCC 33913
MRHRLLSSALLLALPTLAAAQAAPRPEVQAAAAPLQAKVVQWRRDFHQHPELSNREERTAATVAAQLRKLGLKPRTGIAHHGVVAIIKGGKPGPKIALRADMDALPVTEQTGLPFASKATSQYRGETVGVMHACGHDAHTAILLGVAEALVGMREQLPGEVMLIFQPSEEGAPGNEEGGASLMLKEGLFADFKPQAVFGLHVFSSVQAGKIAVRGGPLMAASDRFAIKMIGRQTHGSAPWNGIDPIVASADMIGTAQTVVSRRANLSKQPAVVSFGAIKGGIRYNIIPDDVEMVGTIRTFDEGMRQQIFADLKTVAEHTAAAHGAKVEAQVPDQDGNPATVNDPALTAKMLPSLQAVVGADNVYEPPLQMGAEDFSFYAQQVPSMFFFVGSTAKGIDPATAPSNHSPQFLLDESALDVGLRALLQVSLDYLQQG

SEQ ID NO: 9546 - protein, 260 aa, Mycobacterium tuberculosis
MSGRLTGKVALVSGGARGMGASHVRAMVAEGAKVVFGDILDEEGKAMAAELADAARYVHLDVTQPAQWKAAVDTAVTAFGGLHVLVNNAGILNIGTIEDYALTEWQRILDVNLTGVFLGIRAVVKPMKEAGRGSIINISSIEGLAGTVACHGYTATKFAVRGLTKSTALELGPSGIRVNSIHPGLVKTPMTDWVPEDIFQTALGRAAEPVEVSNLVVYLASDESSYSTGAEFVVDGGTVAGLAHNDFGAVEVSSQPEWVT

SEQ ID NO: 9547 - protein, 463 aa, Sinorhizobium meliloti
MSAFDYDLFVIGGGSGGVRSGRLAAALGKKVAIAEEFRYGGTCVIRGCVPKKLYVYASQFAEHFEDAAGFGWTVGESRFDWAKLVAAKEQEIARLEGLYRKGLANAGAEILDTRAELAGPNTVKLLASGKTVTAERIVIAVGGHPSPHDALPGHELCITSNEAFDLPALPESILIAGGGYIAVEFANIFHGLGVKTTLIYRGKEILSRFDQDMRRGLHAAMEEKGIRILCEDIIQSVSADADGRRVATTMKHGEIVADQVMLALGRMPNTNGLGLEAAGVRTNELGAIIVDAFSRTSTPGIYALGDVTDRVQLTPVAIHEAMCFIETEYKNNPTSPDHDLIATAVFSQPEIGTVGITEEEAARKFQEIEVYRAEFRPMKATLSGRKEKTIMKLVVNAADRKVVGAHILGHDAGEMAQLLGISLRAGCTKDDFDRTMAVHPTAAEELVTMYQPSYRVRNGERVG

SEQ ID NO: 9548 - protein, 409 aa, Pseudomonas pseudoalcaligenes
MSKTIPIVDAQHAGSAYQHVPGHPDPQLSAVAKGTPTGEYLRRYWQPVALSADVTDRPQMVRILGEDLVLFRDKAGRPGLLYPRCMHRGTSLYYGHVEEAGIRCCYHGWLFAVDGTCLNQPCEPEGGLRREAARQPWYPVEERYGLVFAYMGPPEKKPVLPRYDILEDLEEGEFIEVISGGFVSYADHVEDPNVPYHWLQNWENIMDPYHVYILHSTFSGIQFAENFKILPRVDFEAVDGGVIYHAWRDLEDGRQLERINSALFPNISAIPMIDLSPGQGRWIGWHVAVDDQHYRGFFAARTRQPGNFAPIKMHNGKSWTELSEQEKQDFPGDFEAQFGQGRVTLHGEEHLATSDHGIALLRRQMKQQIAIVQQGGDPAGVHFNEADALVRIRSGNFYTTSDKTETAAD

SEQ ID NO: 9549 - protein, 473 aa, Sinorhizobium meliloti 1021
MWTTLPPGASISPEVVMNKHFDAVIIGAGQAGPSLAGRLSGVGKTVALIERKLFGGTCVNTGCMPTKAMVASAYAIHTARRGAEYGMTTGPVSVDFGRVMARKEKVRLDARSGVEKWLKGMKNCTVFEGHARFEGPREVRIGDELISGERIFVNVGGRAAVADLPGVNDVPYLTNSSIMDLAELPEHLVVVGGSYIGLEFAQMFRRFGSDVTVIEKGARLIGREDPEVSDAIREILENEGVRIRTNAECIRFSNHADSVAVGVDCTSGEPEVSGSHVLLATGRHPNTDDLGLDKAGVKTDERGYIEVDDSLRTNVPHIFAMGDCNGRGAFTHTSYNDFEIVAANLIDNDPRRVSDRIQTYALYIDPPLGRAGMTETEARKKGHKLLVGTRPMTRVGRAVEKGETQGFMKVIVDAETDEILGASILGTGGDEAVQSILDVMYAKKPYTMIARAVHIHPTVSELIPTVFGDLSSA

SEQ ID NO: 9550 - protein, 260 aa, Mycobacterium tuberculosis
  misc_feature (19)..(19): Xaa can be any naturally occurring amino acid
  misc_feature (27)..(27): Xaa can be any naturally occurring amino acid
  misc_feature (47)..(47): Xaa can be any naturally occurring amino acid
  misc_feature (127)..(127): Xaa can be any naturally occurring amino acid
  misc_feature (190)..(190): Xaa can be any naturally occurring amino acid
  unsure (1)..(260): unsure at all Xaa locations
MSGRLTGKVALVSGGARGXGASHVRAXVAEGAKVVFGDILDEEGKAXAAELADAARYVHLDVTQPAQWKAAVDTAVTAFGGLHVLVNNAGILNIGTIEDYALTEWQRILDVNLTGVFLGIRAVVKPXKEAGRGSIINISSIEGLAGTVACHGYTATKFAVRGLTKSTALELGPSGIRVNSIHPGLVKTPXTDWVPEDIFQTALGRAAEPVEVSNLVVYLASDESSYSTGAEFVVDGGTVAGLAHNDFGAVEVSSQPEWVT

SEQ ID NO: 9551 - protein, 256 aa, Zea mays
MNALAATSRNFRQAARLLGLDSKLEKSLLIPFREIKVECTIPKDDGTLASFVGFRVQHDNARGPMKGGIRYHPEVDPDEVNALAQLMTWKTAVAAVPYGGAKGGIGCSPGDLSRSELERLTRVFTQKIHDLIGTHTDIPAPDMGTNSQTMAWIFDEYSKFHGHSPAVVTGKPIDLGGSLGRDAATGRGVMYATEALLAEYGKSISGSTFVIQGFGNVGSWAAQLIHEKGGKVIALGDVSGTIRNKAGIDVPALMKH

SEQ ID NO: 9552 - protein, 784 aa, Stevia rebaudiana
MNLSLCIASPLLTKSNRPAALSAIHTASTSHGGQTNPTNLIIDTTKERIQKQFKNVEISVSSYDTAWVAMVPSPNSPKSPCFPECLNWLINNQLNDGSWGLVNHTHNHNHPLLKDSLSSTLACIVALKRWNVGEDQINKGLSFIESNLASATEKSQPSPIGFDIIFPGLLEYAKNLDINLLSKQTDFSLMLHKRELEQKRCHSNEMDGYLAYISEGLGNLYDWNMVKKYQMKNGSVFNSPSATAAAFINHQNPGCLNYLNSLLDKFGNAVPTVYPHDLFIRLSMVDTIERLGISHHFRVEIKNVLDETYRCWVERDEQIFMDVVTCALAFRLLRINGYEVSPDPLAEITNELALKDEYAALETYHASHILYQEDLSSGKQILKSADFLKEIISTDSNRLSKLIHKEVENALKFPINTGLERINTRRNIQLYNVDNTRILKTTYHSSNISNTDYLRLAVEDFYTCQSIYREELKGLERWVVENKLDQLKFARQKTAYCYFSVAATLSSPELSDARISWAKNGILTTVVDDFFDIGGTIDELTNLIQCVEKWNVDVDKDCCSEHVRILFLALKDAICWIGDEAFKWQARDVTSHVIQTWLELMNSMLREAIWTRDAYVPTLNEYMENAYVSFALGPIVKPAIYFVGPKLSEEIVESSEYHNLFKLMSTQGRLLNDIHSFKREFKEGKLNAVALHLSNGESGKVEEEVVEEMMMMIKNKRKELMKLIFEENGSIVPRACKDAFWNMCHVLNFFYANDDGFTGNTILDTVKDIIYNPLVLVNENEEQR

SEQ ID NO: 9553 - protein, 408 aa, Methanocaldococcus jannaschii DSM 2661
MDAIILCAGKGERLRPLTENRPKPMIPIAGKPILQHIIEKVEDLVDNIYLIVKYKKEKIVDYFKNHPKIKFLEQGEIDGTGQAVLTAKDYVDDEFLVINGDIIFEDDLEEFLKYKYAVAVKEVKNPENFGVVVLDDENNIIELQEKPENPKSNLINAGIYKFDKKIFELIEKTKISERGERELTDAIKHLIKEEKVKGIKLNGYWNDVGRPWDILEANKYLLDKINTDIKGKIEENVVIKGEVIIEEGAIVKANSVIEGPAIIKKGAVVGPLAYIRPYTVLMENTFVGNSSEVKASIIMKNTKIPHLSYVGDSIIGENCNFGCNTITANLRFDDKPVKVNIKSKRVESVRKLGVIMGDNVKTGIQVSFMPGVKVGSNCWIGASCLIDRDIESNTFVYKRDELIFRKLK

SEQ ID NO: 9554 - protein, 344 aa, Daucus carota
MANYNFKYIFIFLLLISISAPAVLSVVEDCGWEEDNSCVNKMKARPLKIIADVSQLINSMIGVCYYLVTRSIPALSPEWNLFVICIVKKFALGIILATGFMHVLPDSFDMLSSSCLKEHPWHKYPFTPMLSRIVTMAFDSIAESLASKRHNGGVVNPEGDTEMAVAGNHDHSHHHHGSLSTKEGLDGKTLLFYRVGTMVLLGIIVHSIVIGLSLGASSNTCTNKGLVSALCFTQMFEGMGLGGCILQAEYKFMKKAIMACFFAVFWIALGILSTTYEENSPRALVTVGLLNASSLGLLIYMACVDLLAADFMGNKLQGSWKSQIKSYMAVLLGAMGMSVMAIWA

SEQ ID NO: 9555 - protein, 561 aa, Oryza sativa
MESTMKGIRGDNAPCVLDLDDAATVGGGVGDTYGEDCATEEQLVTPWTVSVASGYNLLRDPRYNKGLAFNERERETHYLRGLLPPAIVSQELQERKIMHNIRQYQLPLQKYMAMMDLQEGNERLFYKLLIDNVEELLPVVYTPTVGEACQKYGSIFSRPQGLYISLKEKGKILEVLKNWPERSIQVIVVTDGERILGLGDLGCQGMGIPVGKLALYTALGGVRPSAEYADFLHEFMTAVKQNYGEKVLIQFEDFANHNAFELLAKYGTTHLVFNDDIQGTASVVLSGLVAALKLVGGSLSEHSYLFLGAGEAGTGIAELIALEISRQTKAPIEECRKKIWLVDSKGLIVSSRKETLQHFKKPWAHEHEPVGNLLDAVKTIKPTVLIGTSGKGQTFTQEVVEAISSFNERPVIFALSNPTSQSECTAEQAYTWSKGRAVFASGSPFDPVEYDGKIYVPGQANNAYIFPGFGLGVVMSGAIRVHDDMLLAASEALAQQVTQENFDKGLTYPPFSNIRKISAHIAANVAAKAYELGLASRRPRPKDLVKYAESCMYSPLYRNYR

SEQ ID NO: 9556 - protein, 119 aa, Brassica napus
MFFTSRLLSLPRRNMVLSRTSIDSNDTVSSTFGSRYDLIALPTYHIGDSSILVDAAYHIIKYDLMRASNPRLNLVSFVTTCMESTCDKLIMDFINRSYVDMDQYPVITELNKRCLNMIT

SEQ ID NO: 9557 - protein, 579 aa, Phaseolus vulgaris
MCGILAVLGCSDSSQAKRVRVLELSRRLKHRGPDWSGLHQYGDCYLAHQRLAIVDPASGDQPLFNEDKTIAVTVNGEIYNHEELRKQLPNHTFRTGSDCDVIAHLYEEHGENFVDMLDGIFSFVLLDTRDNSFIVARDAIGVTSLYIGWGLDGSVWISSELKGLNGDCEHFESFPPGHLYSSKEREFRRWYNPPWFSEAIPSAPYDPLALRHAFEKAVIKRLMTDVPFGVLLSGGLDSSLVAAVTARYLEGTNAAKHWGTKLHSFCVGLEGAPDLKAAREVADYIGTVHHEFHYSVQDGIDAIEDVIYHIETYDVTTIRASIPMFLMSRKIKSLGVKWDICGEGSDEIYGGYLYFHKAPNKEEFHQETCRKIKALHKYDCLRANKSTFAWGLEARVPFLDKEFIEVAMNVNPEYKMIKKEEGRIEKWVLRRAFDDGEHPYLPKHILYRQKEQFSDGVGYGWIDGLKGHAEKHVTDRMMLNAANIFPFNTPTTKEAYYYRMIFERFFPQDSARLSVPGGPSVACSTAKAVEWDAAWSNNLDPSGRAALGVHASAYGNQVKAVEPEKTIPKMEVSPLGVAI

SEQ ID NO: 9558 - protein, 161 aa, Lactobacillus salivarius subsp. salivarius
LLNQSKDTIIYLCVLKKQHLFQSDKPESIETTLKNAADGRDIRLIVVTDAEGILGIGDWGVDGVDIAIGKLMVYTAAAGINPAQVLPVSIDAGTNNKELLNDPLYLGNKHKRVYGEKYNELIDKFVAAVQKLFPESMLHFEDFGRSNADVILNKYKDKILT

SEQ ID NO: 9559 - protein, 316 aa, Arabidopsis thaliana
MATIVSPPHFSPVEDAENIKAACQGWGTNENAIISILGHRNLFQRKLIRQAYQEIYHEDLIHQLKSELSGNFERAICLWVLDPPERDALLANLALQKPIPDYKVLVEIACMRSPEDMLAARRAYRCLYKHSLEEDLASRTIGDIRRLLVAMVSAYKYDGEEIDEMLAQSEAAILHDEILGKAVDHEETIRVLSTRSSMQLSAIFNRYKDIYGTSITKDLLNHPTNEYLSALRAAIRCIKNPTRYYAKVLRNSINTVGTDEDALNRVIVTRAEKDLTNITGLYFKRNNVSLDQAIAKETSGDYKAFLLALLGHGKQL

SEQ ID NO: 9560 - protein, 162 aa, Lactobacillus rhamnosus
VVADSIEQYNELFLDPQNAAFVSVDAPEDIEATLKNAADGRDIRLVVVTDAEGILGMGDWGVNGVDIAIGKLMVYTAAAGIDPSQVLPVSIDAGTNNQKLLDDPLYLGNRHKRVSGEQYYDVIDKFVAAEQQLFPDSLLHFEDFGRDNAQVILDKYKDQIAT

SEQ ID NO: 9561 - protein, 548 aa, Buchnera aphidicola (Myzus persicae)
MAAKDVKFGNEARIKMLRGVNVLADAVKVTLGPKGRNVVLDKSFGAPSITKDGVSVAREIELEDKFENMGAQMVKEVASKANDAAGDGTTTATLLAQSIVNEGLKAVAAGKNPMDLKRGIDKAVISAVEELKNLSVPCSDSKAITQVGTISANADEKVGALIAEAMEKVGNDGVITVEEGTGLQNELEVVKGMQFDRGYLSPYFINKPETGIVELENPYILMADKKISNVREMLPILESVAKSGKPLLIISEDLEGEALATLVVNSMRGIVKVAAVKAPGFGDRRKAMLQDISILTGGSVISEELAMELEKSTLEDLGQAKRVVISKDTTTIIGGVGEKHTIQSRISHIRQEIQEATSDYDKEKLNERLAKLSGGVAVLKVGAATEVEMKEKKARVEDALHATRAAVEEGVVAGGGVALVRVAGKTSNLRGQNEDQNVGIRVALRAMEAPLRQIVSNSGEEPSVVTNNVKDGKGNYGYNAATDEYGDMIDFGILDPTKVTRSALQYAASVAGLMITTECMVTDLPKEDKSSDSNSSPAGGMGGMGGMM

SEQ ID NO: 9562 - protein, 178 aa, Lactobacillus brevis
NPVVYDPTVADSIEQYSHLFTDPQNAAFISVDAPEDIEATLKNAAGDRDIRLVVVTDPKNFGYGPTGVLTGLDIAVGKLMVYTAAAGMIQHKSCQLALMAGTNNQTLLNDRYYLGNHHERVYGDKYHAVIDQFVAAEQKLFPESLLHWEDFGRSNAQVILDKYKDKIATFNDDIQGTG

SEQ ID NO: 9563 - protein, 210 aa, Brassica juncea
MLCSEYESPVTLGGEYCPKLASSCPKKPAGRKKFRETRHPVYRGVRLRKSGKWVCEVREPNKKSRIWLGTFLTAEIAARAHDVAAIALRGKSACLNFADSAWRLRIPETTCPKEIQKAAAEAAVAFQAELNDTTADHGLDVEETIVEAIFTEESSEGFYMDEEFMFGMPTLWASMAEGMLLPPRPYNSDLTMTSTEMLTCPFGVMSTCNH

SEQ ID NO: 9564 - protein, 180 aa, Lactobacillus fructivorans
NSVVYDPTIADSIENYSRLYVNPQNAAFLSIDHDDPETIRESLKNTAAGRNIKLIVVTDGEGILGIGDWGTQGIDIPVGKLMVYSAAAGIDPSEVLPVVMDVGTTNKSLLDNPLYLGNHQDRDYGQKYYDFVDKFVKEAEDLFPNLYLHFEDFGRRNASNILDKYKDDYLVFNDDIQGTG

SEQ ID NO: 9565 - protein, 725 aa, Dianthus caryophyllus
MPAVACYVDTSAAVYGGAGALSLPASEINFSGVPPTTTSTTVNQPPPPQQWSPSLSAELYRIDRWGPPYFAVNSSGNVTVKPFGDATLPHQEIDLLKVVKKVSDSKSSSGLGLHLPVIIRFPDVLKHRLESLQSAFDFAVRTHGYGSHYQGVYPVKCNQDRYIVEDIVEFGSGFRFGLEAGSKPELLMAMSSLCKGSPDSLLVCNGFKDAEYISLAIIGRKLGLNTVIVIEQEEEVDMAIELSRKMGIRPVVGVRAKLRTKHSGHFGSTSGEKGKFGLTTTQILRVVRKLENFGMLDCLQLLHFHIGSQIPTTTLLSDGVAEASQVYCELTRLGAHMRVIDIGGGLGIDYDGSKSGDSDLSVGYTLEEYASAVVGTVMSVCDRKGVKSPVICSESVRAIVSHHSILVFEAVSSSSSASPPMPGSTLALDYLVDGLTDEVKGEYRSLTAAAMRGEYESCLMYSGMLKQRCVELFKDGCLGMEQLAAVDGLCELVSKALGVADGVCTYNVNLSVFTSIPDFWGIGQLFPIMPIHRLDQQPKARGILSDLTCDSDGKIDKFIGDESSLPLHELSGGEGYYLGMFLGGAYEEALGGVHNLFGGPSVVRVQQSDGPQSYAVTRAVPGPSSSDVLRVMHHEPELMFQTLKHRAEECDNDYTAGPLADMLAQSFNSTPYLVPGHATGSCGFSNGSGLVNGCREYFYGVDDGCNAAAVDAAAGEEEQWSYVCA

SEQ ID NO: 9566 - protein, 502 aa, Arabidopsis thaliana
MGKVLVMLTAAAAVVACSVATVMVRRRMKGRRKWRRVVGLLKDLEEACETPLGRLRQMVDAIAVEMQAGLVSEGGSKLKMLLTFVDDLPNGSETGTYYALHLGGSYFRIIKVHLGGQRSSLEVQDVERHSIPTSLMNSTSEVLFDFLASSLQRFIEKEGNDFSLSQPLKRELAFTFSFPVKQTSISSGVLIKWTKGFAISEMAGEDIAECLQGALNKRGLDIRVAALVNDTVGALSFGHFHDPDTIAAVVFGTGSNACYLERTDAIIKCQNPRTTSGSMVVNMEWGNFWSSRLPRTSYDLELDAESMNSNDMGFEKMIGGMYLGDIVRRVILRMSQESDIFGPISSILSTPFVLRTNSVSAMHEDDTSELQEVARILKDLGVSEVPMKVRKLVVKICDVVTRRAARLAAAGIAGILKKVGRDGSGGGRRSDKQIMRRTVVAVEGGLYLNYRMFREYMDEALRDILGEDVAQHVVVKAMEDGSSIGSALLLASSQSVQTIPSV

SEQ ID NO: 9567 - protein, 453 aa, Bacillus thuringiensis serovar konkukian str. 97-27
MKETNSFSQKLKQFALLFFPIFVTQMSLFAMSFFDTTMSGHASPIDLAGVAIGTSIWIPVSTGLTGILMATTPIVAQLVGSKKKEDVPHVVIQAVYLAICASFVVILIGLFTVTPILNGMRLEEPVERIAAQFLSIIAIGIIPLFTYTVLRGFIDALGKTRTTMIITLLSLPINVVLNYVLIFGNFGFPKLGGVGAAIASAATYWCILIITVMIIRTKEPFASFNIFKQLYRPSLSSWKEFLKLGVPIGFAIFFETSIFAAVTLMMSNFSTTTIAAHQAAMNFASLLYMTPLSLAMAMTIAVGFEVGAKRYNNAKQYGFIGIGLALAFALLYSILLYFFDDEIASIYTTDIQVHHLAKEFLIFAILFQISDAIATPVQGALRGYKDVNVALIMTLIAYWVIGLPLGYILATYTDWAAKGYWIGLIIGLAFGATFLLIRLFQVQRKYTTQNSRS

SEQ ID NO: 9568 - protein, 495 aa, Zea mays
ITMDPTKFRPSSSHDTTVTTTNAGAPVWNDNEALTVGPRGPILLEDYHLIEKVAHFARERIPERVVHARGASAKGFFECTHDVTSLTCADFLRAPGVRTPVIVRFSTVIHERGSPETIRDPRGFAVKFCTREGNWDLLGNNFPVFFIRDGIKFPDVIHAFKPNPRSHVQEYWRVFDFLSHLPESLHTFFFLFDDVGVPSDYRHMEGFGVNTYTFVSAAGKAQYVKFHWKPTCGVRCILTHEEAALVGGRNHSHATQDLYDSIAAGSFPEWTLYVQVMDPDTEEQYDFDPLDDTKTWPEDLLPLRPVGRLVLDRNVDNFFNENEQLAFGPGLVVPGIYYSDDKMLQCRVFAYADTQRYRLGPNYLMLPVNAPRCAHHNNHYDGAMNFMHRDEEVDYYPSRHAPLRQAPPVPIPARPVVGKRQKETIQKPNDFKQPGERYRSWDANRQERFVRRFADSLGHPKVSQELRSIWIDLLSKCDASLGMKIATRLNMKPNM

SEQ ID NO: 9569 - protein, 79 aa, Hordeum vulgare
AKKRKKKTYTKPKKQKHKHKKVKLAVLQFYKVDDATGKVTRLRKECPNADCGAGTFMANHFDRHYCGKCGLTYVYNQKA

SEQ ID NO: 9570 - protein, 118 aa, Candida glabrata CBS138
MGNTTEDDIDKQIELREQDRWLPINNVARLMKNTLPETAKVSKSAKECMQECVSEFISFVTSEASDRCAQDRRKTINGEDILISLHALGFENYAEVLKIYLAKYRQQQALKNNYEEDS

SEQ ID NO: 9571 - protein, 246 aa, Glycine max
  misc_feature (19)..(19): Xaa can be any naturally occurring amino acid
  unsure (1)..(246): unsure at all Xaa locations
MEFPTEAILSEGSISQKKXGRGKLEIRGIENTTNRQVTFCKRRNGLLKKAYELSVLCDAEVALVVFSSRGRLYEYANNSVRGTIERYKKACAASTNAESVSEANTQFYQQEASKLKRQIRDIQNLNRHILGEGLSSLSLKELKNLESRLEKGLSRVRSRKHETLFADIEFMQKREIELQNHNNFLRAKIAENERAQQRQQDMIPGTECESTIPNSQSYDRNFFPVNLIDSNNNQYSRQDQTALQLV

SEQ ID NO: 9572 - protein, 492 aa, Zea mays
MTSLDLQVLAPNMETYTTDDALTIMGFGKFQALVLFYAGMGWVAEAMELMLLSFLGPFIREEWNVSPENESLLSSVVFAGMLLGACAWGFVSDKYGRSGTGLIFSTLFTSGMGFLSALSPNYLCLVALRFLVGVGVGGSHVFISWFLEFVPAQNRGTWMVIFSLFWTLGTILEASLAWVVLPALNWRWLLVFTALPCFLLLPFFGLTPESPRYLCAQNRMSDATSVLERMANANQSALPPGVLTYNRQTKCDHDVLAPESECLLPVREKECTVDNAKSSESGSLAALRMLLSRELLRSTLLLWFVFYANSFAYYGLVLLTSQLSDANKSCASGVSFGLRQKEINLYKDTFITSLAEIPGLFLSAVLVDWFGRKASMWSMMFACCAFLGPLVLQQTELLTTILLFGARACAMGSFTVLCLYAPEVYPTFVRSTGAGIATPIGRIGGVVCPLVAVAMLRSCHQMEALIVFEVILCLAAVACMFFPVETKGRGMD

SEQ ID NO: 9573 - protein, 178 aa, Oenococcus oeni
PIVYDPTIADTIENYSELFVEPQGAAFLDINHPENIQSTLKNAANGRDIKLLVVSDAEGILGIGDWGVQGVDIAVGKLMVYTVAAGIDPSTVLAVVIDAGTNNEKLLKDPMYLGNKFNRVRGDKYYDFIDKFVNHAESLFPNLYLHWEDFGRSNASNILNSYKDKIATFNDDIQGTGI

SEQ ID NO: 9574 - protein, 390 aa, Prochlorococcus marinus str. MIT 9312
MSQSIIESKNKKDVNNGKIPAKETILSPRFYTTDFEAMENMDLSINEEELEAICEEFRKDYNRHHFVRNSEFDGAAEKLDPETRELFVDFLEGSCTSEFSGFLLYKELSRRIKDKNPLLAECFAHMARDEARHAGFLNKSMSDFGLQLDLGFLTANKDYTYFPPRSIFYATYLSEKIGYWRYIAIYRHLEKNPDSKIFPLFNYFENWCQDENRHGDFFDALMKAQPRTVKSLSQKINIGGTTFTHPLFDYFHRFRYFLNNLPITSKLWSRFFLLAVFATMYARDLGIKKDFYSSLGLDAREYDQYVINKTNETSARVFPVVLDVYDKSFYGRLDKIVENNKVLSNIANSEENKVSKTLKKLPTYLSNGYQLLRLYLLKPLDSKDFQPSIR

SEQ ID NO: 9575 - protein, 305 aa, Olea europaea
MQIFVKTLTGKTITLEVESSDTIDNVKAKIQDKEGIPPDQQRLIFAGKQLEDGRTLADYNIQKESTLHLVLRLRGGMQIFVKTLTGKTITLEVESSDTIDNVKAKIQDKEGIPPDQQRLIFAGKQLEDGRTLADYNIQKESTLHLVLRLRGGMQIFVKTLTGKTITLEVESSDTIDNVKAKIQDKEGIPPDQQRLIFAGKQLEDGRTLADYNIQKESTLHLVLRLRGGMQIFVKTLTGKTITLEVESSDTIDNVKAKIQDKEGIPPDQQRLIFAGKQLEDGRTLADYNIQKESTLHLVLRLRGGL

SEQ ID NO: 9576 - protein, 152 aa, Zea mays
MSLVRRSNVFDPFSMDLWDPFDTMFRSIVPSAVSTDSETAAFASARIDWKETPEAHVFKADLPGVKKEEVKVEVEDGNVLVISGQRSREKEDKDDKWHRVERSSGQFVRRFRLPENAKVDQVKAGLENGVLTVTVPKAEEMKREVKAIEISG

SEQ ID NO: 9577 - protein, 106 aa, Brassica juncea
VCQKETVCVTGASGFIGSWLVMRLLERGYFVRATVRDPGNLKKVQHLLDLPNAKTQLTLWKADLSDEGSYDDAINGCDGVFHIATPMDFESKDPENEVIKPRVNGN

SEQ ID NO: 9578 - protein, 178 aa, Lactobacillus hilgardii
PVVYDPTIADTIENYSHLFLDPQNAAFLSIDDQDDIEASLKNASAGCDIKLIVVTDGEGILGIGDWGVQGVDISVGKLMVYTAAAGVDPKSVLPVVLDVGTNRKELLADDLYMGNHTQRVTGDKYYNFVDKFVETAENLFPDMYLHFEDFGRSNAANILNKYKDNILTFNDDIQGTGI

SEQ ID NO: 9579 - protein, 337 aa, Neisseria meningitidis
MQVYYDKDADLSLIKGKTVAIIGYGSQGHAHAANLKDSGVNVVIGLRQGSSWKKAEAAGHVVKTVAEATKEADVVMLLLPDETMPAVYHAEVTANLKEGATLAFAHGFNVHYNQIVPRADLDVIMVAPKGPGHTVRSEYKRGGGVPSLIAVYQDNSGKAKDIALSYAAANGGTKGGVIETTFREETETDLFGEQAVLCGGVVELIKAGFETLTEAGYAPEMAYFECLHEMKLIVDLIFEGGIANMNYSISNNAEYGEYVTGPEVVNASSKEAMRNALKRIQTGEYAKMFIQEGGVNYASMTARRRLNADHQVEKVGAQLRAMMPWITANKLVDQDKN

SEQ ID NO: 9580 - protein, 178 aa, Leuconostoc mesenteroides subsp. mesenteroides
PVVYDPIVAESIEQYNEIYTNPQNAAFLSIDHPENIESSLKSVADGRDIELVVVTDAEGILGMGDWGVNGVDIAVGKLMVYTAAAGIDPATVLPVSIDAGTNNKILLENPLYLGNKHERIAGEKYLEFIDEFVTAEQKLFPASLLHWEDFGRSNAQVILDKYKDSIATFNDDIQGTGI

SEQ ID NO: 9581 - protein, 177 aa, Lactobacillus plantarum
NPVVYDPVVADSIEQYNELFLDPQNAAFVSVDAPEDIEATLKNARGRRDIRLVVVTDAEGILGMGDWGVNGVDIAIGKLMVYTAAAGIDPSQVLPVSIDAGTNNQKLLDDPLYLGNRHKRVSGEQYYDVIDKFVAAEQQLFPDSLLHFEDFGRDNAQVILDKYKDQIATFNDDIQGT

SEQ ID NO: 9582 - protein, 416 aa, Staphylococcus aureus subsp. aureus COL
MNLNDTIFMFLCTLLVWLMTPGLSLFYGGLVESKNALNTVMQSMAAIVLVTFVWITVGFTISFGNGNLWFGNWEYTFLNHVGFATQEDISPHIPFALFMLFQMMFCTIAISILSGSIAEKMKFIPYLLFVVIWTALVYSPVAHWVWGGGWINKLGVLDFAGGTVVHITSGVSGLVLAIMIGKGNKHSESTPHNLIITLIGGIFVWIGWYGFNVGSAFTFDNIAMLAFTNTVISASAGAIGWLILEYIFKKTTSLLGLLLGALAGLVVITPAAGYVTYLSATIMALIGGICCYIVINYIKVKLKYHDALDAFGIHGVGGIIGAVLTAVFQSKKANPDIENGFIYTGDIHIILVQILCVTAVVIFSIVMTFIIAKVIKLITPLSVTEQETNIGLDKIVHGEHAYFEGELNRFNKHIRY

SEQ ID NO: 9583 - protein, 161 aa, Pediococcus parvulus
IADTIENYSDLFIQSQNAVFLSIDDPDSMKASLKNAADGRDIRLIVVTDAEGILGIGDWGTNGVDISVGKLMVYTAAAGIDPSQVMPVVLDVGTNNQDLLKNPMYLGNRHERITGDRYYKFVDQFVNTAEDLFPKLYLRFEDFGRDNAANILNKYKDQITT

SEQ ID NO: 9584 - protein, 393 aa, Elaeis guineensis
MASMVAFRPEAFLCFSPPKTTRSTRSPRISMASTVGPSTKVEIPKKPFMPPREVHVQVTHSMPPQKIEIFKSLEDWAENNILVHLKPVEKCWQPQDFLPDPSSEGFHEEVKELRERSKEIPDGYYVCLVGDMITEEALPTYQTMLNTLDGVRDETGASLTSWAVWTRAWTAEENRHGDLLNKYLYLSGRVDMKQIEKTIQYLIGSGMDPRTENSPYLGFIYTSFQERATFISHGNTARHAKEHGDVKLAQICGTIASDEKRHETAYTKIVEKLFEIDPDGTVLSFADMMKKKISMPAHLMYDGQDDNLFEHFSAVAQRLGVDTAKDYADILEFLINRWKVGELTGFSGEGKRAQDFVCTLAPRIRRIEERAQERAKQAPRIPCSWIYGREVQL

SEQ ID NO: 9585 - protein, 685 aa, Schizosaccharomyces pombe
MTSSSYTDIDTLAINTIRTLAVDTTAHAKSGHPGAPMGLAPAAHVLFSRIMKFNPAHPKWLNRDRFILSNGHACVLQYIMCHLLGYKLTIEDLKQFRQVGSKTPGHPETHNPDLNIETGAGPLGQGIASAVGLAIGKAHSAAVYNKPGFDLFSNYTFCFLGDGCLQEGVSSEACSLAGHLKLSNLIAVWDNNKITIDGATSMSFDEDVEKRFEAYGWNIVRVANGDTDLDGIEKGFREAMSCTDKPTLINLKTTIGYGSELQGTHSVHGSPLKPEDCVHVKKLFGFDPTKTFQVPPEVYAYYKERVAIASSAEEEYKKMYASYKQSYPDLSNQLERILSRKFPEGWEKHLPVYKPGDKAVATRKLSEIVLDALCPVLPELVGGSADLTPSNLTRWEGAADFQPPSSKLGTYAGRYIRYGIREHGMAGIMNGLAVYGPIIPYGGTFLNFVSYAAGAVRMAALNNSRVIYVATHDSIGLGEDGPTHQPIETFAHFRAMPNINCWRPADGNETSAAYYSALTSDSTPSILALTRQNLPQLENSTIENALKGGYVMLENKEADITLVGTGSEVSLCIDTVKTLETEYNLKARVVSLPCWEVFEQQPESYRLSVIPDGIPAMSVEVWATNGWRRYVHEAFGMHTFGDSGPAPKLYEKFHFTTSGVAQRAKKTVDAYKDIPYIRSPVRRAF

SEQ ID NO: 9586 - protein, 365 aa, Oryza sativa
MEKYELLKDIGSGNFGVARLMRNRETKELVAMKYIPRGLKIDENVAREIINHRSLRHPNIIRFKEVVLTPTHLAIVMEYAAGGELFDRICSAGRFSEDESRYFFQQLICGVSYCHFMQICHRDLKLENTLLDGSPAPRLKICDFGYSKSSLLHSKPKSTVGTPAYIAPEVLSRREYDGKMADVWSCGVTLYVMLVGAYPFEDPDDPKNFRKTIGRIVSIQYKIPEYVHISQDCRQLLSRIFVANPAKRITIREIRNHPWFMKNLPRELTEAAQAKYYKKDNSARTFSDQTVDEIMKIVQEAKTPPPSSTPVAGFGWTEEEEQEDGKNPDDDEGDRDEEEGEEGDSEDEYTKQVKQAHASCDLQKS

SEQ ID NO: 9587 - protein, 466 aa, Vibrio vulnificus YJ016
MAHANHFDVIVIGSGPGGEGAAMGLTKAGLKVAVVEKESSVGGGCTHWGTIPSKALRHAVSRIIEFNSNPLFCKNNSSLHATFSTILGHAKSVIDKQTRLRQGFYDRNQCQLIFGTARFTDAHTISVTQNDGTEEVYTADKFVIATGSRPYQPADVDFNHERIYDSDSILSLKHDPRHIIIYGAGVIGCEYASIFRGLGVKTDLINTRDRLLAFLDNEVSDALSYHFWNSGVVIRNDETYERIEGTEDGVIVHLQSGKKMKADCLLYANGRTGNTDKLNLPAVGLQGDSRGQLKVDGNYQTEVEHVYAVGDVIGYPSLASAAYDQGRFVAQAITKGKADGYLIDDIPTGIYTIPEISSVGKTEQELTAAKVPYEVGRSSFKHLARAQIAGKDIGSLKILFHRETKEILGIHCFGERAAEIIHIGQAIMEQKGEANTIEYFVNTTFNYPTMAEAYRVAALNGLNRLF

SEQ ID NO: 9588 - protein, 395 aa, Staphylococcus aureus
MNDMNQQLIEALKSKEDKMIEIRRYLHQHPELSFHEGETAKYIVEFYKDKDVEVETNAGPRGIKVTIDSGRPGKTLAIRADFDALPITEDTGLSFASQNKGVMHACGHDAHTAYMLVLAETLAEMKDSFTGKVVVIHQPAEEVPPGGAKAMIENGVLDGVDHVLGVHVMSTMKTGNVYYRPGYVQTGRAFFKLKVQGKGGHGSSPHMANDAIVAGSYFVTALQTVVSRRLSPFETGVVTIGSFDGKGQFNVIKDVVEIEGDVRGLTDATKATIEKEIKRLSKGLEALYGVTCTLEYNDDYPALYNDPEFTEYVAKTLKEADLEFGVEICEPQPPSEDFAYYAKEQPSAFIYTGAAVEDGEIYPHHHPKFTISEKSLLISEEAVGTVVLDYLKGDN

SEQ ID NO: 9589 - protein, 263 aa, Arabidopsis thaliana
MANSGNYGKRPFRGDESDEKKEADDDENIFPFFSARSQYDMRAMVSALTQVIGNQSSSHDNNQHQPVVYNQQDPNPPAPPTQDQGLLRKRHYRGVRQRPWGKWAAEIRDPQKAARVWLGTFETAEAAALAYDNAALKFKGSKAKLNFPERAQLASNTSTTTGPPNYYSSNNQIYYSNPQTNPQTIPYFNQYYYNQYLHQGGNSNDALSYSLAGGETGGSMYNHQTLSTTNSSSSGGSSRQQDDEQDYARYLRFGDSSPPNSGF

SEQ ID NO: 9590 - protein, 174 aa, Glycine max
NHISYHINMACSSGTSSGSLSLLQNSGSEEDLQAMMEDQRKRKRMISNRESARRSRMRKQKHLDDLVSQVAQLRKENQQILTSVNITTQQYLSVEAENSVLRAQVGELSHRLESLNEIVDVLNATTTVAGFGAAASSTFVEPMNNNNNSFFNFNPLNMGYLNQPIMASADILQY

SEQ ID NO: 9591 - protein, 397 aa, Neisseria gonorrhoeae FA 1090
MYRHIEYYPGDPILSLVETFKNDPRPEKVNLSIGIYFDDEGRMPVLESVSRAETARAAAPAPSPYLPMEGLDVYRSAVQHLLFGKGNPALAQGRIVTVQTLGGSGALKVGADFLHRWFPEARAYVSDPTWDNHRGIFEGAGFEVGTYPYYDPATVGVKFDEMTAFFNTLPENSVLILHPCCHNPTGVDMSERQWDEVLQIIKTRKLIPFMDIAYQGFGGDLDSDAYAVRKAVEMDLPLFVSNSFSKNLSLYGERVGGLSVVCPNKEEADLVFGQLKFTVRRIYSSPPAHGAYIAADVMNSSELYALWQNEVYMMRDRIRAMRQKLYGVLTARIPDRDFTYFIKQRGMFGYTGLSVGQVRRLRDEFAVYLLDSGRMCVAGLNTSNITYVADALAEVLK

SEQ ID NO: 9592 - protein, 441 aa, Escherichia coli CFT073
MTHDNIDILVVDDDISHCTILQALLRGWGYNVALANSGRQALEQVREQVFDLVLCDVRMAEMDGIATLKEIKTLNPAIPVLIMTAYSSVETAVEALKTGALDYLIKPLDFDNLQATLEKALAHTHSVDAETPAVSASQFGMVGKSPAMQHLLSEIALVAPSEATVLIHGDSGTGKELVARAIHASSARSEKPLVTLNCAALNESLLESELFGHEKGAFTGADKRREGRFVEADGGTLFLDEIGDISPMMQVRLLRAIQEREVQRVGSNQTISVDVRLIAATHRDLAAEVNAGRFRQDLYYRLNVVAIEVPSLRQRREDIPLLANHFLQRFAERNRKAVKGFTPQAMDLLIHYDWPGNIRELENAVERAVVLLTGEYISERELPLAIASTPIPLVQSQDIQPLVEVEKEVILAALEKTGGNKTEAARQLGITRKTLLAKLSR

SEQ ID NO: 9593 - protein, 569 aa, Hordeum vulgare subsp. vulgare
LGGACRVLAGMPAAGATALAGGVNFAVYSAEPPRALCLFTPEDLKADRVSEEVPLDPLMNRTGDVWHVFLEGELHGMLYGYRFDGTFAPHCGHYFDVSNVVVDPYAKAVISREEYGVPAHGNNSWPQMAGMIPLPYSTFDWEGDLPLRYPQKDLVIYEMHLRGFTKHDSSNVEHPGTFIGAVSKLDYLKELGVNCIELMPCHEFNELEYATSSSKMNFWGYSTINFFSPMTRYTSGGIKNCGRDGINEFKTFVRESHKRGIEVILDVVFNHTAEGNENGPILSFRGVDNTTYYMLAPKGEFYNYSGCGNTFNCNHPVVRQFIVDCLRYWVMEMHIDGFRFDLASIMTRGSSLWDPINVYGAPIEGDMITTGTPLVTPPLIDMISNDPILGGVKLIAEAWDAGGLYQVGQFPHWNVWSEWNGKYRDIVRQFIKGTDGFAGGFAECLCGSPQLYQAGGRKPWHSINFVCAHDGFTLADLVTYHNKYNLPNGEDNRDGENHNLSWNCGEEGEFARSSVKRLRKRQMRNFFVCLMVSQGVPIFYMGDEYGHTKGGNNNTYCHDSYVNYFRWEK

SEQ ID NO: 9594 - protein, 327 aa, Triticum aestivum
DLPLRYPQKDLVIYEMHLRGFTKHDSSNVEHPGTFIGAVSKLDYLKELGVNCIELMPCHEFNELEYSTSSSKMNFWGYSTINFFSPMTRYTSGGIKNCGRDAINEFKTFVREAHKRGIEVILDVVFNHTAEGNENGPILSFRGVDNTTYYMLAPKGEFYNYSGCGNTFNCNHPVVRQFIVDCLRYWVTEMHVDGFRFDLASIMTRGSSLWDPVNVYGAPIEGDMITTGTPLVTPPLIDMISNDPILGGVKLVAEAWDAGGLYQVGQFPHWNVWSEWNGKYRDIVRQFIKGTDGFAGGFAECLCGSPHLYQAGGRKPWHSINFVCAHD

SEQ ID NO: 9595 - protein, 1099 aa, Magnetospirillum magnetotacticum MS-1
MTTPAPLHRLLQRQLARASRGREGGAPDFETLLRLISDSYEEHDKERRLSDRSARLMEEELRAANQESRRQAKAHLQAILNTVGEGIVIADQTGTVVSVNPALLSIFGYERDEVIGNNIDMLIPLAALKAAGSSGMERIFDLGRESMALRRGGTSFPIELAAGDLTPTGSAQFVVIMRDISERKRIEREMAESEERFRDFAQSTSDWFWEMGPDLRFTGFSGQFTEHTRALPSHYVGHTRDEMISDDTPMEARLQNLADMEARRPFRDFVYHTKNMDGPGRFLRVNGKPVFDPSGEFKGYRGTASDITEEIEAADRLKASQAEIERLAERNNSILESVDDGIVGIDLNGRATFVNRAAAKLLDFEPAELVGSDILPLMALDMETAESLYQILLRLADSIRDDTASFKRRDGSPLPVEYIASPVMDKGNQVGVVLGFRDITQRRLVERQLREAKEAAEAGNRTKSEFLATMSHEIRTPMNGVIGMTGLLLDTKLTEEQRHFAETIRDSGESLLTVINDILDFSKMEAGKLDLDYTEFELVPLVESVVDILAPRAHAKGIEIASLIDPRLRMLVRSDPGRLRQVLMNLGGNAVKFTEKGGVSIEVTLLERPGAQPMVHFDVRDTGIGIPPEAQGRLFSMFMQVDASTARRYGGTGLGLAICRRLAELMGGEVGLESQPGKGSRFWMSVPMELLAPQSAAPPDLTGHRVLVVDDNPVNCDVIERQLRAFGVEVHACLDAGSGMGELTRAAAMGTPWEVAVIDSQMPVVTGSEMVRMMRAIPMLGGSRIIVTSSQGMPAEQQDGQPAIDAFLHKPLRQSTLLDTIGRVLGLSGPEEQPAAPAEEHNAPDSTAKRLRILVAEDNPVNQQVALGLLRKLGHTVDVVGDGAEALEAVRLLPYDVVLMDVQMPEMDGLEATRAIRSLASAAARIPIVAMTANAMRGDDQMCFDAGMDGYISKPIDRHKLAEALAKYSGAPEPKPAEPTSAQDSKAVDLDVLDALAADIEADTVVEILVKFMEDARTRHANAAVAAPEGDLEKVRREAHTIKGAAASLGLMAVRDACLALEQAARAGEGVAPLVVQLHDRIEALPGQLSTTAYALPPS

SEQ ID NO: 9596 - protein, 462 aa, Idiomarina loihiensis L2TR
MNWWTNNKGEFNKLAKLTGPILVAQLTQMLMSVVDTVMAGRKGALDLAAVSVGGSIFVPATLLVFGLALALAPIISHLDGSNSHRRIANILQQGLYACAIVGVITLIGMSSAPWLLDIMEVEDDFRAITLDYLFYISWGIPGFVIYAVLRNFCEGLSNTMPSLIIGFIGLLINIPANYIFVYGKFGMPELGGAGCGLATAIVLWGMALSMVVYTFTAKRYKRLRLLRRWYRPNWDDVTYVIRIGFPISMSLFFEVSLFAAVALLIAPLGPTVVSAHQIALNISSLVYMVPLSISMAVTLRVGFALGAGNPKNAMLSFKLAMLFGGVFAGVNGLIMYLGGGWLASLYTPDKDIINLAATLMGLAAIFTVSDTFQAISIGTLRGYKDTKYPMILAFISYWPFGLTVGYILGLTDWVVPAMGAAGFWIGFISGLSVAAVLLSLRLRRVSRRYERKHFREQLNSAA

SEQ ID NO: 9597 - protein, 457 aa, Olea europaea
MQIFVKTLTGKTITLEVESSDTIDNVKAKIQDKEGIPPDQQRLIFAGKQLEDGRTLADYNIQKESTLHLVLRLRGGMQIFVKTLTGKTITLEVESSDTIDNVKAKIQDKEGIPPDQQRLIFAGKQLEDGRTLADYNIQKESTLHLVLRLRGGMQIFVKTLTGKTITLEVESSDTIDNVKAKIQDKEGIPPDQQRLIFAGKQLEDGRTLADYNIQKESTLHLVLRLRGGMQIFVKTLTGKTITLEVESSDTIDNVKAKIQDKEGIPPDQQRLIFAGKQLEDGRTLADYNIQKESTLHLVLRLRGGMQIFVKTLTGKTITLEVESSDTIDNVKAKIQDKEGIPPDQQRLIFAGKQLEDGRTLADYNIQKESTLHLVLRLRGGMQIFVKTLTGKTITLEVESSDTIDNVKAKIQDKEGIPPDQQRLIFAGKQLEDGRTLADYNIQKESTLHLVLRLRGGL

SEQ ID NO: 9598 - protein, 71 aa, Zea mays
AAARATSPPSRTVAATHSLSFIDMNARVGRNVSITNKEGVQEADRPDEGYYIRSGIVVVLKNATIKDGTVI

SEQ ID NO: 9599 - protein, 617 aa, Oryza sativa
DCLTVSLSLAHIFFPRRATTAGPKKRPDSLVFSEPSLLVLKWPPLPPPPRISSHSSHSHSHRTHPLLQAKLKLRFGYFLSSPLFSLLLAVAMAVRRRRRRSRAAAVLVAALLLAASAATASAASSYPAKVVTGLLSSTASAVVKQLWSLKSTATRTGSAAAGRSMVKYEGGYAVETVFDGSKLGIEPHDVEVTPSGELLVLDSMNSNVYRVQLPLSRYSRPKLVAGSPEGLSGHVDGRLREAKMNHPKGFTVDDRGNIYVADAMNMAIRKISDTGVTTIAGGKSMRGGHLDGPSDDAKFSTDFEIRYISSSCSLLVIDRGNQAIREIALHNDDCEYQYEAGFPLGIALLFAAGFFGYMLALLQRQVLGMVSTADVHCFKDTEKEPQTPPRPSIASIPPYQKPLKPSLRPPLIPTEDQAGKHEAEEGFFTSIGKLIGGAKSSAVEIFSRKKRPTHQYHHHLQQQRANPWPVQESYAIPHDETPPPLDMRAATPRKNYAFMTKEPEKVHHVRHGRPYFNGWDMQHAPQQQPEQQMYHQQHLQQHRQYSAGPQTFYEQSCETTNEIVFGAVQEVDTKRRMVEIKAVNYGDTFYEQYGMRYRNNYIGYNNSSNGNNNSYYY

SEQ ID NO: 9600 - protein, 146 aa, Pediococcus acidilactici
TIADTIENYSELYVQSQNATFLSIDDPDNMETALKNAADGRDIRLIVVTDAEGILGIGDWGTNGVDISVGKLMVYTAAAGIDPSQVLPVVLDVGTNNEKLLKDPMYLGNRHERIKGDRYFEFVDQFVQTAENLFPNMYLHFEDFGA

SEQ ID NO: 9601 - protein, 334 aa, Staphylococcus aureus subsp. aureus COL
MTTVYYDQDVKTDALQGKKIAVVGYGSQGHAHAQNLKDNGYDVVIGIRPGRSFDKAKEDGFDVFPVAEAVKQADVIMVLLPDEIQGDVYKNEIEPNLEKHNALAFAHGFNIHFGVIQPPADVDVFLVAPKGPGHLVRRTFVEGSAVPSLFGIQQGASGQARNIALSYAKGIGATRAGVIETTFKEETETDLFGEQAVLCGGVSKLIQSGFETLVEAGYQPELAYFEVLHEMKLIVDLMYEGGMENVRYSISNTAEFGDYVSGPRVITPDVKENMKAVLTDIQNGNFSNRFIEDNKNGFKEFYKLREEQHGHQIEKVGRELREMMPFIKSKSIEK

SEQ ID NO: 9602 - protein, 411 aa, Glycine max
MALRLNPIPTQTFSLPQMASLRSPRFRMASTLRSGSKEVENIKKPFTPPREVHVQVTHSMPPQKIEIFQSLEDWAEENILAHLKPVEKCWQPQDFLPDPSSDGFEEQVKELRERAKELPDDYFVVLVGDMITEEALPTYQTMLNTLDGVRDETGASLTSWAIWTRAWTAEENRHGDLLNKYLYLSGRVDMKQIEKTIQYLIGSGMDPRTENSPYLGFIYTSFQERATFISHGNTARLAKEHGDIKLAQICGMIASDEKRHETAYTKIVEKLFESDPDGTVMAFADMMRKKIAMPAHLMYDGRDDNLFDNYSSVAQRIGVYTAKDYADILEFLVGRWKVEQLTGLSGEGRKAQEYICGLPPRIRRLEERAQARVKESSTLKFSWIHDRESTTLNAPREEHGEIFRQYRSEKC

SEQ ID NO: 9603 - protein, 390 aa, Olea europaea
MALKLCFPPHKMPSFPDARIRSHRVFMASTIHSPSMEVGKVKKPFTPPREVHVQVTHSLAPEKREIFNSLNNWAQENILVLLKDVDKCWQPSDFLPDSASEGFDEQVMELRKRCKEIPDDYFIVLVGDMITEEALPTYQTMLNTLDGVRDETGASLTPWAIWTRAWTAEENRHGDLLNKYLYLSGRVDMKQIEKTIQYLIGSGMDPRTENNPYLGFIYTSFQERATFISHGNTARLAKEHGDLKLAQICGIIAADEKRHETAYTKIVEKLFEIDPDGTVLALADMMRKKVSMPAHLMYDGQDDNLFENFSSVAQRLGVYTAKDYADILEFLVGRWDIEKLTGLSGEGRKAQDYVCTLPPRIRRLEERAQSRVKKASATPFSWIFGREINL

SEQ ID NO: 9604 - protein, 314 aa, Oryza sativa
MAPSFDFAASILLCAEDNTAILDLGEESEEISWVVGVDASLGDLSMDFPLQSDDCIEALLGREEQQHIPMEGYLQRLLLQPDGLDLVAVRSDAIDWIWKVHELYKFGPLTAVLSVNYLDRFLSVFDLPQEEACMTQLLAVASLSLAAKMEETVVPHPLDLQVCDAKYVFETRTIKRMELAVLNALKWRMQAVTACSFIDYYLHKFNDDDTPSTSALSRSVDLILSTCKVAEFLVFRPSEIAASVALVALEEHETSMFERVATCYKNLKKFLGNDDDDGDEAAAAVVAAVRWTGAAEDRFTVSLSGEDFVWPCGS

SEQ ID NO: 9605 - protein, 396 aa, Helianthus annuus
MAIRINTATFQSDLYRSFAFPQPKPLRSPKFAMASTIGSATTKVESTKKPFTPPREVHQQVLHSMPPQKIEIFKSMEGWAENNILVHLKPVEKCWQAQDFLPDPASDGFMEQVEELRARAKEIPDDYFVVLVGDMITEEALPTYQTMLNTLDGVRDETGATLLLGLVWTRAWTAEENRHGDLLHQYLYLSGRVDMRQIQKTIQYLIGSGMDPRTENSPYLGFIYTSFQERATFISHGNTARHAKEHGDVKLAQMCGIIAADEKRHETAYTKIVEKLFEIDPDGTVLAFADMMRKKISMPAHLMYDGRDDNLFENFSAVAQRLGVYTAKDYADILEFLVGRWKVADLTGLSGEGRKAQDYVCGLAPRIRRLEERNSARAKESVNVPFSWIFDREVKL

SEQ ID NO: 9606 - protein, 459 aa, Schizosaccharomyces pombe
MTETVTTTSSDKSEKKNYLFYTSPNHRPPTVVRAEGVYLYLEDGTRIMDATGGAAVACLGHGNKEVIDAMHKQSEKVCYIHSMGFSNEPADKLANLLVSEHPDVFARAYFANSGSEAVETCLKLILQYWQLVGEKQRCHIIARKQGYHGNTLFALSVGGMKPRKQPYEGVFSHTTSHVSPCFEYRYKENGETTEEYVARLAKELEDEILRVGPEKVAAFVAETVSGACTGCATPVPGYFKAMRKVCDKYGVIFYLDEVMSGIGRTGTMHAWEQEGVTPDIQSIAKCLGGGYQPISGALVGHRIMNVFEQKDAAMAGFFTYQAHPIACSAALAVQTILRRDHLVERAAEMGKYLSEKLHETFDSHPNVGNIRGRGLFWGLEIVKDKATKECFPPEYKVGSLANKIGCEHGVFVYPGMGTIDGTRGDHVLLAPPYIITREQIDELVEALSKTITSTVAALP

SEQ ID NO: 9607 - protein, 336 aa, Schizosaccharomyces pombe
MSELVLITGITGFVASHSAEALLSQGYRVRGTYRFQEKLDGLLKNRPEWEKKVEFVQVPDCRAPNAYVEAAKGVDYVIHAATEVHSNLEPPRKDPHELLHIAIQGCENALIAAAQEPKVKRFVYISSEAALKGPVNYFGDGHVFTEKDWNPKTLREAEESDDELLNYTVCKKLGERAMHAFVARNTPRFQAIALNPPLILGPVFHLQSVDNLNFSTWFFWQLIKGRYEVAPESKFFNYVDVRDLAEAQVKALTAKTDKDRFVISGGAFKNDDIVNVALKYFPQFKDKIAKPNGETSPCNYEVDASLSIKELGLTYRPAEETFKDATESLYKLAGLL

SEQ ID NO: 9608 - protein, 360 aa, Schizosaccharomyces pombe
MAPAEKAFVLRKKMDTAIEDRPGQTLTDDHQVKVAIKATGICGSDVHYWKEGGIGDFILKKPMILGHESAGVVVEVGKGVSSLKPGDPVAVEPGCVCRLCDYCRSGRYNLCPHMEFAATPPYDGTLRTYYITTEDFCTKLPKQISVEEGALFEPMSVAVHAMTRGNLKCGSRVLVMGCGTVGLLMMAVAKAYGAIDIVAVDASPSRVEFAQKYVGAKPFTPIAAKENESLPDYAQRYKQAIIEKYGEFDFAVDATGVGICIHTAVLALKRGGTFVQAGNGKPVIDFPINHIINYEINVLGSFRYAHGCYKQSLFLVSNGLVDVKPLITHRFAFKDALKAYETVASGEEGVLKVIIGGPDA

SEQ ID NO: 9609 - protein, 215 aa, Schizosaccharomyces pombe
MSAEQEKKTQGTTKEEQKSSFASEDVASKQTEEAKAVFGDGVAKQENKSGASTNDEKKPAEGDEDAEPASPEVHFEPIVKLSAVETKTNEEEETVEFKMRAKLFRFDKAASEWKERGTGDARLLKHKETGKTRLVMRRDKTLKVCANHLLMPEMKLTPNVGSDRSWVWTVAADVSEGEPTAETFAIRFANSENANLFKENFEKYQEENAKILKKN

SEQ ID NO: 9610 - protein, 419 aa, Candida glabrata CBS138
MVKISATVYNDVEPIKTDILFATKQRYLKDTRGFKVDLGVGAYRADNGKPWILPSVRKAERLVQEEDDYDHEYLNICGLDSLTNSAAKVILGEDCPALRESRVISVQSLSGAGALHVAAKFIKKYTPEKKIYLSNPTWPIHQSIFENVDLETDSYPYWDATNKSLDFEGFIKAIDHAPRGSIFVLHACAHNPTGLDPTQEQWHQIIESIQKGDHIPLFDSAYQGFASGDLERDAYAIRYTINQLRDCAPIFVAQSFAKNVGMYGERVGCLHLVLPAQKEDIVPIKDAITSQLSRIIRSEISTPPAYGAKVVSKIFTTPELKEQWYQDLVTMSSRIISVRTRLRDLLAEYNTPGNWDHIVQQCGMFSFTGLTPEMTKRLETEHAVYMVPTGRASVAGLNTGNVQHVAKAINEVVNHFMKD

SEQ ID NO: 9611 - protein, 213 aa, Bacillus cereus ATCC 14579
MEDAVNEYLLSFIDPKDKLILEMEEYATENHVPIMDRLGMEFMLQFLRLIGPKSILELGTAIGYSSIRMMQAIPNSRIVTVERNRERYEKALEYIERSPVTDRISVIYGDALETGEQVKEHGTFDVIFIDAAKGQYRRFFDLYEPLLNPGGVIISDNVMYHGLVTTKEKIENRRTRGLIRRIKTYNEWLMNHEGYDTTIFPIGDGVAVSKKRG

SEQ ID NO: 9612 - protein, 562 aa, Acidithiobacillus ferrooxidans
MADTITFQIEGMTCDSCAVHTRQALERVPGVRSASVSYPQQRAEIEVDTGVGLDPLVAAVAALGYRARLPDTPNKPSGLLNKALGWQDGETSVACDDEALHIAVIGSGGAAMAAALKAVEQGARVTLIERGTIGGTCVNVGCVPSKIMIRAAHIAHMRRESPFDGGIAAAVPVIDRGKLLAQQQARADELRHVKYEGILDGNPAITVLHGEARFKSGHSLNVQLNDGGEREVAFDRCLIATGASPAIPPIPGLKDTPYWTSTEALVSDTIPERLAVIGSSVVALELAQAFARLGSQVTILARGTLFFREDSAIGEAITAAFRADGIEVLEHTQASHVAYAVGEFVLATGNGELRADKLLIATGRAPNTRSLALEAAGVAVNAQGAIVIDQGMRTNSPNIYAAGDCTDQPQFVYVAAAAGTRAAINMMGGSAALDLTAMPAVVFTDPQVATVGYSEAEAHHDGIETDSRTLTLDNVPRALANFDTRGFIKLIAEKGSGRLLGAQVVAPEGGEVIQVAALAIRNRMTVQELADQLFPYLTMVEGLKLAAQTFNKDVKQLSCCAG

SEQ ID NO: 9613 - protein, 317 aa, Candida albicans SC5314
MVELSDYQRQEKVGEGTYGVVYKALDTKHNNRVVALKKIRLESEDEGVPSTAIREISLLKEMKDDNIVRLYDIIHSDSHKLYLVFEFLDLDLKKYMESIPQGVGLGANMIKRFMNQLIRGIKHCHSHRVLHRDLKPQNLLIDKEGNLKLADFGLARAFGVPLRAYTHEVVTLWYRAPEILLGGKQYSTGVDMWSVGCIFAEMCNRKPLFPGDSEIDEIFRIFRILGTPNEEIWPDVNYLPDFKSSFPQWKKKPLSEAVPSLDANGIDLLDQMLVYDPSRRISAKRALIHPYFNDNDDRDHNNYNEDNIGIDKHQNMQ

SEQ ID NO: 9614 - protein, 374 aa, Leptospira interrogans serovar Copenhageni str. Fiocruz L1-130
MLKICKVQITKHLVNFSRVISVVILSFFKCLVKRKHSRKEKMANIYYDSDCDLNSLKGKTIAVIGYGSQGHAQAQNMKDSGLKVIIGLKEGSKSIQDAKNAGFEVYSVSEASQKADIIQILAPDTIQADLYKKDIEPNLKKGDALVFSHGFNIHYDFIKPPKEVDVYMVAPKGPGHLVRRVYTEGGGVPCLIAIYQDSSGEAKKRALAHAAGVGGGRAGILETSFREETETDLFGEQVVLCGGLSNLIMAGFETLTEAGYDPEIAYFECLHEVKLITDLIYEGGLARMRFSISDTAEYGDYVSGPRVIDPGVKQRMKEVLNDIQKDKGAKFATNWMAETKAGYPNFKNMRDKNASHPIESVGKKLRSMMKWLSK

SEQ ID NO: 9615 - protein, 610 aa, Zea mays
METLLAGNPANGVAKPTCNGVGALPVANSHAIIATPAAAAATLAPAGATLGRHLARRLVQIGASDVFAVPGDFNLTLLDYLIAEPGLTLVGCCNELNAGYAADGYARSRGVGACAVTFTVGGLSVLNAIAGAYSENLPVVCIVGGPNSNDYGTNRILHHTIGLPDFSQELRCFQTITCYQAIINNLDDAHEQIDTAIATALRESKPVYISVSCNLAGLSHPTFSRDPVPMFISPRLSNKANLEYAVEAAADFLNKAVKPVMVGGPKIRVAKAREAFAAVADASGYPFAVMPAAKGLVPEHHPRFIGTYWGAVSTTFCAEIVESADAYLFAGPIFNDYSSVGYSLLLKREKAVIVQPDRMVVGDGPAFGCILMPEFLRALAKRLRRNTTAYDNYRRIFVPDREPPNGKPNEPLRVNVLFKHIKGMLSGDSAVVAETGDSWFNCQKLRLPEGCGYEFQMQYGSIGWSVGATLGYAQAAKDKRVIACIGDGSFQVTAQDVSTMLRCGQKSIIFLINNGGYTIEVEIHDGPYNVIKNWDYTGLVNAIHNSEGNCWTMKVRTEEQLKEAIAMATGDKKDCLCFIEVIVHKDDTSKELLEWGSRVSAANSRPPNPQ

SEQ ID NO: 9616 - protein, 562 aa, Vibrio sp. Ex25
MNNDKRPLYIPYAGPALLATPLLNKGSAFSAEERSSFNLEGLLPESTETIQEQVERAYQQYKSFESDMDKHIYLRNIQDTNETLYYRLVQNHISEMMPIIYTPTVGAACENFSNIYRRGRGLFISYPNRDRIDDLLNNAANHNVKVIVVTDGERILGLGDQGIGGMGIPIGKLSLYTACGGISPAYTLPIVLDVGTNNPQRLADPMYMGWRHPRITGAEYDAFVEEFIQAVQRRWPDALIQFEDFAQKNAMPLLERYKDRVCCFNDDIQGTAAVTVGSLLAACKAAGTQLSKQRITFLGAGSAGCGIAEAIIAQMVSEGISDEQARSQVYMVDRWGLLQEGMPNLLDFQQRLVQKHTNTKEWENEGNGFSLLDVMRNAKPTVLIGVSGAPGLFSQEVIEEMHKHCKRPIVFPLSNPTSRVEATPNDIIRWTNGEALVATGSPFEPVVHEGRTYPIAQCNNSYIFPGIGLGVLAVNAKRVTDEMLMESSRALATCSPLAINGRGALLPPLEEIHSVSKKIAFAVGKKAIEQGVALEITDEALNVAIEQSFWQPVYRRYKRTAF

SEQ ID NO: 9617 - protein, 191 aa, Zea mays
  misc_feature (32)..(32): Xaa can be any naturally occurring amino acid
  misc_feature (63)..(63): Xaa can be any naturally occurring amino acid
  misc_feature (66)..(66): Xaa can be any naturally occurring amino acid
  misc_feature (111)..(111): Xaa can be any naturally occurring amino acid
  misc_feature (155)..(155): Xaa can be any naturally occurring amino acid
  misc_feature (176)..(176): Xaa can be any naturally occurring amino acid
  unsure (1)..(191): unsure at all Xaa locations
ITMDPTKFRPSSSHDTTVTTTNAGAPVWNDNXALTVGPRGPIPAGDYHLIEKVAHFARERIPXRVXHARGASAKVFFECTHDVTSLTCADFLRAPGVRDPRDRGLLDVIHXRGSPEKIPDPPGFPGNLTPRREIGPGGKKFPRFFIREGIKFPEXPAFKPNRGSNGKKWGGLKFLXHLPENGKLFFLLLRG

SEQ ID NO: 9618 - protein, 330 aa, Triticum aestivum
  misc_feature (226)..(226): Xaa can be any naturally occurring amino acid
  unsure (1)..(330): unsure at all Xaa locations
NKFVQKSRLVPVRNSRDIVDPRVRSASLTGLPALHQKFDLPAPFVLHTDCPHYWRFHLPGETEEEFATRLAKNLEDLILKEGPETIAAFIAEPVMGAGGVIPPPKTYFDNGPAVVKKYGILFIVDEVITAFGRLGTMFGSDMYNIKPDLVTLAKALSSAYVPIGATLVSPEIAAVVDSQSNKLGSFAHGFTYSGHPVACAVAIEALKIYRERNIPDHVKQIAPRFXQEGLKAFAGSPIVGEIRGVGLIIGTEFTDNKSRDSPFPAEWGVGAIFGQECQKRGMLVRVAGDSIMMSPPLTMTAGEVEELVSIYGEAMKSTEMKVAELKSKKN

SEQ ID NO: 9619 - protein, 313 aa, Ralstonia eutropha JMP134
MSAIQILQVGPLAPQTNSTLQERFSAAALWQQADPLAWAREHGGEVRVVVTSARHGCTAALIGALPKLEAIVSFGVGYDSIALDAARARGIQVSNTPDVLNDCVADLAFGLLIDAARGIAHGDRFVRAQRWPQGGFPLTTRVSGKKLGILGLGRIGEIVARRASGFDMEIAYHNRRPRDGAPWRFEGDLKALAAWADFLVVAVVGGPETAGLVSREVIDALGPKGILVNVSRGSVIDEAAMVEALVEGRLGGAGLDVFRDEPNVPPALLALDNVVLAPHMASGTHETRAAMTALTLQNLEAFLDTGKVLTPVL

SEQ ID NO: 9620 - protein, 496 aa, Zea mays
MTATPAVIGLSARGNRLLATSFGSAELAPPDAYPSRQFAAAAPKLTVVAHRASASASSPADIGGAGHARAHAIRALRNHSAPALAPPPPADPAPELDSKFELEFESSLEAIVLLQRSMLEKQWELPFEDDISTEDEDERSTVVVARSGVSARQRRMSGRRRGAFVGRKSVTVSPELMQSRNRIYLRGTVSKDLLTHKQVVQLSRKIKDGIWLQHQRSKLKEKLGNEPSYKQLAQSLRIPAPELRARMRESFLAREMLAMSNTRLVISIAQKYDNLGVELPDLIQGGLIGLLRGIEKFDASRGFRISTYVYWWIRQGVSRALADNSRSFRLPTYLHERLVAIRGAKYALEDQGIAPTVENIAESLNISEKKVHNATEAVHKVISLDQQAFPSLNGLPGDTLHSYIEDQNVANDPWHGFEERYLKEEVNSLINSTLNERERDIIRLYHGIGKQCHTWEDISRQFGLSRERVRQVGLVAMEKLKHAARREHLDALLEEY

SEQ ID NO: 9621 - protein, 391 aa, Staphylococcus aureus subsp. aureus MSSA476
MLDWFQLANNKENKTIQLRRYLHQYPELSFEEFQTHDYIVNQLSQLSCDIETPIGRNGIKATFKGLGTGPTIALRADFDALPVEELNDVPYKSKNPGCMHACGHDGHTAILLTVAEILDEHKHLLEGNVVLIFQYGEEIMPGGSQEMIDAGCLENVDRIYGTHLWSGYPTGTIHSRAGAIMASPDEFSVTIKGRGGHGAKPHETIDPIVIMAEFILSAQKIISRTIDPVKQAVLSFGMIQAGTTDSVIPDQAFCKGTVRTFDSDIQNHVMDKMDKLLQGLAIANDINYDLNYIKGYLPVHNNEKAYQVIKEATNDLHVRFNESDLMMIGEDFSHYLKVRPGAFFLTGCGNESKGITAPHHNPKFDIDEKSLKYAVAVFLKIIELEQVFKTN

SEQ ID NO: 9622 - protein, 55 aa, Pinus taeda
HGGCVISPSNYVAHEGRLYCRHHSSQLFREKGNFSQLSKATPTKGVTENSDTDDK

SEQ ID NO: 9623 - protein, 55 aa, Pinus taeda
HGGCVISPSNYVAHEGRLYCRHHSSQLFREKGNFSQLSKATPTKGVTENSDTDEK

SEQ ID NO: 9624 - protein, 471 aa, Blumeria graminis
MPTFGFLKKRKKVSLGHRDLDSPASTLSQPASPITPSTSRGLGEPIDTTSSKITSPGQKLGSNITKDHRGTRTTVEDLPSMTDVSHLQQAYRNLSQGSTASKSNLLTIHNLINPPQHDGAGQSKVMPEKHMNNKTERPVQGKAAVAQVRQTKGKYSLSDFEILRTLGTGSFGRVHLVQSKHNQRFYAVKVLKKQQVVKMKQVEHTNDERSMLQEVKHPFLITLWGTFQDSKNLYMVMDFVEGGELFSLLRKSQRFPNPVAKFYAAEVTLALEYLHKKDIIYRDLKPENLLLDRHGHLKITDFGFAKKVTDITWTLCGTPDYLAPEVVSSKGYNKSVDWWSLGILIFEMLCGYTPFWDNGSPMKIYENILKGRVKYPPYIHPDAQDLIQRLITADLTKRLGNLHGGAEGIKSHQWFAEVTWERLAKKDIDAPYVPPVKAGSGDASQFDKYPEETERYGQTGPDEHGSLFENF

SEQ ID NO: 9625 - protein, 252 aa, Prunus microcarpa
AHYKSEADVGNAIAEAIQSGLVKREELFITSKASNHGHVVEACKNSLKKLQLDYLDLYLVHYPLATKHSGVGTTASLLDENKVLDIDVTVSLETTWHDMEKTVDLGLVRSIGLSNYELFLTRDCLSYAKIKPQVSQFETHPYFQRESLVRFCKKHGVIPMAHTPLGGATANVKAFGSISPLEDPVLIGLAKKYQKSVAQIALRWNLERGTPVIPKSSKVERLKENLEVLNFKLEKEDIELINTIDKKSRTTL

SEQ ID NO: 9626 - protein, 372 aa, Anaplasma marginale str. St. Maries
MYSNLLGKTDQHWALHSGAGSIINTLNTVALRGSNEPYWSVLGRFVNKSKRHSAISDEQVVKSYHDMLLMRRFEEKVGQLYGMGLIRGFCHLYIGQEAIAVGLQNVLSSEDSIVTSYREHGFMLTSGESANTILAELMGKGTGCSKGKGGSMHMFNVAKNFFGGHGIVGAQVPIGTGIAFAEQYKKGKGVVFTCLGDGAMNQGQVYESFNMASLWKLPVVYVVENNEYAMGTSVPRSSSVVELYRRGEGCGVPGSQVDGMDIFAVIEAASNAAELCRNGNGPVLLEMKTYRFRGHSMSDPAKYRTRQEVDEVRDSRDPLCRLKEYVLKHKIAPESTLDGFEKQVREIVNGAVEFAQSSPEPEAGELYTDVYK

SEQ ID NO: 9627 - protein, 252 aa, Prunus lusitanica
AHYRSEADVGNALAEAFETGLVKREELFITSKASNHGHVVEACKNSLKKLQLDYLDLYLVHYPLATKHSGVGTTASLLDENKVLDIDVTVSLESTWHDMEKTVSLGLVRSIGLSNYELFLTRDCLSYAKIKPQVSQFETHPYFQRETLVRFCRKHGVCPMAHTPLGGATANVKAFGSISPLEDPVLRALAKKYKKSVAQIALRWNLDRNTPVIPKSSKIERLKENLEVLNFKLEKEDIELINTIDKKSRTTL

SEQ ID NO: 9628 - protein, 252 aa, Prunus virginiana
AHYKSEADVGNALAEAFDTGLVKREELFITSKASNHGHVVEACRNSLKKLQLDYLDLYLVHYPLATKHSGVGTTASLLDENKVLDIDVTVSLESTWHDMEKTVSLGLVRSIGLSNYELFLTRDCLSYAKIKPQVSQFETHPYFQRETLVRFCRKHGVCPMAHTPLGGSTANVKSFGSISPLEDPVLHGLAKKYKKSVAQIALRWNLDRNTPVIPKSSKIERLKENLEVLNFKLEKGDIELINTIDKKSRTTL

SEQ ID NO: 9629 - protein, 196 aa, Oryza sativa (japonica cultivar-group)
MSMPEAGRSERDGREQDDDYEQQQARVLMALMQGFCAARYRKADNIPCPIVQGLYLGSVGAAMNKDALKSLNITHILIVARSLNPAFAAEFNYKKIEVLDSPDIDLAKHFDECFSFIDESISSGGNVLVHCFAGRSRSVTIIVAYLMKKHQMSLENALSLVRSKRPQVAPNEGFMSQLENFEKSMQGKIQIAFFTK

SEQ ID NO: 9630 - protein, 468 aa, Arabidopsis thaliana
MGRVRKSDFGSIVLVLCCVLNSLLCNGGITSRYVRKLEATVDMPLDSDVFRVPCGYNAPQQVHITQGDVEGKAVIVSWVTQEAKGSNKVIYWKENSTKKHKAHGKTNTYKFYNYTSGFIHHCPIRNLEYDTKYYYVLGVGQTERKFWFFTPPEIGPDVPYTFGLIGDLGQSYDSNITLTHYENNPTKGQAVLFVGDISYADTYPDHDNRRWDSWGRFAERSTAYQPWIWTTGNHELDFAPEIGENRPFKPFTHRYRTPYRSSGSTEPFWYSIKRGPAYIIVLASYSAYGKYTPQYQWLEEEFPKVNRTETPWLIVLMHSPWYNSYDYHYMEGETMRVMYEAWFVKYKVDVVFAGHVHAYERSERVSNIAYNVVNGICTPVKDQSAPVYITIGDGGNIEGLATKMTEPQPKYSAFREASFGHAIFSIKNRTHAHYGWHRNHDGYAVEGDRMWFYNRFWHPVDDSPSCNS

SEQ ID NO: 9631 - protein, 481 aa, Schizosaccharomyces pombe
MIRNSEDFSHHLSRESKAREKGPFQMLGRIKSSTGIDAISFSSGLPHPNKFAIRELSIKFPQLGCFKEENGTYAKEVNVTFNIKADPSEGLLNFSQSLQYGQCQGISELVGFIKEHIRRIHAPRYENWDIKMSNGNTSGLEYCLRLLVNYGDHVLTEKYTYPAAITAMRALGVQFVSVDMDSEGMLPESLEEIMRDWDISLGPRPHVLYTVPTGQNPTGSTLSLSRRKKLLALARKYDIIIVEDEPYYFLQMEDYNGSLNPAQQKCDGSTFLKSLVPSLLSLDTEGRVLRLDSFSKLIAPGTRLGYITGNSMFIDHITRIAEVCTESPSGICQSVLYAMLHNWGQEGFCAWLQELQYSYTVRRNAFLNVANKYLPNSVCIYHVPRAGLFLWVELNLNHYRFSDTKKSVSQIEMEIFLALVEKGVKTVCGQFFMANPERSTKIFFRFAYSIADFEDFEEGIKRFTSVINEHFNVESRVRICP

SEQ ID NO: 9632 - protein, 329 aa, Staphylococcus carnosus
MSVLVLGGAGYIGSHAADQLIEQGYDVAVVDNLGTGHRQAVPETARFYEGDIRDKAFLNHVFEQENVEGVFHFCAYSLVGESVEKPLEYFNNNVYGMQVLLEVMKAHDVNEIIFSSTAAVYGEPEIIPIQEDAPKAPTNPYGESKLMMEKMMHWCHNAYGVNYAALRYFNVAGAKEDGSIGEDHNPETHLIPIVLQAALGQRDAITIFGTDYDTEDGSCVRDYLHVTDLIAAHILAYQYLKDGGESGAFNLGSSQGYSVIEIVEAARKATGIDIKAEIGERRAGDPSKLVASSDKAQRVLGWKPKHDDIHEIIETAWNWHQSHPNGYSN

SEQ ID NO: 9633 - protein, 805 aa, Medicago sativa
MATERLTRVHSLKERLDETLTANRNEILALLSRLEAKGKGILQHHQVIAEFEEIPEESRQKLTDGAFGEVLRSTQEAIVLPPWVALAVRPRPGIWEYLRVNVHALVVENLQPAEFLKFKEELVDGSANGNFVLELDFEPFTASFPRPTLNKSIGNGVHFLNRHLSAKLFHDKESLHPLLEFLRLHSYKGKTLMLNDRIQNPDSLQHVLRKAEEYLSTIDPETPYSEFEHRFQEIGLERGWGDTAERVLESIQLLLDLLEAPDPCTLESFLDRIPMVFNVVILSPHGYFAQDDVLGYPDTGGQVVYILDQVRALESEMLSRIKKQGLDIIPRILIITRLLPDAVGTTCGQRLEKVYGTEHCHILRVPFRDEKGIVRKWISRFEVWPYLETYTEDVAHELAKELQSKPDLIVGNYSDGNIVASLLAHKLGVTQCTIAHALEKTKYPESDIYWKKFEEKYHFSCQFTADLFAMNHTDFIITSTFQEIAGSKDKVGQYESHTAFTLPGLYRVVHGIDVFDPKFNIVSPGADQTIYFPYTETSRRLTSFYPEIEELLYSSVENEEHICVLKDRNKPIIFTMARLDRVKNITGLVEWYGKNAKLRELVNLVVVAGDRRKESKDLEEIAEMKKMYGLIETYKLNGQFRWISSQMNRVRNGELYRVICDTKGAFVQPAVYEAFGLTVVEAMATGLPTFATLNGGPAEIIVHGKSGFHIDPYHGDRAADLLVEFFEKVKADPSHWDKISQGGLQRIEEKYTWTIYSQRLLTLTGVYGFWKHVSNLDRLESRRYLEMFYALKYRKLAESVPLAVE

SEQ ID NO: 9634 - protein, 748 aa, Glycine max
MDADSSGEEVVIKTRKPYTITKQRERWTEEEHNRFLEALKLYGRAWQRIEEHIGTKTAVQIRSHAQKFFTKLEKEAFVKGVPIGQALDIDIPPPRPKRKPSNPYPRKTNVGAPTLHSEAKHGKSLISIASSHGKQALDLEKEPLPEKHNVDLRPTTVKENKDGSCLNVFTIIQEAPCSSVSSANKNSTSISVPLRNSCALREFIPSVKEVITRDETNESFVTDELENQKLEIDDGKHTQKTNDTCEVSKLENSGASELVQTEKTDGRNCALTIDGVPGNQNYPRHVPVHVVDGNLGTSTQNLSPDMVFQDSIFQPKGGVNRQPNLVTNSATSHISECQNNAARSSIHQSFPPSPPFAQDDYHSFLHMSSTFSSLIVSTLLQNPAAHAAASFAATFWPYANAETSADSPVCTPDFPSRQIGSPPSVTAIAAATVAAATAWWAAHGLLPLCGPLHTAFACPPASATTVPSMIIDESPQKTERGEIKPQNPPLQDQIPDPEHSEAQHSAPKSPAVSSSKSEDRGDANLDTSPKATNHEMNQAISENPDSNKMKGRKPVDRSSCGSNTTSSSEETELLEKDEKEKEEPKTPDANVLDTELSNRRSRSISNLTDSWKEVSEEGRLAFQALFSREVLPQSFSPTHHLINKDNQIDSIKDNELNTDYKDEDLESKKCSSICDGVQKNLLFVKDNNEEEGLLTIGLGPGKLKTRRTGFKPYKRCSVEANENRIGTACIQGEEKGPKRLRLNGEAST

SEQ ID NO: 9635 - protein, 356 aa, Medicago sativa subsp. X varia
MKKGNLGLGLKLSVPQTDQVAFAKFLTESGTFKDGDLLVNRDGVRIVSETEVEAPPPIKATDNQLSLADIDIVKVVGKGNGGVVQLVQHKWTNQFFALKIIQMNIEESVRKRIAKELKINQAAQCPYVVVCYQSFYDNGVISIILEYMDGGSMADLLKKVKTIPEPYLSAICKQVLKGLIYLHHERHIIHRDLKPSNLLINHTGEVKITDFGVSAIMESTSGQANTFIGTYNYMSPERINGSQRGYNYKSDIWSLGLILLECAMGRFPYTPPDQSERWESIFELIETIVDKPPPSAPSEQFSSEFCSFISACLQKDPGSRLSAQELMELPFISMYDDLHVDLSAYFSDAGSPLATL

SEQ ID NO: 9636 - protein, 311 aa, Triticum aestivum
MATHFVLNTGAKIPSVGLGTWQSDPGVVGEAVYAAVKAGYRHIDCARAYNNEKEVGLALKKLFEEGVVKREDLFITSKLWCGHHAPEDVPEALGDSLNDLQLDYLDLYLIHWPFKIKKGTSIGNPENFLPPDIPATWGAMEKLHDAGKARAIGVSNFSSKKLGDLLAVARVPPAVDQVECHPTWQQSKLHSFCQSTGVHLSAYSPLGSPGSTWMNGNVLKEPVVVSIAEKLGKTPAQVALRWNIQMGHSVLPKSVSEERIKQNLAVYDWSIPEDLLAKFSEIKQARLLMGNFIVNKDSVYKTHDELWDGEI

SEQ ID NO: 9637 - protein, 442 aa, Synechocystis sp. PCC 6803
MKPKNFPLARYVLGAMLAFLFVGVAQAQTETTSIAEVTYAINNLFLLAAAVLVLFMQAGFAMLEAGLSSHKNTVNVLFKNTFDVCVGVLLYFLFGYSLMYGENPVLGGFFGWGGFGITNNLDNVEGLSPQVDWLFQAAFAATAATIVSGAVMGRMYFKAYLIYSAVITGLVYPISGHWKWGGGWLDKLGFHDFAGSLLVHSVGGFAALAAVVVMGPRIGRFEGNKINSLGYQGITSSSLGVFILWVGWYGFNPGSQLAFVGALNTNTTMLIAVNTTLSAAAGGLAALAFDWITENKRKPNLLVTLNGILGGLVGITAGCDTVSNWSAIAIGVVAGILSVLGTKLLDRLRIDDGVGAWPVHGLCGIWGGIAVGIFSTNVEHKLSAQIVGSLVIPFWAFITMFFLFYVMDLWGILRVKPSQEKVGLDIVEHGQTEKGVEIAFED

SEQ ID NO: 9638 - protein, 479 aa, Pichia anomala
MSSFRVLDLVKPLTGYLPEVIAPERKVPFNQKLMWTGVTLLIFLVMSEIPLYGIVSSESSDPLFWLRMMLASNRGTLMELGISPIVSSGMVFQLLQGTQLLDVNLESKTDRETFQTAQKLFAILLSIGQATVYVLTGIYGRPSDLGVGVCLLLILQLVFAGIIVILLDELLQKGYGLGSGISLFMATNICEQIFWKAFAPTTVNNGRGDEFEGAVVALFHLLSVRKDKRRALVEAFYRQNLPNIFQLLATFIVFFLVVYLQGFRYEIPVRSTRQRGQNGLYPIKLFYTSNTPIMLQSALTSNFFIISQMLFQRFPLNPVVRLFGVWDARPGSAQLFASNGLAYYIQPPLSLTEALLDPIKTVIYVSFVLSVCALFSKTWIEISGTAPRDVAKQFKDQGLVIAGRRETSVYKELKRIIPTAAAFGGASIGALSVACDLLGTLGSGTSILLAVTTIYSYYEIAAKEGGFQKHIVEGFSEAF

SEQ ID NO: 9639 - protein, 1130 aa, Ralstonia metallidurans CH34
MSNPISPSPAVRQAVFVKTAHSLWQNIWRTIGTMLALVFLALGTAHPAQAEFRRDPTVPSHAVTLKTSIRVNGTSSPAPGSSTLQEPNDPMLLRIGVMANGLPPFDLVGIDGNYEGISADYLAMIASTLHAKVEVRAYATRDAALHDLSRDAIDVVATDPGQTEPAQGAIGFTPNQIIEIATRTTAHKLVGNQTLGYVNGQLDPQAILAAYPGRKLQAYATLLDALTQLSLGADVVLLSNATAASYITAQYGIPNLVAVNVSRLSVGDLSFLVRDPALRARFDAAIRAIPKPTRLAISTHWVPTALMPHFDKALNLTTEESAWIAAHPVARYRATNDRVPFVFSDEHGESVGLSVQVLGKIEERTGLRFEPVSADGNSDPDHATTPTIQPIVPVDGPSERTDGLTITEPYFQGYWAIVAHVRQHGINNILDLAGKRVAVVLPNPIIDRLRATVPLQVVKAASYRDAYRMVATGIADATLGNMMTANYLIRESYPEALRIVAPISGTPLNVGIGVPADEPMLLAILNKALLSLSREDINALRLRWSEPSSIAGSTETLPSWAWFSLSAGLVLLAISLLWSQSLRQQIQRRRRMEAVLHEQLAFQTSILDAIPQPIYLRDIDLRLMTCNAAFERALGCGRKQMRGRTIDQMPLKLGDVPLSMQTYRKVLATGEAATLDRTLMIEGKERIVLNWVEPLRNATGGVVGIIGGWIDMTERQQMVTELASAKDRAEAANRAKSAFLASISHEIRTPMNAILGMLELTLQDKRLPDDDRLQVETAQESAKSLIGLIDDILDASKMEAGKFVLTPQPAPLRQLIGDVTSLFGLAASRKGVQLEAIVDDAVAPCHMVDPLRFKQVLNNLVSNAVRFTDRGSVVIRLGATNLTPDCQSLTFSVSDTGTGIPEDGLKKLFQPFTQIGDTKRSAGGTGLGLSICQRLVTKMHGTIGITSEVGKGTTVTATIELPIAAEIAPVLQSEQQNQPASKPGKALRVLIVDDHAPNRILLQRQLEKLGHRAFTASDGCEALEKLTDATFDLIICDYSMPNMDGPTLTRTIRSSDLPYRTLPILGYTASAQPEIRAHAIECGMDAVMIKPVDMATLETTLAANVNRRAHPGLPGLALALAPCGKSALTA

SEQ ID NO: 9640 - protein, 488 aa, Listeria monocytogenes EGD-e
MTDRKNLTTNQGVPVGDNQNSMTAGRKGPTLIEDYVLIEKLAHFDRERVPERVVHARGAGAHGKFVTKKSMKKYTMAKFLQEEGTETEVFARFSTVIHGQHSPETLRDPRGFSVKFYTEEGNYDFVGNNLPVFFIRDAIKFPDVIHSLKPDPRTNIQDGNRYWDFFSLTPEATTMIMYLFSDEGTPASYREVRGSSVHAFKWINEEGKTVYVKLRWVPKAGIVNLSTEQASQIQAKEFNHASRDLYEAIENGDYPEWDLYVQVLDPKDLDSFDFNPLDATKDWFEDVFPYEHVGTMTLDRNPDNIFAETESVGFNPGVLVRGMLPSEDRLLQGRLFSYSDTQRHRVGPNYLQLPINSPKAPVANNQRDGHMPFKQQTSSINYEPNSYDTEPKENPAFIEPEQEIRGDISGRLIAEKPNNFGHAKEVWDRYSNAERAALVKNIVDDWSQVREDIKIRNLRNFYQVDPEFASRVAAGTGINLEEHVTDLK

SEQ ID NO: 9641 - protein, 343 aa, Triticum aestivum
  misc_feature (190)..(190): Xaa can be any naturally occurring amino acid
  unsure (1)..(343): unsure at all Xaa locations
MSPHPNQSTNLEPPCSSKKKINQLANERATTDGSSSPPVIEVGPAGRISGGGGGAMSRASLSPSSSGDEEEEDDEGVDGYRKGGYHAVLLLLLASPRPHLDSLPRVDHLFHPFEAEMAATFNVNAEAGLKKLDGYLLSRSYISGYQASKDDLAVYSEFSVAPPSTCTNVARWYNHIDALLKLSGVTAPGXQGVKVLSSVVPETSTTDVAEAPAADDDDDSDVDLFGEETEEEKKAAEERAAKAKASTKKKESGKSSVLLDVKPWDDETDMVKLEEAVRSIKMEGLLWGASKLMPVGYGIKKLQIMMTIIDDLVSVDTLIEDHLCVEPANEYIQSCDIVAFNKI

SEQ ID NO: 9642 - protein, 282 aa, Trichodesmium erythraeum IMS101
MSIEKKNVTVGSIEWFYREAQPDGKTDKLPVLLLHGLASQSHSWTVIMPELAQAGYRAIAPDWIGCGFSPKLDKRDFPYTSEAFIEVLAELINNLQLERFYLVVQGFLGSVGLQYALRNPKKIERLTILNTPLSTTAKLPWQIKQLGIPFIGDMLTQDPLFVDRTLEKGSRLTVADQDLEVYRSPYLRSSAAGRAILAIVRNLDLKKSMAEIESGFKEWQQPTLIIWGIKDPWLDISQGENLANICQNGKLVKLPEAAHYPQEHWSGNIIDELLLFLRMIEI

SEQ ID NO: 9643 - protein, 310 aa, Malus x domestica
MSTVTLSSGYEMPVIGLGLWRLEKDELKEVILNAIKIGYRHFDCAAHYKSEADVGEALAEAFKTGLVKREELFITTKIWNSDHGHVVEACKNSLEKLQIDYLDLYLVHYPMPTKHNAIGKTASLLGEDKVLDIDVTISLQQTWEGMEKTVSLGLVRSIGLSNYELFLTRDCLAYSKIKPAVSQFETHPYFQRDSLVKFCMKHGVLPTAHTPLGGAAANKDMFGSVSPLDDPVLNDVAKKYGKSVAQICLRWGIQRKTAVIPKSSKIQRLKENLEVLEFQLSDEDMQLIYSIDRKYRTSLPSKTWGLDVYA

SEQ ID NO: 9644 - protein, 177 aa, Synechocystis sp. PCC 6803
MQQRGVTIWLTGLSGAGKTTITHALEKKLRDSGYRLEVLDGDVVRTNLTKGLGFSKEDRDTNIRRIGFVSHLLTRNGVIVLVSAISPYAAIRQEVKHTIGDFLEVFVNAPLAVCEERDVKGLYAKARSGEIKGFTGIDDPYEPPTNPDVECRTDLEELDESVGKIWQKLVDLKYIEG

SEQ ID NO: 9645 - protein, 932 aa, Streptococcus pyogenes SSI-1
MIEETSKEGDGHLPLKKLESSNNQTIIAEEVALLKEMLENITRRMIGDDAFTVIESIMVLSEKQDYIELEKVVANISNQEMEVISRYFSILPLLINISEDVDLAYEINHQNNTDTDYLGKLALTIKDLAGKDNGKDILEQVNVVPVLTAHPTQVQRKTILELTTHIHKLLRKYRDAKAGVINLEKWRQELYRYIEMIMQTDIIREKKLQVKNEIKNVMQYYDGSLIQAVTKLTTEYKNLAQKHGLELDNPKPITMGMWIGGDRDGNPFVTAETLCLSATVQSEVILNYYIDKLAALYRTFSLSSTLVQPNSEVERLASLSQDQSIYRGNEPYRRAFHYIQSRLKQTQIQLTNQPAARMSSSVGLNTSAWSSPASLENPILAYDSPVDFKADLKAIEQSLLDNGNSALIEGDLREVMQAVDIFGFFLASIDMRQDSSVQEACVAELLKGANIVDDYSSLSETEKCDVLLQQLMEEPRTLSSAAVAKSDLLEKELAIYTTARELKDKLGEEVIKQHIISHTESVSDMFELAIMLKEVGLVDQQRARVQIVPLFETIEDLDNARDIMAAYLSHDIVKSWIATNRNYQEIMLGYSDSNKDGGYLASGWTLYKAQNELTAIGEEHGVKITFFHGRGGTVGRGGGPSYDAITSQPFGSIKDRIRLTEQGEIIENKYGNKDVAYYHLEMLISASINRMVTQMITDPNEIDSFREIMDSIVADSNTIYRKLVFDNPHFYDYFFEASPIKEVSSLNIGSRPAARKTITEITGLRAIPWVFSWSQNRIMFPGWYGVGSAFKRYIDRAQGNLERLQHMYQTWPFFHSLLSNVDMVLSKSNMNIAFQYAQLAESQDVRDVFYEILDEWQLTKNVILAIQDHDDLLEDNPSLKHSLKSRLPYFNVLNYIQIELIKRWRNNQLDENDEKLIHTTINGIATGLRNSG

SEQ ID NO: 9646 - protein, 803 aa, Magnetococcus sp. MC-1
MGASRFVQAINPTGAIPRQPSMRATHPKPKILIVDDKPANLMALRRLLKNTHAELIEAESGNEALGLMLEHELALMLLDVDMPGMDGFEVSRMASGLDRTSNVPIILITAAYKDYSHRIKGYQAGAIDYIEKPIDDRILNAKVAIFLNLYNAHRESEQLRQDLTLNQERLELALEGANEGLWDWNILSNQVYYSPRWITMLGYATNEVNQDFSTWKTLIHPDDFESALACLERHFTTPEEPYRAEFRMRTKQGGWCWILARGKVVARTADGQPHRMVGAHQDISQRKQLEADLLAAKTEAEQANQAKSRFLANMSHEIRTPMNTILGMGEILLNAPNLTPKQHRYLSISQRAGDTLLGLINDILDLSKIEAGELHLEHTLFALHDELKSLITMLRPMARDKGLSMQCVIDPQLPTHVHGDPQRFRQIVLNLLSNALKFTDQGSITLHAKPIETGRLQFTVSDTGIGMPEQVITKIFRPFVQAEANTTRRFGGTGLGLSICRQLVTMMHGEIYANSQVGEGSQFIFEIELPAANSETVKQERLSPPTKQNIPMRLLLVDDMEDNRLLVKAFLEGTPHQIVEAEDGLDALEKSQQSQFDLILMDGMMPKMDGLEATRRIRARESEHNLTPVTIVALTANAMPQDVADSLAAGSDYHMAKPIRRAKLLQLLASIANERRLFSHEEVKQTTTLTSVETIAADILDALANDVGSGYRQSILRFYSTLPARVAQLTAHIGSEADSVLIEAQGLQQDASYFGAHKLAHLCTQIAQMARTKQPREMIASLCPLLQQALQTIERRLTNEGYF

SEQ ID NO: 9647 - protein, 234 aa, Ralstonia metallidurans CH34
MNIGKRFTAEWLGTFWLVFGGCGAAVFAAAFPNVGIGLLGVSLAFGLTVVTMAYAIGPVSGCHLNPAVTVGLAVAGRFPVAEAPLYILAQLLGAICAAGTLLYLASANPGFDLMANGLATNGYGAASPGGYGLRAVVTTETLMTAFFLIIIIGATSYRRTRAAAPVAIGLALTLIHLISIPISNTSVNPARSTGPAIIVGGVAIQQLWVFWVAPICGAILAGLLGRLLFVNEAD

SEQ ID NO: 9648 - protein, 161 aa, Triticum aestivum
  misc_feature (6)..(6): Xaa can be any naturally occurring amino acid
  unsure (1)..(161): unsure at all Xaa locations
FIALSXIVPGLKKMDKASVLGDAIKYVKTLQEQVKGMEEVARRRPVESAVLVKKSQLAADEDDGSSCDENFEGADAGLPEIEARMSDRRVRGRVGGRVGRGVLVAALSELESIDLAIMNTNVLPFTTSSIDITIMATAGEDFSLSVKDIVRKLHQAFKSSP

SEQ ID NO: 9649 - protein, 159 aa, Streptococcus pyogenes SSI-1
MPNLYDFTVKAQDGSDISLVNYKEKVVLVVNTATKCGLTPQYQALQALYDTYHDKGFEVLDFPCNQFLNQTPGEAEEINRFCSLTYHTTFPRFAKIKVNGKDADPLFTWLKEEKSGPLGKRIEWNFTKFLIDQNGQVIKRYSSKTDPKLIEEDLKALLG

SEQ ID NO: 9650 - protein, 491 aa, Sinorhizobium meliloti 1021
MALTPALTRHIRRPKIFASLDEVTRSSGQPAGPVFDVSNPSTGELLATLPDMGIDDARTAIDAAALAQPLWAGKPAKDRSIILRRWHDLIVEHADDLAAILTAEMGKPVGEAKGEVLHAASYVEWYAEEAKRVYGETFPAPANDRRMLVIKQPVGVVGTITPWNFPASMVARKISPALAAGCTIVLKPAEQTPLVAGAMFVLAEKAGFPEGVLNLLYASEGAPIGRELCGNPKVRKISFTGSTEVGRLLMRQCSDQIKKVSLELGGNAPFIVFDDADIDEAVDGAVQAKFRNAGQTCVSANRIYVQSAVHDAFAEKFVTRVRELTVGDGFAPDVAIGPMIDAHAIDKIEAHVADAVAKGAQVRSGGSRIGTTGTFFEPTVLTGISHDMRIAQEETFGPIAPIIRFETAEQVVAEANDTIYGLAAYFYAENLKRVWHVAEALEYGMVGINTGRMSSEAAPFGGIKQSGIGREGSRHGLEDYLEMKYLCMGNI

SEQ ID NO: 9651 - protein, 209 aa, Orchis italica
MGRGNTEIKRIENSTNRQVTFSKRRSGIIKKAREISVLCDAQVSLVIFSSLGKLSEYCSPSTTLSKMLERYQQNSGKKLWDATHENLSAEIDRIKKENDTMQIELRLKGEDLNSLTPKELIPIEEGLQNGLTSVREKQMDFLKMLKKNERMLEEENKRLKYLLQHQQLAIEGSMRELEISYHQKDPEYADQMPMTFRVQPFQPNLHGNN

SEQ ID NO: 9652 - protein, 334 aa, Dechloromonas aromatica RCB
MILVTGGAGYIGSHTCVELLNSGQDVVVFDNFCNSHPESIKRVEAITGKKIAVVKGDIRDQAAVEAALRQYDCQSVIHFAGLKAVGESVEKPLAYYDNNVIGTHKLLQAMSNCGIKTLVFSSSATVYGEPQFLPLTEQHPLSGTNPYGRTKLVIEDMLRDLYRSDSSWRIGILRYFNPVGAHESGLIGEDPQGIPNNLMPFVAQVAVGRRERLSVWGNDYPTPDGTGVRDYIHVVDLAIGHLKALACLSESRCFEVNLGTGTGCSVLDVIKAFESASGRPIPYELAPRRAGDVASCYADPAFAAELLQWRAERNLEVMCVDAWRWQSNNPNGFR

SEQ ID NO: 9653 - protein, 252 aa, Prunus emarginata
AHYKSEADVGNALAEAFETGLVKREELFITSKASNHGHVVEACKNSLKKLRLDYLDLYLVHYPLATKHSGVGTTASLLDENKVLDIDVTVSLETTWHTMEKTVYLGLVRSIGLSNYEFFLTRDCLSYAKIKPQVSQFETHPYFQRESLVRFCKKHGVTPMAHTPLGGATANVKAFGSISPLEDPVLLGLAKKYKKSVAQIALRWNIERDTAVIPKSSKVERLKENLEVLNFKLEKEDIELINTIDKKSRTTL

SEQ ID NO: 9654 - protein, 252 aa, Prunus emarginata
AHYKSEADVGNAIAEAIQRGLVKREELFITSNASNHGHVVEACKNSLKKLRLDYLDLYLVHYPFATKHSGVGTTASLLDENKVLDIDVTVSLETTWHTMETTVYLGLVRSIGLSNYEFFLTRDCLSYAKIKPQVSQFETHPYFQRESLVRFCKKHGVTPMARTPLGGATANVKAFGSISPLEDPVLLGLAKKYKKSVAQIALRWNIERDTAVIPKSSKVERLKENLEVLNFKLEKEDIELINTIDKKSRTTL

SEQ ID NO: 9655 - protein, 252 aa, Prunus emarginata
  misc_feature (193)..(193): Xaa can be any naturally occurring amino acid
  unsure (1)..(252): unsure at all Xaa locations
AHYKSEADVGNALAEAFETGLVKREELFITSKARHHGHVVEACKNSLKKLQLDYLDLYLVHYPLATKHSGVGTTASLLDENKVLDIDVTVSLESTWHDMEKTVSLGLVRSIGLSNYELFLTRDCLSYAKIKPQVSQFETHPYFQRETLVRFCRKHGVCPMAHTPLGGATANVKAFGSISPLEDPVLRALAKKXKKSVAQIALRWNLDRNTPVIPKSSKIERLKENLEVLNFKLEKEDIELINTIDKKSRTTL

SEQ ID NO: 9656 - protein, 251 aa, Prunus emarginata
AHYKSEADVGNAIAEAIQRGLVKREELFITSKANHGHVVEACKNSLKKLRLDYLDLYLVHYPLATKHSRVSTTASLLDENKVLDIDVTVSLETTWHTMEKTVYLGLVRSIGLSNYEFFLTRDCLSYAKIKPQVSQFETHPYFQRESLVRFCKKHGVTPMAHTPSGGATANVKAFGSNSPLEDPVLLGLAKKYKKSVAQIALRWNIERDTAVIPKSSKVERLKENLEVLNFKLEKEDIELINTIDKKSRTTL

SEQ ID NO: 9657 - protein, 168 aa, Oryza sativa (japonica cultivar-group)
MDRQRQQSSRGNASATATRGGGGGGGGKGGGNGKAAAAGKKPIKVVYISNPMRVRTSAAGFRALVQELTGRNADPSKYSPRASAGDDGGGATALPDTGAASDADALEAGAAPGRHPAETATFDEGGGGGGGGYDDDDDDVFRSQLLDTSYSVFSPPTLLYDDHPHSKV

SEQ ID NO: 9658 - protein, 802 aa, Mesorhizobium loti
MPPARAFLVPTPQPSGYGMTVSQQIPVATLGVPRIGRRRELKFALESYWSGKSPAADLLATAKALRAASWREQHDRGVSKIPSNDFSLYDHVLDTVAMVGAVPARYVWTDGEVPLDTYFAMARGNQDQAADCGHAGDEHAANGHGLAAMEMTKWFDTNYHYIVPELTDDQSFALSSAKPVDHFLEAKALGIHTRPVLLGPVTFLKLAKSPEEGFNPIALLPRLLPVYEELLRRLKLAGADWVQIDEPALVVDLVPNERDALQFAYCRLSKAAPELKIMVATYFGSLGDNLETAISLPVAGLHVDLVRAPEQLETVGRLAQKDLVLSLGLIDGRNVWRANLPAMLDRIKPIVAGWPRDRVEIAPSCSMLHVPIDLDMETALDADVKSWLAFAAQKTDELVVLARALAEGRDAVAAELEASAEAAAARATSAKVHDPLVEGRVASIKVAMTRRKSAFDVRSKLQGDTFGLPSFPTTTIGSFPQTAEVRKARAAHAKGELSYVDYEAFLKKEIEAAVRWQEEIGLDVLVHGEFERNDMVQYFAEQLRGFAFTQHGWVQSYGSRFVRPPIIIGDVSRQQPMTVHWWRYAQSLTPKPVKGMLTGPVTILNWSFVRDDLARSAVCRQVALAIRDEVSDLEKAGAGMIQIDEAALREGLPLREAEWQAYLDWAVECFRLASTAVGDATQIHTHMCYSEFGDIVDAIAAMDADVISIETSRSQMELLDTLRTFKYPNEIGPGVYDIHSPRVPEVGEISNLIMLARDRLLDGQLWVNPDCGLKTRRWEEVRPALVNMVAAARAIREKARTA

SEQ ID NO: 9659 - protein, 252 aa, Prunus emarginata
SSLQSEADVGNAIAEAIQSGLVKREELFITSKASNHGHVVEACKNSLKKLRLDYLDLYLVHYPLATKHSGVGTTASLLDENKVLDIDVTVSLETTWHDMEKTVSLGLVRSIGLSNYELFLTRDCLSYAKIKPQVSQFETHPYFQRESLVRFCKKHGVTPMAHTPLGGATANVKAFGSISPLEDPVLLGLAKKYKKGVAQIALRWNIERDTAVIPKSSKVERLKENLEVLNFKLEKEDIELINTIDKKSRTTL

SEQ ID NO: 9660 - protein, 446 aa, Onion yellows phytoplasma OY-M
MNKTKIICTLGPASYDKNILQALIQTGLNVARFNFSHAQYEQTKLLMKTIKTISDKLDKNTGLMLDTKGPEIRTHEFDGVVTIQKDSEVKISMTEVLGNAKLFSVSYSNLYNELKVGDMVNIDDGYLSLEVVGKDEAKQQLVTKAKNTHSIKSRRGVNVPKVNLEMDFISPKDYQDIVFAAQQDFDYIAASFVRRAQDVKDIRKILQEQGNSNIQIISKIENQEGVDNLEEIIQESDGIMVARGDLGIEVDGELVPLYQTRMITKCLEYGKPVVVATQMLESMQRNPRPTKAETSDVFNAVREGTTFTMLSGESASGEYPVEAVTYMKKINYQAEKVVNYQALSQVYQPKNSKENLLLSAVELALRTDVKAIVVYDLKDAYNVSKFHPSVPVLALVKTEQEARRLVLNFGVCPFVSETKLQTKLEELTQNQSSNCLVVKDGMLYFK

SEQ ID NO: 9661 - protein, 350 aa, Magnaporthe grisea 70-15
MAPIGIALIGGGIFIKQAHIPAVLATPSLEVKAVYSRSLKSAKESAALLPNGGEGVDLYSSEEGGGGYADVLKRDDVSGVIIALPIANQPEYIKAALDAGKHVLAEKPVAPNVSQGRELIEYYHSIKARTGATWSCAEQMRCMPNYIFGAAEARKLGKITGFRAIVEFMTKEDNPYYNTEWRKNPTHDYGFILDGGVHWAASLRMLLGDDVAETVSGFSHTASAYLPSPDTLQGIVRTKSGASGAFLVSCGSTLPAKSEFSVACERGSVTVSRDNITVSRTDGSEPQVTIKNSAEGVKYEVQAWAAALEAGKPDPRLAPEEGLADAEFLLGMLKSADAGGVPQNLSLQHV

SEQ ID NO: 9662 - protein, 383 aa, Pyrococcus abyssi GE5
MNFNPVKEAEKIKDEIIAWRRDFHMYPELGFEEERTSKIVEEHLREWGYKIKRAGTGIIAEIGSGDKTVALRADMDALPIQEENDVPYKSRVPGKMHACGHDAHTAMLLGAAKIIAEHSDELSNRVRLLFQPAEEGGNGALKMIEAGAIEGVDAIFGIHVWAELESGVIGIREGPFLAGVGKFVAKIIGKGGHGAAPHLSIDPIPAAADAVLALQRIVAREVDPLDSAVVTVGRIQGGTAFNVIPQYVELEGTFRFFTQELGKFLEKRIREIIEGTAKAHNCEAEIKTEILGPPTINDEKMAKFVAETAKSLGLKVGEVRKTLGGEDFAFYLEKVPGAFIALGIRNEKKGIVYPHHHPKFDVDEDVLYLGTALEVALAFNFKG

SEQ ID NO: 9663 - protein, 412 aa, Lycopersicon esculentum
MNALAATNRNFKLAARLLGLDSKLELSLLIPFREIKVECTIPKDDGTLASFVGFRVQHDNARGPMKGGIRYHPEVDPDEVNALAQLMTWKTAVANIPYGGAKGGIGCSPSDLSISELERLTRVFTQKIHDLIGIHTDVPAPDMGTNPQTMAWILDEYSKFHGYSPAVVTGKPVDLGGSLGRDAATGRGALFATEALLNEHGKSVAGQRFVIQGFGNVGSWAAKLIHEQGGKVVAVSDITGAIKNEKGIDIESLFKHVKETRGVKGFHDAHPIDANSILVEDCDVLIPAALGGVINKDNHKLKIKAKYIIEAANHPTDPEADEILSKKGVTILPDIYANSGGVTVSYFEWVQNIQGFMWDEKKVNDELKTYMTRGFKDVKDMCKTHNCDLRMGAFTLGVNRVARATVLRGWEA

SEQ ID NO: 9664 - protein, 325 aa, Methanothermobacter thermautotrophicus str. Delta H
MILIVGGAGYIGSHVNKFLSERGYETLILDNLTRGHRDFVKWGEFIEGNLGDRRLLDRTFETHDVDAVMHFAAFTDVGESVLKPGRYYHNNVVNTINLLDSMVDHGVRDFIFSSTCAVYGNPMEIPISEEHPLNPISPYGRSKLMVEEILGDYRDAYGLNYVSLRYFNAAGADPEGEVGELHNPETHLIPIVLDVALGLRDAVRIFGTDYPTPDGTCVRDYIHVMDLADAHWRALRYLEGGESGVFNLGNGNGFSVMEVIETCREVTGASINAVEDDRRPGDPPELVGSAGRARRVLGWRPEFTELEDIIETAWNWHSRIRGGIS

SEQ ID NO: 9665 - protein, 530 aa, Arabidopsis thaliana
MAPTIFVDHCILTTTFVASLFAFLLLYVLRRRSKTIHGSVNVRNGTLTVKSGTDVDIIIVGAGVAGAALAHTLGKEGRRVHVIERDLTEPDRIVGELLQPGGYLKLIELGLEDCVKDIDAQRVLGYALFKDGKHTKLSYPLDQFDSDVAGRSFHNGRFVQRMREKASLLPNVRMEQGTVTSLVEENGIIKGVQYKTKDGQELKSFAPLTIVCDGCFSNLRRSLCKPKVCNMVVEVPSNFVGLVLENCELPFPNHGHVVLGDPSPILFYPISSSEVRCLVDVPGSKLPSVASGEMAHHLKTMVAPQVPPQIRDAFISAVEKGNIRTMPNRSMPADPIHTPGALLLGDAFNMRHPLTGGGMTVALSDIVILRDLLNPLVDLTNKESLSKYIESFYTLRKPVASTINTLAGALYKVFLASPDDARSEMRRACFDYLSLGGVCSSGPVALLSGLNPRPMSLVLHFFAVAIFGVGRLLVPLPSVKRLWLGARLISSASGIIFPIIKAEGVRQMFFPRTIPAIYRAPPTPSSSSPQ

SEQ ID NO: 9666 - protein, 176 aa, Zea mays
MADAPASPGGGGGSHESGSPRGGGGGGGGSVREQDRFLPIANISRIMKKAIPANGKIAKDAKETVQECVSEFISFITSEASDKCQREKRKTINGDDLLWAMATLGFEDYIEPLKVYLQKYREMEGDSKLTAKSSDGSIKKDALGHVGASSSAAQGGAYNQGMGYMQPQYHNGDISN

SEQ ID NO: 9667 - protein, 496 aa, Trichodesmium erythraeum IMS101
MLRKLMDKNWFSRFRYFCLFLGTIVVLIGCQVALANGGSDDFVKVDNIWLLLAGALVFFMNAGFALLEAGFCRSDNSVNVLAKNLIVFCVAAIAFWMFGFGLMFGDSSYHLPCRGNFEQKNEKVQSYHGHFSPTMEYNEFEQKSQFILPPKNDTPLGYPSKGFSCLQRQFPKRSIASIFFFQLAFAGTAATIVSRAVAEKMKLWVFFCFSFILVGFLYPIVGHWVWSEYGWLKQGLNFIDFAGSTVVHTVGGTAALAVAILLKPRWSWLGYDPWEDLETDEGSEALSPQGQKESYDQRNLTSATLGCLILWLGWLGFNGGSTTELKEVGHIIITTIMSAATGGIIAILLSPLFSQRSSNNSEIGKLDLSSLINGILGGLVGITASAAYVDIPIAIFIGAVSGVVVVLTRKLLKWIKLEDPLGAIPVHLFCGCWGTIAVSFSLRGTIVYEKTYNFLERLEWQFSGWGVVFITTFLVSCIIWIFIGLTLYLFEKILRK

SEQ ID NO: 9668 - protein, 385 aa, Magnaporthe grisea 70-15
MSSQPEHPTLLIPGPIEFDDAVLQSMSHYSESHVGPAFVNVFGETLTLLRKLFQTTDSGSQPFVISGSGTLGWDLVSANLVEAGEDVLVLGTGYFSDGFADCLRTYGANVTELKAPVGSRPQLPEIEKALSAKKYKVLTVTHVDTSTGVLSELKDLSAMVHKVSPETLIIADGVCSVASEEIAFDEWGLDGVITASQKAIGCPAGLSISMFSSRAIKAFEARKTPPASYFASMKNWLPIMRNYEAKKPSYFATPSPQLIHALHTALTQIMSRPLAERFAKHKEASSKIKKAIADLGLKQVASNPADQANGMTAVYLPESVKPTDILPKLFSKGVIFAGGIHKEIAPKYIRFGHMGVSVLNPERGDLDRAIKALESGLSECGYQKA

SEQ ID NO: 9669 - protein, 333 aa, Listeria monocytogenes EGD-e
MTKQIKVGVIGVGQMGQYHAEIYQKLPQVELVAICEYNDERRAEMAEKFQCKAYKDYHELLANTEIEAVSIVLPDNMHRDCVEEAVKYKKHILLEKPLAKELEDGKAMYELTKDYDKVFTVGFLLRFDPRFNMIKQRLDNGELGDIIHLYCRRNSPITGPKRYIGASDLSMHVMIHDIDYINWYMDSEPVKVIAKSRSVLLKEYGMNDVIYAIVTYENGAIACLEACWVLPENSPTIIDDKLELVGTKGVAYVDSCDHGVRFVSEKGVSYPDSRHWYYTNGEVSGDLAEEVMAFINNVANNTKSIITPKEAYDSLRVVDAIERSIAEGKEVSL

SEQ ID NO: 9670 - protein, 374 aa, Oryza sativa (japonica cultivar-group)
MVAAAVAAAEQVVAALREECATPAARLDGVAAAMAGEMAAGLAEEGGSKIKMIVSYVDNLPNGTEEGLFYALDLGGTNFRVLRVQLAGKEKRVVKRESREVSIPPHLMSGNSSELFGFIASALAKFVADEGHNAVFNDRQRELGFTFSFPVRQTSIASGTLIKWTKAFSIDDAVGEDVVAELQMAMEKQGLDMRVSALINDTVGTLAAGSYYDEDIVVGVILGTGSNAAYLEKANAIPKLEGELPKSGNMVINTEWGNFSSSCLPITEYDEALDKESLNPGEQIFEKLISGMYLGEIVRRVLLKISLQSSIFGNLDQTKLKTRFILRTPDISVMHHDGTPDLRIVAEKLADNLKVIFISKSSIELYSLYPFYAQ

SEQ ID NO: 9671 - protein, 146 aa, Phaseolus vulgaris
MGAFTEKQEALVNSSWEAFKGNIPQYSVVFYTSILEKAPAAKNLFSFLANGVDPTNPKLTAHAESLFGLVRDSAAQLRANGAVVADAALGSIHSQKALNDSQFLVVKEALLKTLKEAVGDKWTDELSTALELAYDEFAAGIKKAYA

SEQ ID NO: 9672 - protein, 137 aa, Brassica napus
MSKLQSDAVKDAITQIVGEAREKKLKFTETVELQIGLKNYDPQKDKRFSGSVKLPHIPRPKMRVCMLGDAQHVDQAEKMGLDYMDVESLKKMNKNKKLVKKLAKKYHAFLASEAIIKQIPRLLGPGLNKAGKFPTLV

SEQ ID NO: 9673 - protein, 330 aa, Mesorhizobium loti
MPDYDVLCIGNAIVDIIAQCDEEFLETNGIIKGAMNLIDTHRAELLYSRMGPAIEASGGSAGNTAAGVASFGGRAAFFGKVSNDALGEIYAHDIHAQGVAFDTRPLAGLPPTARSMIFVTPDGERSMNTYLGAATELGPEDVEADKASGAAVTYFEGYLWDPPRAKEAIRQTAKLAHAAGREVSMTLSDSFCVDRYRDEFLKLMRSGTVDIVFANSHEIKSLYQTASFDEALAQIRKDCKIAAVTRSEKGSVIVRGDETVVIQATAIKELVDTTGAGDLYAAGFLHGYTQGRDLKTCGDLGSLAAGLVIQQIGPRPRQNLRREAEQAGLL

SEQ ID NO: 9674 - protein, 483 aa, Pseudomonas aeruginosa UCBPP-PA14
MQLKDAKLFRQQAYVDGAWVDADNGQTIKVNNPATGEIIGSVPKMGAAETRRAIEAADKALPAWRALTAKERANKLRRWFDLMIENQDDLARLMTIEQGKPLAEAKGEIAYAASFLEWFGEEAKRIYGDTIPGHQPDKRIIVIKQPIGVTAAITPWNFPSAMITRKAGPALAAGCTMVLKPASQTPYSALALAELAERAGIPKGVFSVVTGSAGEVGGELTSNPIVRKLTFTGSTEIGRQLMAECAQDIKKVSLELGGNAPFIVFDDADLDAAVEGALISKYRNNGQTCVCANRLYVQDGVYDAFVDKLKAAVAKLNIGNGLEAGVTTGPLIDAKAVTKVEEHIADAVSKGAKVVSGGKPHALGGTFFEPTILVDVPKNALVSKDETFGPLAPVFRFKDEAEVIAMSNDTEFGLASYFYARDLARVFRVAEQLEYGMVGINTGLISNEVAPFGGIKASGLGREGSKYGIEDYLEIKYLCLGGI

SEQ ID NO: 9675 - protein, 216 aa, Arabidopsis thaliana
MGRGKIEIKRIENSTNRQVTFCKRRNGLLKKAYELSVLCDAEVALIVFSTRGRLYEYANNNIRSTIERYKKACSDSTNTSTVQEINAAYYQQESAKLRQQIQTIQNSNRNLMGDSLSSLSVKELKQVENRLEKAISRIRSKKEIELDNENIYLRTKVAEVERYQQHHHQMVSGSEINAIEALASRNYFAHSIMTAGSGSGNGGSYSDPDKKILHLG

SEQ ID NO: 9676 - protein, 363 aa, Nicotiana tabacum
MERLFLLSLLAFVLFSSAIAFSDEDPLIRQVVSETDDSHLLNAEHHFSLFKSKFGKIYASEEEHDHRFKVFKANRRRARRHQLLDPSAEHGITKFSDLTPSEFRRTYLGLHKPKPKLNAEKAPILPTSDLPADFDWRDHGAVTGVKNQGSCGSCWSFSTTGAVEGAHFLATGELVSLSEQQLVDCDHECDPEQQDACDAGCGGGLMTTAFEYTLKAGGLQLEKDYPYTGKDGKCHFDKSKIAAAVTNFSVIGLDEDQIAANLVKHGPLAVGINAAWMQTYVGGVSCPLICFKRQDHGVLLVGYGSHGFAPIRLKEKAYWIIKNSWGENWGEHGYYKICRGHNICGVDAMVSTVTAAHTTNPNL

SEQ ID NO: 9677 - protein, 305 aa, Triticum aestivum
  misc_feature (65)..(65): Xaa can be any naturally occurring amino acid
  misc_feature (180)..(180): Xaa can be any naturally occurring amino acid
  misc_feature (213)..(213): Xaa can be any naturally occurring amino acid
  misc_feature (241)..(241): Xaa can be any naturally occurring amino acid
  misc_feature (271)..(271): Xaa can be any naturally occurring amino acid
  unsure (1)..(305): unsure at all Xaa locations
MSVSVSAAASSSLPPLLARRRSPPASLAPVRSLRSRSRLLSSARTTPVLLPAAAMAAPAPAASSXRDLLIFDAEENLAVALAKYTADLSAKFAAERGAFTVVLSGGSLIYALRKLTEAPYLETVDWSKWHVFWVDERVVPKDHEDSNYKLALDGYLSKVPIPAGQVYAINDALSAEGAAXDYETILKQLVKNGVLAMSKTTGFPMFDLQLLGXWGPDGHIASLFPGHPPVKENKKWVTHIXDSPKPPPQRITFTFPVINSSAYVPMVVTGXAGKTGHCKRHLGQKNFDLDPSERVLWRWKITWFT

SEQ ID NO: 9678 - protein, 426 aa, Hordeum vulgare subsp. vulgare
MAAADTSRVFLILIIALVMVIVVLLGICWRFLGPGIMRRLLRPRRCPSEVPEYFSGNMSGNLRTITYFDYVTLKKATKDFHQKNQLGRGGFGPVYLGKLDDGRKVAVKQLSVGKSGQGESEFFMEVNMITSIQHKNLVRLVGCCSEGTERLLVYEYMKNKSLDKILFAAADAPAPASAPPFLNWRTRHQIIIGIGRGLQYLHEESNLRIVHRDIKASNILLDDKFQPKISDFGLARFFPEDQTYLSTAFAGTLGYTAPEYAIRGELTVKADTYSFGVLVLEIISSRKNTDLNLPNEMQYLPEHAWRLYEQSKILELVDGRVQGGEGFEEKEVMLVCQIALLCVQPYPNSRPAMSEVVRMLTMKTDQSIPAPAKPAFLDRKNLNGDRDAASSDTATMEMMRSPAGYWMMTPSPMLEVDRPYDMSFGK

SEQ ID NO: 9679 - protein, 194 aa, Hordeum vulgare subsp. vulgare
MMLSSAYSTPAADELGGPPPLPPPPGADVSVIVGALTGVLLGLFLFLIYAKHCRQRGRGGARGAAGGLGLGFRASSTCDRCRSGVSLSVVDALPVVRFGDMGGAAAAAQPECAVCLGTFDPAADELLRVLPKCRHAFHADCVDTWLEAHSTCPVCRRRVGKEDAFAVIPELEAADADWYPAREAEMQIVVRRPA

SEQ ID NO: 9680 - protein, 145 aa, Brassica napus
  misc_feature (62)..(62): Xaa can be any naturally occurring amino acid
  unsure (1)..(145): unsure at all Xaa locations
MASSADAPLESGLSSLRLAADKYRSILNDEKTGNIRWRYGGPPLFDTVNKLFEEERTHVWPXGSLEETVQNAIMSWEMEFSHKIRLQDFKTINPDKFKLFVNGREGLSAEETLRLGSYNALLKTSLPGEFQYYKPEEESFESSHD

SEQ ID NO: 9681 - protein, 346 aa, Escherichia coli
MKSVVNDTDGIVRVAESVIPEIKHQDEVRVKIASSGLCGSDLPRIFKNGAHYYPITLGHEFSGYIDAVGSGVDDLHPGDAVACVPLLPCFTCPECLKGFYSQCAKYDFIGSRRDGGFAEYIVVKRKNVFALPTDMPIEDGAFIEPITVGLHAFHLAQGCENKNVIIIGAGTIGLLAIQCAVALGAKSVTAIDISSEKLALAKSFGAMQTFNSLEMSAPQMQGVLRDVRFNQLILETAGVPQTVELAVEIAGPHAQLALVGTLHQDLHLTSTTFGKILRKELTVIGSWMNYSSPWPGQEWETASRLLTERKLSLEPLIAHRGSFESFTQVVRDIARNAMPGKVLLIP

SEQ ID NO: 9682 - protein, 372 aa, Bacillus halodurans C-125
MAEKPLRPLAEGELSIDQVKEQLVELGKKRGVLTYAEITEKLAPYDQDSDQMDEFFEYLGEQGVEILNDNEEVPSLQQVEKEEEEFDLNDLSVPPGVKINDPVRMYLKEIGRVPLLTAEEEIELATRIEQGDEEAKRRLAEANLRLVVSIAKRYVGRGMLFLDLIQEGNMGLIKAVEKFDYNKGFKFSTYATWWIRQAITRAIADQARTIRIPVHMVETINKLIRVQRQLLQDLGREPSPEEVAEEMDLTPEKVREILKIAQEPVSLETPIGEEDDSHLGDFIEDQDALAPSDAAAYELLKEQLEDVLDTLTDREENVLRLRFGLDDGRTRTLEEVGKVFGVTRERIRQIEAKALRKLRHPSRSKRLKDFLE

SEQ ID NO: 9683 - protein, 557 aa, Kluyveromyces lactis NRRL Y-1140
MSIATSDYSRIDDKVWPTANRTGPKEDPSKYHCTYVTKKVALGDGHFSVVKECMNTMTGDRYAMKLVHKSLVMDKLQLIQREVSVLKRVSSLIRELETLNQKVAGSGSNHGDVFEGHHHVLQLFDFFETSKSIVLVTQLCESEDLYDKILNAGHLDLETQVKPFTACLLSALQFLHGNGIIHRDLKAENVLFRLKTKTNMIELPRDDAMYDKSAHDLILADFGLAISTETGSKEFVGTISYLAPELVACKNSGKQSSIQNGRLKPYGTGVDVWALGVLCYFMACGYMPFDCETDAETMEYIANSDYYMDEDMSKDDKYKQFWSFLEKCFEVDMDKRASADELSAHSFVCPQYFPNKSPTPIIDSPRAPALRVSKSSTSLHSLEPPSRSASTVSLNLNEPMKRSDSREVNLNRIRETLRKTLSMTSIKREPNVLLNVPSGSNSANFNRASSTLKLEPEPPNVALMNGCLCATPESCSNFTTSPSMSRNGSKNNLQTAIGSWNESSLSGLNSGATLAFDRNSFDFTKLNNTSLSPSVPTSSSSNDARKDKIVFQLGEDD

SEQ ID NO: 9684 - protein, 247 aa, Boehmeria nivea
MANNGEGKQNEVSRHQEVGHKSLLQSDALYQYILETSVYPREPESMKELREITAKHPWNLMTTSADEGQFLSMLLKLINAKNTMEIGVFTGYSLLATALALPEDGKILAMDINRENYELGLPVIEKAGLAHKIDFREGPALPALDQMIEDGKYHGSFDFIFVDADKDNYLNYHKRLIELVKVGGVIGYDNTLWNGSVVAPPDAPLRKYVRYYRDFVLELNKALAADPRIEICMLPVGDGIPICRRVS

SEQ ID NO: 9685 - protein, 309 aa, Methanothermobacter marburgensis str. Marburg
MITTVVGSYPATPREPETLRERISSFIGSYDACRPAIETAVRDQVRAGVDIISDGQVRGDMVGHFAEAMGGMMVKDGVSIIFSRITPPAGSIGSDDLIYRIKILRKLTDDESKGVKGIITGPSTMAHASKIEGFYSPQKRERAIMDMADALRVEAEHLQDAGALMIQIDEPFLSTGMVDMGTARRAVKRISGALDVDVSLHVCGDISGVIGELLTFPVDMLDLEFAGRPSNLEVLAEKWRGDKKLGFGCVDTSTEVVESTDTIKNLIERGADIAGEDNLYIDPDCGMRKLPREAAFSKLRNMVKAASEF

SEQ ID NO: 9686 - protein, 308 aa, Methanocaldococcus jannaschii
MITTVVGSYPVVKKEETFLDKVKKVFGLYDEYKYAIERAVKDQVKAGVNIISDGQVRGDMVEIFTNNMYGFDGKRVVGRVEFIKPITLKDILYAKSIAKKLNPNVEIKGIITGPCTIASSVRVESCYSDNRDENLIYDIAKALRKEVEALKKHVPIIQIDEPILSTGMYDFDVARKAIDIIVDGLNIKFAMHVCGNVYNIIDELNKFNVDILDHEFASNKKNLVILESMEKKVGFGCVNTKVKKVESVEEIKSLIEEGIEILKNNEKLNKNLSDNILIDPDCGMRLLPIDVAFNKLKNMVEATKLIKI

SEQ ID NO: 9687 - protein, 202 aa, Pyrococcus horikoshii
MADEYLVPLDQYLAAGVHIGTQQKTKDMKKFIYRVRQDGLYVLDVRKTDERLKVAGKFLARFEPQSILAVSVRLYGQKPVKKFGEVTGARAIPGRFLPGTMTNPAVKNFFEPEVIIITDPRADHQAMKEAIEIGIPIVALVDTENLLSYVDLAIPTNNKGRKALALIYWILAREILYNRGEISSREEFKIPVEEFEMKIVRR

SEQ ID NO: 9688 - protein, 394 aa, Neurospora crassa
MASNRPAAFNTLRMGEVIREKVQDGVTGETREIQYTQCKIVGNGSFGVVFQTKLSPSNEDAAIKRVLQDKRFKNRELQIMRIVRHPNIVQLKAFYYSNGERKDEVYLNLVQEFVPETVYRASRFFNKMKTTMPILEVKLYTYQLFRALAYIHSQGICHRDIKPQNLLLDPTTGVLKLCDFGSAKILVENEPNVSYICSRYYRAPELIFGATNYTTKIDVWSTGCVMAELMLGQPLFPGESGIDQLVEIIKVLGTPTREQIRTMNPNYMEHKFPQIKPHPFNKVFKKADADAIDLIARLLEYTPTERLAAIDAMVHPFFDELRDPSTRLPDSRHNSGTVRDLPPLFDFTRHELSIAPQLNHKLVPSHMRPVLASKGLDIDNFTPMNKSEMMAKLD

SEQ ID NO: 9689 - protein, 353 aa, Nicotiana tabacum
MQSLKNNGQSNQYNNQSSQSIREQKRSEDGYNWRKYGQKQVKGSENPRSYYKCTFPNCPTKKKVERSLDGQITEIVYKGNHNHPKPQSTRRSSSTASSLTRPTLQYTKLMKSQIISSYGSNATPENSSISFGDDDHDHEQSSQKSRSRGDDNEEEEPDSKRWKRESESEGLSAPGSRTVREPRVVVQTTSDIDILDDGYRWRKYGQKVVKGNPNPRGYYKCTSPGCPVRKHVERASQDIRSVITTYEGKHNHDVPAARGSGINRPVAPNITYNNGANAMAIRPSVTSQIPLQSIRPQQSPFTLEMLHKPSNYNGFSGYVNSEDSYENQLQDNNVFSRAKDEPRDDMFMETLLC

SEQ ID NO: 9690 - protein, 454 aa, Neurospora intermedia
MSNLPSEPEFEQAYKELAYTLENSSLFQKHPEYRTALTVASIPERVIQFRVVWEDDNGNVQVNRGYRVQFNSALGPYKGGLRLHPSVNLSILKFLGFEQIFKNALTGLSMGGGKGGADFDPKGKSDAEIRRFCCAFMAELHKHIGADTDVPAGDIGVGGREIGYMFGAYRKAANRFEGVLTGKGLSWGGSLIRPEATGYGLVYYVGHMLEYSGAGSYAGKRVALSGSGNVAQYAALKLIELGATVVSLSDSKGALVATGESGITVEDINAVMAIKEARQSLTSFQHAGHLKWIEGARPWLHVGKVDIALPCATQNEVSKEEAEGLLAAGCKFVAEGSNMGCTLEAIEVFENHRKEKKGEAVWYAPGKAANCGGVAVSGLEMAQNSQRLNWTQAEVDEKLKDIMKNAFFNGLNTAKIYVEAAEGELPSLVAGSNIAGFVKVAQAMHDQGDWWSKN

SEQ ID NO: 9691 - protein, 347 aa, Cytophaga hutchinsonii
MASVKEKAKDNTKTKVESAGAFTKETYLFWYEKMQLVRKFEEKTGQLYGQQKIKGFCHLYIGQEACAAGAVSALKKGDHYITTYRDHGQPLVLGTDPKAIMAEMYGKATGISKGKGGSMHIFDKAVNFAGGHGIVGGQIPLGAGLAFAEMYKGTDNLCVCYMGDGAVRQGALHETFNLAMLWNIPVIFVIENNGYAMGTSVQRTSNVTELYQIGESYDMPSEAVDAMSVEEVHLSVARAAERARSGGGPTLLEFRTYRYKGHSMSDPAKYRTKEELESYKAQDPIEKVRAVILEKKHATEADLEAIDAKIKATVEEAVKFAEESPYPDASEAYKDVYTQEDYPFIIE

SEQ ID NO: 9692 - protein, 454 aa, Neurospora sitophila
MSNLPSEPEFEQAYKELAYTLENSSLFQKHPEYRTALAVASIPERVIQFRVVWEDDNGNVQVNRGYRVQFNSALGPYKGGLRLHPSVNLSILKFLGFEQIFKNALTGLSMGGGKGGADFDPKGKSDAEIRRFCCAFMAELHKHIGADTDVPAGDIGVGGREIGYMFGAYRKAANRFEGVLTGKGLSWGGSLIRPEATGYGLVYYVGHMLEYSGAGSYAGKRVALSGSGNVAQYAALKLIELGATVVSLSDSKGALVATGESGITVEDINAIMAIKEARQSLTTFQHAGHVKWIEGARPWLHVGKVDIALPCATQNEVSKEEAEGLLAAGCKFVAEGSNMGCTLEAIEVFENNRKEKKGEAVWYAPGKAANCGGVAVSGLEMAQNSQRLNWTQAEVDEKLKDIMKNAFFNGLNTAKTYAEAAEGELPSLVAGSNIAGFVKVPQAMHDQGDWWSKN

SEQ ID NO: 9693 - protein, 533 aa, Zea mays
MAGGGAAPPPKQEELQPHPVKDQLPSVSYCITSPPPWPEAVILGFQHYIVMLGTSVIIPSALVPQMGGGNEEKARVIQTLLFVAGINTLCQSFFGTRLPAVMGGSYTIVAPTISIIMAGRYSNEADPREKFLRTMRGTQGALIIASTIQIVLGFSGLWRNVVKLLSPLSAVPLVSLAGFGLYELGFPGVAKCVEIGLPEIILMLIFSQYLPHAVHAAKPVFDRFSVIFTIAIVWLYAYILTVSGAYKSARTKTQLHCRVDRSGLVGGAPWISVPYPFQWGAPTFDAGESFAMMVAAFVALVESSGAFIAVSRYASATMIPPSVLGRGIGWQGIGTLLGAFFGTANGTAVSVENAGLLALTHVGSRRVVQISAGFMIFFSVLGKFGAIFASIPLPIFAALYCILFAYIGACGLSFLQFCNLNSFRTKFIMGFSLFMGLSVPQYFNEYTSVAGYGPVHTGARWFNDMINVPFSSKPFVAVLVAFLLDNTIQVRDSGVRRDRGYHWWDKFRSFKTDSRSEEFYSLPFNLNKFFPSV

SEQ ID NO: 9694 - protein, 557 aa, Escherichia coli
MILLSIEGMTCPSCVAHVKEALDAIEGVNKVEISYENARATITTNGGVSVTVLIGAIEALGYIAKESTGTAKEITSPNDCCDNENASNTESNQTQHVAIIGTGSGAFACAIKAAEGGAKVTLIEGADVIGGCCVNVGCVPSKILIRAAQLAQQQRNNPFTGLENHAPQLSRALLTQQQTARVEELRAAKYQNILETNPALSLLKGWAQFKNANTLIVRKNDGTEQAVHADKILIATGSTPTIPPIDGLTETPYWTSTEALFAQELPQHLVVIGSSVVALEIAQAYRRLGSEVTILARHTLLYREDPLLGEKLTGCFEKEGIRVLNSTQATKVTHDGSQFTELTNAGDLRCDRLLVSTGRHANTCQLNLGAVGVTTNKKGEIVVNERMETNVPGIYAAGDCCNMPQFVYVAAAAGSRSGINMTGGYAKLDLSTMPAVIFTDPQVATVGLTEEQANAQDIETDSRVLEMENVPRALANFETDGFIKLVTEKATGRLIGAQILAHEGGELIQSAALAIRNRMTVTLEADQLFPYLTMVEGLKLCAQTFNKDVKELSCCAG

SEQ ID NO: 9695 - protein, 391 aa, Synechococcus sp.
MNVHLVAFLNEQEEIGMTQATNPVLDQTRNEGDIDYSALAEAQIKEGTDYVELTLPTKKSRKAKTSRRKETATKKKPYTEDSIRIYLQEIGRIRLLRAEEEIELARKIADLLELERMREQLTEHESRVPTDKEWAEAAGMPLKDFRRRLFHGRRAKDKMVQSNLRLVVSIAKKYMNRGLSFQDLIQEGSLGLIRAAEKFDHEKGYKFSTYATWWIRQAITRAIADQSRTIRLPVHLYETISRIKKTTKILSQELGRKPTEEEIAERMEMTIEKLRFIAKSAQLPISLETPIGKEEDSRLGDFIEADGETPEDQVSKSLLREDLENVLDTLSARERDVLRLRYGLDDGRMKTLEEIGQIFNVTRERIRQIEAKALRKLRHPNRNSILKEYIR

SEQ ID NO: 9696 - protein, 314 aa, Escherichia coli
MTPASYNLAVRRAAPAVVNVYNRGLNTNSHNQLEIRTLGSGVIMDQRGYIITNKHVINDADQIIVALQDGRVFEALLVGSDSLTDLAVLKINATGGLPTIPINARRVPHIGDVVLAIGNPYNLGQTITQGIISATGRIGLNPTGRQNFLQTDASINHGNSGGALVNSLGELMGINTLSFDKSNDGETPEGIGFAIPFQLATKIMDKLIRDGRVIRGYIGIGGREIAPLHAQGGGIDQLQGIVVNEVSPDGPAANAGIQVNDLIISVDNKPAISALETMDQVAEIRPGSVIPVVVMRDDKQLTLQVTIQEYPATN

SEQ ID NO: 9697 - protein, 676 aa, Arabidopsis thaliana
MVNAMVERATSEMLIGPDWAMNLEICDMLNSDPAQAKDVVKGIKKRIGSRNPKAQLLALTLLETIVKNCGDMVHMHVAEKGVIHEMVRIVKKKPDFHVKEKILVLIDTWQEAFGGPRARYPQYYAGYQELLRAGAVFPQRSERSAPVFTPPQTQPLTSYPPNLRNAGPGNDVPEPSAEPEFPTLSLSEIQNAKGIMDVLAEMLSALEPGNKEDLKQEVMVDLVEQCRTYKQRVVHLVNSTSDESLLCQGLALNDDLQRVLTNYEAIASGLPGTSSQIEKPKSETGKSLVDVDGPLIDTGDSSNQANGATSSSGNGVLNQLALPAPPVTNGSANSKIDLLSGDDLALVPVGPPQPASPVASDQNALALIDMFSDNTNNPSPATAPSGNPAQNIPLNPQGHQQPNSQAGEAGLQQSNGFAPQVGYSQFEQPSYGQGVSSPWSSQPAQQPVQPSYEGAQDSTAFPPPPWEAQLQDYSPSAESGSPFSPGMHPTQTAFTHAQPVNNNNPYPQIPQTGPPVNNNSPYAQMPQTGQAVANISPYPQIPQNGVYMPNQPNQALGSGYQPQQQQQQQMMMAQYYAQQQQLQQQQQQQAYGNQMGGYGYGYNQQQQGSSPYLDQQMYGLSMRDQTSHQVASSSSTTSYLPPMKPKNKPEDKLFGDLVDISKFKPTKPTSGRAGTM

SEQ ID NO: 9698 - protein, 274 aa, Listeria monocytogenes str. 4b H7858
MSELKLKSFEIRKDVLKMIYDAKTGHTGSDLSCADILVALYYGVLNVNPENPEALDRDRYVQSKGHAVEVLWAVLADKGFFAKEELADFSAFGSRLIGHPNNKVAGIEMNTGSLGHGLSVSVGMALAAKMDGKSYHTYTLMGDGELAEGSVWEGAMAAANYKLDNLTAIIDRNSLQISGRTEDVMSVEPLADKWRAFGWDVIEVDGNDPDKLQAIFKTVNVTGKPRLIIAKTIKGYGVKIAENAAKWHHYVPSSEEYEIAMKDLEERMEACRHE

SEQ ID NO: 9699 - protein, 162 aa, Pyrococcus abyssi GE5
MVSMCENEKERTLVIIKPDAVIRGLIGEIISRFEKRGLKIVGMKMIWISKELAEKHYAEHREKPFFKSLVEYITRTPVVVMVVEGRCAIEVVRKMAGATDPKNAEPGTIRGDFALEVSDAICNVVHASDSKESAEREIKLYFRDDEIFDYPRAEDWFYRKGI

SEQ ID NO: 9700 - protein, 659 aa, Ustilago maydis 521
MVGVSTASISAMGSKEHQLVGEARIRAPQPLQLPLLTLGLLGAQTVWSIDMAFAPPYLLDLGLSKSAMAAVFVAGPLSGLIVQPLIGSLADNSTSKYGRRRPFLATATIICAISILFLGFASEVAACFAVPGGNTHQNLAIFIGVVSVYLVDFSVNAVTALDRALMVDIAETEHQAEANAWAARLTGVGSVLSFLIGNLDLPKLAPGFLGTTQIQIISVLVSVILIATHAVVVLCVEEQVLAQTRSYGSRKAKGFGLTAIMHDLYIQARGLPPPIIEIFKVQFFAQIGWFPILFYSTVWVGEIYKADVRLNGGKQSDHELFEQATRAGSRAFFWHAVLSLLTSIVLPLAVPNPVHESSARPVWFANSSMLRKLGKVRERCPKLSFWWPFANFVFFISMMGTYFAGLTKSVFLATWVVTSVGFCFAIANWIPIALLGILIHTQHVQTNPDSAHLVVGGRTLPSNAAANADREGDEVAMALLGDRTHDDEWRRGSMARMSLYDASLDQRSQPQSRVCDDTDSDDEDQLPRALSFGASSLYEEAHARDANAEADDVERGRDSDKGANSTLSHAGTVLGLHNVAIVVPQFLVTAASALIFAIMEPSPKQKDQEGDVGVGNSTESGKSSDALGFIFRLGGCCALVAGILAVRLVRRHGHELRGY

SEQ ID NO: 9701 - protein, 332 aa, Pyrococcus abyssi GE5
MVKVVKVYYDDEVSMDILKDKTVAVIGYGNQGEAQAKNMRDSGVHVILGLRPSGSSWKRAEKDGFEVYTIEEAVKRADIVHILIPDLVQPKVYREHIEPYLREGQALGFSHGFNIHYKQIVPPEYVDVIMVAPKSPGKRVREKYLEGFGVPALVAVYQDYTGNAKDLALAMAKAIGCTRAGVIETTFKDETESDLIGEQLVLVGGLIELIKKGFEVLVELGYPPELAYFEACNEAKLIMDLIYERGFTGMLKAVSDTAKYGGLTVGPKVIDDHVKENMKKFAERVRSGEFAKEWISKADKASEVLEELMKPIEEHEIEKVGRFIRKMSGLER

SEQ ID NO: 9702 - protein, 535 aa, Spiroplasma citri
MAKYIFVTGGVVSGLGKGITASSIGVLLKASGLNVFMQKFDPYLNVDPGTMSPYQHGEVFVTTDGAETDLDLGHYERFIDENLTKESNITSGRIYKNVIEKERRGEYDGGTVQVVPHVTNEIKKKVYHAASTSKADIIITEIGGTVGDIESLPFIEAIRQVRMEQGRENVIYMHVSLVPYIAASKESKTKPTQHSVRELLSLGIQPDIVVARTEQALDDNVLEKIALFCNIEKSNVLVATDVASILWSHKMYEQNAQIVISKLLNLKSLKTDMSEWKRFVEKINQSQQVIEIKLVGKYIELPDAYLSVSESLRIAGYENKVKIKIDWIKAEDVNKKNDQQLLKNAKGILVPGGFDERGFEGRGFEGKILACQFARENNIPFFGICFGMQAAVIEFARNVCHIQDANSSELTETKNAIIDIIRGKDKTDALGGTLRLGNYKTTFVPNTLAHKLYGKKWGFRTSRHRYEVNNDYREQLAQAGLVFSGLYVEKNLVEVIEIPKYPFYLAAQYHPEFTSRPNKPNPLFNGFVQAVIKNK

SEQ ID NO: 9703 - protein, 613 aa, Escherichia coli K12
MEQNPQSQLKLLVTRGKEQGYLTYAEVNDHLPEDIVDSDQIEDIIQMINDMGIQVMEEAPDADDLMLAENTADEDAAEAAAQVLSSVESEIGRTTDPVRMYMREMGTVELLTREGEIDIAKRIEDGINQVQCSVAEYPEAITYLLEQYDRVEAEEARLSDLITGFVDPNAEEDLAPTATHVGSELSQEDLDDDEDEDEEDGDDDSADDDNSIDPELAREKFAELRAQYVVTRDTIKAKGRSHATAQEEILKLSEVFKQFRLVPKQFDYLVNSMRVMMDRVRTQERLIMKLCVEQCKMPKKNFITLFTGNETSDTWFNAAIAMNKPWSEKLHDVSEEVHRALQKLQQIEEETGLTIEQVKDINRRMSIGEAKARRAKKEMVEANLRLVISIAKKYTNRGLQFLDLIQEGNIGLMKAVDKFEYRRGYKFSTYATWWIRQAITRSIADQARTIRIPVHMIETINKLNRISRQMLQEMGREPTPEELAERMLMPEDKIRKVLKIAKEPISMETPIGDDEDSHLGDFIEDTTLELPLDSATTESLRAATHDVLAGLTAREAKVLRMRFGIDMNTDYTLEEVGKQFDVTRERIRQIEAKALRKLRHPSRSEVLRSFLDD

SEQ ID NO: 9704 - protein, 210 aa, Zea mays
ASSTVSHISFAEDGTDPPKKPTSVAEVAKQRELSGTLQSETDSKTKKQISNAKSKELSGHDIFADTLDSRSNRARNPSNGSTASHAPAKNTNVFAAATNLVPLFPFCCPECYSTNVRLKQQASTFSFGDANTDSTPKTARKITGKKVNDLTGNDIFKGDVPPASAEKHLSTAKLKEITGSNIFADGKEPIRERVGGNRKPPGGESSIALI

SEQ ID NO: 9705 - protein, 653 aa, Candida glabrata CBS138
MSLVPYKEGSIILNDPSSRSLAIVDPKIGSVAIYKQINARVEHLRSDRRSSVESIASYMCPHCGTEVHLSNDEGYGSSARKARKENTNRRNVSPDFDPDDLSNYNMLSTTTGSSAYFRLLQRNHQFYAIQDGEQTENSHIPDDMFIPGYFHKFFDILEPLGNGARGSVYKVVHKLGSTPLGTYALKKIPIGNDDEWFKKCIREVKILSSLKHTSENLITYNHVWMEMDASVGHVQSLDGSSTGMVGDVPCMFILQQYCAGGNLEDCINNVVFEKNPELISIEERKKRFRERHGQKSSGSAKAGLSTLQILSILHDIASGLKELHNSGLIHRDLKPSNCLLLSPYKHNDEERVFPTVVIGDFGESQMKGEYRTATGCTGTMEFTAPELIIENCDSNSNSQYHEFSFQSDMYSLGMIGYFVIFGELPFGSELDIPEIKNCIKALNIDKTYMVKKHREMRLKDIDYRIFDVLQLLLSSKESIRPSAIEVESIFEKLIGLNIKHDDNEKLAYDYSSKDKLEKSDVLYEQPDGINIGKLEEFQSSDKGSASTNEAYFQIASLPATPRLALPNLIDRQQVSDSTKINLTNITLRGLIFVFAALAYYRYALTVNAINPQVMHSFFWSSTFMALSFVDNQRFLFCIFIIQFIISLRAMFLY

SEQ ID NO: 9706 - protein, 194 aa, Zea mays
  misc_feature (79)..(79): Xaa can be any naturally occurring amino acid
  unsure (1)..(194): unsure at all Xaa locations
MGGLSVIAPPARDTASPQHRRARRAFLVSNYLILGCASGCGFLTLSLRLVPSVDGFLLILLHALTVAAAVAGCAVIAAXPDPPRGRCYTAHMSATAVVSILQGAAAVLAFSRTSEFLAGGLRSYVREEDGAVILRMVGGLGVGIFCLEWVALALAFVLRYYAYVDRECGGNPLRRSAKVGGEDGAGTWPWPFQV

SEQ ID NO: 9707 - protein, 396 aa, Listeria monocytogenes EGD-e
MRTQLMNMLQERKDEITQIRRHLHEHPELSFHETETANFIQDFYKGKDVEVATEVGNGHAVVVTIKGEKPGKTIALRADFDALPIEEQTELPFKSKNPGVMHACGHDGHTAYLLVLADCLIQLKENIPGTIKIVHQHAEETPPGGAKSVVESGILDDVDQIFGIHVFPFGESGQVYYHSGYAMAGRTYFKLKIQGVGGHGSSPHMANDAIVAGAYFVTAIQTVVSRRLNPFDTGVITIGSFDGKGSFNVIKDAVELEGDVRYMNTENRDKMDAEIHRIVAGMEAMFSVTVELTYTNDYPPLYNDPAVTEQVVASLQKGVGEYLTGISEYDMLSGSEDFAYYLQKIPGVFFYIGAKPKNTSIAYFNHHPKFDIDEDALLVAAKSVADVVLDYYKLNG

SEQ ID NO: 9708 - protein, 605 aa, Ralstonia metallidurans CH34
MRANVPADLILPVRAGLSRRRFVQGLAAGGVLGALGGLSSGSWASSGGGQAATGNGTAPVLRGTEFDLVIGESAVNFTGKPGMATTINGMLPGPTLRWRKGDTVTIRVTNRLNEPTSIHWHGIILPYQMDGVPGISFPGIPPGETFTYRFKVDQTGSYWYHSHSGFQEMTGVYGSLIIDGDEDPVRADRDYAVLLSDWTDEDPMRVMSKLKIQSDYYNYNQPTVVDFFRDVSNDGLGAALEKRKMWNQMRMSPTDLADLSGATLTYLMNGVTPAGNWTGLFRPGERVRLRFVNGAGNTFYDVRIPGLKLKVIQVDGQNIEPVTVDEFRIGPGETCDVLVEPTDDAHTIFAQSMDRTGFARGTLAVREGLQPPVPALDKAEWLTMGDMMGSMNHGAMNHGAMPMDHSQHDMSGMSGMAGMSAMSHGDSLKVPSTRARHARTEYGPSTDMRVDMARTNLDDPGIGLRNNGRRVLTLADMHTVGGPMDHRGPGREVELHLTGNMERYTWSFDGVEYGKSTPVFFKHGERLRVILHNDTMMTHPMHMHGMWSELEAPDGTFQARRHTIPVQPAQRISFLVTADALGRWAWHCHLMMHMDMGMFREVVVA

SEQ ID NO: 9709 - protein, 400 aa, Listeria monocytogenes EGD-e
MEVWTMKEKLFQKLDEKRDRMIEIRRYLHEHPELSFQEENTAKYIADFYKEMDCDVRTHVGGNGVVVTIDTGKPGKTLAIRADFDALPIQEETGLAFASKNPGVMHACGHDGHTAYMLILGETLIEMKQELTGKLVILHQHAEETPPGGAIQMIQDGALDGVDNVLGIHVMSTMKTGEVFYREGAIQTGRSYFKLKVQGQGGHGSSPHLANDAIVAASEFVVAVQTVISRRLNPFDVGSITIGSFDGKGSFNVIKDAVELEGDVRSMSEEARNIIQKEITRIVSGIEAMFGVTCELDYKNDYPVLNNDEALTDFVVKSIKGAKIPEITDVVRCEPQPPSEDFAYYAKERPSSFFYVGAMPADGHFYPHHHPKFDINEDALLIASKAMGACVVDYLKGENN

SEQ ID NO: 9710 - protein, 361 aa, Arabidopsis thaliana
MDRAPVTTGPLDMPIMHDSDRYDFVKDIGSGNFGVARLMRDKLTKELVAVKYIERGDKIDENVQREIINHRSLRHPNIVRFKEVILTPTHLAIIMEYASGGELYERICNAGRFSEDEARFFFQQLLSGVSYCHSMQICHRDLKLENTLLDGSPAPRLKICDFGYSKSSVLHSQPKSTVGTPAYIAPEVLLRQEYDGKIADVWSCGVTLYVMLVGAYPFEDPEEPRDYRKTIQRILSVKYSIPDDIRISPECCHLISRIFVADPATRISIPEIKTHSWFLKNLPADLMNESNTGSQFQEPEQPMQSLDTIMQIISEATIPAVRNRCLDDFMTDNLDLDDDMDDFDSESEIDIDSSGEIVYAL

SEQ ID NO: 9711 - protein, 215 aa, Brassica napus
  misc_feature (174)..(174): Xaa can be any naturally occurring amino acid
  misc_feature (194)..(194): Xaa can be any naturally occurring amino acid
  misc_feature (208)..(209): Xaa can be any naturally occurring amino acid
  misc_feature (214)..(214): Xaa can be any naturally occurring amino acid
  unsure (1)..(215): unsure at all Xaa locations
MRKGRGSSAVPPALPGSVKEPRYRGVRKRPWGRFAAEIRDPLKKSRVWLGTFDSAEEAARAYDAAARNLRGPKAKTNFQIDCSPSSPLQPLHHRNQIDPFMDHRLYGGEQEVVIISRPASSSMSSTVKSCSGVRPASSSVAKAATKRYPRTPPVAPEDCRSDCDSSSSVVEDGXDIASSSSRRKPPFEFDLNFXPLDGVDLFVGADDXXCTDLXL

SEQ ID NO: 9712 - protein, 165 aa, Leptospira interrogans serovar Copenhageni str. Fiocruz L1-130
MRFDMNDTLYDLTATLNNGKEQKLENYKGKVLLIVNTASECAFTPQYAGLQNLYSKYKTEGLEILGFPCDQFKHQEPGSDETIKNFCQKNYGVEFPIFKKIEVNGDNAHPVFRFLRNKASGFFGNSIKWNFTKFLVDKQGNVIKRYSPITTPENIEKEIQNLLKR

SEQ ID NO: 9713 - protein, 707 aa, Saccharomyces cerevisiae
MSEQLRQTFANAKKENRNALVTFMTAGYPTVKDTVPILKGFQDGGVDIIELGMPFSDPIADGPTIQLSNTVALQNGVTLPQTLEMVSQARNEGVTVPIILMGYYNPILNYGEERFIQDAAKAGANGFIIVDLPPEEALKVRNYINDNGLSLIPLVAPSTTDERLELLSHIADSFVYVVSRMGTTGVQSSVASDLDELISRVRKYTKDTPLAVGFGVSTREHFQSVGSVADGVVIGSKIVTLCGDAPEGKRYDVAKEYVQGILNGAKHKVLSKDEFFAFQKESLKSANVKKEILDEFDENHKHPIRFGDFGGQYVPEALHACLRELEKGFDEAVADPTFWEDFKSLYSYIGRPSSLHKAERLTEHCQGAQIWLKREDLNHTGSHKINNALAQVLLAKRLGKKNVIAETGAGQHGVATATACAKFGLTCTVFMGAEDVRRQALNVFRMRILGAKVIAVTNGTKTLRDATSEAFRFWVTNLKTTYYVVGSAIGPHPYPTLVRTFQSVIGKETKEQFAAMNNGKLPDAVVACVGGGSNSTGMFSPFEHDTSVKLLGVEAGGDGVDTKFHSATLTAGRPGVFHGVKTYVLQDSDGQVHDTHSVSAGLDYPGVGPELAYWKSTGRAQFIAATDAQALLGFKLLSQLEGIIPALESSHAVYGACELAKTMKPDQHLVINISGRGDKDVQSVAEVLPKLGPKIGWDLRFEEDPSA

SEQ ID NO: 9714 - protein, 247 aa, Brassica napus
  misc_feature (210)..(210): Xaa can be any naturally occurring amino acid
  unsure (1)..(247): unsure at all Xaa locations
RQHNWFQAHLPRYLAVPPPDTVQQAKEIDEEILQEVINMGFDRNLLIESLRNRTQNDGTVTYYLILDNRFRVSAGYLGAEFQETMEGTPRMHPAESVASPVSHRLPGLMELQGVGLRSQYPVERKWALGLQSRAHPREIMTEVLKALQDLTVCWKKIGPSNMKCRWVPTTADGMLSNSMHDTNYFGDDSSIVENDPPVKSPNVVKFEIQXLYKTRDAKFLLDLQRVHGPQFLFLDLCAAFLAQLRVL

SEQ ID NO: 9715 - protein, 1858 aa, Cryptococcus neoformans var. neoformans
MLPSSQQTTAPGPLPATPDQLSLRQRHPSSKQGTPRNLDGPSSSKPSPSESARRGKPNFFSSMHFSQALPQSIPSMIPDEPPPELQRSQRRSKVEALTKLDRTGTPIQSAAGPAATSFVPHTIQKSTPPPSAPHYLRNPLHRPKVVNPPFSIDSVRTEAPRHPHLRTEPRLFGLGDCPTFYPTPEEFKDPMAYIGSIAQQGKKYGMCKIVPPEGWHMPFRLETETFRFKARLQRLNQLEAASRAKLNFLEQLSMYHMQQGDSKIHIPLIDRQPLDLWKLRREVNRSGGNLELDRTKGWSKITVSLGHKPSWAPHVRAAYMNIVLPFDNWAVRARPASVSPLARLNPRSSGSPSKPPPPVTNDNFSASPVKGISRMGTTSHYPISKIRPNGMPFVPPPDNGRSPSKCASLNCGSALGDVNEINEPSPLSISPSATASTPTTLRINVPGFSDQEGSDSELSDEDSALSPPSIRKAPFEAEYQKGEVCEICKGEHDADKILLCDGCDRGFHIYCLDPPLASVPTNEEWYCTSCLLSQGEDFGFEEGDEHSVASFQARDAAFSYAWWNRHMPHSSSRTSINEAQPTDDGDNGQVKPRQLGKVTVSEDDIEREFWRLTESSLDTVDVEYGADIHSTSHGSAGPTLETHPLDPYSRDPWNLNNMPILPDSLLRYIKSDISGMTVPWIYIGMMFSTFCWHNEDHYTYSINYMYWGETKTWYGIPGSDAEKFEAAIKSEAPDLFEQQPGLLFQLITMMNPGRLSEAGVKVVACDQRPNEFVITFPKAYHCGFNHGINMNEAVNFALPDWLPDGKESVRRYREHNKAPVFSHNELLITITLFSETIRTALWLKDALIEMVDEETARRGALRTKYPKLVEYLIEEDCPEEQYQCAICKAFCYLAQVTCSCTSQVSCLSHADQLCTCRKPRKVLRMRYSEAQLEDIRDVVVHRAALPEQWRVRFLSLMESPRPQLKSMRALVSEGERIAHPIPELGPLKRFVDVATSLIQQIMAITARKSAGRRKKASRVDSDRKGKRTRADRDDGENDGIDRSPGVLTGLLKQADRLAFDAPELPQLRQLMVTIEDFRTEASSLLATPEDQLDRQRCKNALILGQSFGLDFPELPPLEQLVQRQEWFRQLEEEIDDANMEYDDVVALLEESLECQIPRDHTMVNELKVRERKGKQWIDSVERLLASSQITINDISALIEARRHVPISIDILRKLESLRKSAISWQTSARNVFATNGSSVAASRLCKNVVAASKPLSNVVIPEIRQLQAELEHHALWREEASKVLGVPVARLASTIDYIRSAFENSLAPDDDAHNNQRVCFCRSSPADNMVMCKVCQHSYHPRCVDVSLRHVPEEFKCAMCQRLPNDDGPSLDAFIGLISPQRWNFLINPLEFELAQYIASAAIRYAPQAFRLADPLSLSPPCRDLELLRHTIRKIYTLPLVFDARNSQTNERCVFVNWLFRRMQDAIRMKAKEISLSTVGVQSKVGRRPSVALAAGQSTLMNSENGTLSGRARPRRRARIILAESHPHEFYCLCGMSSAGENTTAQIECPKCGQGYHAGCVKMTEGLAGKSVWTCPCCTVRDGRHYQKGVEVRVQLSSHRGTDQFLDYHTIINDFADRLVVITKPTSASAITLECIDFVPARIPNNVKTMEEREDSLNRIKKRKSGGVDGGFRNEQATNNPVAHGLKTVAAKGFMGPPSTILNKIPTQTASSEFGGSSVAMGALPDTQTKSSAVPRTIYTPAESNANTSVSLLTPTIQNRSTFDLRSDFGLESCFSSTPVATGASTTSIVRQNGCTASATTICCEGRATAVTGKSVLDDNIDSREGSEERYSYSDMGEFTAVKEGRHVVDEDVTMENQ

SEQ ID NO: 9716 - protein, 347 aa, Prochlorococcus marinus subsp. marinus str. CCMP1375
MTTTTSGAPASLGRNELPPHLDENLLTPRFYTTEFEKAAKTDLEIARKDFEAMFKEMEADYNLKHFDRKASLERLDELSPEDKAVYESYLVRSVVSEFSGFLLFKEISNRFKKAGRQELGQFFTFLARDEARHAGFLGRALKTEGINVDLPNLPKKRAATFFPLSWVLYSLYLSEKIGYWRYILINRHLKANPDKVCAPLFDFFEPWCQDENRHGDCINLMMRCWPGMTKGFRGKLLSRFFLWTVFLTHTLTVCERGEFYELLGIDPVLFDEEVIIQTNNTSKNAFPWVYKFEDGKFLSMRIDILNAFKKWRNQNGIKKPLALGKFVLLILKQFTLPMEKTDAVRYG

SEQ ID NO: 9717 - protein, 362 aa, Azoarcus sp. EbN1
MTTIGRFQVDYTRFLDPRGEATQPLPDFALDPEKLIPLYRAMVLTRTFDTKAIALQRTGKLGTFASALGQEAIGVGVAAAMRAEDVLVPSYRDHPAQLLRGVTMAESLLYWGGDERGSDFAGPRDDFPICVPIATQVCHAAGAAYAFQLRQEARVAVCFIGDGGTSKGDFYEALNFGAVWKAPLVVVVNNNQWAISVPRSMQSAAQTLAQKAIAAGIEGCQVDGNDIVAVHHAARQAIEKARSGGGPSLIEALSYRLGDHTTADDASRYRDPAVVQENWTFEPVVRLRNHLVRLNAWDPQHEEQLVRECGEAVNAAVERYLATPPPTPEAMFDHLYRTLPAALQEQRDMALRFAPHEGGGHD

SEQ ID NO: 9718 - protein, 1230 aa, Cryptococcus neoformans var. neoformans
MSSFTPAFRLHHTHSSSVSPTASNDVAPSSPTPNQPHQLAARSPLYATSPNCASKITKGSSLSSSTAHHGLKYVRPSTSPLLRSPKGESFSAYLGNWGSQELITFLNIHKCGQYLAIFQKNDINGKILLDLDMTALKSMGIGKISERVRLIGGIKDLRRCVADESIRAPFTQRSYPSERTLLPSLPSHSNVLLDKWDCSSSASRLGKRQITLRPPPLDLQGHMPPRLLSHASLGIATIDTHDIHTTNSKIEVYIQQNPPGQPQSMPTKRSDSLTLCAAPSRNVGRRSPSSRHFEGCKSQTDGLTTLNLTLDRQVPSSTMNNVTLREDCHLQREERLPLSHQVPHSRNAFASPHKTSLSGRCPLARGDTTSHQPSGPAIAEQDSPVNYRISNTVTNTKEISQGDLKQPFVMKSLESQSHLLAGVSDMSHDPVTDGFKPKGKASVPLTVMSSSDISAVNANPAALSLADLRRQLVKFINTEDDTIRTVNVMHVTSGVEILERALKKFGKFGTGIHGSPDVYGDEDGDGTLEIDGWEVYTESTPDESSKPLSEFNLLKTCTFHREGTAIQDKGLFLRKKQRMQKRKNIQDFFGETPPPSMSPTSPTLITGPHLSLVQGKSQPTSGSAFSSSSRLSTLTHKGRNRASMISVMSGLGVPIINTLPSPQGNGLRLTGSVHSHEKKSMYNFFGHRPPSELISNHLTDYFPSAKKSDVEKARHSLLRLSGGTVAYKKSGIYEGDSTPDHWSKPGDNQPPSLPPFEPSQDTLSDSLQAFASSTPVHLSRPKHTVALRRRRDSDSSSRSHTSMLMQTRRNRDHSDTTSLLTVDEITAEVENRRVSTIQRGDYIEETEDSSSIEGDTLPQDDESKGVLRAICSDSNKLVDSGKSYQGDSDIDQQHELEDEEEDKLDDDEEEEEEEEEEDNEQGKAFTSTGSKRIIKWIKGALIGAGSFGSVYLGMDAQSGLLMAVKQVELSAGSAKNEDRKRSMLSALEREIELLKELQHENIVQYLDSSVDANHLNIFLEYVPGGSVAALLNNYGAFEEALVRNFVRQILTGLNYLHMRGIVHRDIKGANILVDNKGGIKISDFGISKKVENSLITGLRTNRPSLQGSVFWMAPEVVKQTSYSPKADIWSVGCLVVEMLTGTHPWADLTQMQAIFRIGSLARPAPPSDISVQADEFLRKTFEIEHAKRPTAAQLLKHPFIGSPRVRTAASNFINGAIASETMEVQVVEES

SEQ ID NO: 9719 - protein, 411 aa, Zea mays; identical to SEQ ID NO: 962

SEQ ID NO: 9720 - protein, 544 aa, Vibrio vulnificus YJ016
MTPTELKRLYRIIKVQLEYGLDDLLPDHQLAKAPRWMRKSLFWLKNQHPEKPLGDRLRLALQELGPVWIKFGQMLSTRRDLFPPHIADPLALLQDQVSPFDGALAKAQMEQALGGPLETWFSDFDLVPLASASIAQVHTAKLKTTNQEVVLKVIRPDIRPIIDADLKLMRRMASIVAKAMPEARRLKPIEVVREYEKTLLDELDLRREAANAIQLRRNFTDSEELYVPEVYPDFSNETVMVSERIYGIQVSDITGLKANGTNMKLLAERGVSVFFTQVFRDSFFHADMHPGNVFVNPEHPENPQWIGLDCGIVGTLNSEDKRYLAENFLAFFNRDYRRVAELHVDSGWVPADTNIDEFEFAIRIVCEPIFAKPLCEISFGHVLLNLFNTARRFNMEVQPQLVLLQKTLLYVEGLGRQLYPQLDLWETAKPFLEEWMMNQVGPKALINAIKDRAPYWAEKLPELPELLYDSLKQGKAMNQRMDQLYQGYRASKRQQATGKFLFGVGATLVVCSAILVDHTYEQLSLATAIAGVTFWLFSWRAYRR

SEQ ID NO: 9721 - protein, 511 aa, Cryptococcus neoformans var. neoformans
MFARQPLSQNLLRPLSRPSSSFSRTSTIPKLAFLQSARGFASASEPYDVVIIGGGPGGYVAAIKAAQLGFKTACIEKRGALGGTCLNVGCIPSKAMLNNSHIFHQTQHDLKNRGIDVSGIQLNLPKMLAAKEASVKALTGGIETYLFKKNGIDYIKGEASFETANKLNVKLLEGGETQVEAKNVIIATGSEVTPFPGLEIDEERIVSSTGALELKEVPKKMVVIGGGVIGLELGSVWSRLGAEVTVVEYLGAIGAGMDGEIGKQFQKILTKQGFKFKLNTKVISGHREGDIVKLKVDSAKGGKEETIEADVVLVAIGRRPVTTGLNLEAIGVETDKRGRIIIDDEFNTSAKGVKCIGDVTFGPMLAHKAEEEGIAAVEILKTGHGHVNYDAIPSVVYTHPEVAWVGKNEEELKGAGVQYKIGKFPFAANSRAKTNQDSEGFVKFIVEKETDQVLGCHIIGPNAGEMIASATLALEYKASAEDIARTCHAHPTLSEAFKEAALASYDKTINF

SEQ ID NO: 9722 - protein, 427 aa, Arabidopsis thaliana
MRETKKEEEEVEEEEAMNALAATNRNFKLAARLLGLDSKLEKSLLIPFREIKVECTIPKDDGTLASFVGFRVQHDNARGPMKGGIRYHPEVDPDEVNALAQLMTWKTAVAKIPYGGAKGGIGCDPSKLSISELERLTRVFTQKIHDLIGIHTDVPAPDMGTGPQTMAWILDEYSKFHGYSPAVVTGKPIDLGGSLGRDAATGRGVMFGTEALLNEHGKTISGQRFVIQGFGNVGSWAAKLISEKGGKIVAVSDITGAIKNKDGIDIPALLKHTKEHRGVKGFDGADPIDPNSILVEDCDILVPAALGGVINRENANEIKAKFIIEAANHPTDPDADEILSKKGVVILPDIYANSGGVTVSYFEWVQNIQGFMWEEEKVNDELKTYMTRSFKDLKEMCKTHSCDLRMGAFTLGVNRVAQATILRGWGA

SEQ ID NO: 9723 - protein, 398 aa, Ustilago maydis 521
MASLRTGLRVAQPLRASARNFATRPSIRSSVRHYSSPAPGSPPPPQPSSSSSTSKVLLTSVAIAAAAGGAFLAFGRDDKVSILGVGANGANKFQGSKGSVGPATTSAHSKADYQAVYNAIAEQLEANPDYDDGSYGPVLVRLAWHASGTYDKNSNTGGSNGATMRFAPESEHGANAGLGAARDFMEKIHQKFPWITYSDLWTLGGVAAIQELGGPKIPWRPGRKDATADKCTPDGRLPDGDKGPDHLRYIFYKMGFNDQEIVALSGAHALGRCHTDRSGFDGPWTFAPTSFTNEYFNLLMNEKWNIRKWNGPPQFEDKSTKSLMMLMTDMALVQDPSFKKHVQRYAKSEDEFFNDFRSAYAKLLELGVPAENFKAFETKLDGGKPFEFATSAEQENAN

SEQ ID NO: 9724 - protein, 454 aa, Haemophilus somnus 129PT
MTIKTPVQATLASNQYFLDRQDIMESNVRSYPRKLPFAYQKAQGVWVTDVEGNEYLDFLAGAGTLALGHNHPKLIQAIKDVLDSGLPLHSLDITTPLKDAFTEELLSFFPKDKYILQFTGPSGADANEAAIKLAKTYTGRGNVIAFSGGFHGMTHGALSLTGNLGAKNAVQGLMPGVQFMPYPHEYRCPFGIGGKAGVKAVEDYFENFIEDVESGVVKPAAVILEAIQGEGGVVPAPISFLQKVREVTQKHGILMIVDEVQAGFCRSGKMFAFEHANIEPDIVVMSKAIGGSLPLAVLAIKKEFDAWQPAGHTGTFRGNQLAMATGYVSLKIMREENLAQNAKERGEYLTKALTELSQEFPCIGNVRGKGLMMGIDIVDEHQAKDATGAYPRDCDLAVAIQKYCFKNKLLLERGGRGGNVVRILCAVNITQAECEEFIKRFKQSVAEAVKAVRG

SEQ ID NO: 9725 - protein, 524 aa, Lycopersicon esculentum
MDTCCAAMKSTVHLGRVSTGGFNNGEKEIFGEKIRGSLNNNLRINQLSKSLKLEKKIKFGEAYSVITIENDTETVFVDMPRLERRRANPKDVAAVILGGGEGTKLFPLTSRTATPAVPVGGCYRLIDIPMSNCINSAINKIFVLTQYNSAALNRHIARTYFGNGVSFGDGFVEVLAATQTPGEAGKKWFQGTADAVRKFIWVFEDAKNKNIENILVLSGDHLYRMDYMELVQNHIDRNADITLSCAPAEDSRASDFGLVKIDSRGRVVQFAEKPKGFDLKAMQVDTTLVGLSPQDAKKSPYIASMGVYVFKTDVLLKLLKWSYPTSNDFGSEIIPAAIDDYNVQAYIFKDYWEDIGTIKSFYNASLALTQEFPEFQFYDPKTPFYTSPRFLPPTKIDNCKIKDAIISHGCFLRDCTVEHSIVGERSRLDCGVELKDTFMMGADYYQTESEIASLLAEGKVPIGIGENTKIRKCIIDKNAKIGKNVSIINKDGVQEADRPEEGFYIRSGIIIIAEKATIRDGTVI

SEQ ID NO: 9726 - protein, 155 aa, Triticum aestivum
MVKQKIVLKLALDDERKRRKAFKAAVGMSGVTSATMEGDKIIIVGDGVDPITLTTMLRRSLGYAELLSVSSGDDKKKDGYGYGGADGGGSGMSFGGKEGGGSKGGGGGGGYSQNAVAPVTYPAYQQYNAMPSYPVYSYPAPAYQHQEQDPGCSIM

SEQ ID NO: 9727 - protein, 520 aa, Zea mays
MQPQQGSSSSLQQNSTSAPGAAVVPPPKKKRNQPGNPNPDAEVIALSPRTLLATNRFVCEVCNKGFQREQNLQLHRRGHNLPWKLKQKNPREARRRVYLCPEPTCVHHDPSRALGDLTGIKKHYCRKHGEKKWKCDKCSKRYAVQSDWKAHSKTCGTREYRCDCGTLFSRRDSFITHRAFCDALARESAQMPPLGAGLYVGPGSMSLGLSQIHGFADQAQSSSAAAAAAPQFDHIMPSSSGSSSMFRSQASASSPSYFLGGSAPPAAAQDFSEDGSQGSQGPLLHGKAHFHGLMMQLPEQQHQPGSSNAAVGANGSNILNLGFFSAGNSGGTSGSLQDARIAIQDQFNLSGSGSGSAEHGNNVMVASIGSHLGRGFPSLYSSSPSAGMAQNSATALLMKAAQMGSTTSSTTHNNHNGPTTTSTLLRATGFSGATGSGQLGTTGGRAAAGEEGAASHEAHFHELIMNSLAGGGFSGTAGFGGGVDDGKLSTRDFLGVGRGAATMAPPGLHMGALDPAQQMK

SEQ ID NO: 9728 - protein, 146 aa, Synechocystis sp. PCC 6803
MSLILYNPLREMDNFQQQMNQLFEEVFVPTDRHGDRQGFNPKAELTETEEAYVLKLELPGMDPDNLDIQAARDAVTVSGDRQDTHSTEKDGVRRTEFRYGSFRRVIPVPGAIQNTEVKANYDAGILTLTLPKVEEAKNKVVKVQLS

SEQ ID NO: 9729 - protein, 308 aa, Solanum tuberosum
MAGKSKILFIGGTGYIGKFIVEASAKAGHDTFVLVRESTLSNPTKTKLIDTFKSFGVTFVHGDLYDHESLVKAIKQVDVVISTVGHALLADQVKLIAAIKEAGNVKRFFPSEFGNDVDRVHAVEPAKAAFNTKAQIRRVVEAEGIPFTYVATFFFAGYSLPNLAQPGAAGPPNDKVVILGHGNTKAVFNKEEDIGTYTINAVDDPKTLNKILYIKPPHNIITLNELVSLWEKKTGKNLERLYVPEEQVLKNIQEASVPMNVGLSIYHTAFVKGDHTNFEIEPSFGVEASEVYPDVKYTPIDEILNQYV

SEQ ID NO: 9730 - protein, 400 aa, Arabidopsis thaliana
MESLLSSSSLVSAAGGFCWKKQNLKLHSLSEIRVLRCDSSKVVAKPKFRNNLVRPDGQGSSLLLYPKHKSRFRVNATAGQPEAFDSNSKQKSFRDSLDAFYRFSRPHTVIGTVKFLFKNVLSILSVSFLAVEKVSDISPLLFTGILEAVVAALMMNIYIVGLNQLSDVEIDKVNKPYLPLASGEYSVNTGIAIVASFSIMSFWLGWIVGSWPLFWALFVSFMLGTAYSINLPLLRWKRFALVAAMCILAVRAIIVQIAFYLHIQTHVFGRPILFTRPLIFATAFMSFFSVVIALFKDIPDIEGDKIFGIRSFSVTLGQKRVFWTCVTLLQMAYAVAILVGATSPFIWSKVISVVGHVILATTLWARAKSVDLSSKTEITSCYMFIWKLFYAEYLLLPFLK

SEQ ID NO: 9731 - protein, 545 aa, Haemophilus influenzae 86-028NP
MATNYIFVTGGVVSSLGKGIAAASLAAILEARGLNVTIMKLDPYINVDPGTMSPTQHGEVFVTQDGAETDLDLGHYERFIRTKMTKRNNFTTGKIYSEVLRKERRGDYLGATIQVIPHITNEIKDRVIAGAQGHDVVIVEVGGTVGDIESLPFLEALRQLAVQVGREHTLFMHLTLVPYIPTAGEVKTKPTQHSVKELLSIGIQPDVLICRSDRMIPPNERAKIALFCNVAERAVISLKDVNSIYQIPALLKSQGLDDFVCERFRLTCPEADLTEWEQVLYKQANPVGEVTIGMVGKYTELPDAYKSVNEALKHAGLTNRLSVSIKYIDSQDVETKGVEVLKGVDGILVPGGFGYRGVEGKIRTAQYARENKIPYLGICLGMQIALIEYARNVAGLTKANSSEFDKDCEQPVVALITEWQDAEGNTEVRTDESDLGGTMRLGAQQCHLVSGSHARELYGKETIEERHRHRYEVNNTLLPQIEKAGLKVTGLSADKKLVEIIEVPNHPWFVACQFHPEFTSTPRDGHPLFAGFVKAAYENHKKSVK

SEQ ID NO: 9732 - protein, 545 aa, Haemophilus influenzae R2866
MATNYIFVTGGVVSSLGKGIAAASLAAILEARGLNVTIMKLDPYINVDPGTMSPTQHGEVFVTQDGAETDLDLGHYERFIRTKMTKRNNFTTGKIYSEVLRKERRGDYLGATIQVIPHITNEIKDRVIAGAQGHDVVIVEVGGTVGDIESLPFLEALRQLAVQVGREHTLFMHLTLVPYIPTAGEVKTKPTQHSVKELLSIGIQPDVLICRSDRMIPPNERAKIALFCNVAERAVISLKDVNSIYQIPALLKSQGLDDFVCDRFRLTCPEADLTEWEQVLYKQANPVGEVTIGMVGKYTELPDAYKSVNEALKHAGLTNRLSVNIKYIDSQDVETKGVEVLKGVDGILVPGGFGYRGVEGKIRTAQYARENKIPYLGICLGMQIALIEYARNVAGLTKANSSEFDKDCEQPVVALITEWQDADGNTEMRTDESDLGGTMRLGAQQCHLASGSRARELYGQETIEERHRHRYEVNNTLLPQIEKAGLKVTGLSADKKLVEIIEVPNHPWFVACQFHPEFTSTPRDGHPLFAGFVKAAYENHKQSVK

SEQ ID NO: 9733 - protein, 414 aa, Zea mays
ISISMESRVLLRATANVVGIPKLRRPIGAIHRQFSTASSSSFSVKPIGGIGEGANLISGRQLRPILLLDSSAINGGEKREILKPVKAAAAEGGDTAGEAKVGFLAKYPWLVTGFFFFMWYFLNVIFNILNKKIYNYFPYPYFVSVIHLFVGVVYCLISWSVGLPKRAPIDSNLLKVLIPVAVCHALGHVTSNVSFAAVAVSFTHTIKALEPFFNAAASQFIMGQSIPITLWLSLAPVVLGVAMASLTELSFNWLGFISAMISNISFTYRSIFSKKAMTDMDSTNVYAYISIIALFVCIPPAIIVEGPKLLNHGFADAIAKVGMTKFISDLFWVGMFYHLYNQLATNTLERVAPLTHAVGNVLKRVFVIGFSIVIFGNKISTQTGIGTGIAIAGVAMYSIIKAKIEEEKRQGKKA

SEQ ID NO: 9734 - protein, 135 aa, Burkholderia sp. 383
MSYSNKVLDHYENPRNVGSFAKDDDTVGTGMVGAPACGDVMKLQIRVGADGVIEDAKFKTYGCGSAIASSSLVTEWVKGKTLDEALSIKNTQIAEELALPPVKIHCSILAEDAIKAAVADYKKRHDTTEGDQAAA

SEQ ID NO: 9735 - protein, 243 aa, Glycine max
MEDPNQAPEGSSQKKMGRGKIEIKRIENTTNRQVTFCKRRNGLLKKAYELSVLCDAEVALVVFSTRGRLYEYANNSVRATIERYKKANAAASNAESVSEANTQFYQQESSKLRRQIRDIQNLNRHILGEALGSLSLKELKNLEGRLEKGLSRVRSRKHETLFADVEFMQKREIELQNHNNYLRAKIAEHERAQQQQSNMNMSGTLCESLPSQSYDRNFFPVNLIASDDQQQYSRQDHTALQLV

SEQ ID NO: 9736 - protein, 426 aa, Thermoplasma acidophilum DSM 1728
MQWQAMGSKDLFQRGSSLFPMGVNSPVRYFKDYPFYVDNASGSRIYDVDGNEYIDYCLAYGPSILGHADPDVVRAVRDQAEKGLIYGAPSEAEIRLGDIIRRSSKNIEMMRFTNSGTEATMHAIRLARAYTGRSIIVKMEGGFHGAHDYSLIRSGSGTLTFGSPSSPGVPEEVARTVVVGRYNDEANIRNIFSQYGSRIAAVITEPIMGNAGVITPEPGFLEFLRDITQKNGSLLIFDEVITGYRFAFSPYQDIIGIRPDLTTMGKIIGGGMPIGLFGGSADIMKKVSPSGDVYQSGTFSGNPVTMAAGFAALKKLQGMDYASLVRRTEKLMNGIDDILAKRKIRHVVNGYRSMFQFFFAESAKNYDEVMKADRDLYFRIFKRLMNHGVYVPPSQFETNFVSFAHSDDDISKTIEAFDLSVGEAAK

SEQ ID NO: 9737 - protein, 348 aa, Triticum aestivum
  misc_feature (151)..(151): Xaa can be any naturally occurring amino acid
  misc_feature (170)..(170): Xaa can be any naturally occurring amino acid
  unsure (1)..(348): unsure at all Xaa locations
MKKPGKLALPSQDSTIGKFLTQSGTFKDGDLLVNKDGLRIVPQSEEGEAPPIKPLDNNHQLSIDDLDSIKVIGKGNSGTVQLVRHKWTGQFFALKVIQLNIQESIRKQMAQELKISLFTQCQYVVTCYQCFYVNGVISIALEYMDGGSLAXFLKAVRTVPEAYLAAILSXLKGLMYSHHEKRLIPRDLKPWNILINHRGKVKISDFGVSPIISSSSAQRDTFTGTFNYMAPERISGQKHGHLSDIWSLGLVMLECATGNFPYPPRESFYELLEAVVDQPSPSAPSDQFSPEFCSFISACIQKNAADRSSAQTLSAHPFLSMYDDLNIDLSDYFTTAGSPPPPPHQIAL

SEQ ID NO: 9738 - protein, 431 aa, Bacillus anthracis str. Sterne
MKNLDNQHNQNHIMGTLQWFIFLLANSIALPIVVGGLFHLTTEEIFYLMQRTFFVVGISSFLQGWLGHRLPIADGPAGSWVGVFTVLAYATAGQDQLHSTLQILELGMIISGVILIGLGVTGFIGRILFLFTPIVTGTFLLLLCLQLSGVFLKGMLGITATASQIDGFTAIIAFSIFLFVIILSNFGKGFVKSYAVLIGLISGWILFLIAGKVTISSQVTHFVQLPQIFAWGLPKWNTGMAVSSFVMVCILVSNTVAAIIAINQATIQKGTIEQKQLKDGTWVGGISHIISSVFSTVGVVPLPATAGFIRLTKQKYIRSFLLACMLLVVMSLFPSIIRYLASLPSAVASAVLMASFVQLIGIGLNNIKQVELNERNVTILGVAVLFGSGVMFLPSGALQSLPSVMQYIFGNGLFVGTVVSILLEQIWRIGK

SEQ ID NO: 9739 - protein, 594 aa, Cytophaga hutchinsonii
MNQAILYRGPDHSDFVSFQFKQQQIFIGNNRLKIIDRNTLSNQPYNSIDKRYSLTFNGAIYNYKELKQQLPAMEWQTESDTEVLLNWMIVHGLSGLPELNGMFAFAFYDRQQHALIIARDPSGIKPLYYYNDDDYFIASSEIKGILASGLVKKEFNSNQVSHYLQFKYVPKPFTFYKNIFELNEATFIKIDEYDFKIKRFESPSVIKPNTLTNQQLIETCDQLIENAVKHHLVADVPVGLYLSGGIDSTLLLSKIRKLGHLNFPTFTIANSSREQAFGTRDFEFARLASKLYNSDHHEVSVHAEMLQDLPAFVSMIDQPIGDSALFLTHILSKEAGQHVRVALNGAGADELFAGYNRHSAYKSYLNNLLHKNLAITLIKSTYNILPDGGNHSLKKVFRLWNKFTGMMDVDPIKTCHNFSSSEYFIEKNTSIEVDDKSYEDLSYYLYYCLRNDRTKYLISDILALTDKMTMRSSIEARVPYLDQELRRFVESLDPSVLLKNGRKWILKEVLLRNGGETFLNRPKEGFGMPFGYWLKLPVNKNFVEKLTNKNHPIYEWVPYQTIKNLVDWHLGSKRDCSSELWSVLLLMHWYEKEF

SEQ ID NO: 9740 - protein, 439 aa, Selenomonas ruminantium subsp. ruminantium
MLNLTKSAAAFAEAKELMPGGVNSPVRSYKSVDCNPPFIDHALGDKIYDIDGNEYIDYVGSWGPMVVGHAHPKVVKALQEAATRGTSYGAPTCIESELAKLVMEVYPSIETIRMVNSGTEATMSALRLARGYTGREKIVKFIGCYHGHSDSLLVNAGSGMATFGVPSSPGVTKGTAQDTISVPYNDEEAITKVMEEVGDEVAAVIVEPVAGNMGLVLPKQGYVRKLRDLTEKHGALLIFDEVMCGFRASLGGAQAAYGITPDLTCLGKIIGGGLPVAAYGGRKDIMAKVSPSGPVYQAGTLSGNPLAMTAGLATLQIITAEPEDGKADYSRELTLKTKKLLLGWQEKAKAAGVAIQVHQAGSMFGIFFSEKDVLNYEDSCNADQEKFKVWFKSMLEQGVYLAPSQFETLFMSGAHTDEDIDRTIAAAEKAFAAVAAMEK

SEQ ID NO: 9741 - protein, 456 aa, Pseudomonas aeruginosa UCBPP-PA14
MNSQITNAKTREWQALSRDHHLPPFTDYKQLNEKGARIITKAEGVYIWDSEGNKILDAMAGLWCVNVGYGREELVQAATRQMRELPFYNLFFQTAHPPVVELAKAIADVAPEGMNHVFFTGSGSEANDTVLRMVRHYWATKGQPQKKVVIGRWNGYHGSTVAGVSLGGMKALHEQGDFPIPGIVHIAQPYWYGEGGDMSPDEFGVWAAEQLEKKILEVGEENVAAFIAEPIQGAGGVIVPPDTYWPKIREILAKYDILFIADEVICGFGRTGEWFGSQYYGNAPDLMPIAKGLTSGYIPMGGVVVRDEIVEVLNQGGEFYHGFTYSGHPVAAAVALENIRILREEKIIEKVKAETAPYLQKRWQELADHPLVGEARGVGMVAALELVKNKKTRERFTDKGVGMLCREHCFRNGLIMRAVGDTMIISPPLVIDPSQIDELITLARKCLDQTAAAVLA

SEQ ID NO: 9742 - protein, 599 aa, Anaplasma marginale str. St. Maries
MGAPGSAYKIVDHEYDVVVVGAGGAGLRAVVGMAAAGLSVACVSKVFPTRSHTVAAQGGISAALGNISEDDWRWHMFDTVKGSDWLGDQDAIEYMCKHAMEAVVELEHYGVPFSRTEDGKIYQRPFGGMTTEYGKGKMAVRTCAASDKTGHAILHTLYQQALKYKVEFFVEYFAIDLIMSANNSACHGVVAWSLCDGTLHRFRAHAVVLATGGYGRVYFSATSAHTCTGDGGGMAARAGLPMEDMEFVQFHPTGIYGSGCLMTEGCRGEGGYLLNSEGERFMERYAPKARDLASRDVVSRAITMEIREGRGVGPKKDHVFLSIAHLDPAVIKERLPGISETAKTFAGVDVTKDPIPVLPTVHYNMGGVPTNYYGEVILSEKGKIVAGLFAIGEAACVSVHGANRLGSNSLLDLVVFGRAAALRAKEIIKPGAPHAPIEESFVDAIVDRFDKLRFSRGGPRVAEVRDSMQRVMQDHAAVFRTADILNEGKQKIREVASMAKDMSVSDRSMIWNSDLVEALELTNMLPQAVITMDCAANRTESRGAHAREDFPERDDENWMKHTMAWYDSKTHGVKIAYKSVATSTLTNEVEWFPPQKRVY

SEQ ID NO: 9743 - protein, 331 aa, Listeria monocytogenes str. 4b H7858
MPDLTDDELVELMTRMVWTRVLDQRSISLNRQGRLGFYAPTAGQEASQLASHYALEKHDYILPGYRDVPQLIWHGLPLTKAFLFSRGHFVGNQFPEDLNVLSPQIIIGAQIVQAAGVALGLKKRKKDAVVITYTGDGGSSQGDFYEGMNFAGAYHAPAIFVVQNNKFAISTPREKQSAAETLAQKAVAAGIPGVQVDGMDPLAVYAVTKFARERAVAGEGPTLIETMTYRYGPHTLSGDDPTRYRTKELDGEWELKDPIVRFRTFLEGKGLWNEEKENAVIDQAKEEIKVAIKEADATPKQTVTDLLKNMYETPTAPIKEQLAIYEAKESK

SEQ ID NO: 9744 - protein, 505 aa, Populus tremuloides
MDLLLLEKTLLGSFVAILVAILVSKLRGKRFKLPPGPLPVPVFGNWLQVGDDLNHRNLTDLAKKFGDILLLRMGQRNLVVVSSPELSKEVLHTQGVEFGSRTRNVVFDIFTGKGQDMVFTVYGEHWRKMRRIMTVPFFTNKVVQQYRYGWEEEAAQVVEDVKKNPGAATHGIVLRRRLQLMMYNNMYRIMFDRRFESEEDPLFNKLKALNGERSRLAQSFDYNYGDFIPILRPFLRGYLKICQEVKERRLQLFKDYFVDERKKLASTKNMCNEGLKCAIDHILDAQKKGEINEDNVLYIVENINVAAIETTLWSIEWGIAELVNHPEIQKKLRHELDTLLGPGHQITEPDTYKLPYLNAVVKETLRLRMAIPLLVPHMNLHDAKLGGFDIPAESKILVNAWWLANNPAHWKNPEEFRPERFLEEEAKVEANGNDFRYLPFGVGRRSCPGIILALPILGITLGRLVQNFELLPPPGQSKIDTSEKGGQFSLHILKHSTIVAKPRSF

SEQ ID NO: 9745 - protein, 596 aa, Zea mays
MAAMNGEVLGECGRNINSLKRKRESPAAYAAGVFCTSELHQHTVNDSAVRFHLDKDRKAKIVCHFNKQVLQSYKKFMSSAPPKRILLRQGAVWKDFPEKIVKLAQADFRAKKMITETGYQNQLFLLDFAHMTFIDTKTGFQRPIAWIDENEKCYFPESFIQDQKLFMKKDFGNGNHEYISEERNGTRETNHQFGASESSAESSNFESSIGDVSSPKRARAEKNFIVKKYCDMGEAIGENEPCTLLPTACNLLPHQANLGEVSRAQRTIEAVEKLLLQGMGSVIESKDIIGIYRTPLLDDHGQVRYHIHQKQVQVTGCHRGNANVRYAWLPCSKSTVHVMMLNGVLQVDKPPNKCAAYGEGTLLTPANRSDACVKYSDVDENGIVRMMLCRVIMGNVEIVHPGSKQCQPSNKYFDSGVDDLKNPRHYVVWDMNLNSHIYSEFVVTVKLPSKTKDSFVSQENCQNSSDLSLVLNSSSPDCISQEMNLEAPPALGGGCAAPMLGDSMEKAPSSPWMPFSMLFAAISTKVSPENMDVIIGCYEEFKSKKISRGELVKKLRHVVGDRVLISTIMRLQDKQLPPVDKREEPDTSASKVVAEP

SEQ ID NO: 9746 - protein, 150 aa, Picea abies
LGCVLAELLLSQPLFPGESGVDQLVEIIKVLGTPTREEIKYMNPNYTEFKFPQIKAHPWHKVFHKRMPPEAVDLVSRLLQYSPNLRCSALEACAHPFFNELRDPNTRLPNGRSLPPLFNFKSQELKGASPELIQRIIPEHARKHNPVLPA

SEQ ID NO: 9747 - protein, 294 aa, Oryza sativa
MAPPCGDAAAAASAAPGLANLLIREGAGLPSRPERYPPFRPCTSDSFAPISREGDDIPPQKKSVSLRSGGGGNAAEREEGGANRNGKKEKTGAQRITGWGLREFSKIVSKKVEAKGRTTYNEVADEIFAELKSITQNGLEFDEKNIRRRVYDAFNVLIAIRVIAKDKKEIKWMGLTNYRYEKIQKLEEVHKELITRIKNKKKLLQEIEKQFDDLQNITLRNQASQRPAESVNGILLPFLLIKTSRKARVEIEISEDSKFARFDFNGAPFTMHDDVSILEAIRRNKGRAGLSIHP

SEQ ID NO: 9748 - protein, 603 aa, Pisum sativum
MATITGSSMPTRTACFNYQGRSAESKLNLPQIHFNNNQAFPVLGLRSLNKLHVRTARATSGSSDTSEKSLGKIVCGMSLVFVGAEVGPWSKTGGLGDVLGGLPPVLAGNGHRVMTVSPRYDQYKDAWDTNVLVEVKVGDKIETVRFFHCYKRGVDRVFVDHPLFLERVWGKTGSKLYGPKTGIDYRDNQLRFSLLCQAALEAPRVLNLNSSKYFSGPYGEDVIFVANDWHSALIPCYLKSMYKSRGLYKNAKVAFCIHNIAYQGRNAFSDFSLLNLPDEFRSSFDFIDGYNKPCEGKKINWMKAGILESDQVFTVSPHYAKELISGEDRGVELDNIIRSTGIIGIVNGMDNREWSPQTDRYIDVHYNETTVTEAKPLLKGTLQAEIGLPVDSSIPLIGFIGRLEEQKGSDILVEAIAKFADENVQIVVLGTGKKIMEKQIEVLEEKYPGKAIGITKFNSPLAHKIIAGADFIVIPSRFEPCGLVQLHAMPYGTVPIVSSTGGLVDTVKEGYTGFHAGPFDVECEDVDPDDVDKLAATVKRALKTYGTQAMKQIILNCMAQNFSWKKPAKLWEKALLNLEVTGNVAGIDGDEIAPLAKENVATP

SEQ ID NO: 9749 - protein, 143 aa, Brassica napus
MADTPSSPAGDGGESGGGSVREQDRYLPIANISRIMKKALPPNGKIGKDAKDTVQECVSEFISFITSEASDKCQKEKRKTVNGEDLLWAMATLGFEDYLEPLKVYLARYRELEGDNKGSGKSGDGSNRDAAAGGVPNEDMPSW

SEQ ID NO: 9750 - protein, 320 aa, Arabidopsis thaliana
MATAVGGGSDVEVGFAKLQGEDFEYYMQSYSIILGRNSKKATVDVDLSSLGGGMNISRNHARIFYDFTRRRFSLEVLGKNGCLVEGVLHLPGNPNVKLDSQDLLQIGDKEFYFLLPVRSILGGPLGPRHHVSGQTSVVPYHNYQSGPGSGSGKKGVRSRELYEYDDEDDDDDDDEEDDMRGSGKKTRRDGHEVVYASGEKKREGRSKVDREADDQQFLQLEEKDVVSSVATVLSDLCGPGEWMPMEKLHSVILKEYGNVWHHSRVRRYLSQEDWAIPEAKGKPWYGLLMLLRKYPEHFVINTRSKGRVTLEFVSLVTLLS

SEQ ID NO: 9751 - protein, 175 aa, Triticum aestivum
MAPTVMASSVTSVAPFQGLKSTAGLPVSRRSNGASLGSVSNGGRIRCMQVWPIKGIKKCETLSYLPPLRTEALLKQVDYLIRSKWVPCLEFSKVGFIFREHNASPGYYDGRYWTMWKLPMFGCTDATQVINEVEQVRKEYPDAYFRIIGFDNMRHVQCVRFIAFKPPGCDESVKD

SEQ ID NO: 9752 - protein, 295 aa, Zea mays
  misc_feature (270)..(270): Xaa can be any naturally occurring amino acid
  unsure (1)..(295): unsure at all Xaa locations
MFSLKKRPQTRRLPAVKKEEKKEKPDSEPQAPNGQTSLDTTRRTHPHPPPLPWPTRLTRGRPPRAPAAVLAHATEDDDREEGEIAADAPSPALPAAHPLEHSWTFWFDNPHGKNKMAAWGSSIRPIHTFSTAEDFWGLYNNIHHPSKLIGGADFHCFKNKIEPKWEDPICANGGKWTISCGRGKSDTLWLHTLLAMIGEQFDYGDEICGAVVSVRSKQERIAIWTKNAGNEAAQISIGKQWKEFLDYKDSIGFIVHGYSAYCLSPPLLSXYSHFPLWLQDDAKKMDKGLKNRYTV

SEQ ID NO: 9753 - protein, 474 aa, Magnetospirillum magnetotacticum MS-1
MYRADALALAAGIAGARLMEAAGWAVARAARRLLPKGRIAILCGPGNNGGDGFVAARLLARDGWSVRVALLGAVERLKGDAAIMAGRWTGRVEPLTPDALHGCVGVIDALFGAGLARPLEGAAKAVVEEIGRLRLPVIAVDVPSGVHGDSGAVLGLAPDCLATVTFFRPKPGHCLLPGRLKCGELVVADIGIPAAVLDEIAPDLCRNGPGVWALPEIKAEGHKYSRGHVLILGGAEMTGAARLAARAARRVGAGLVSIAAPPEALGVYRAGDPGVLVASSEPFADLLEDGRRNALLLGPGGGVGEALAGKVLAALGTGRPCVLDADALSSFEGRSADLFRHLSDRVVLTPHDGEFRRLFGEMPGSRLERARHAARLSGAIVLLKGADTVVAHPKGGATITTDAPPWLATAGSGDVLAGLLAGLLAQGMEPFEAACAAVWLHGRAAAEFGPGLIAEDLSEAIPAILAERRWDPHD

SEQ ID NO: 9754 - protein, 330 aa, Schizosaccharomyces pombe
MSNKSAWQPQFDEIHSSVQEAEGFLQSSNDVQKAIDEVHYPDSLNDLSEISKNLYISSWKTASELVSTSDKGIDYTLSAMSINPNLSVPEQQHLWLQIEDSSSQNILQYFEKSNKFIAFALSKNAKVLVHCFAGISRSVTLVAAYLMKENNWNTEEALSHINERRSGISPNANFLRQLRVYFECNYQLDRSLRPYRQWLFRRYGDFAVLNTRVPSEVAYAETVRARAGQLELRCKKCRFVLASSDYLVSHEPKDENNYSHTRCTHYFLEPIRWMQPELELGNLEGRFDCPKCNSKIGSYKWQGLQCSCLQWVCPALSILQSRVDAVRKLG

SEQ ID NO: 9755 - protein, 413 aa, Listeria monocytogenes EGD-e
MEMDPNTDLSSVTRPRATPVLTTFQFDSGKVGHIWTTFSEDQIDLNFACPEVLYKMIDVLMFYLEEGAEYVRLDAVGFMWKVPGTSSIHLEETHEIVKLFRDLVDIAAPGTIIITETNVPHVDNISYFGNGEKEAHMVYQFPLPPLVLHAIHHGNAKFLRNWAKNLELPEGKRTFFNFLASHDGIGLNPVRGIIPEAEILALVNDLEEEGALVSYKQNPDGSKSPYEINVTYMDALSKQADTDDLRLARFLVAHAVLMSIPGVPAVYVQSILGSRNDYLGVEATSHNRSINRKKYDLAEITAELEQRGSLRKATYDALTKLISTRKAESLFHPEIPMEVLESTAELFVVKRSSDAESIILIHNLSEKEVSYSLDSGVYTNLYKGSTVTGSDSIKLSGYEFCWLKTKNYREEQK

SEQ ID NO: 9756 - protein, 140 aa, Listeria monocytogenes EGD-e
MTNLRKRLSRLYAEDVVDSLAARIEARVQQTQQRKLTRKDQWDEKDIVLITYGDQFKEESQKTLTTFKKMYDSYLKSAFEIVHFLPFYPYSSDDGFSVIDYKAVNPELGDWKDIKEMEKSARLMFDFVCNHMSAKSDWFK

SEQ ID NO: 9757 - protein, 464 aa, Schizosaccharomyces pombe
MAPISKVFDYLVIGGGSGGLASARRAAKHGAKVALIEASGRLGGTCVNYGCVPKKIMWNIADLVAKMKTAKQNGFPNSQLGSFDWGMIKRKRDAYIGRLNGIYERNVNKDGVAYISGHASFVSPTEVAVDMNDGSGTQVFSAKYILIAVGGHPIWPSHIPGAEYGIDSDGFFELESQPKRVAIVGAGYIAVELAGVFAALGTETHMFIRQSKFLRKFDPIISDGIMDHFQHIGINVHTNSLEFKKVEKLPSGELCIHQQDGSTFNVDTLLWAIGRAPKIQGLRLEKAGVKTLPNGIIIADTYQRTNVPTVLSLGDVCGKLELTPVAIAAGRRLSDRLFGGIKDAHLDYEEVPSVVFAHPEAGTIGLTEQEAIDKYGESQIKVYNTKFNGLNYSMVEQEDKVPTTYKLVCAGPLQKVVGLHLVGDFSAEILQGFGVAIKMGATKSDFDSCVAIHPTSAEELVTLV

SEQ ID NO: 9758 - protein, 288 aa, Mimosa pudica
MAKDVEVAERGSYSAKDYHDPPPAPLIDAEELGKWSFYRALIAEFIATLLFLYITVLTVIGYKSQTDTTVATGDVCGGVGILGIAWAFGGMIFILVYCTAGISGGHINPAVTFGLFLARKVSLIRAILYIVAQCLGAICGVGLVKAFQKAYYTKYGGGANTLGDGYSVGTGLGAEIIGTFVLVYTVFSATDPKRNARDSHVPVLAPLPIGFAVFMVHLATIPVTGTGINPARSFGAAVIFNQQKAWDKHWIFWVGPFIGAAIAAFYHQFILRAGAAKALGSFRSNPSV

SEQ ID NO: 9759 - protein, 636 aa, Neisseria polysaccharea
MLTPTQQVGLILQYLKTRILDIYTPEQRAGIEKSEDWRQFSRRMDTHFPKLMNELDSVYGNNEALLPMLEMLLAQAWQSYSQRNSSLKDIDIARENNPDWILSNKQVGGVCYVDLFAGDLKGLKDKIPYFQELGLTYLHLMPLFKCPEGKSDGGYAVSSYRDVNPALGTIGDLREVIAALHEAGISAVVDFIFNHTSNEHEWAQRCAAGDPLFDNFYYIFPDRRMPDQYDRTLREIFPDQHPGGFSQLEDGRWVWTTFNSFQWDLNYSNPWVFRAMAGEMLFLANLGVDILRMDAVAFIWKQMGTSCENLPQAHALIRAFNAVMRIAAPAVFFKSEAIVHPDQVVQYIGQDECQIGYNPLQMALLWNTLATREVNLLHQALTYRHNLPEHTAWVNYVRSHDDIGWTFADEDAAYLGISGYDHRQFLNRFFVNRFDGSFARGVPFQYNPSTGDCRVSGTAAALVGLAQDDPHAVDRIKLLYSIALSTGGLPLIYLGDEVGTLNDDDWSQDSNKSDDSRWAHRPRYNEALYAQRNDPSTAAGQIYQGLRHMIAVRQSNPRFDGGRLVTFNTNNKHIIGYIRNNALLAFGNFSEYPQTVTAHTLQAMPFKAHDLIGGKTVSLNQDLTLQPYQVMWLEIA

SEQ ID NO: 9760 - protein, 588 aa, Burkholderia sp. 383
MSLIEVKVPDIGDFSGVDVIEVNVKPGDVIEKEQTLITLESDKASMEVPSDVAGTVKEIKVKAGEKVSQGTVIAIVEAAAGAAAPAKAPEAAKPAAAAPAPAAAAPAPAPQAGSYAGAVDVECDMLVLGAGPGGYSAAFRAADLGMKTVLVERYSTLGGVCLNVGCIPSKALLHTSLVVEEAAALASHGITFGKPEVDLDKLRDFKGGVVKKLTTGLAGMAKARKVEVVTGVGAFVDPFHMEVQGENGKKVVKFKQAIIAAGSQAVKLPFMPEDPRVVDSTGALELRQLPKRMLVIGGGIIGLEMATVYSTLGAEIDVVEMMDGLMMGADRDLVKVWEKYNAKRFGNVMLKTKTVGAEAKEDGIYVKFEGEKAPAEAQRYDLVLVAVGRSPNGKKIGADKAGVAVTDRGFIDVDKQMRTNVPHIFAIGDVVGQPMLAHKAVHEGHVAAEAAHGEKAYFDALQIPSVAYTDPEVAWAGKTEDQCKAEGIKYGKAVFPWAASGRAIANGRDEGFTKLIFDEETHRVIGGAIVGLNAGDLISEVCLAVEMGADAEDIGKTIHPHPTLGESVGMAAELYEGVCTDLPPQRKK

SEQ ID NO: 9761 - protein, 345 aa, Oryza sativa
MTRSSIWGAVIAWRCAEAERFGRSQESLVRAGELSWEVGMERYEVIKDIGSGNFGVAKLVRDVRTKELFAVKFIERGQKIDENVQREIMNHRSLRHPNIVRFKEVVLTPTHLAIVMEYAAGGELFERICSAGRFSEDEARFFFQQLISGVSYCHSMQICHRDLKLENTLLDGSIAPRLKICDFGYSKSSLLHSQPKSTVGTPAYIAPEVLARKEYDGKVADVWSCGVTLYVMLVGAYPFEDPDEPRNFRKTITRITIPEIKNHPWFLKNLPIEMTDEYQMSVQMNDINTPSQGLEEIMAIIQEARKPGDGSKFSGQIPGLGSMELDDVDTDDIDVEDSGDFVCAL

SEQ ID NO: 9762 - protein, 400 aa, Triticum aestivum
  misc_feature (209)..(209): Xaa can be any naturally occurring amino acid
  unsure (1)..(400): unsure at all Xaa locations
MDSALASAAAIADQRQKIEQYRHILASVISSSPPDIPQAKRFLNHMVSDEVPLVVSRQLLQTFAQELGKLEPDSQKEVAHYALTQIQPRVVSFEEQVVVIREKLAELYESEQQWSRAAQMLSGIDLDSGIRMLDDTNKLSKCVQIARLYLEDDDAVNAEAFINKASFLVTNSNQEVLNLQYLPWRPRILDLKRKFLEAALRYYGISQIXEQPQIGDEEIDENALEQALSAAVTCTILAGAGPQRSRVLATLYKDERCSKLKIYPILQKVFLERILRKPEIDAFAEELKPHQKALLPDKSTVLDRAMIEHNLLSASKLYTNISFEELGTLLGIDPRKAEKIACRMICEDRMRGSIDQVEAVIHLQDDTKGLQQWDQQIAGLCQALNDILDSMSSKGIAIPV

SEQ ID NO: 9763 - protein, 273 aa, Debaryomyces hansenii CBS767
MNIARRYLSRFVEKCPIERGCECNILSELPNDKPIDFEKNLNGTSVIPWKHLLVLSHGFNHADEWPSKLELLPGSLTNEMDLLKRKVVSPYHPIMISNAIVPNVTRGAKEKVYLYPDNKMIEFDIKDTKDFMHTYLVPPEEEMAQFEPVYNPFKKTTAITWEKKKIDFKEQDIGKDLILVCGHTQRDVRCGKIAPILVDQFKKSLKDRGLDVDVGVVSHIGGHAYAGNVIYFPLDKTKKSIWYGRVFPEKVAGIVDETVIGGNIIKELYRGEV

SEQ ID NO: 9764 - protein, 97 aa, Picea abies
TGGGPGLDQKTIDSYPKILFSRHQKLPLTCQDTWCSICLGEYEYKEVLRLMPDCRHCFHASCIDAWLKLNASCPLCRTSPLPSPLPTPLSGLIPLAR

SEQ ID NO: 9765 - protein, 288 aa, Zea mays
MAKDIEASGPEAGEFSAKDYTDPPPAPLVDADELTKWSLYRAVIAEFIATLLFLYITVATVIGYKHQTDAAASGPDAACGGVGILGIAWAFGGMIFILVYCTAGISGGHINPAVTFGLFLARKVSLVRALLYIIAQCLGAICGVGLVKGFQSAYYVRYGGGANELSDGYSKGTGLAPEIIGTFVLVYTVFSATDPKRSARDSHVPVLAPLPIGFAVFMVHLATIPITGTGINPARSLGAAVIYNKDKAWDDQWIFWVGPLIGAAIAAAYHQYVLRASATKLGSYRSNA

SEQ ID NO: 9766 - protein, 209 aa, Colwellia psychrerythraea 34H
MTTTNMKTENTVWHNQQISKEQRATLKQQKPALLWYTGLSGSGKSTVANAVDALLFKLGCHSYLLDGDNVRHGLNGDLGFSDEARIENIRRISEVAKLFLDAGLIVSTAFISPFASDRALAKAKLEDGEFIEVFIDTPISVCEQRDPKGLYKKARAGEIKDFTGIDSTYDVPTAPQIHVKTAEQSVEQCAEQIVSHLIEQGFISEMTLS

SEQ ID NO: 9767 - protein, 361 aa, Arabidopsis thaliana
MEVAIPMKELILKPAVIGLKTLSRYYMFCHNFGEETNFRFCQWILPLLCVLFFKVRKPYTVTKQREKWSEEEHDRFLEAIKLYGRGWRQIQEHIGTKTAVQIRSHAQKFFSKMAQEADSRSEGSVKAIVIPPPRPKRKPAHPYPRKSPVPYTQSPPPNLSAMEKGTKSPTSVLSSFGSEDQVNRCSSPNSCTSDIQSIGATSIDKKNNYTTSKQPFKDDSDIGSTPISSITLFGKIVLVAEESHKPSSYNDDDLKQMTCQENHYSGMLVDTNLSLGVWETFCTGSNAFGSVTEASENLEKSAEPISSSWKRLSSLEKQGSCNPVNASGFRPYKRCLSEREVTSSLTLVASDEKKSQRARIC

SEQ ID NO: 9768 - protein, 104 aa, Bradyrhizobium sp. BTAi1
MAFRPLHDRVVVKRIDAEEKTAGGIIIPDSAKEKPSQGEVIAVGPGARDESGKLVPLDVQVGDRVLFGKWSGTEVKIDGQELLIMKESDIMGVLTDTASKKKAA

SEQ ID NO: 9769 - protein, 328 aa, Escherichia coli K12
MGQLIDGVWHDTWYDTKSTGGKFQRSASAFRNWLTADGAPGPTGTGGFIAEKDRYHLYVSLACPWAHRTLIMRKLKGLEPFISVSVVNPLMLENGWTFDDSFPGATGDTLYQNEFLYQLYLHADPHYSGRVTVPVLWDKKNHTIVSNESAEIIRMFNTAFDALGAKAGDYYPPALQTKIDELNGWIYDTVNNGVYKAGFATSQEAYDEAVAKVFESLARLEQILGQHRYLTGNQLTEADIRLWTTLVRFDPVYVTHFKCDKHRISDYLNLYGFLRDIYQMPGIAETVNFDHIRNHYFRSHKTINPTGIISIGPWQDLDEPHGRDVRFG

SEQ ID NO: 9770 - protein, 546 aa, Bradyrhizobium sp. BTAi1
MSAKDVKFGVEARDRMLRGVDILANAVKVTLGPKGRNVVLDKSFGAPRITKDGVTVAKEIELDDKFENMGAQMVREVASKSADAAGDGTTTATVLAQAIVREGAKAVAAGMNPMDLKRGIDLAVEAVVADLVKNSKKVTSNDEIAQVGTISANGDSEIGKFLADAMKKVGNEGVITVEEAKSLETELDVVEGMQFDRGYISPYFVTNADKMRVEMDDAYILINEKKLSSLNELLPLLEAVVQTGKPLVIVAEDVEGEALATLVVNRLRGGLKVAAVKAPGFGDRRKAMLQDIAILTGGQAISEDLGIKLENVNLSMLGRAKKVMIDKENTTIVNGAGKKADIEARVAQIKAQIEETTSDYDREKLQERLAKLAGGVAVIRVGGATEVEVKERKDRVDDAMHATRAAVEEGILPGGGVALLRASEQLKGLRTKNEDQKTGVEIVRKALSAPARQIAINAGEDGSVIVGKILEKEQYAYGFDSQTGDYVNMVSKGIIDPTKVVRTAIQNAASVASLLITTEAMVAELPKKNAGGPAMPPGGGMGGMDF

SEQ ID NO: 9771 - protein, 339 aa, Polaromonas sp. JS666
MTQGELQATMHALVQKGKGILAADESGPTIAKRFKTINVESTEENRRAWRSLLLTTPGLGEFVSGVILHEETLGQATDDGTPLPQCAARQGIVAGIKVDAGKIPLAGAPGDEITQGLDGLAGRLAAYQRQGARFAKWRAVYNVSDTLPSRLALEANAEALARYAAICQEQGIVPIVEPEVLIDGDHTMARCAEVTEAALHEVFHALHRHRVVLEHMLLKPSMVVPGKTHAHQAAPAEVAVQTVRILRRTVPAAVPSINFLSGGQTPEEATANLDAMNLLGPQPWQLSFSYGRALQEPALQAWKGQAAHARSSQDALLKRARLNGAACRGRYSAAMEAAD

SEQ ID NO: 9772 - protein, 474 aa, Campylobacter coli RM2228
MKKLTNDFGNIIADNQNSLSAGAKGPLLMQDYLLLEKLAHQNRERIPERTVHAKGSAAYGEIKITADLSAYTKAKIFQKGEVTPLFLRFSTVAGEAGAADAERDVRGFAIKFYTKEGNWDLVGNNTPTFFIRDAYKFPDFIHTQKRDPRTHLRSNNAAWDFWSLCPESLHQVTILMSDRGIPASYRHMHGFGSHTYSFINDKNERFWVKFHFKTLQGIKNLSNKEAAELIAKDRESHQRDLYNAIENKDFPKWKVQVQILAEKDADKLGFNPFDLTKIWPHSVVPLMDIGEMILNQNPQNYFNEVEQAAFSPSNIVPGIGFSPDKMLQARIFSYPDAQRYRIGTNYHLLPVNRARSEVNTYNVAGAMNFDSYRNGAAYYEPNSYEESPKEDKSYLEPDLVLKGNAQRYAPLDDDFYTQPRALFNIMNQNQKEQLFENIAASMEGVEEKIITRALGHFEKISPDYAQGIKKALGK

SEQ ID NO: 9773 - protein, 742 aa, Thermobifida fusca YX
MIEPLQPGDPGRIGPYRLVSRLGAGGMGQVFLARSPGGRPVVVKVILPEYANDDEYRIRFAREVEAARRVGGFHTAQVIDADPTADPPWMATAYIPGPSLRKAVTERGPLYGNNLRTLAAGLVEGLAAIHACGLVHRDFKPSNIVLAADGPRVIDFGVARPLDSSVMTQSGAVIGTLAYMSPEQTDGSQVGPASDVFSLGTVLAFAATGRSPFMADSIGEIIARISGPPPELPELPDDLRELVYACWEQNPDLRPTTAELLAQLSTDHTGDDWPPPHLSDLIGSMLPLGATTSPNPSLAIEPPPPSHGPPRPSEPLPDPGDDADEPSAEKPSRTLPEPEPPELEEKPIQVIHEPERPAPTPPRPREPARGAIKPKNPRPAAPQPPWSPPRVQPPRWKQLITKKPVAGILTAVATAGLVVSFLVWQWTLPETPLRPDSSTAPSESADPHELNEPRILTTDREAVAVAFSPGGSLLAGGSGDKLIHVWDVASGDELHTLEGHTDWVRAVAFSPDGALLASGSDDATVRLWDVAAAEERAVFEGHTHYVLDIAFSPDGSMVASGSRDGTARLWNVATGTEHAVLKGHTDYVYAVAFSPDGSMVASGSRDGTIRLWDVATGKERDVLQAPAENVVSLAFSPDGSMLVHGSDSTVHLWDVASGEALHTFEGHTDWVRAVAFSPDGALLASGSDDRTIRLWDVAAQEEHTTLEGHTEPVHSVAFHPEGTTLASASEDGTIRIWPIATE

SEQ ID NO: 9774 - protein, 196 aa, Oryza sativa
MEDDKSKEGKSSSSYRGVRKRPWGKFAAEIRDPERGGARVWLGTFDTAEEAARAYDRAAFAMKGATAMLNFPGDHHHGAASRMTSTGSSSSSFTTPPPANSSAAAGRGGSDRTTDKVELECLDDKVLEDLLAETNYLRGERDAAGFATAHTQAGPVMGCVGAHAIRRRPLESPPPASDSPTPLRHATTAMLQTLPL

SEQ ID NO: 9775 - protein, 306 aa, Glycine max
MQIFVKTLTGKTITLEVESSDTIDNVKAKIQDKEGIPPDQQRLIFAGKQLEDGRTLADYNIQKESTLHLVLRLRGGMQIFVKTLTGKTITLEVESSDTIDNVKAKIQDKEGIPPDQQRLIFAGKQLEDGRTLADYNIQKESTLHLVLRLRGGMQIFVKTLTGKTITLELESSDTIDNVKAKIQDKEGIPPDQQRLIFAGKQLEDGRTLADYNIQKESTLHLVLRLRGGMQIFVKTLTGKTITLEVESSDTIDNVKAKIQDKEGIPPDQQRLIFAGKQLEDGRTLADYNIQKESTLHLVLRLRGGDF

SEQ ID NO: 9776 - protein, 413 aa, Clostridium perfringens str. 13
MENRVVITGLGAITPIGNNVNEFWTNAKKGVCGIDEITLFDASDYKVKIAGEVKNFKAEDFIDKKEAKRLDRFTHFALAATEEAMKDAKLDLKDENVDQNRVGVIVGSGIGGYGTLEAQFDVLLTKGPNRVSPFAIPSGIINLVAGNIAIKYGAKGVCESLVTACATGVSSIGAAYRSIKHGYSDIVISGGSEASITRAAIAGFTNLKALNTNNDPKRASIPFDKERSGFVMGEGAGILILESLESAQKRGARIYGEIIGYGATCDAYHITSPDPEGDGAKRAIEAAIEEGKINKDEISYINAHGTSTPLNDKFETLAIKGCFGEKAYDIPVSSTKSMTGHLLGAAGAIESVICVKALEEGFIPPTIGYKVPDEDCDLDYVVNEGRELELNYVINNALGFGGHNASLLFKKWD

SEQ ID NO: 9777 - protein, 333 aa, Nitrosospira sp. KAN8
MTIKVGINGFGRIGRMVFRAAVQNFPDIEVVAINDLLEPDYLAYVLQHDSVHGRFKGDVSIEDSTLIVNGKRIRLTAIKDPAELKWGEVGAEVVVESTGLFLTKESCQKHIAAGARKVIMSAPSKDDTPMFVYGVNNDTYDGEAIISNASCTTNCLAPVAKVLNDTFGVKRGLMTTVHAATATQKTVDGPSNKDWRGGRGILENIIPSSTGAAKAVGKVIPELNTKLTGMAFRVPTSDVSVVDLTVELEKEASYDEICDAMKKASEGSMKGVLAYTDQKVVSTDFRGESATSIFDAEAGMALDGNFVKVVSWYDNEWGYSSKILEMVRVVAGK

SEQ ID NO: 9778 - protein, 374 aa, Agrobacterium tumefaciens str. C58
MAGWRRHLHEHPELLYDVFETSKFVAEKLTSFGCDVVETGIGKTGVVGIIKGRHGDGPTIGFRSDMDALPILETSGKPWASKVPGKAHSCGHDGHTAMLLGAAQYLAETRNFKGSIAVIFQPAEEGGAGALAMLNDGMMEKFGISQVYGMHNEPGIPVGQFAIRKGSTMAAADSFEIVITGKGSHAAAPHLSVDPVLTSAYIIIALQSIVSRETDPLKSLVVTVATTHGGTAVNVIPGSVTLTGTVRTLLPETRNFAEKRLKEVATATAMAHGATAEVKYRRGYPVTFNHADETEFATGVAMGVAGANAVNTNPNPHMGAEDFSYMLEARPGAFIFIGNGDTAGLHNAAYDFNDDALPYGISYWVSMAEKALAA

SEQ ID NO: 9779 - protein, 335 aa, Nitrosomonas sp. CNS332
MAIRVGINGFGRIGRMVFRASIEEFDDIEVVAINDLLEPDYLAYMLLHDSVHGRFKGDVSVDGNNLIVNGKKIRLTATKDPEELNWGEVKVDVVVESTGLFLTKELCEKHIKAGAPKVVMTAPSKDDTPMYVYGVNDKTYQGEAIISNASYTTNCLAPIAKVLNDTWGIKRGLMTTVHAATATQKTVDGPSNKDWRGGRGILENTIPSSTGAAKAVGVVIPELNKKLTGMAFRVPTSDVSVVDLTVELEKDASYDEIRKAMKTASEGSMKGVLGYTDQKVVSTDFRGETHTSVFDAEAGIQLDKNFVKVVAWYDNEWGYSCKVLEMVRVIAGRNN

SEQ ID NO: 9780 - protein, 277 aa, Burkholderia fungorum LB400
MSERLKDRVALVTGAASGIGAATARLMAQEGAFVVLADVDEHAGQALARELRDATFAYTDVSVEAQVAAAVDEALRLHGRLDCMVNNAGFVGAYGSILETSAAAWHATLGVLLDGVFYGIKHAARAMVKQGSGCILSVASTAGVMGGLGPHAYTSAKHAVIGLTRSAASELAPRGVRVNAVAPGTTVTEMMVQGRGSRQAAIDAATRASPLGTPLMPQEIAAALVYLASDDARHVNAHTLVVDSGVTVAGASGGAVFHNRPAGFMGRMPGGANADAR

SEQ ID NO: 9781 - protein, 335 aa, Nitrosomonas sp. OZK11
MTIRVGINGFGRIGRMVFRASIEEFDDIEVVAINDLLEPDYLAYMLVHDSVHGRFRGDVSVSGNNLVVNGKPIRLTAVKDPAELKWDEVNVDVVVESTGLFLTKQDCEKHIKAGARKVVMSAPSKDDTPMYVYGVNDKTYQGEAIISNASCTTNCLAPIAKVLNDTWGIKRGLMTTVHAATATQKTVVAPSNKDWRGGRGILENIIPSSTGAAKAVGVVIPELNKKLTGMAFRVPTSDVSVVDLTVELEKDASYEDICNAMKAASGGSMKGVLGYTNQKVVSTDFRGETCTSVFDAEAGIQLDKNFVKVVAWYDNEWGYSCKVLEMVRVIAGHGR

SEQ ID NO: 9782 - protein, 175 aa, Triticum aestivum
  misc_feature (90)..(90): Xaa can be any naturally occurring amino acid
  unsure (1)..(175): unsure at all Xaa locations
MGPTVMASSVTSVAPFQGFKSTAGLPVSRRSNGASLGSVSNGGRIRCMQVWPIKGIKKFEILSYLPPVSTEALLKQVDYLIRSKWVPCLXFSKVGFIFREHNASPGYYDGRYWTMWKLPMFGCTDATQVINEVEEVKKEYPDAYVRIIGFDNMRQVQCVRFIAFKPPGCKESGKA

SEQ ID NO: 9783 - protein, 346 aa, Glycine max
MAHPTSSSGQSNDLTKEDCKETSSVVVCFGEMLIDFVPMVGGVSLAEAPAFKKAPGGAPANVAVGISRLGSSSAFIGKVGADEFGYMLADILKQNNVETSGMRFDSNARTALAFVTLRADGEREFLFFRNPSADMLLQESELDKDLLKKARIFHYGSISLIDEPCKSAHLAAMSIAKNSGCILSYDPNLRLALWPSADAARKGIMDIWDQADVIKISEDEITFLTGGDDPYDDNVVLKKLFHPNLKLLIVTEGSQGCRYYTKAFKGRVSGVKVKPVDTTGAGDAFVSGILHCIASDQTIFQDEKRLRKALYFANVCGALTVTQRGAIPALPTKEAILQFLLEAAVI

SEQ ID NO: 9784 - protein, 475 aa, Schizosaccharomyces pombe 972h-
MGGARFINFIKPLSSLLPEVEGPKTHLELVEKLGWMAGCVVVYQILSIIPVYGAEKTDTLDPINNFRVLDGSSASGLMITGLAPIYLSSFLLQILASKKKIAVNFNLIIDRVLFQNAQKVVSALLYLILAVTYVSSGYYGSFSDLGIFRFIMLILQIFLPGIVCIYLCEIIEKGHGLGSGPVLLLGSHILGNIMWDVLSLHRYPVNESGDSQYQGALVGFAFNLFSFKNKFSSLRSILFRSEGLSFVQFLVCIAVFATFMYTLNIRIDVPIRSSRVRGVRQNFPLKLLYTSVIPLIYFYSILSHLLVFAYALYSLCPNSLITRLLVQYSPIDTFAEHKLQLVGGLVYFLYPPLGLSEALLHPVHTVIYTITLICITIYFSLLWMNATAGGPRDVLLFFKENQLVIAGYREATMLKELEKIIPIAAKLSAFFVSILSVIAGIFASTFGVGVLIASALVYASFEMIVGANTSLGNGN

SEQ ID NO: 9785 - protein, 147 aa, Triticum aestivum
GVGFKPGGGGGRGGGGRAGPAAGLPVPPHGRGDHLALPHPHSGLQVKMEQHMPQQPPHMMYSSPYFSLPAANSGDMSPAIRRYCKAEQVSGQTSALSPSRETGLSTDPNAAGCAEISSAATPSSQNQDFLDQFDEYPALNLADIWKY

SEQ ID NO: 9786 - protein, 294 aa, Glycine max
MSTSSINGWCLSSISPAKTSLKKATLGPSVFATREDMAKEYEQAIEELQKLLREKSELKATAAEKVEQITASLGTSSSDGIPSSEASDRIKAGFIHFKKEKYDKNPALYGELAKGQSPKFMVFACSDSRVCPSHVLDFQPGEAFVVRNVANIVPPYDQSKYAGTGAAVEYAVLHLKVSEIVVIGHSACGGIKGLLSFPYDGTYSTDFIEEWVKIGLPAKAKVKTQHGDAPFAELCSHCEKEAVNVSLGNLLTYPFVRDGLVNKTLSLKGGYYDFVKGSFELWGLQFGLASSFSV

SEQ ID NO: 9787 - protein, 583 aa, Rickettsia typhi str. Wilmington
MARFIFVTGGVVSSLGKGITAASLAMLLQAKGFRVSVRKLDPYLNVDPGTMNPHEHGEVYVTDDGAETDLDLGHYERFTGVTACKFDNITTGAIYSKLLKDERLGNYTGITVQVIPHVTNIIKDFIMSNTNGFDFIICEIGGTVGDIEGLPFFEAIRQIGNKLKSANCLFIHLTLLPYVKTVRELKTKPTQHSVKELRAIGISPNILVCRAERNISKSAIDKIALFCNIKPEYVIPAIDQKNIYLVPIAYHNSGLENKVLNFFNINLVPSKLDKWYDIIGKIKDSNSKVKIAIIIKYHKSHDAYKSVIEALNHAGIYYKYKIDLLWINAENLTEENINKKLLNINGILVPGGFGVRATKGKMIAIKYARTNNIPFFGICFGMQLATIEIAQNLIGIKDAVTEEFKIKGTKIIEKINKNSEDVTITIKNTHISKCTYSEEFECDTSTVYSNIHEDSNKESTHRLPIETNFGNISDIKKTMRLGAYPCNLVANTIAATAYQSLEINERHRHRYKFNNEFQNIFEQHGVVFSGFSKNKQIVEIIELPELRWFIGVQFHPEFKSKPFEAHPLFIQFIKAAIEYNKCN

SEQ ID NO: 9788 - protein, 347 aa, Arabidopsis thaliana
MASNSALLMKTIFLVLIFVSFAISPATSTAPEECGSESANPCVNKAKALPLKVIAIFVILIASMIGVGAPLFSRNVSFLQPDGNIFTIIKCFASGIILGTGFMHVLPDSFEMLSSICLEENPWHKFPFSGFLAMLSGLITLAIDSMATSLYTSKNAVGIMPHGHGHGHGPANDVTLPIKEDDSSNAQLLRYRVIAMVLELGIIVHSVVIGLSLGATSDTCTIKGLIAALCFHQMFEGMGLGGCILQAEYTNMKKFVMAFFFAVTTPFGIALGIALSTVYQDNSPKALITVGLLNACSAGLLIYMALVDLLAAEFMGPKLQGSIKMQFKCLIAALLGCGGMSIIAKWA

SEQ ID NO: 9789 - protein, 348 aa, Pyrococcus abyssi GE5
MSEKMVAIMKTKPAYGAELVEVDVPKPGPGEVLIKVIATSICGTDLHIYEWNEWAQSRIKPPQIMGHEVAGEVVEVGPGVEGIEVGDYVSVETHIVCGKCYACRRGQYHVCQNTKIFGVDTDGVFAEYAVVPAQNVWKNPKSIPPEYATLQEPLGNAVDTVLAGPISGKSVLITGAGPLGLLGIAVAKASGAYPVIVSEPSDFRRELAKKVGADYVINPFEEDVVKEVMDITDGNGVDVFLEFSGAPKALEQGLQAVTPAGRVSLLGLYPGKVSIDFNNLIIFKALTVYGITGRHLWETWYTVSRLLQSGKLNLDPIITHKYKGFDKYEEAFELMRAGKTGKVVFMLK

SEQ ID NO: 9790 - protein, 397 aa, Salmonella enterica subsp. enterica serovar Typhi
MFQKVDAYAGDPILSLMERFKDDSRHDKVNLSIGLYYNEDGIIPQLKTVAEAEARLNAQPHGASLYLPMEGLNTYRHTIAPLLFGADHPVLQQQRVATIQTLGGSGALKVGADFLKRYFPDAGVWVSDPTWENHIAIFAGAGFEVSTYPWYDDATNGIRFNDLLATLNTLPARSIVLLHPCCHNPTGADLTPSQWDAVIEIVKARDLIPFLDIAYQGFGAGMDEDAYAIRAIASAGLPALVSNSFSKIFSLYGECVGGLSVVCEDAEIAARVLGQLKATVRRIYSSPPCFGAQVVATVLGDEALKASWLAEVDAMRTRIISMRQTLVKELKAEMPDRNFDYLLQQRGMFSYTGLSAEQVDRLRDEFGVYLIASGRMCVAGLNASNVHRVAKAFAAVM

SEQ ID NO: 9791 - protein, 319 aa, Avena fatua
MASAKAMGQGEQDRFVLKSGHAIPAVGLGTWRAGSDTAHSVQTAITEAGYRHVDTAAQYGIEKEVDKGLKAAMEAGIDRKDLFVTSKIWRTNLAPERARPALENTLKDLQLDYIDLYLIHWPFRLKDGAHQPPEAGEVLEFDMEGVWKEMEKLVKDGLVKDIDVCNFTVTKLNRLLRSANIPPAVCQMEMHPGWKNDKIFEACKKHGIHVTAYSPLGSSEKNLVHDPVVEKVANKLNKTPGQVLIKWALQRGTSVIPKSSKDERIKENIQAFGWEIPEDDFQVLCSIKDEKRVLTGEELFVNKTHGPYKSASEVWDHEN

SEQ ID NO: 9792 - protein, 554 aa, Colwellia psychrerythraea 34H
MCSIFGILDIKTGADALRPTALECSRLLRHRGPDWSGIYHSDNAILVHERLSIVDTEHGAQPLYNGDKSNVLAVNGEIYNHKALASALNVDYEFQTASDCEVILPLYEEFGVEFVDKLQGMFAFIVYNEKDNSYLIARDHIGIIPLYTGYDSEGNFYVASEMKALMPICKTVEEFPPGHILDSRVGKLQQYYKRNWQEYAAIKDNTTSTTKIREALEESVKSHLMTDVPYGVLLSGGLDSSLISAITQKFAARRIEDNDLAEAWWPKVHSFACGLAGSPDLIAAQTVADSIGTIHHSVVFTEQEGIDALKEVIYHLETYDVTTIRASTPMYLMARKIKAMGIKMVLSGEGADEIFGGYLYFHKAPNAQEFHEELNRKLDRLHKFDCLRANKSMSAWGIEARVPFLDKNFMDVAMRINPEDKLCGNGKMEKAILRESFEGYLPKEILWRQKEQFSDGVGYSWIDGLKAHVESLVTEQQLENAHIRFPVNTPDNKEGYYYRTVFEDKYPLATAADCVIGGKSVACSTEEALAWDESFQNNADPSGRAVLSVHNESY

SEQ ID NO: 9793 - protein, 337 aa, Arabidopsis thaliana
  misc_feature (112)..(112): Xaa can be any naturally occurring amino acid
  unsure (1)..(337): unsure at all Xaa locations
MGKIKIGINGFGRIGRLVARVALQSEDVELVAVNDPFITTDYMTYMFKYDTVHGHWKHSDITLKNSKTLLFGDKPVTVFGIRNPEEIPWGEAGAEYVVESTGVFTDKDKAAXHLKGGAKKVVISAPSKDAPMFVVGVNEDKYTSDVNIVSNASCTTNCLAPLAKVIHDNFGIVEGLMTTVHAITATQKTVDGPSAKDWRGGRAASFNIIPSSTGAAKAVGKVLPDLNGKLTGMSFRVPTVDVSVVDLTVRIEKGASYEDIKKAIKAASEGPLKGIMGYAEEDLVSTDFLGDSRSSIFDAKAGIALNDHFVKLVSWYDNEWGYSNRVVDLIRHMFKTQ

SEQ ID NO: 9794 - protein, 136 aa, Triticum aestivum
AAGIRHEGGKVVPGFGHGVLRKTDPRYSCQREFALKHLPEDPLFQLVSKLYEVVPPILTELGKVKNPWPNVDAHSGVLLNHFGLSEARYYTVLFGVSRSMGIGSQLIWDRALGLPLERPKSVTMEWLENYCKNKAA

SEQ ID NO: 9795 - protein, 174 aa, Glycine max
  misc_feature (3)..(4): Xaa can be any naturally occurring amino acid
  misc_feature (6)..(6): Xaa can be any naturally occurring amino acid
  misc_feature (9)..(10): Xaa can be any naturally occurring amino acid
  misc_feature (20)..(23): Xaa can be any naturally occurring amino acid
  misc_feature (26)..(26): Xaa can be any naturally occurring amino acid
  misc_feature (28)..(29): Xaa can be any naturally occurring amino acid
  unsure (1)..(174): unsure at all Xaa locations
RKXXFXCDXXSKPKQGAAWXXXXRKXYXXDTVEEFWCLYDQVFKPSKLQINADFHLFKTGIDPKWEDPECANGGKWSITSNSGRKANLDNMWLETMMALIGEQFEDAEDICGVVASVRQWQDKLSLWTKTAANEAAQMSIGRKWKEIIDVNDKITYNFHDDSRSKGATKGRYTV

SEQ ID NO: 9796 - protein, 140 aa, Brassica napus
STKQSLRQSLSEKSSSVETQGNAVRALKASRAAKPEIDAAIDLLNKLKLEKSAVEKQLQSTITSSGNGSLNREAFRQAVVNTLERRLFYIPSFKIYRGVAGLFDYGPPGCAVKSNVLSFWRQHFILEENMLEVDCPCVTP

SEQ ID NO: 9797 - protein, 482 aa, Acinetobacter sp. ADP1
MIQESLQYLLKHPDISFTAPTSGAVIEVNDAAKGTPLAWVKSHDRSGVEAAIQRSAQAQAKWKTQTALQRADVLWAWFHLINEHKENLAQILTAEQGKPLAEARGEIGYAASFIRWFAEQARRIDGEILPPTMAHQRLLVIKQAIGVTAAITPWNFPAAMITRKAAPAIAAGCSMLVKPAELTPLTAYALEVLALQAGLPQDILINISGDSVEVGKTLCESDVVRKLSFTGSTPVGRILMQQSAPSIKKLSLELGGNAPVLVFDDANLDQAVQGIMASKFRNSGQTCVCANRIYVQSGIYDALTTKLVDAVKALKVGDGREEGVTQGPLIDARAVAKVQSHIEDATSKGATLQTGGQLAAQGGTFFEPTVLSGVTQEMRVAKEETFGPLAALFRFETEEQAIAMANDTEFGLAAYLFTQSTARQWRVGEALEYGMVGVNTGAISNEVAPFGGVKQSGLGREGSQHGIEEYLEMKYLCVDLSE

SEQ ID NO: 9798 - protein, 332 aa, GIBBERELLA ZEAE PH-1
MSFGRTVTLNSGWKIPQIGYGTWQAAPGEVGNGVYEALKAGYRHLDLAKIYQNQREVGEGIKKALSEVPGLKREDIFITGKLWNNKHRPEEVAGALDDTLEELGLEYIDLWLIHWPVAFKNGNQLFPLKEGDDGKTALDQEVTLSQTWEAVTKLPKEKVRSIGVSNFNKEMLEQIIKDTGVTPAMNQIERHPRLPQPELVKYLQEKGIFLTAYSAFGNNSWGEPLLINTPEVKAIAERLSKSKGKEVTPAQVILAWSTLDNHVVIPKSVTPARIRSNFEEVELDEEAVKELSKFGEKPQRFNIPKTYKPDWDINVFDDEKEKSATHQVVLKL

SEQ ID NO: 9799 - protein, 137 aa, Glycine max
MADQLTDDQISEFKEAFSLFDKDGDGCITTKELGTVMRSLGQNPTEAELQDMINEVDADGNGTIDFPEFLNLMARKMKDTDSEEELKEAFRVFDKDQNGFISAAELRHVMTNLGEKLTDEEVDEMIREADVDGDGQI

SEQ ID NO: 9800 - protein, 330 aa, Xenorhabdus nematophila
MQPISVTILTGFLGSGKTTLLRHILKANHGYKIAVIENEFGEVPIDHELIGDRATQIKTLSNGCICCSRSNELEDALLDLLDSMDKGEIYFDRLIIECTGMADPGPITQTFFSHEVLCQRFLLDGIITLVDAAHAEQQLDRFSIAQAQIGYADKILLTKTDIVPAHDALIDRLQRINARAPIHKVIQGHADLSILFNIEGFILNDKLTVSTPIFRFAPEQLTSAQLTFEKQNIIRSIIVNLPHPVELSDISDVMEALLLSFADNLLRYKGILAIKDDSRRLLFQGVQRLYSADWDREWRTDERRESVLVFIGMDLPEQNIREKFAALFVE

SEQ ID NO: 9801 - protein, 856 aa, Nocardia farcinica IFM 10152
MSAQDLPQELRRALSTVAREPRLLVASDYDGTLAPIVSDPSKAYPHRESVSALRALAGLTGTTAAVISGRALRDLAALSRLPVEVQLIGSHGSEFDVGFVHAIDNDAKQLLHEVQAALTQIADDNPGASVETKPASVALHVRNAAPEIGRRALEAVRQGPARWVGVQVTEGKAVIELAVIQTDKGTALDTIRHQEGATAAVFFGDDVTDEKAFRVLSGPDVGIKVGEGESLAKYRVDSTEAVACALAFLLEERRTWLAGASAPRIERLTMLASPRSVALLTPDATVTWFCHPEPDSAAVFAHLLGGPQAGHFSVAPERPGLPLSQRYVDGTMTVETRWASLQVTDYLPHDVAPTRTDLTRVISGHARAVVTFAPRPEFGQVPVSLEADRDGLKVLGTNDPMVLRSPGVQWRIDNDGVHDVATAVVDPAQGPVVLELRCGTHDLDPASASETERRREAERYWREWANSLELPPLKPDLMKRSALTLRGLVHAPSGSILAAATTSLPEDIGGVRNWDYRYCWLRDAALTAQSLVTLGSLTEAEQFLGWVHRVLETLPGPERLHPLYTIYGETLPPEAVIDQLPGYAGSRPVRVGNAANMQVQLDVFGPIVDLISTLAHARERKGITEPAKALPDADWELVHAMVAAVQRRWTEPDHGIWEIRGNPRHHVYSKVMGWLTVDRALTLAQKFDRPVDPEWVSLRETIAEEVKSKGWNDEVQSFTAAYDGTDLDAATLHIGLSGLIDPSDPRFAATVVATEAELRSGSTVYRYHHDDGLPGGEGGFHLCAAWLVEAYLLIGKRSDAEALFAQLVDVAGPTGLLSEEYDPVAERSLGNHPQAYSHLGLLRCAQLLSQPVQVLV

SEQ ID NO: 9802 - protein, 145 aa, Vigna unguiculata
MVAFSDKQEALVNGAYEAFKANIPKYSVVFYTTILEKAPAAKNLFSFLANGVDATNPKLTGHAEKLFGLVRDSAAQLRASGGVVADAALGAVHSQKAVNDAQFVVVKEALVKTLKEAVGDKWSDELGTAVELAYDELAAAIKKAY

SEQ ID NO: 9803 - protein, 417 aa, Symbiobacterium thermophilum IAM 14863
MTGQEFFRDTQETIRAAVAKLGHSEGVYKILRNPRRTLEVHIAVTMPDGSVETFLGYRSQHAAVFGPYKGGVRFHPNVTKEEVEALAMLMTLKNAVLGLPYGGAKGGVICDPNALPPTAVEQIARGYVRGLRDMIGPDTDIPAPDVNTNSRVMGWMLDEYLKCTNAIDFSVFTGKSLNLGGIEGRTGATGLGIAYVTREACKVRGVDLKGARVAVQGFGNVGRGAAQALTALGARIVGVTDITGGVYKEDGLDVAALTEYARDRGGVAGFPGAEPLTNEQLFALPVDVLIPAALEGQITGKVAETIQAPIVVEGANGPTTPEGAQVLADRGIMQVPDILANGGGVTVSYFEWVQGQQGGLRWSERTVHRRLDRYMTSAFAAVLAYSERYNVSMREAAYLFAVDRLATGMIERGWVPR

SEQ ID NO: 9804 - protein, 333 aa, Nitrosospira sp. GS832
MTIKVGINGFGRIGRMVFRAAVQNFPDIEVVAINDLPEPDYLAYMLQHDSVHGRFKGDVSIDGDTLVVNGKRIRLTAIKDPSELRWGEVGAEVVIESTGLFLTEETCQKHIAAGAGKVIMSAPSKDDTPMFVYGVNDNTYDGQSIISNASCTTNCLAPIAKVLNDTWGIKRGLMTTVHAATATQKTVDGPSNKDWRGGRGILENIIPSSTGAAKAVGKVIPELNTKLTGMAFRVPTSDVSVVDLTVELEKEASYEEICDAMKKASEGSMKGVLAYTDQKVVSTDFRGESATSIFDAEAGMALDGNFVKVVSWYDNEWGYSSKILEMVRVVASK

SEQ ID NO: 9805 - protein, 239 aa, Agrobacterium tumefaciens str. C58
MRDGTGPLLIFDCDGVLVDSEPVSIAVLLDMLSHLGVTMGEEEAYERFLGRSVASMTTTLFEEYGVETDIDFLDHMRATLFERFRTELKPIDGIAETLDELLPLKRCVASSSQPERIRYSLGLTGLIDKFEPHVFSATMVRNGKPAPDLFLHAARSMGVEPRQCIVIEDSPAGIAAAKAAGMGVFAFTGGSHARFPAFREKIAGLGADAVFDAMPDLVQLVGSYVGRGGFDGQVERDAG

SEQ ID NO: 9806 - protein, 333 aa, Nitrosospira sp. NRS527
MTIKVGINGFGRIGRMVFRAAVQNFPDIEVVAINDLLEPVYLAYMLQHDSVHGRFKGDVAIDGDTLVVNGKRIRLTAIKDPAELKWGEVGAEVVIESTGLFLTKETWQKHIAAGAGKVIMSAPSKDDTPMFVYGVNDNTYDGQSIISNASCTTNCLAPIAKVLNDTWGIKRGLMTTVHAATATQKTVDGPSNKDWRGGRGILENIIPSSTGAAKAVGKVIPELNTKLTGMAFRVPTSDVSVVDLTVELDKDATYEEICAAMKQASEGAMKGVLGYTDEKVVSTDFRGESCTSIFDAEAGMALDGSFIKVVSWYDNEWGYSSKILEMTRVVAGK

SEQ ID NO: 9807 - protein, 230 aa, Glycine max
VDPAFFLAEYRSHRKHLLAREAEAARWSQRKQLLGAAGAGRGGGSKREVNPWLAPTMGFPPMSPMHHFRPLHVWGHHNMDQSFMHMWPKHPPYSPSPPAWPPRTAPSPPSPDPLYWHQHQLAPNAPTTGTPCFPQPLTTTRFGSQTVPGIPPRHAMYQIVDPGIGIPASQPPPRPLVDFHPSKESIDAAISDVLSKPWLPLPLGLKAPALDGVMGELQRQGIPKIPPSCA

SEQ ID NO: 9808 - protein, 333 aa, Nitrosospira sp. TYM9
MTIKVGINGFGRIGRMVFRAAVQNFPDIEVVAINDLLEPDYLAYMLQHDSVHGRFKGDVSIDGDTLVVNGKRIRLTAIKDPAELRWGEVGAEVVIESTGLFLTKETCQKHITAGAGKVIMSAPSKDDTPMFVYGVNDNTYDGQSIISNASCTTNCLAPIAKVLNDTWGIKRGLMTTVHAATATQKIVDGPSNKDWRGGRGILENIIPSSTGAAKAVGKVIPELNTKLTGMAFRVPTSDVSVVDLTVELDKDATYEEICAAMKQASEGAMKGVLGYTDEKVVSTDFRGESCTSIFDAEAGMALDGSFIKVVSWYDSEWGYSSKILEMARVVAGK

SEQ ID NO: 9809 - protein, 199 aa, Arabidopsis thaliana
  misc_feature (94)..(94): Xaa can be any naturally occurring amino acid
  unsure (1)..(199): unsure at all Xaa locations
PRVRAKVFHYGSISLITEPCRSAHMKATEEAKEAGALLSYDPNLREPLWPSPEEARTQIMSIWDKADIIKVSDVELEFLTRNKTIDDETAMSLXHPNLKLLLVTLGEKGCRYYTKDFHGSVETFHVDAVDTTGAGDSFVGALLNQIVDDQSVLEEEERLRKVLRIANACGAITTTKKGAIPALPTDCEALSFLKRQVEQ

SEQ ID NO: 9810 - protein, 435 aa, Schizosaccharomyces pombe
MVSEISDLSLAKEKSEAQFIARNPKSNDFHCKACDSLPGGNTRTVLHGAPFPIFIEAGYGSKLRDVDGHEYTDFLNELTAGIYGHSNPVIKKALMQGFDEIGISLGGTTTCELNYAEALKSRFLSIEKIRFCNSGTEANITAIIAARKFTGKRAVIAMHGGYHGGPLSFAHGISPYNMDSQDFILCEYNNSTQFKELVNSSQDIAAVIVEAMQGAGGAIPADKEFMQTIQLECEKNDIVFILDEVMTSRLSPGGLQQIYCLKPDLTTLGKYLGGGLPFGAFGGRADIMSCFDPRLPGSLSHSGTFNNDTLTLTAGYVGLTELYTPEAVKRLNALGDGLRKDIESYCHNTKMSITGLGSIMNIHFTESGRVNSYNDTAGEVIELKDLLWMDLLKEGFWIARRGMITLSLVLTESELEAFKLTIKAWIHRRMSLIRI

SEQ ID NO: 9811 - protein, 342 aa, Candida albicans SC5314
MTTGTSKPKVLLVGEFIYSKQKWSELEEIAEVIQSESTTREQFIQDLKTKYNDITCIARTFYSINETGRFDADLAQHMPQTLKSVSHCGAGYDQVDVEPFTRLEVQVSNVTEPVERPTADVAIFLVLACMRNFLQGRQILMNGEWPSNGDKEAAGAPLGHTPQGKVVGILGMGGIGRAIRDRLKPFGFDGIVYYNRKQLSPELEKGAEYVTMDELFKQSDVIIIGVPLNAKTRHLIDKEAIQKMKDGVVLVNIARGAIIDEKHLPELIKSGKIGAFGADVFEHEPEVSAELVNLPNVVALPHMGTHSVEALTNMEEWVVCNVETFIKTGKLKTIVPEQQGIF

SEQ ID NO: 9812 - protein, 485 aa, Mesorhizobium sp. BNC1
MLKKTSHFLREANFIAGEWVNADSGATIEVINPATRQTIGTVPKCGRAETRRAIEAAQEAFQSWKKTSANDRAKLLRKLHDAIMDNQDALAELLVMEQGKPLAEAKGEVGTSAAYILWFAEEGRRIYGDIVPAPWTDRRILVTKEPVGVIGAITPWNFPSSMLARKLGPALAAGCTTVAKPASQTPYSGLAWGVLAEEAGFPKGVVNIVTGSASEIGDELTENPLVRKITFTGSTEIGKLLMEKAAGTVKKVSMELGGNAPFLVFDDADLDRAVKGAMIAKYRNAGQTCVCTNRFFVQDGIYDRFLEKFVEASRKLKVGSGLDEGVEQGPLIDGGAVEKVEELIADAVSKGGKVVTGGKRHALGGSYFEPTVIAEATPQMRFMEEEIFGPVAPVFRFKDEADGIRMANDTSFGLACYFYTSDLGRAFRVMEGLKYGLVGVNEGLITTVEAPFGGLKESGLGKEGGRQGIEDYLDTKYVCIGGLGL

SEQ ID NO: 9813 - protein, 1052 aa, Cytophaga hutchinsonii
MKLETVIQKGHSASVKAVAVSPDGKILATGSRDKSVKLWDQQSGMEIRSLIGHDHTVNGLAFSPDGKLLATSSADGTARVWDILTGKEIFTSPKNSKYITDVAFNPDGKSFAYAGYPDSASIYAIPSGKLIKRLEVNADQGSGYGISLKYSNDGKWLAIGEDNKTANVYRTSDWHLAYTFKPAEGWCGGCGTYVEFSRDNKSLFKIAHNDKLSQYDLQTGSLIKTFGEPVDYLRGITLTKDGQHVIAASDSMLYNYTITSKTVVAYKLYLSETVNDIALSLDEKEILVASDNMTAWALEAASGKVIRTYQGALQEQDKGGLNYNADNYWEYNIARYLRLKNELLLTKDDNNFITGKTGVNAIQWNISTGAPNKLYEGHTKAVISMDQSADGSILATADGAGEVFLWNTKTGALINRIKPHTEPIFDVSLSRDGKYVATGSWDASIEVYDVQTGEVSSDMYLKENSCYSISFTPNGLYLLCGRLDKSLELREPDSKKVVLSFIGHTDVVSSIAFGADPNKALTASWDGTARIWDVTTGMMLQKFKGARGMLHSAIYSTDSKKIITGGDDRIIRIWDIQSGQVLKTLNGHQSEITSLSLSKDGKMLVSYSTDGVVKFWNLESGLEFYEHVHISSREWMARTPQGYFSATEQARADIHFVKGMDVYAPDQFFEYYRPDLIQQIFLNRGSSPTGMQNVENSLQLSPPPLIKLACIPNADGLQATLNIKVMDEGGGLSEIRLAHNGKNMAVALDPKKVVEGKGNSYIYSVPVSLVRGTNQFSGIAVSKGKIESAASLVSVVSDKAPSAAVCHVFAIGIDTYKNPAYTLNYAREDAEAFAESVKRNGANLYQKVIVHGLYDAAATRQNVLDTLKSLEAHIALNDVFIFYYAGHGSMVDQNFYFIPTECTSMYQATANNALSAETIQAGFKNIKALKQIIIMDACQSGGSVEVLAMRGANEEKAFAQLSRGAGIHVMASAGSEQNAKEILELKHGLFTYVLLEALNGKADGAPKDGKITIYELKSYLDDQVPELNSKYSGKIQFPYTFSRGSDFPIVLE

SEQ ID NO: 9814 - protein, 333 aa, Nitrosovibrio sp. FJI82
MAIRVGINGFGRIGRMVFRASIEEFDDIEVVAINDLLEPDYLAYMLLHDSVHGRFKGDVSVDGNNLIVNGKKIRLTATKDPEELNWGEVKVDVVVESTGLFLTKELCEKHIKAGAPKVVMTAPSKDDTPMYVYGVNDKTYQGEAIISNASCTTNCLAPIAKVLNDTWGIKRGLMTTVHAATATQKTVDGPSNKDWRGGRGILENIIPSSTGAAKAVGKVIPELNTKLTGMAFRVPTSDVSVVDLTVELEKEASYDEICDAMKKASEGSMKGVLAYTDQKVVPTDFRGESATSIFDAEAGMALDGNFVKVVSWYDNEWGYSSKILEMVRVVAGK

SEQ ID NO: 9815 - protein, 388 aa, Prochlorococcus marinus subsp. marinus str. CCMP1375
MATTTANSSMLGTSGATFAPLTVPKRLLLGPGPSNSHPSVLNALSQQPVGHLDPFYIQLMAEVQGLLRDVWQTSNRLTLPMSGTGSAAMEATIANVVEPGDTFLVAIKGYFGNRLADMASRYKANVQTIDKKWGEAFSLQELEEAIIKYKPAFLALVHAETSTGVCQPMEGIGDLCRKHNCLLILDTVTSLGSIPLYLDDWKVDLAYSCSQKGLSCPPGLGPFTMNERAEEKLNKRTGKVPNWYLDVSLLNKYWGSDRVYHHTAPVNMNFGIREALRLILEEGLEATWTRHKLNALELWNGLEDLGLSLHVPSDIRLPTLTTVSIPSNVDGKAFSLHLLNNHGVEIGGGLGELAGKVWRIGLMGYNSNKTNVDKILNLFDSELPKFKS

SEQ ID NO: 9816 - protein, 345 aa, Zea mays
GARQGLQLHRHRGRRPKQDRAMGPPESCKDGREGVVLLYQKDRKYPTGLRANRATEAGYWKATGKDNEVYDPLAAEGLLLVGMKKTLVFYKGRAPRGDKTNWVMHEYRLEGSGRLPASPASASGSATNIAAAMMKASASACKDEWVVCRVFNKTTGIKKTAAPAYQVAMAGAEMDQNQNNIPAIPIPMPLQLPLPVPMQMQFPILPDFVMDPVAPYYPNPNAGAGMMPPMAAGIGGAGGLQINGALFGNPMPAPLPMNFYHHQMGMGAAAGQVDMGAAAGQMDMGAAGAGAGGFDVAAPESRPSSMVSQKDEQANAAEISSMMSVTGPGSATTTIEMDGIWKYKY

SEQ ID NO: 9817 - protein, 333 aa, Nitrosovibrio sp. RY3C
MAIRVGINGFGRIGRMVFRASIEEFNDIEVVAINDLLEPDYLAYMLLHDSVHGRFKGDVSVDGNNLIVNGKKIRLTATKDPEELNWGEVKVDVVVESTGLFLTKELCEKHIKAGAPKVVMTAPSKDDTPMYVYGVNDKTYQGEAIISIVSCTTNCLAPIAKVLNDTWGIKRGLMTTVHAATATQKTVDGPSNKDWRGGRGILENIIPSSTGAAKAVGKVIPELNTKLTGMAFRVPTSDVSVVDLTVELEKEASYDEICDAMKKASEGSMKGVLAYTDQKVVSTDFRGESATSIFDAEAGMALDGNFVKVVSWYDNEWGYSSKILEMVRVVAGK

SEQ ID NO: 9818 - protein, 604 aa, Photobacterium profundum SS9
MAENDFHIVNRIRTQIARLGDKVALRHQAQEQWQDITWNEFGEQIQQLAIAMLAHGMNVQDKVAIFSNNMPRWTVTDFAALYNRCVTVPIYSTNTPQQAAYVLNDADVRLLFVGEQVQLDAAIGIAEGCPKLERIVTLSDDLVLPDNPLVCSFNDFLCAATPELEAELQQRLNDTAMDDLLTLIYTSGTTGTPKGVMLDYANIAAQLAGHDQNLSLDEGDSSLCFLPLSHVFERAWTFYVLHRGAINHYLTDTNQLKEALADVKPNVMAAVPRVYEKIYSTVHDKVSRAPFHRKLIFTWAVNMGARMAVCHQEHRQPSKLLTMSHNLANKLVLSKLRDILGGNIKFMPCGGAKLDEGIGRFFHAIGINVKLGYGMTETTATVSCWDDQCFNPDSIGMAMPGAEIKIGENNEILVRGPMVMRGYYNMPEETAKNFTEDGFLKTGDAGHFDEQGNLFITDRIKELMKTSGGKYIAPQVIEGAIGKDHFIEQIAVIADTRKFVSALIVPCFDTLEEHARELNIKYKDRLELVKNSQIVELIEKRVVELQKDLARFEQVKKITLLPKAFSMDKGELTPTQKLRRKVIHDRYHQEIERMYEESHRKANK

SEQ ID NO: 9819 - protein, 422 aa, Mesorhizobium sp. BNC1
MKTTDSFGRPLVAVTGMGVVTSLGQGKKDNWRALTGGQSGIHPITRFPTDHLATTISGMVDFLPESSRGASALTFALADSAAEEAIGEAGFSTSDFGGPLFLAAPPVELDWHNRLRLYAQSDRANGWRSLIEAARKASERALFDESQFAAIADRLAEKYGTRGLPITLSTACASGATAIQLGTEAIRRGECERALAIGADGSATAEALIRFSLLSALSTQNERPEKASKPFSKDRDGFVLAEGSGALVLESLENALARGAEILGIIRGCGEKADDFHRTRSKPDGSPAIAAVRAALSDAGMSEDEIGYVNAHGTSTPENDKMEHLSLSTVFGERMRTIPISSNKSMIGHTLSAAGAVEAVFSILTMRENTIPPTINYENPDPAIELDVVPNVKREAEVASVLSNSFGFGGQNTCLVMAREAG

SEQ ID NO: 9820 - protein, 313 aa, Psychrobacter arcticus 273-4
MSALQQLRTMTTIVADTGDLAAIERLKPIDATTNPSLITKALIHPDNEAVLSETMSRHRNDIDAVIDELTIQIGCNILSLIEGRVSTEVDARLSYDTQATIDKALAFMEAYQKSGIDSERVLIKMAATWQGIEAARYLETQGIHCNLTLLFGQHQAIACADAGVTLISPFVGRILDWQKRQQNRQNIPVSDDMGVQSVKLIYQYYKQHGYKTQVMGASFRSTEQILALAGCDLLTIAPNLIDELAAMDIEVTRQLSESMSMDMTDMTRVSLSAEEFSHAYQQDTITQDLLPKGIDGFISARDELAHMLASMRS

SEQ ID NO: 9821 - protein, 428 aa, Acinetobacter sp. ADP1
MDTKHSALNQRKQQATPRGVGVMCQWYADKAENATIWDAEGNTYIDFAGGIAVLNTGHRHPKVLAAVKAQLERFTHTAYQVTPYESYVALAERINELAPIAGPAKTTFFTTGAEAVENAVKIARCYTGRQGIITFGNGFHGRSFMTMAMTGKTAPYKRDFGLMPGGVFHARYPVESRGISVDDALESIENIFSEDVAPHDVAAIVLEPVQGEGGFNVVPADFLKRLRALCDKHGILLVADEVQTGFARTGKLYAMDHYETKADLITMAKSLGGGFPISGVVGRAEVMDAPNPGGLGGTYAGNPVAVAAAHAVIDAIQEEKLCERANELGAELVHVLKGLQQSTDQVITDIRALGSMVAAEFETAEQAKAVQNYAMQNGLLLLTCGKYGNVIRFLYPLTIPVEQFRSGLDILKQGVASLATDHTTQAIG

SEQ ID NO: 9822 - protein, 479 aa, Acinetobacter sp. ADP1
MAAPKNVSESGHSEGLKSGLQSRHLTMISIAGVIGGALFVGSGSVIYSAGPAAILAYTLGGLLVLLIMRMLGEMAVMNPDSGSFSTYADRAIGRWAGFSIGWLYWCFWTLLMGWEAYVAGKILNSWFPFIPIWGYMLLVIVGLVWVNLQDVKNYGEFEFWFALIKVVAIVMFLVVGSLAIMHLWPWGDPSAAGFTNLTAQGFMPGGFSSVITALLGVMFAYMGAEIVTVAAAESKDPAKEIRKASNSIVWRIILFYVGSMFITVCLIPHNNPLLKDPTWGTYSVTLSTLGIPEARHIVNFVVLTSVCSCFNSALYTCSRMMFSLSKRGDAPKIFAKTNRNSSPWAGVIFSSIFSIVAVYLTATESMNVYDVLMLATGTVALYVYLAVAFSQLRMRKKIEAEGKAVDFKMWLFPWLTYAVIITIIGAIITMLIEGTYFKEVTYTTGLALVIVILGILTHKFNWGKDAREKMLEQSKKSMT

SEQ ID NO: 9823 - protein, 329 aa, Triticum aestivum
SEGIRGDPRRAACVVAAMSSLSMVEARLPPGFRFHPRDDELVLDYLSRKLGGGGAGGAAAAVASIYGCPAMVDVDLNKIEPWDLPEIACIGGKEWYFYSLRDKKYATGQRTNRATESGYWKATGKDRAISRKGLLVGMRKTLVFYEGRAPKGKKTEWVMHEFRKEGQGDLMKLPLKEDWVLCRVFYKTRATVAKPPTGSSYNIDSAAATSLPPLVDNYIAFDHPGVSTVQNLEGYEQVPCFSNGPSSHPSSSASMNIPVTAMAPMAADQEQQHMGKAIKDALSQLTRFEQGNVKREAPAQGGVFAQDGFEYLAESGFSQMWNSLNGFSS

SEQ ID NO: 9824 - protein, 262 aa, Pyrococcus abyssi GE5
MVKVAYVQMNPQILEPDKNYSKAEKLIKEASKQGAQLVVLPELFDTGYNFETREEVFEIAQKIPEGETTTFLMDVARDTGVYIVAGTAEKDGDVLYNSAVVVGPRGFIGKYRKIHLFYREKFFFEPGDLGFRVFDLGFMKVGVMICFDWFFPESARTLALKGADVIAHPANLVMPYAPRAMPIRALENKVYTVTADRVGEERGLKFIGKSLIASPKAEVLSMASETEEEVGVAEIDLYLVRNKRINDLNDIFKDRREEYYFR

SEQ ID NO: 9825 - protein, 200 aa, Arabidopsis thaliana
  misc_feature (61)..(61): Xaa can be any naturally occurring amino acid
  misc_feature (85)..(85): Xaa can be any naturally occurring amino acid
  misc_feature (114)..(114): Xaa can be any naturally occurring amino acid
  misc_feature (135)..(135): Xaa can be any naturally occurring amino acid
  misc_feature (153)..(153): Xaa can be any naturally occurring amino acid
  misc_feature (164)..(164): Xaa can be any naturally occurring amino acid
  unsure (1)..(200): unsure at all Xaa locations
AFTEIEALHTRVLPYEDSTGIFCSNDRLCDRLAVEIKPDLLILQYDGEGLYTEPHGGSTSXILPTFIRSQRQNDITFVELSTQDXGRSTAEAKAAVTVADVVVPVIHRTGYCSXNMRIVLIELLVVTLSLPHAHXCLPLLHTTTSDMEPAVSXSSRKLHDLSSXDSDSDLRYIDYALALDDMTVIAENDLDGAAALGSRY

SEQ ID NO: 9826 - protein, 317 aa, Haemophilus influenzae 86-028NP
MTTQLDSLRNMTVVVADTGDIDAIKKYQPQDATTNPSLILSASALPQYAPLIDEAVAYAKAQSNDKAQQLIDAEDKLAVNIGLEILKIVPGRISTEVDARLSYNTQATVEKARKLIALYNAAGISNDRILIKIASTWQGIRAAEILEKEGINCNLTLLFSEAQARACAEAGVYLISPFVGRILDWYKANSDKKEYAPAEDPGVISVTKIYNYYKEYGYNTVVMGASFRNVGEITELAGCDRLTIAPALLKELQENSTALIRKLEYKGEVKAKPQPLTEAEFYWQHNSDAMAVEKLAEGIRKFAIDQEKLETMLSAKL

SEQ ID NO: 9827 - protein, 191 aa, Burkholderia sp. 383
MMRVGDRDCTPMSQEKNDYTLWLTGLSGAGKSTLSREIAAQLRARKIPTCILDGDELRAGVSPDLGFSREDRTENCRRTAEIAKLLNSQGFMVIVALISPYEADRQRARQIVGVDHFVEVYLKTDIATCSARDPKQLYAKAITGQTTQFTGISDPYEVPTTPDLVVETGSMDIASSVALIMNFERQRFTHA

SEQ ID NO: 9828 - protein, 461 aa, Burkholderia sp. 383
MTDRNEAVPPHSTADYRALDAAHHIHPFSDMGALNRAGSRVIVKADGVYLWDSDGNKIIDGMAGLWCVSVGYGCKALADAAYRQIQELPFYNTFFKTTHPPVIELSAMLAEVSPKGFNHFFYCNSGSEGNDTVLRLVHQYWRVQGQPQKKYVISRKNGYHGSTIAGGTLGGMGYMHEQMPSKVENIVHIDQPYFFGEAAAGETPEAFGLARAQQLEAKILELGAENVAAFIGEPFQGAGGVIFPPSTYWPEIQRICRKYDILLAADEVIGGFGRTGEWFAHQHFGFEPDLITMAKGLTSGYVPMGAVGIHERVARPIIDNGEFNHGLTYSGHPVAAAVAVANLKLLRDEGIVERVKNDIGPYFQRRLRDALGDHPIVGEIAGAGLVAGVQLARDRDRRERFGASVDIGTICRDFCFNGNLIMRATGDRMLLSPPLVIREAEVDEIVDKAKRAFDATAERVG

SEQ ID NO: 9829 - protein, 1017 aa, Synechococcus elongatus PCC 7942
MNYCQNARTAMSAALQSSDDAFRTVSSPLATDLDLSSPLEFFLRHRLTVVEELWEVVLRQECGQELVDILTQLRDLTSPEGQAPEVGGEALVQVIETLELSDAIRAARAFALYFQLINIVEQHYEQTQYQLAYERSRLEPLPGPDESPEGLHTIEIPQHQLDPFAAVIPLNQDPATFQTLFPRLRQLNVPPQMIQELTDRLDIRLVFTAHPTEIVRHTIRDKQRRIAYLLRQLDELETGKNRGFRELEAQNIRQQLTEEIRLWWRTDELHQFKPTVLDEVDYALHYFQEVLFEAIPLLYQRFRLALQGTFPDLQPPRYNFCQFGSWVGSDRDGNPSVTSAVTWQTACYQRSLVLDRYITAVEHLRNVLSLSMHWSEVLPELLSSLEQESMLFPETYEQLAVRYRQEPYRLKLSYILERLHNTRDRNTRLQQQQEKDPTTPLPEYRDGTLYQAGTAFLEDLKLIQHNLKQTGLSCYELEKLICQVEIFGFNLVHLDIRQESSRHSDAINEICEYLQILPQPYNELSEAERTAWLVQELKTRRPLVPARMPFSESTREIIETLRMVKQLQEEFGEAACQTYIISMSRELSDLLEVLLLAKEVGLYDPVTGKSSLQVIPLFETVEDLQNAPRVMTALFELPFYTQLNPTQSEPLQEVMLGYSDSNKDSGFLSSNWEIHKAQKALGTVARDHRVKLRIFHGRGGSVGRGGGPAYEAILAQPGRTTDGRIKITEQGEVLASKYALPELALYNLETITTAVIQSSLLGSGFDDIEPWNQIMEELAARSRRHYRALVYEQPDLVDFFNQVTPIEEISKLQISSRPARRKTGKRDLGSLRAIPWVFSWTQSRFLLPSWYGVGTALQEFLQERPEQNLNLLRYFYEKWPFFRMVISKVEMTLAKVDLQIAHHYVHELANPEDQERFERVFSQIAAEFQLTCHLVLTITNHGRLLDGDPELQRSVQLRNGTIVPLGFLQVALLKRLRQYRQQTETTGLMRSRYSKGELLRGALLTINGIAAGMRNTG

SEQ ID NO: 9830 - protein, 333 aa, Nitrosovibrio sp. RY6A
MAIRVGINGFGRIGRMVFRASIEEFDDIEVVAINDLLEPDYLAYMLLHDSVHGRFKGDVSVDGNNLIVNGKKIHLTATKDPEVLNWGEVKVDVVVESTGLFLTKELCEKHIKAGAPKVVMTAPSKDDTPMYVYGVNDKTYQGEAIISNASCTTNCLAPIAKVLNDIWGIKRGLMTTVHAATATQKTVDGPSNKDWRGGRGILENIIPSSTGAAKAVGKVIPELNTKLTGMAFRVPTSDVSVVDLTVELEKEASYDEICDAMKKASEGSMKGVLAYTDQKVVSTDFRGESATSIFDAEAGMALDGNFVKVVSWYDNEWGYSSKILEMVRVVAGK

SEQ ID NO: 9831 - protein, 271 aa, Thermobifida fusca YX
MTPHDTRPDTAAPPTSAAAGTSVDVDLTGRTALVTGAASGIGRACATRLAAAGATVRLVDLNREALDELAQRGIGEPHHVDLTDLDAVDTVARGVDIVVNNAGVQTVCPVHEFPPERFSMMVKLMLEAPFRIVRAALPHMYARNWGRIINISSVHGLRASAYKSAYVAAKHGLEGFSKVVALEGAPHGVTSNCINPGYVRTPLVEQQIADQARAHGIPASDVVETVLLARSPIKRLIEPAEVAEMVAYLCCPEASFINGASLTIDGAWSAS

SEQ ID NO: 9832 - protein, 247 aa, Oryza sativa
MSSAAAATRFIKCVTVGDGAVGKTCMLICYTCNKFPTVECRAAANPFLSVLAPARRAGLSSLRLDLDYIPTVFDNFSANVSVDGSVVNLGLWDTAGQEDYSRLRPLSYRGADVFILSFSLISRASYENVQKKWMPELRRFAPGVPVVLVGTKLDLREDRAYLADHPASSIITTEQGEELRKLIGAVAYIECSSKTQRNIKAVFDTAIKVVLQPPRHKDVTRKKLQSSSNRPVRWPHGSTQNGIEDHG

SEQ ID NO: 9833 - protein, 470 aa, Photobacterium profundum SS9
MKKTKIVCTIGPKTESVEMLTKLANAGMNVMRLNFSHGNFEEHGQRIVNLREVMATSAQPLAILLDTKGPEIRTIKLENGEDFALVAGQEFTFTTDITVVGNQDRVAVTYPGFAKDLTKGNIILVDDGLIEMEVLETTETEVKCKVLNNGDLGENKGVNLPGVSVKLPALSEKDKADLVFGCEQGVDFVAASFIRKEDDVKEIRALLAANGGEKIQIISKIENQEGVDNFDSILEASDGIMVARGDLGVEIPVEEVIFAQKMMIEKCNRARKVVITATQMLDSMIKNPRPTRAEAGDVANAIMDGTDAVMLSGESAKGKYPIEAVTIMAQICNRTDSALKAELGSRLDSSRLRITEAVCKGAVDTSEKLNAPLIVVATEAGKSARSIRKYFPTAKIIAVTTNQKTAAQLCLTKGVTPIVVDAIDNTDAFYSRGKEIALETGLGAKGDIVVMVSGALVPSGTTNTASVHVL

SEQ ID NO: 9834 - protein, 321 aa, Agrobacterium tumefaciens str. C58
MTSKLEQLRAITTVVADTGDIEAVARLKPVDCTTNPTIVLKALGTPAFADAVKEAVAWGRKQGGQSDAVVAAVADRLAISVGAALAGLVPGRVSTEVDADLSFDTQASITKARHIIASYKERGIERERILIKLASTWEGIKAAEVLQSEGIDCNLTLLFSQAQAIACAEAKAFLISPFVGRILDWYKKSTGETYTAETDPGVVSVRSIYNYYKANGIGTVVMGASFRNVGEIEALAGCDRLTISPALLEELDKDNGKLERKLSPDNVKAEALQSLDEKAFRWAMNEDAMATEKLSEGIRLFAKDLVTLREMVRKELTAAAA

SEQ ID NO: 9835 - protein, 612 aa, Photobacterium profundum SS9
MEQNPQSQLKLLVAKGKEQGYLTYAEVNDHLPEDIVDSDQVEDIIQMINDMGIKVVETAPDADEIMMTEDNTDDDAIEAAAQALSSVESEIGRTTDPVRMYMREMGTVELLTREGEIDIAKRIEDGINQVQCSVAEYPSAISYLLEQFDKVEADELRLTDIISGFIDPNEEQTAAPTATHIGSELSETDLADEDKNLETDDDDEEEEDTGIDPELAREKFLELRHSYEKMALAINTHGRHNATTEVAVGELSEIFKQFRLIPKQFDKLVRSLRDSMDKVRTNERLIMRMCIDNSKMPKKTFIKFFAGNESSPDWIDEALNSGKPYAERLKNYEEDLRRSSLKLRILEKETGLSIERIKDISRRMSIGEAKARRAKKEMVEANLRLVISIAKKYTNRGLQFLDLIQEGNIGLMKAVDKFEYRRGYKFSTYATWWIRQAITRSIADQARTIRIPVHMIETINKLNRISRQMLQEMGREPIPEELAERMQMPEDKIRKVLKIAKEPISMETPIGDDEDSHLGDFIEDNTLQLPMDAATATNLRAATNDVLAGLTPREAKVLRMRFGIDMNTDHTLEEVGKQFDVTRERIRQIEAKALRKLRHPSRSDVLRSFLDE

SEQ ID NO: 9836 - protein, 340 aa, Pseudomonas fluorescens Pf-5
MRFLITGGAGYIGSHTVLELLQAGHEAVVLDNLCNSSMLSLQRVQQITGVAPVFVEGDVCDRAILDRIFSQHEIDGVLHFAGLKAVGESVKQPLPYYQNNVSGSITLCQAMASAGVYRLVFSSSATVYGDPVQIPLVESSPLGTPTNAYGTSKLMVEKILQDMAAADPRWSVALLRYFNPVGAHQSGLMGEDPNGLPENLLPYISRVAVGKLERLSIYGNDYPTPDGTGVRDYIHVVDLAKGHIAAVNYISQHTGINAWNLGTGVGYSVLEMIRAFEDASGCTIPYTLSPRRQGDIAQCWSDPSKALHDLGWKAERGLKEMMEDTWRWQSNNPDGYRSFE

SEQ ID NO: 9837 - protein, 273 aa, Prochlorococcus marinus subsp. marinus str. CCMP1375
MADFLAAAVQITSTSDIEANFSLAEEQIELASRRGAELVGLPENFAFLGNDQQRLDISASLAEQCSQFLVTMARRYQIFLLGGGFPVPAGDGQRTLNRAELVGRDGQLLGRYDKIHLFDVDLPDGNKYRESETIISGKKLPSVINLPGLCKVGISICYDVRFPELYRHLVNEGAELLMIPATFTAFTGKDHWQVLLQSRAIENTAYVVAPAQTGLHYGRRQSHGHAMIIDPWGTVLADAGVQQGSAIAPVDTSRVQSIRNQMPCLKHRKPELF

SEQ ID NO: 9838 - protein, 477 aa, Psychrobacter arcticus 273-4
MITPPENSSQSTPHSQTKPLTPTALDAAGIDIATDSATMSLPHNSDFENGRWFPTWRPFKGDLDRTPVGINEYLPPSKSMLLGVQHTFAMFGSTVLAPLLMGFDPNLAILMSGICTVMFFMITGGRMPSYLGSSFAFIGPVIAVTAYAGVGFNANLNVALGGIMACGIIYALVGLLVMKTGTGWIERLMPPIVTGAIVMIIGLNLAPVTIQGVSANQFDAWMAALTILLISGVAVFTRGMLRRLLLLVGLILSYIAYYVMTNVLGYGVPIDFSGVSTASWFGLPSVHTPKFEISAIILIAPVAFILIAENLGHFKAVEGMTKARVTPYMGRAFFADGLATTFSAGFGGTGVTTYAENIGVMAVTKVYSTTIFVIAGLVAIMLGLSPKFGAIIQTIPPALLGGASIVVFGLIAIAGAKIWIDSHIDFSKNSNLIIAAVTVIMGTGNFSLHLGGFDLGGIGTATLTAIVLNALFNLRKN

SEQ ID NO: 9839 - protein, 125 aa, Ustilago maydis 521
MSGAVPFKQDLPPSGGYQPIRYKRNLPGKNLSGLTIFGGVIAICAYGFYKVGLTNLEQRELKRERAWSRIHLIPLLMAESDRDTYRRNEAQIAREKEIMKDVPGWEAGKSVYNTKRYTQPNIVVL

SEQ ID NO: 9840 - protein, 132 aa, Brassica napus
MASRLYTNSPQNLHFVASSTKPHSFKTSVTVRCASIATSPNNRWSLHGMSALVTGGTRGIGRAIVEELVGLGAKVHTCARNETELKESLRDWNRSGFQVDGSVCDVSDRAQRESLMETVSSLFHGKLHILVK

SEQ ID NO: 9841 - protein, 461 aa, Thiomicrospira crunogena XCL-2
MSAISFQSYQNEFKHLVRLAIPILLAQLALTGLGVVDTIMSGQVGTDDLAAIGLGTSLLFPVFMISTGILLALTPLVAKQKGRQNWQGITYYLHQSLWLSIPLGLFSLLTLMHLQWVLDLLTLSSNVYQLTNDYLFYIAFGLPGIVLYQAFRFFWEGLGLTIPTMLISFFALLLNIPLNAVFIYGWGPVEAYGAAGCGIASALVMWAMFVVSVIYVLSSEKTRSLVCLKLSLFERPSWSKGISDILSLGIPNTLALLFEVSLFSFIALFIAQLGTVVIAAHQVAISYTSLAFMVPLSVAMAITVRVGEAYGQGSLKALKVSVRTGVGSAALFSGVIALFTYAMMQDIAALYTTDTKVILLAGTLLLFAAFYQVFDAVQVASAGALRGLHSTKVTMVVTFISYWLIGLGMGYVFAFTDWVIPKSGVAGFWLGIVLGLILAAVLLQIKLHVLVKRLTREGELA

SEQ ID NO: 9842 - protein, 711 aa, Geobacillus stearothermophilus
MRRWLSLVLSMSFVFSAIFIVSDTQKVTVEAAGNLNKVNFTSDVVYQIVVDRFVDGNTSNNPSGALFSSGCTNLRKYCGGDWQGIINKINDGYLTDMGVTAIWISQPVENVFSVMNDASGSASYHGYWARDFKKPNPFFGTLSDFQRLVDAAHAKGIKVIIDFAPNHTSPASETNPSYMENGRLYDNGTLLGGYTNDANMYFHHNGGTTFSSLEDGIYRNLFDLADLNHQNPVIDRYLKDAVKMWIDMGIDGIRMDAVKHMPFGWQKSLMDEIDNYRPVFTFGEWFLSENEVDANNHYFANESGMSLLDFRFGQKLRQVLRNNSDNWYGFNQMIQDTASAYDEVLDQVTFIDNHDMDRFMIDGGDPRKVDMALAVLLTSRGVPNIYYGTEQYMTGNGDPNNRKMMSSFNKNTRAYQVIQKLSSLRRNNPALAYGDTEQRWINGDVYVYERQFGKDVVLVAVNRSSSSNYSITGLFTALPAGTYTDQLGGLLDGNTIQVGSNGSVNAFDLGPGEVGVWAYSATESTPIIGHVGPMMGQVGHQVTIDGEGFGTNTGTVKFGTTAANVVSWSNNQIVVAVPNVSPGKYNITVQSSSGQTSAAYDNFEVLTNDQVSVRFVVNNATTNLGQNIYIVGNVYELGNWDTSKAIGPMFNQVVYSYPTWYIDVSVPEGKTIEFKFIKKDSQGNVTWESGSNHVYTTPTNTTGKIIVDWQN

SEQ ID NO: 9843 - protein, 101 aa, Penicillium canescens
EYKEAFSLFDKDGDGEITTKELGTVMRSLGQNPSESELQDMINEVDADNNGTIDFPEFLTMMARKMKDTDSEEEIREAFKVFDRDNNGFISAAELRHVMTS

SEQ ID NO: 9844 - protein, 148 aa, Salvia miltiorrhiza
MADPLTDEQISEFKEAFSLFDKDGDGCITTKELGTVMRSLGQNPTEAELQDMINEVDADGNGTIDFPEFLNLMARKMKDTDSEEELKEAFRVFDRDQNGFISAAELRHVMTNLGEKLTDEEVDEMIREADVDGDGQINYEEFVKVMMA

SEQ ID NO: 9845 - protein, 151 aa, Methanothermobacter thermautotrophicus str. Delta H
MKDRIPIFSVAKNRVEMVERIELSDDEWREILDPEAFRVARKAGTEPPFTGKYHDLHDDGIYRCICCGTDLFDSETKFDSGTGWPSFYDVVSEHNIKLREDRSLGMVRCEVLCARCDAHLGHVFDDGPRPTGKRYCMNSAALKFIPRDQIG

SEQ ID NO: 9846 - protein, 300 aa, Glycine max
MELETLYTPCYMPNSNWFVQESLSTEWTREDNKKFESALAIYDKDTPDRWFKVAAMIPGKTVFDVIKQYRELEEDVSEIEAGHVPIPGYLASSFTFELVDNHNYDGCRRRLAPVRGSDQERKKGVPWTEEEHRRFLMGLLKYGKGDWRNISRNFVVTKTPTQVASHAQKYYIRQKVSGGKDKRRPSIHDITTVNLTETSASDKNKPPVIAPQQKLNSMSKVQLDWTSSHYNDGSLMVFNPNSDDLFVSSSSDVTSMALKMQGQDLYECALREAYAKVKVPGFSMAPRDFNNEAVFGIHAL

SEQ ID NO: 9847 - protein, 77 aa, Brassica napus
RVRIIFPALERNAQKHWNQAVHSLTLNVRKIFSDLDPELFKECLAKFKEDESKEGETKAKREATWRRLEEFGMRKAS

SEQ ID NO: 9848 - protein, 197 aa, Zea mays
MSASRFIKCVTVGDGAVGKTCLLISYTSNTFPTDYVPTVFDNFSANVVVNGATVNLGLWDTAGQEDYNRLRPLSYRGADVFILAFSLISKASYENVSKKWIPELKHYAPGVPIVLVGTKLDLRDDKQFFIDHPGAVPITTAQGEELKKLIEAPAYIECSSKSQENVKGVFDAAIRVVLQPPKQKKKKSKAQKACSIL

SEQ ID NO: 9849 - protein, 412 aa, Burkholderia fungorum LB400
MSRRRVVVTGLGLISPVGNNVADGWANLVAGKSGIANITKFDASNFSTRFAGEVKGFNIEDYIPGKEARHMDTFIHYGVAAGIQAMQDSGLEVTDENSERIGVVVGSGIGGLPMIEVTQTELLNRGPRRISPFFVPASIINMISGHLSIKFGIKGPNLAIVTACTTGLHCIGEASRLIEYGDADVMIAGGAESTVSPLGVGGFAAARALSQRNDDPATASRPWDKDRDGFVLGEGAGVMVLEEYEHAKARGAKIYAEVSGYGMSGDAYHMTAPLEDGDGARRCMLAALKNAGINLDQVNYLNAHGTSTPLGDLAETTGIKRAFGDHAKDMVVNSTKSMTGHLLGGAGGLESVFTVLAVHHQVSPPTINIFNQDPACDLDYCANTAREMKIDVALKNSFGFGGTNGTLVFKRA

SEQ ID NO: 9850 - protein, 330 aa, Thermobifida fusca YX
MAKAPVNVTVTGAAGQIGYALLFRIASGQLLGVDTPVRLRLLEIPQAIKAAEGTAMELDDCAFPLLAGVDIYDDPRKAFDGVNVALLVGARPRTKGMERRDLLEANGGIFGPQGAAINDGAADDVRVLVVGNPANTNALIAQAHAPDIPADRFTAMTRLDHNRALSQLAAKLNVSVSDIKKLTIWGNHSATQYPDIFHAEVNGRSAVEAVNDEEWLRDTFIPTVAKRGAAIIEARGASSAASAANAAIDHVYDWVNGTPEGDWTSVALPSDGSYGVPEGLVSSFPVVSRNGSWEIVQGLEINEFSRERIDASVRELEEEREAVRALGLIK

SEQ ID NO: 9851 - protein, 316 aa, Vibrio fischeri ES114
MTTKLEQLRKLTTVVADTGDIEAIAKYTPEDATTNPSLILKAAEITEYAPLIDASIEYAKAQSNDKAQQVQDTCDMLAVNIGKEILKVVPGRISTEVDARLSYDTEGSVAKARQLIKMYNDAGITNDRILIKLASTWEGIRAAEILEKEGINCNLTLLFSFAQARACAEAGVYLISPFVGRIMDWYKAKEGRDFEPSEDPGVVSVTGIYNYYKEHGYNTVVMGASFRNIGEILELAGCDRLTISPNLLQELEEATGEVVEKLVDTNGNKARPAAMTHAEFLWDHNQDAMAVEKLAEGIRNFAVDQGKLEAMIATKL

SEQ ID NO: 9852 - protein, 377 aa, Clostridium acetobutylicum ATCC 824
MKVPIIMTPGPTSVRENVRLSRAEKTTNPDLDMDFYDFYKKTTEKIGKFLKTKNEVRILSGEGILGLEAACASLTEKGDRVLVIENGIFGEGFADFVKMYGGEPFFFRGNKKCSINIEELERFLDSDSEFKYATVVHCDTPSGMLNNVGAICKLLKKKGIMTVVDSVSAMGGEELKVDEWDIDIVIGGSQKCISAPPGLTIVSISDDAFSAMKNRKTPIASFYCNLLVWEDYYNKKWFPYTPPISDIVALRKAVENILEEKDIIARHDKIASATRAAVVLGGLEIYIEDGFSNTVTVIKVPHGMNDDKILSYMKENYNVMIAGAFDYLKGKVLRIGHMGENAYVDKVSYTLFALQRTLEHYGFEFKRDMVKVFLEKV

SEQ ID NO: 9853 - protein, 663 aa, Vibrio fischeri ES114
MNRKHLANAIRALSMDGVQQANSGHPGAPMGMADIAEVLWRSHLNHNPANPEWADRDRFILSNGHGSMLIYSLLHLSGYELSIDDLKNFRQLHSKTPGHPEYGYAPGVETTTGPLGQGITNAVGMAMAEKALAAQFNKEGHDIVDHFTYTFMGDGCLMEGISHEACSLAGTLGLGKLIAFWDDNGISIDGEVEGWFSDDTPKRFEAYGWHVIPAVDGHDSDAINAAIEAAKADPRPTLICTKTIIGFGSPNKQGTHDCHGAPLGADEIKAAKAQLGWEHGAFEIPQEVYAEWDAKETGAAKEASWNEKFAAYEAAYPELAAEFTRRVNGDLPKEWEEKASAIIADLQANPANIASRKASQNALEAFGAMLPEFMGGSADLAPSNLTMWSGSKSLEANDFSGNYIHYGVREFGMTAIMNGIALHGGFVPYGATFLMFMEYARNAMRMAALMKVQNIQVYTHDSIGLGEDGPTHQPVEQIASLRLTPNMSTWRPCDQVESAVAWKLAIERKDGPSALIFSRQNLAQQERDAKQLANIAKGGYILKDCEGQPELILIATGSEVELAIEAAAQLTAEGKAVRVVSMPSTDAFDKQDEAYREAVLPSAVTKRIAIEAGIADFWYKYVGFGGKIIGMTTFGESAPADELFKMFGFTTENVVNTAKELLA

SEQ ID NO: 9854 - protein, 518 aa, Burkholderia sp. 383
MCVARRHHAAQPRQYVSLSAFVIEVPVPAKSSVAPAIVWFRDDLRVTDQPALTRAVESGRPLVCVFVDDTGDGAGRALGGAARWWLHGSLAGLDAALARHGGRLLLLRGDAQREIERVVHDTGAEAVYWNRRYAQPQRDADAALKASLKARGVTVESSNGSLLNEPWEVLTGSGGPYQVFTAYWRAARRDRTVAVPLPEPERIAFHPWPKAVRDCALALDVLALRPPVPDWAGGLRDAWPAPDEAGAHARLDAFLTASLAGYADARDLPDRPATSRLSPFLRFGNLSPRQVWHAVQGAANAGGAAVAADADKFLSELGWREFSYTLLYHFPALASDNFRAQFDAMPWRDDPAALRAWQRGRTGYPLVDAGLRELWTTGWMHNRVRMVVASFLIKHLLIDWRAGEAWFWDTLVDADPANNAASWQWVAGCGADAAPYFRIFNPVAQGQKFDPDGAYVRRWVPELAGLDNASIHAPWEASPLELDAAGVRLGVDYPAPLVEHAAARARALDALAALPKRR

SEQ ID NO: 9855 - protein, 162 aa, Zea mays
MAMRALPLTPSRSSSFGAHQTRPSGGGPRSVRAYAKGDEEGDKQSLFGSITEALDFSQVRSEKDAELLYEARESTRGGGRMTREQYGALRRKIGGTYQDFFKSYVEVDGQYVEEGWVDKTCKICKKDTRGEPRQVDKLGRYAHVACLENPKPANFFAKIFAR

SEQ ID NO: 9856 - protein, 465 aa, Glycine max
SDDSKKTRRTRKKGASSSAGLEEKKEVKEEKKVRRRKKTEEEKLIVEDKGSEAEISDQDEPSFLENVEDDSDSGLELIKDDGEDISFTYGWPPLVCCFGAVQHAFVPSGRPAYMLINHEIHGSIPDALWSPEKFVRAPGGSAGSVAIALATLGGKVAFMGKLADDDYGQAMLYYMNANNVQTRSVRIDSKRATAVSLMKVGKRSRLKMSCVKPCAEDSLTKSELNFDVLKEAKMFYFNTHSLLDRNMRSTTLQAIKISKHFGGVIFYDLNLPIPLWHSSEETMMFIQQAWNLADIIEVTKQELEFLCGITPSEEFDTKNNARSKFVHYEPEVVSPLWHENLKVLFVTNGTSKIHYYTKELDGAVLGMEDAPITPFTCDMSATGDGIVAALMRMLTVQPDLLTDKGYLEHSIKYAIDCGVIDQWILGRVRGFPPHEDMEEDITPDSNGIRSISETEYRTAVGSASE

SEQ ID NO: 9857 - protein, 453 aa, Pseudomonas fluorescens
MTRNNPQTREWQALSNDHHLAPFSDFKQLKEKGPRIITHAKGVYLWDSEGNKILDGMAGLWCVAVGYGREELADAASQQMRELPYYNLFFQTAHPPVLELSKAIADIAPEGMNHVFFTGSGSEGNDTMLRMVRHYWAIKGQPNKKVIISRKNGYHGSTVAGASLGGMTYMHEQGDLPIPGIVHIAQPYWFGEGGDMSPEEFGVWAANQLEEKILELGVDNVGAFIAEPIQGAGGVIVPPDSYWPRMKEILAKYDILFVADEVICGFGRTGEWFGTDYYGLKPHMMTIAKGLTSGYIPMGGLIVRDDVVAVLNEGGDFNHGFTYSGHPVAAAVALENIRILRDEKIIERVHAETAPYLQKRLRELNDHPLVGEVRGVGLLGAIELVQDKATKRYEGKGVGMICRQFCFDNGLIMRAVGDTMIIAPPLVISKAEIDELVTKARQCLDLTLSALQG

SEQ ID NO: 9858 - protein, 467 aa, Mesorhizobium sp. BNC1
MVMTALATGASAPPVNLWLSEARATLSLAWPMILTNLAQTAMTMTDVMMLGRLSPEALAAGTLGHNLYFMLVIFGLGLLAAASPMMASAIGRKLRYVRDVRRTARQGLWLALVISVPIWLILWNTESILLAMGQDPALSRGAASYMNALQWAALPFFGYIVLRSFISALERPGWALLVAFICVGFNVLANWCLIYGNLGFPALGLQGAGLATTLSSIFMFLGLVAVVTLVRQFRRFSLFGRLWRSDWPRFKAMLRLGLPIAGILTFEVSIFNIAALLMGLIDAVSLAAHAIAIQIASASFMVPMGLGQAVTVRVGRAYGARDAEAITRAGWTAFVMGVSFMGMMALLMYFAPRLLIAGFLDLNAPENQPVISTAVTFLAFAALFQIADGAQAVGSGMLRGLHDTTVPMIYAALGYWGIGLPLSIVLGFPLGYRGVGIWTGLCAGLAVVAVMLLWRWLRREKLMPFSA

SEQ ID NO: 9859 - protein, 550 aa, Schizosaccharomyces pombe 972h-
MDLEHKRISRSTLPDYADPDYFEARGERNPVKPQSSNVVPGTSHIGSIKSPADYVFGDIIGDGSFSKVRRATDKKSWKEYAIKVLDKKYIVKENKVKYVNIERDSMMRLNGFPGISRLFHTFQDDLKLYYVLELAPNGELLQYIKKYRFLDENCVRFYAAEILSSIEYMHSCGIIHRDLKPENILFDGNMHVKITDFGTAKILPPKYVNSPDYTTFPSSFVGTAEYVAPELLSRQVVSKSSDLWAFACVVYQMIVGSPPFHGSNPNNIFKKIMSLEYELPKLLPPDIVPLFSHLFRIQPSDRSTTQQIKQFPFFATITWDNLWTQDPPPMQSFRPNYNIAIPNAPAYYRSNVTAAAAANAAAAFASASIVKHQETARRQELPTVNRFTAPTAHYGYASLRSHQMPVDRLYYKLVPSSESIIESTSVFVSPIPSVPEGNKFPSGLSKMFLKRKQRVMLLTDVGRCAFVCKGKHERLFIEMEVNLKDSSVVVIFDENSSKRFLIEDKVQSWIIEDSSGDVTKYKDKILKFADVASSHQSRSSEENVEENEEE

SEQ ID NO: 9860 - protein, 548 aa, Mycobacterium bovis AF2122/97
MSDARVPRIPAALSAPSLNRGVGFTHAQRRRLGLTGRLPSAVLTLDQQAERVWHQLQSLATDLGRNLLLEQLHYRHEVLYFKVLADHLPELMPVVYTPTVGEAIQRFSDEYRGQRGLFLSIDEPDEIEEAFNTLGLGPEDVDLIVCTDAEAILGIGDWGVGGIQIAVGKLALYTAGGGVDPRRCLAVSLDVGTDNEQLLADPFYLGNRHARRRGREYDEFVSRYIETAQRLFPRAILHFEDFGPANARKILDTYGTDYCVFNDDMQGTGAVVLAAVYSGLKVTGIPLRDQTIVVFGAGTAGMGIADQIRDAMVADGATLEQAVSQIWPLDRPGLLFDDMDDLRDFQVPYAKNRHQLGVAVGDRVGLSDAIKIASPTILLGCSTVYGAFTKEVVEAMTASCKHPMIFPLSNPTSRMEAIPADVLAWSNGRALLATGSPVAPVEFDETTYVIGQANNVLAFPGIGLGVIVAGARLITRRMLHAAAKAIAHQANPTNPGDSLLPDVQNLRAISTTVAEAVYRAAVQDGVASRTHDDVRQAIVDTMWLPAYD

SEQ ID NO: 9861 - protein, 400 aa, Zea mays
MEAPPGPGPMELDAPPPAAAAAAIPPAGSDKHKDGEGGDAVTGHIISTTIGGKNGEPKRTISYMAERVVGTGSFGIVFQAKCLETGETFAIKKVLQDRRYKNRELQLMRAMEHPNVICLKHCFFSTTSRDELFLNLVMEFVPETLYRVLKHYSNANQRMPLIYVKLYMYQLFRGLAYIHNVPGVCHRDVKPQNVLVDPLTHQVKLCDFGSAKVLIPGEPNISYICSRYYRAPELIFGATEYTSSIDIWSAGCVLAELLLGQPLFPGESAVDQLVEIIKVLGTPTREEIRCMNPNYTEFRFPQIKAHPWHKIFHKRMPPEAIDLASRLLQYSPSLRCSALDACAHPFFDELRTPNARLPNGRPFPPLFNFKHELANASPDLVSRLVPEHIRRQIGVNFGSS

SEQ ID NO: 9862 - protein, 281 aa, Ustilago maydis 521
MSNVELGVQTEKAFQKQPIFQNSKAALKTRDRRWYKDVGLGFKTPRAAIDGTYIGKHFDTISSTISTQSISNSTSRIPKVQSIAASALVNGSKCSSNKCINIVHWRMHHDESASSTHMETAETDCTFGGTTCWRRCDRLVDGRHSVPDLNCITDSLCIFSTESTVVSLHCISGQLLTDKKCPWTGLVSIRGRILTGKVVSTKMTRTIIIRREYLHFVPKYSRYEKRHKNVAAHVSPAFRVQVGDTVTIGQCRPLSKTVRFNVLKVAKNKSAEKAAKQFGRF

SEQ ID NO: 9863 - protein, 428 aa, Agrobacterium tumefaciens str. C58
MPEQAVKQSHDIDALMMTIGAQAKAASRPLSIAGTDQKNRALLAMASAIEASKEAILAANRKDLAAAESAGLAASFVDRLTLNDARIAGIAEGIRSVAALADPVGEVIAAWDRPNGLKIERVRTPLGVIGVIYESRPNVTADAGALCLKAGNAVILRGGSDSQHSSRAIHACLVQGLRIAGLPENAIQLVPVTDRAAVGALLSGLKGTVDVIVPRGGKSLVARVQSEARVPVFAHLEGICHIYVDKSADLDMAKAIVVNAKMRRTGICGAAETLLVDASAVSSHLEPVVKALLDAGCEVRGSQPVRNVVEGLEAATEEDWRTEYLDAIISVAVVDGISGAIEHIGTYSSNHTEAVIAEDPDVVARFFNELDSAILLHNASTQFADGGEFGMGAEIGIATGKMHARGPVGVEQLTSFKYRVHGTGQTRT

SEQ ID NO: 9864 - protein, 56 aa, Oryza sativa
MADSTATCIDIILAIILPPLGVFFKFGCGIEFWICLLLTFFGYLPGIIYAVWVITK

SEQ ID NO: 9865 - protein, 157 aa, Triticum aestivum
MSLIPRGNAFDPFSLDLWNPFDGFPFGSGSSGGGGSLFPSFPRISSETAAFAGARIDWKETPEAHVFKADVPGLKKEEVEDGNVLQISGERNKEKEEKTDTWHRVERSSGKFLRRFRLPEDAKVEQIKAAMENGVLTVTVAKEEAKKPEVKSILISG

SEQ ID NO: 9866 - protein, 467 aa, Saccharomyces cerevisiae
MSTNTKHYDYLVIGGGSGGVASARRAASYGAKTLLVEAKALGGTCVNVGCVPKKVMWYASDLATRVSHANEYGLYQNLPLDKEHLTFNWPEFKQKRDAYVHRLNGIYQKNLEKEKVDVVFGWARFNKDGNVEVQKRDNTTEVYSANHILVATGGKAIFPENIPGFELGTDSDGFFRLEEQPKKVVVVGAGYIGIELAGVFHGLGSETHLVIRGETVLRKFDECIQNTITDHYVKEGINVHKLSKIVKVEKNVETDKLKIHMNDSKSIDDVDELIWTIGRKSHLGMGSENVGIKLNSHDQIIADEYQNTNVPNIYSLGDVVGKVELTPVAIAAGRKLSNRLFGPEKFRNDKLDYENVPSVIFSHPEAGSIGISEKEAIEKYGKENIKVYNSKFTAMYYAMLSEKSPTRYKIVCAGPNEKVVGLHIVGDSSAEILQGFGVAIKMGATKADFDNCVAIHPTSAEELVTMR

SEQ ID NO: 9867 - protein, 501 aa, Sulfolobus solfataricus P2
MISVKEMRALEINSSALGVSTLLLMENAGRSVKDEIVKRFNVKDKVAYVYVGHGGKGGDGLVAARHLADEGAKVTVILLGENKHEDAILNLNVIEEMDYSITLVEIKDMDELKPISADILIDAMLGTGFSGKPREPFRSAIKAFNNSKGFKVSIDVPSGINADTGEAYEDEYVKPDLVVTFHDIKPGLLKYNFNTVVTKIGIPVEAEIYVGPGDLIVNARSRPYYSKKGDSGRVLVIGGSYTFSGAPTLAALGALRAGADLVYVASPEDTARIIAGYSPDLITIKLRGKNISPDNFEELKLWIDRADVVVIGPGMGLAEETIEASKLIVNYLKEKNKLAVIDADALKAISGFDLYENAVITPHAGEFKIFFGEEPDKNIRDRISQVITYAKKCKCTVLLKGYVDIISDGKRFKLNKTGNPGMTVGGSGDTLTGITATLMAQKIEPFIAAYLGVFINSLAGTLAYNRLGAHLTPTDIINEIPNVINNPLDSFKRKLYKRVLS

SEQ ID NO: 9868 - protein, 237 aa, Dactyloctenium aegyptium
GIVNGMDVSEWDPSKDKYIAVKYDAETAIEAKALNKEALQAAVGLPVDRKIPLIAFVGRLEEQKGPDVMAAAIPGIMEEEDVQIVLLGTGKKKFERLFKGAEEKYPDKVAAVVKFNAPLAHHIMAGADLLAVTSRFEPCGLIQLQGMRYGTPCACASTGGLVDTVVEGKTGFQMGRLSVDCKVVEPADVQKVATTLKRAIKVVGTPAYKEMVRNCMALDLSWKGPAKNWENVLLSMG

SEQ ID NO: 9869 - protein, 524 aa, Catharanthus roseus
MEMDMYTIRKAIAATIFALVVAWAWRVLDWAWFTPKRIEKRLRQQGFRGNPYRFLVGDVKESGKMHQEALSKPMEFNNDIVPRLMPHINHTINTYGGNSFTWMGRIPRIHVMEPELIKEVLTHSSKYQKNFDVHNPLVKFLLTGVGSFEGAKWSKHRRIISPAFTLEKLKSMLPAFAICYHDMLTKWEKIAEKQGSHEIDIFPTFDVLTSDVISKVAFGSTYEEGGKIFRLLKELMDLTIDCMRDVYIPGWSYLPTKRNKRMKEINKEITDMLRFIINKRMKALKAGEPGEDDLLGVLLESNIQEIQKQGNKKDGGMSINDVIEECKLFYFAGQETTGVLLTWTTILLSKHPEWQERAREEVLQAFGKNKPEFERLNHLKYVSMILYEVLRLYPPVIDLTKIVHEDTKLGPYTIPAGTQVMLPTVMLHREKSIWGEDATEFNPMRFADGVANATKNNVTYLPFSWGPRVCLGQNFALLQAKLGLAMILQRFTFDVAPSYVHAPFTILTVQPQFGSHVIYKKLES

SEQ ID NO: 9870 - protein, 104 aa, Triticum aestivum
  misc_feature (98)..(98): Xaa can be any naturally occurring amino acid
  unsure (1)..(104): unsure at all Xaa locations
AILMKWILHDWSDAHCATLLKNCYDALPENGKVIVVECVLPVNTEATPKAQGVFHVDMIMLAHNPGGKERYEREFRELAKGAGFSGFKATYIYANAWXAIEFIK

SEQ ID NO: 9871 - protein, 438 aa, Actinobacillus pleuropneumoniae serovar 1 str. 4074
MLTQEKNDLNKSGLDITNDTLVLILAGGRGSRLYELTDRRAKPAVYFGGCRRIIDFALSNCINSNLLKIGVITQYAAHSLLRHLQRGWSFLPYERNQYIDMLPARQQLDENTWYRGTADAVYQNMSMMKSHYRPKYVVILAGDHIYKMDYTQMLRDHVESGAKCTVGCIEVPREQAVEFGVMAVNDKLKVKEFVEKPADPPAMPGRPDSSLASMGIYVFDADYLYKMLEQEAAVPGTSHDFGKDIIPKAVEEGVLYAHPFERSCKGRNATGAIYWRDVGTIDSYWAAHMDLVSEEPQLDLYDESWPIHGRPQQTAPARFYYNKQRQRTLDNSLIAGGCVITDAEISNSVLFNRVHVAEETIIEHTVILPQVSIGKNCVIKRAVIDRHCVIPDGLQIGVNPEEDAKHFRVSKGGIVLVTQGMLDKLQGITSNIKLHHTI

SEQ ID NO: 9872 - protein, 208 aa, Arabidopsis thaliana
MSTTAATVAGGAAQPGQLAFHQIHQQQQQQQLAQQLQAFWENQFKEIEKTTDFKNHSLPLARIKKIMKADEDVRMISAEAPVVFARACEMFILELTLRSWNHTEENKRRTLQKNDIAAAVTRTDIFDFLVDIVPREDLRDEVLGSIPRGTVPEAAAAGYPYGYLPAGTAPIGNPGMVMGNPGGAYPPNPYMGQPMWQQQAPDQPDQEN

SEQ ID NO: 9873 - protein, 405 aa, Sinorhizobium meliloti
MMDFESFFKNELDGLHQEGRYRVFADLARHRGSFPKATRYTADGAQEVTVWCSNDYLGMGQCPIVTEAMKNAIDECGAGAGGTRNISGTNHYHVLLERELADLHGKESALLFTSGYVSNWAALGTLCSKIPGVIVFSDAGNHASMIEGIRHSKCERVIFKHNSVADLEAKLAAADPRAPKIIAFESVYSMDGDIAPIREFCDLADKYGAMTYLDEVHAVGMYGPRGGGIAEREGLMHRLTVIEGTLGKAFGVMGGYITGSAALCDFIRSFASGFIFTTALPPALAAGALASIRHLKESQVERFAHQERVRRLRSLLDQRGIPHMVNPSHIVPVIVGDAAKCKWISDLLLDNFGIYVQPINYPTVPKKTERLRITPTPMHSDADIDHLVSALHSLWSRCALARAVA

SEQ ID NO: 9874 - protein, 484 aa, Agrobacterium tumefaciens str. C58
MYLGLDLGTSGVKALLMDGDQKIIGSANGSLDVSRPHHGWSEQNPADWIAATKTAVAGLKQKFAKELAAVKGIGLSGQMHGATLVDAEGKVLRPCILWNDTRSHAEAAALDADPRFRKITGNIVFPGFTAPKLAWVAKNEPDIFAKVAKVLLPKDYLRLWLTGEYISEMSDSAGTSWLDTGARKWSPELLAATGLDEKHMPSLVEGTDEAGVLRTELASEWGISGRAVVAGGAGDNAASACGMGTVKEGHAFVSLGTSGVLFAANASYLPKPESAVHAFCHALPNTWHQMGVILSATDALNWYSRLTGQSAADLTGELGETLLAPTGVTFAPYLSGERTPHNDAAIRGSFIGLSHESDRKALTQAVLEGVTFAIRDNLEALKSAGTSISRVTAIGGGSRSAYWLASIATSLGVPVDIPAEGDFGAAFGAARLGLIAATGADPVAVCSQPETARTIEPVAALGDAYEEAYRRYHALYPAIRALSQ

SEQ ID NO: 9875 - protein, 640 aa, Burkholderia sp. 383
MAHVLTAPEALAHHAPDSHAADEADTPTQDLLRFITCGSVDDGKSTLIGRLLYESNMLFDDQLTQLEADSKKVGTQGGELDFALLVDGLSAEREQGITIDVAYRFFATARRKFIVADTPGHEQYTRNMITGASTADLAVILIDARKGVLTQTRRHSHLVALIGIKRVVLAINKMDLVDYDQAVFDRIDADYRAFAAELGLAEIVSIPMSALRGDNVIVPSARMPWYAGLTLMQHLDTLPLAARVTSDEPFRLPVQWVNRPHLNFRGYAGSIASGEIRVGERVRVLPSGKESRVASVITQGGESDIARAGDAVTLTLADEIDISRGDMIARADAPPEVADQFEATLVWMHDAPLLPGRPYLVKLGTQTVGATCATPKYKIDVNTREHLAARTLALNEIGVCNLSFDRPVAFDPYDRNRHTGGFIVIDRVTNDTVGAGMLHFALRRAHNVHWQAVDVDRAARAALKAQTPRIVWLTGLSGAGKSTIANLVEKRLHALGKHTYLLDGDNVRHGLNRDLGFTEADRVENIRRVAEVARLMLDAGLITLVSFISPFRAERDMARALVGADEFVEVFVDTPLAVAEERDPKGLYKKARRGELKHFTGIDSPYEPPAQAELRVDTVAESPEEAADRIVAYLLRERAA

SEQ ID NO: 9876 - protein, 524 aa, Pisum sativum
MEPLSSTKQINNNNNNLAKPSSLHVETQPLEPSPLRKIMVVASIAAGVQFGWALQLSLLTPYVQLLGIHHTWAAYIWLCGPISGMLVQPVVGYHSDRCTSRFGRRRPFIAAGSIAVAIAVFLIGYAADLGHSFGDNLDKKVRPRAIGIFVVGFWILDVANNMLQGPCRALLGDLCAGNQRKTRNANAFFSFFMAVGNVLGYAAGAYSKLYHVFPFTKTEACNVYCANLKSCFFLSIALLTVLATAALIYVKETPLIAEKAVVTAEDGGSNGGMPCFGQLSGAFKELKRPMWILLLVTCLNWIAWFPFLLFDTDWMGKEVYGGTVGEGHAYDMGVRAGALGLMLNSVVLGATSLGVDILARGVGGVKRLWGIVNFLLAICLGLTVLVTKLAQHSRQYAPGTGGLQDPLPPSGGIKAGALTLFSVLGIPLAITYSIPFALASIFSSTSGAGQGLSLGVLNLAIVIPQMFVSVLSGPWDALFGGGNLPAFVVGAVAALASGILSMILLPSPPPDMAKSVSATGGGFH

SEQ ID NO: 9877 - protein, 488 aa, Chlamydophila pneumoniae J138
MITKQLRSWLAVLVGSSLLALPLSGQAVGKKESRVSELPQDVLLKEISGGFSKVATKATPAVVYIESFPKSQAVTHPSPGRRGPYENPFDYFNDEFFNRFFGLPSQREKPQSKEAVRGTGFLVSPDGYIVTNNHVVEDTGKIHVTLHDGQKYPATVIGLDPKTDLAVIKIKSQNLPYLSFGNSDHLKVGDWAIAIGNPFGLQATVTVGVISAKGRNQLHIADFEDFIQTDAAINPGNSGGPLLNIDGQVIGVNTAIVSGSGGYIGIGFAIPSLMANRIIDQLIRDGQVTRGFLGVTLQPIDAELAACYKLEKVYGALVTDVVKGSPADKAGLKQEDVIIAYNGKEVDSLSMFRNAVSLMNPDTRIVLKVVREGKVIEIPVTVSQAPKEDGMSALQRVGIRVQNLTPETAKKLGIAPETKGILIISVEPGSVAASSGIAPGQLILAVNRQKVSSIEDLNRTLKDSNNENILLMVSQGDVIRFIALKPEE

SEQ ID NO: 9878 - protein, 545 aa, Haemophilus influenzae Rd KW20
MATNYIFVTGGVVSSLGKGIAAASLAAILEARGLNVTIMKLDPYINVDPGTMSPTQHGEVFVTQDGAETDLDLGHYERFIRTKMTKRNNFTTGKIYSEVLRKERRGDYLGATIQVIPHITNEIKDRVIAGAQGHDVVIVEVGGTVGDIESLPFLEALRQLAVQVGREHTLFMHLTLVPYIPTAGEVKTKPTQHSVKELLSIGIQPDVLICRSDRMIPPNERAKIALFCNVAERAVISLKDVNSIYQIPALLKSQGLDDFVCERFRLTCPEADLTEWEQVLYKQANPVGEVTIGMVGKYTELPDAYKSVNEALKHAGLTNRLSVNIKYIDSQDVETKGVEVLKGIDGILVPGGFGYRGVEGKIRTAQYARENKIPYLGICLGMQIALIEYARNVAGLTKANSSEFDKDCEQPVVALITEWQDAEGNTEVRTDESDLGGTMRLGAQQCHLVSGSRARELYGKETIEERHRHRYEVNNTLLPQIEKAGLKVTGLSADKKLVEIIEVPNHPWFVACQFHPEFTSTPRDGHPLFAGFVKAAYENHKKSVK

SEQ ID NO: 9879 - protein, 218 aa, Glycine max
  misc_feature (177)..(177): Xaa can be any naturally occurring amino acid
  misc_feature (208)..(208): Xaa can be any naturally occurring amino acid
  unsure (1)..(218): unsure at all Xaa locations
MATGKSSRSRSAVSSAKDNGPKLEEGLNPFKSDKFDAESYVQSNCSLNDKEIKQLCTYLVDLKKASAEEMRRSVYANYAAFIRTSKEISDLEGELSSIRNLLSTQAALIHGLAEGVHIDSLSISNSDGFSVNATSDSEDKEISDLDKWLVEFPDLLDVLLAERRVEEALAALDEGEXVVSEAKDLKSINPSALLSLQNSIAERRQKLXADQLAEAACQ

SEQ ID NO: 9880 - protein, 427 aa, Pseudomonas fluorescens Pf-5
MSRSETLFANAQKHIPGGVNSPVRAFKSVGGTPLFFKHAEGAYVTDEDDKRYVDYVGSWGPMILGHSHPDVLDAVRKQLEHGLSYGAPTAMETEMADLVCSIVPSMEMVRMVSSGTEATMSAIRLARGFTGRDSIIKFEGCYHGHSDSLLVKAGSGALTQGVPSSAGVPAAFAKHTLTLPFNDIAAVEKMLAEVGQEVACIIVEPVAGNMNCVPPAPGFLEGLRRLCDQHGVVLIFDEVMTGFRVALGGAQAHYGVTPDLSTFGKIIGGGMPVGCFGGKRKIMEHIAPLGPVYQAGTLSGNPLAMAAGLTTLRLISRPGFHAELSDYTSRLLEGLQQRADAAGIPFVTTQAGGMFGLYFSGADDIVTFDDVMASDANLFKRFFHLMLEGGVYLAPSAFEAGFTSIAHGEAELQLTLDAAERAFAALK

SEQ ID NO: 9881 - protein, 148 aa, Brassica napus
VALAVAQVVMAIGTSFFAFGWPGAMYIGTLLIGLGYGAHWAIVPATASELFGLKNFGALYNFLTLANPAGSLVFSGMIASTICDMEAEKQAHGSVFNPDDVLKCDGYICYFLTSLIMSGFCIIACILSLFLVRRTKPVYTQLYGKTRT

SEQ ID NO: 9882 - protein, 333 aa, Streptococcus thermophilus
MAILVLGGAGYIGSHMVDRLVEKGQEKVVVVDSLVTGHRAAVHPDAIFYQGDLSDQDFMRKVFKENPDVDAVIHFAAYSLVGESMEKPLKYFDNNTAGMVKLLEVMNECGVKYIVFSSTAATYGIPEEIPILETTPQNPINPYGESKLMMETIMRWSDQAYGIKYVPLRYFNVAGAKPDGSIGEDHGPETHLLPIILQVAQGVREKIMIFGDDYNTPDGTNVRDYVHPFDLADAHLLAVEYLREGNESTAFNLGSSTGFSNLQILEAARKVTGKEIPSEKADRRPGDPDILIASSEKARTVLGWKPQFDNIEKIIASAWAWHSSHPKGYDDRG

SEQ ID NO: 9883 - protein, 740 aa, Zea mays
MASEILGNVTEKAKDLAGSKSTKMAQLAEVTKDVHDDKWRITSDYGVKQNNTDDWLRVATDDQTGPLLLEDQFAREKIHRFDHERIPERVVHARGSGAFGKFTLFESASDVTSAGILTDTSRETPVFLRFSTVLGSRGSADTVRDVRGFAVKFYTEEGNWDIVGNNIPVFFIQDSMKFPDVIHAGKPEPDCEVPQAQSAHNNFWDFQYMHPEATHMFMWAMSDRTIPRSYRMMQGFGVNTYTLINAKGERHFVKFHFTPELGVHSFVWDEALKIAGQDPDFHRKDLWMAIDSGAYPKWKFGIQVIPEAKEHDFEFDILDATKVWPEELVPVRYIGELELNKNPDEFFTQTEQVAFCTSHIVPGIGFSNDPLLQGRNFSYQDTQLSRLGINWEELPINKPVCPVMNFNRDGAMRHTITKGKVNYWPNRFQTVPPATEKEGAYVEFPEKTAGMKVRMQSKKFREHKSQAELFYNSMSENEKMHMKAAFAFELDHCDDPVVYERLCERLCEIDLELAQSVAEMVGGEQPTKQTRPKHNKKAKGLSQMDFQPEKPTIATRMVAILIADGYDKAAYTGMKAALTAAGALPFTISPRRNKIFADGEDKSGSGVVADHHLEGQRSTMYDSVFVPGGAKSIETLSKNGRAVHWVREAFGHLKAIGGTGEAVSFIKQAVDLPGMEFSTSGDVVNSYGVVTATAVQPESFKEAVNMAKEAKDFVSAYMYAISQHKNFERETAGLNAMVAY

SEQ ID NO: 9884 - protein, 523 aa, Glycine max
MAMANLARRKGYAVVLSSRSSLCLTRWRGFASGSDENDVVVIGGGPGGYVAAIKAAQLGLKTTCIEKRGTLGGTCLNVGCIPSKALLHSSHMYHEAKHAFANHGVKFSSVEVALPAMMGQKDKAVSNLTQGIDGLFQKNKVTYVKGYGKLVSPSEISVDTTEGENTVVKGKHIIIATGSDVKSLPGVTIDEKKIVSSTGALALSEIPKKLVVIGAGYIGLEMGSVWGRIGSEVTVVEFASEIVPTMDADIRKQFQRSLEKQGMKFKLKTKVVGVDTSGDGVKLTVEPSAGGEQTIIEADVVLVSAGRTPFTSGLNLDKIGVETDKLGRILVNERFSTNVSGVYAIGDVIPGPMLAHKAEEDGVACVEYLTGKVGHVDYDKVPGVVYTNPEVASVGKTEEQVKETGVEYRVGKFPFLANSRAKAIDNAEGLVKIIAEKETDKILGVHIMAPNAGELIHEAAIALQYDASSEDIARVCHAHPTMSEAVKEAAMATYDKPHSHLKSWLLLSSLVFIFVQEFTMTWR

SEQ ID NO: 9885 - protein, 312 aa, Zea mays
MAESFVLNTGSRIPSVGLGVWQIQPDAANDAIYAAVKAGYRHIDCAAAYNNEEEVGLALKKLFEDGVVKRDDLFITSKLWAANHAPEDVEEGIDTTLQDLQLDYLDLYLIHGPIRIKKGTSTMTPENFLPTDIPATWAAMEKLYDSGKARAIGVSNFSCKKLHDLLAVARVPPAVNQVECHPVWQQDKLRKLCQSNGVHLSAFSPLGSPGSPWINGPSVLKNPIVVSVADKLQKTPAQVALRWGIQMGHSVLPKSANESRIKENIDIFGWSIPEDLMAKFSEIKQVRLLTAEFVVHPQAGYNTLEDFWDGEI

SEQ ID NO: 9886 - protein, 333 aa, Streptococcus thermophilus
MAILVLGGAGYIGSHMVDRLVEKGQEKVVVVDSLVTGHRAAVHPDAIFYQGDLSDQDFMRKVFKENPDVDAVIHFAAYSLVGESMEKPLKYFDNNTAGMVKLLEVMNECGVKYIVFSSTAATYGIPEEIPILETTPQNPINPYGESKLMMETIMKWSDKAYGIKYVPLRYFNVAGAKPDGSIGEDHGPETHLLPIILQVAQGVREKIMIFGDDYNTPDGTNVRDYVHPFDLADAHLLAVEYLRKGNESTAFNLGSSTGFSNLQILEAARKVTGKEIPAEKVDRRPGDPDILIASSEKARTVLGWKPQFDNIEKIIASAWAWHSSHPKGYDDRG

SEQ ID NO: 9887 - protein, 120 aa, Oryza sativa; identical to SEQ ID NO: 1323

SEQ ID NO: 9888 - protein, 101 aa, Penicillium brevicompactum
EYKEAFSLFDKDGDGQITTKELGTVMRSLGQNPSESELQDMINEVDADNNGTIDFPEFLTMMARKMKDTDSEEEIREAFKVFDRDNNGFISVAELRHVMTS

SEQ ID NO: 9889 - protein, 214 aa, Bradyrhizobium japonicum USDA 110
MVTFPKHLLEGYQAFATQRLPTEQTRYRELSVKGQFPEVMVIGCCDSRVSPEVIFDVGPGELFVVRNIANLVPVYQPDGNAHGVSAALEYAVTVLKVKHIVVLGHAQCGGIRAFVDKIEPLTPGDFIGKWMQMFIKPGEVVEQRDHESMAQFVERIEKAAVFRSLENLMTFPFVQKAVDAGQMQTHGAYFGVAEGSLFVLDKVAKEFRSVKDAA

SEQ ID NO: 9890 - protein, 197 aa, Raphanus sativus
MPRSRSRVLILLLPLAFVFYLYRYLPSPAIVDQSSYSSIYHISVKDIDGNDVSLSKFTGKVLLIVNVASKCGLTQGNYKELNILYAKYKTKGLEILAFPCNQFGSQEPGSNKEIKDNICTTFKGEFPIFDKIEVNGENASPLYKFLKEQKGGLFGDSIKWNFAKFLVDKQGNVVDRFAPTTSPLEIEKDIEKLLAST

SEQ ID NO: 9891 - protein, 237 aa, Dactyloctenium radulans
GIVNGMDVSEWDPSKDKYIAVKYDAETAIEAKALNKEALQAAVGLPVDRKIPLIAFVGRLEEQKGPDVMAAAIPEILEEEDVQIVLLGTGKKKFERLFKGAEEKYPDKVAAVVKFNAPLAHHIMAGADLLAVTSRFEPCGLIQLQGMRYGTPCACASTGGLVDTVVEGKTGFQMGRLSVDCKVVEPADVQKVATTLKRAIKVVGTPAYKEMVRNCMALDLSWKGPAKNWENVLLSVG

SEQ ID NO: 9892 - protein, 516 aa, Catharanthus roseus
IAATIFALVMAWAWRVLDWAWFTPKRIEKRLRQQGFRGNPYRFLVGDVKESGKMHQEALSNPMEFDNDIVPRLMPHINHTIKTYGRNSFTWMGRIPRIHVMEPELIKEVLTHSSKYQKNFDVHNPLVKFLLTGVGSFEGAKWSKHRRIISPAFTLEKLKSMLPAFAICYHDMLTKWEKLAEKEGSHEVDIFPTFDVLTSDVISKVAFGSTYDEGGKIFRLLKELMDLTIDCMRDVYIPGWSYLPTKRNKRMKEINKEITDMLRFIINKRMKALKAGEPGEDDLLGVLLESNIQEIQKQGNRKDGGMTINDVIEECKLFYFAGQETTGVLLTWTTILLSKHPEWQERAREEVLQAFGKNKPEFERLNHLKYVSMILYEVLRLYPPVIDLTKIIHEDTKLGPYTIPAGTQVMLPTVMLHREKSIWGEDAMEFNPMRFADGVANATKNNVTYLPFSWGPRVCLGQNFALLQAKLGLAMILQRFKFDVAPSYVHAPFTILTVQPQFGSHVIYKKLERQNF

SEQ ID NO: 9893 - protein, 237 aa, Coelachyrum piercei
GIVNGLDVSEWDPSKDKYIATKYDVSTAIEAKALNKEALQAAAGLPVDRKIPLVAFVGRLEEQKGPDVMAAAIPQLMEDDVQIVLLGTGKKKFERMLMSSEEKYPDKVRAVVKFNAALAHHIMAGADLLAVTSRFEPCGLIQLQGMRYGTPCVCASTGGLVDTVIEGKTGFHMGRLSVDCKVVVPADVQKVASTLKRAIKVVGTPAYEEMVKNCMIQDLSWKGPAKNWENVLLSLGV

SEQ ID NO: 9894 - protein, 346 aa, Oryza sativa
MASLSVPPVPTDPRRDAIDLHRAFKGFGCDATAVTAILAHRDASQRALIRRHYAAVYHQDLLHRLAAELSGHHKRAVLLWVLDPASRDAAVLHQALNGDVTDMRAATEVVCSRTPSQLLVVRQAYLARFGGGGGGGLEHDVAVRASGDHQRLLLAYLRSPRYEGPEVVDMAAAARDARELYRAGERRLGTDERTFIRVFSERSAAHMAAVAAAYHHMYDRSLEKVIYRSCTAAYALALVFSLSEFNGGRAVKSETSGNFGFGLLTILRCAESPAKYFAKVLHEAMKGLGTNDTTLIRVVTTRAEVDMQYIKAEYHRSYKRSLADAVHSETSGNYRTFLLSLIGRDR

SEQ ID NO: 9895 - protein, 92 aa, Elaeis oleifera
ADGNGTIDFPEFLNLMARKMKDTDSEEELKEAFRVFDKDQNGFISAAELRHVMTNLGEKLTDEEVDEMIREADVDGDGQINYEEFVKVMMAK

SEQ ID NO: 9896 - protein, 237 aa, Eleusine coracana
GIVNGMDVSEWDPSKDKYIAVKYDEETATEAKALNKEALQAAVGLPVDRKIPLIAFVGRLEEQKGPDVMAAAIPEILEEEDVQIVLLGTGKKKFERLFKAAEEKYPDKVAAIVKFNAPLAHHIMAGADLLAVTSRFEPCGLIQLQGMRYGTPCACASTGGLVDTVVEGKTGFQMGRLSVDCNVVEPADVKKVSTTLKRAIKVVGTPAYKEMVRNCMTQDLSWKGPAKNWENVLLSMG

SEQ ID NO: 9897 - protein, 454 aa, Oryza sativa (japonica cultivar-group)
MAEQGAGEADAGGGEPPPAAVMTAAAEALAGQRSLPTPFLTKTYQLVEDPAVDDVISWNEDGSTFVVWRPAEFARDLLPKYFKHNNFSSFVRQLNTYGFRKIVPDRWEFANDCFRRGEKRLLCDIHRRKVVAAAAAAPPPPSPGMATAAAAVASGAVTVAAAPIPMALPVTRAGSPAHSSEEQVLSSNSGSGEEHRQASGSGSAPGGGGGGSASGGDMGEENERLRRENARLTRELGHMKKLCNNILLLMSKYAATQHVEGSAGISSIANCSGESSEAVPPPPPLPPAILDLMPSCPALATAAAAAGLAIDGEPDPSARLFGVSIGLKRTRDDAAAAADEDGGGEDQAEHGGADVKPEAADPHPAGGGGGSSTEASPESHPWPIYRPTPMYHAVRPTCNGPDRAGSDQDGSSSSQTMGPGEFDDLQKMMVVQQSNFVMHWGRSECGSGVRGFGW

SEQ ID NO: 9898 - protein, 237 aa, Calamovilfa gigantea
RDRHGMDVSEWDPSKDKYIAVKYDVETAIQAKALNKEALQASVGLPVDRNIPVAAFVGRLEEQKGPDVMAAAIPHILAEKNVQIVLLGTGKKKFERLFKGAEEKYPDNVRAVVKFNAPLAHHIMAGADLLAVTSRFEPCGLIQLQGMRYGTPCACASTGGFVDTVVEGRTGFQMGRLSVDCNVVEPADVQKVATTLKRAIKVVGTPAYNEMVRNCMAQDLSWKVPAKNWEKVLLGMG

SEQ ID NO: 9899 - protein, 411 aa, Tropheryma whipplei str. Twist
MSRQVVVTGLGVCCPLGIGTELAWQALLDGESGVRTLPDRCTKGFDLPVTFAGLVPDGVEDLLARTEVNRLDRAGQISLIAARQAVEDAGDIKQNPERTAVSWGTGIGCINTVLSAWDRLAEKGPGRVLPMTVPMLMPNAPAVAVGMKMQARAGIHTSVSACAASTESIAVGFDMIRSNKADVVIAGGSESAINPLTISAFASLSALSTYSGNPEHASRPFSKNRDGFVVSEGAAVLILEEKTRARARGAKIYAEISGALFNSDAHHITAPEPDGKMATTAMRNTLKMSGLSPEDITYVNAHATATILGDISEYKALLALFEDHLANVYVSATKASTGHLLGGAGALEAVFTVKAVSESIIPPTINCDEQDPDIQLRIQRHPKKLSRPFAATSNSFGFGGHNAVVAFTPTD

SEQ ID NO: 9900 - protein, 237 aa, Calamovilfa longifolia
RDRHGMDVSEWDPSKDKYTAMKYDVETAIQAKALNKEALQASVGLPVDRNIPVVAFVGRLEEQKGPDVMAAAIPHILAEKNVQIVLLGTGKKKFERLFKGAEEKYPDNVRAVVKFNAPLAHHIMAGADLLAVTSRFEPCGLIQLQGMRYGTPCACASTGGFVDTVVEGRTGFQMGRLSVDCNVVEPADVQKVATTLNRAIKVVGTPAYNEMVRNCMAQGLSWKGPAKNWEKVLLSMG

SEQ ID NO: 9901 - protein, 1141 aa, Cryptococcus neoformans var. neoformans
MSTNLTSPQSHNTLPPGDQFNRPELRPTNSVVSSTQSPLDWSSFMNFQTPPGVQGNSLGPHRSLSSLENGQPGRVSGHSMATPSVEPSSCPGDQYQSFAQGIALSQASSSAINFQAPQPRIVRPSQFSTSQQYAIDSSPRQSQAYTSPNFQFHPYASQQYSHHPSPQISSPHTPADQLFKGKSPASSSSHSHSNLTPGSSVQPSHPEPLRRTSGDMRPSDDGDSGLSLDLSKFPRDVRFQVPSFPTNRAPGAPPAGSQAWTEYSNTSVQSSDASQTAPGGLFARAACVGGPAWTMAPDQGRPFGSNENAGWNRWDQAQMKQNGLSMGVGVGMAMAQMGTVYVNPNLNPAVYGQGIQSFPSNGYYGGQYNLQQGQHMQQENESGGGEVGSRDIAMNSPHQYAAISGPIYGPGPPSSNHFSSPGNPHLQPHTSPSSHRAPSPRPSHDQTHAPNMMSTSAILPQRPSYDQNISDHRLPHQIDFSSAASVSNPNPHRREMNFTLSSTTSYVHSADGRALLQHPLLSPAQQALQDGPGLYSTTGFDMLGILGRVAARKNPSMVIGPVDLSCSFVVVDIRRYDSPIVYASPNFTRLTGYELPQLLGRNCRFLQSPDGEVTKGSKREYTDNEAVYLLKRSLEAGKECQTSLINYRRNGEPFINLVTVVPIPWDGPDIVYHVGFQIDLVEQPNKILRNMQDGNYSVDYTYSIPPEKPLQLDGKGAAIAGLSTAVLDIMGSRTKALAAGTEEGARMEWFKMILDNTDDFIHALSLKGFFQYASSSIRRSLGYEPEDLLNKNISEFAHPSDIVPVIRALKDSTQTIGEEQQPKPVHFTFRIRTKNFGYVWVESMGRLVVEAGKGRKAVILSGRVRNMPTLSWGKVAEHGGLAKTEFWAKISFQGLLLNLTFGVDKVLGYQAEEILGRNLFSLLPGGQNTPPSGEHLINNYASAPDIAPVAKAIYQTIHDSTHRGALSIRQKMVHRSGQPVDVILVFYAPGQAKDKQSPISYSNNDESASVNFIGTPNGASTYPVKITDIFVQVKLLSSSPSHQRSVQPPSIASLTQARPLVHLPNDNIFEELETGRDSSWQYELHQMKMTNRRLRDSIAALKEKKAGKAKKRKYNIVDESPENQSEIIDTSLSSQIGGIGF

SEQ ID NO: 9902 - protein, 516 aa, Arabidopsis thaliana
MTYAWLWTLLAFVLTWMVFHLIKMKKAATGDLEAEAEARRDGATDVIIVGAGVAGASLAYALAKDGRRVHVIERDLKEPQRFMGELMQAGGRFMLAQLGLEDCLEDIDAQEAKSLAIYKDGKHATLPFPDDKSFPHEPVGRLLRNGRLVQRLRQKAASLSNVQLEEGTVKSLIEEEGVVKGVTYKNSAGEEITAFAPLTVVCDGCYSNLRRSLVDNTEEVLSYMVGYVTKNSRLEDPHSLHLIFSKPLVCVIYQITSDEVRCVAEVPADSIPSISNGEMSTFLKKSMAPQIPETGNLREIFLKGIEEGLPEIKSTATKSMSSRLCDKRGVIVLGDAFNMRHPIIASGMMVALSDICILRNLLKPLPNLSNTKKVSDLVKSFYIIRKPMSATVNTLASIFSQVLVATTDEAREGMRQGCFNYLARGDFKTRGLMTILGGMNPHPLTLVLHLVAITLTSMGHLLSPFPSPRRFWHSLRILAWALQMLGAHLVDEGFKEMLIPTNAAAYRRNYIATTTV

SEQ ID NO: 9903 - protein, 291 aa, Sinorhizobium meliloti
MTNSPDFVKHRFLDLDGIRVFYREAGPPDAPVVLLPHGYPCSSYEFRNFMPLLADRWRLVAPDFPGSGYSDTPDDFAYGFDGFADFLEAFVRRLGLDRFALYLHDFGSQIGLRLAIRRPERISALIIQNGDIYEDELGPKYAPLQEYFRNPTPEGRTKLGEAVSEEGYRDEFLNDVRPELAERISPDLWKLHWSLTTAKRREIAIDVIAGLRENLAWFDRYQSYLREHRPPALIVWGPQDGYMPEGSARAYLRDLPDAELHLIDGGHWLLETNLSEVVSLCRNFLARASAK

SEQ ID NO: 9904 - protein, 498 aa, Glycine max
  misc_feature (475)..(475): Xaa can be any naturally occurring amino acid
  unsure (1)..(498): unsure at all Xaa locations
MTPFYFLLFAFILFLSINFLIQTRRFKNLPPGPFSFPIIGNLHQLKQPLHRTFHALSQKYGPIFSLWFGSRFVVVVSSPLAVQECFTKNDIVLANRPHFLTGKYIGYNNTTVAVSPYGDHWRNLRRIMALEVLSTHRINSFLENRRDEIMRLVQKLARDSRNGFTKVELKSRFSEMTFNTIMRMVSGKRYYGEDCDVSDVQEARQFREIIKELVTLGGANNPGDFLALLRWFDFDGLEKRLKRISKRTDAFLQGLIDQHRNGKHRANTMIDHLLAQQQSQPEYYTDQIIKGLALVMLLAGTDTSAVTLEWAMSNLLNHPEILKKAKNELDTHIGQDRLVDEPDIPKLPYLQSIVYETLRLHPAAPMLVPHLSSEDCTIGEYNIPQNTILLVNAWAIHRDPKLWSDPTHFKPERFENESEANKLLPFGLGRRACPGANLAQRTLSLTLALLIQCFEWKRTTKKEIDMTEGKGLTVXKKYPLEAMCQVCQSLTVKDIYNF

SEQ ID NO: 9905 - protein, 181 aa, Vibrio parahaemolyticus RIMD 2210633
MKGLLKLAAYLGFISMSSFVLASECPDILQGKQRMLNSTEEIELCEVFKGKTLLVVNTASQCGFTPQYEQLETLYQTYKDKNFAVIGFPSNDFRQDKGSEENTAKICYLDYGVTFPMMARSSVLGNDANPVFSEISTQAGVTPKWNFYKFLISKEGKVIATFPSSTSPTSTTLTNMIEQQL

SEQ ID NO: 9906 - protein, 594 aa, Arabidopsis thaliana
  misc_feature (74)..(74): Xaa can be any naturally occurring amino acid
  misc_feature (94)..(94): Xaa can be any naturally occurring amino acid
  misc_feature (132)..(132): Xaa can be any naturally occurring amino acid
  misc_feature (363)..(363): Xaa can be any naturally occurring amino acid
  unsure (1)..(594): unsure at all Xaa locations
MAAATSSIAPSLSCPSPSSSSKTLWSSKARTLALPNIGFLSSSSKSLRSLTATVAGNGATGSSLAARMVSSSAXVKAPVSLDFETSVFKKEKVXLAGYEEYIVRGGRDLFKHLPDAFKGIKQIGVIGWGSQXGPAQAQNLRDSLVEAKSDIVVKIGLRKGSRSFEEARAAGFTEESGTLGDIWETIAGSDLVLLLISDAAQADNYEKIFSHMKPNSILGLSHGFLLGHLQSSGLDFPKNISVVAVCPKGMGPSVRRLYVQGKEINGAGINASFAVHQDVDGRAADVALGWSVALGSPFTFATTLEQEYRSDIFGERGILLGAVHGIVESLFRRYTENGMSEDLAYKNTVECITGTISRTISTXQGMLAVYNSLSEEGKKDFETAYSASFYPCMEILYECYEDVQSGSEIRSVVLAGRRFYEKEGLPAFPMGNIDQTRMWKVGERVRKSRPAGDLGPLYPFTAGVYVALMMAQIEILRKKGHSYSEIINESVIESVDSLNPFMHARGVSFMVDNCSTTARLGSRKWAPRFDYILTQQALVAVDSGAAINRDLISNFFSDPVHGAIEVCAQLRPTVDISVPADADFVRPELRQSSN

SEQ ID NO: 9907 - protein, 463 aa, Oryza sativa
MVAAAVAAAEQVVAALREECATPAARLDGVAAAMAGEMAAGLAEEGGSKIKMIVSYVDNLPNGTEEGLFYALDLGGTNFRVLRVQLAGKEKRVVKRESREVSIPPHLMSGNSSELFGFIASALAKFVADEGHNAVFNDRQRELGFTFSFPVRQTSIASGTLIKWTKAFSIDDAVGEDVVAELQMAMEKQGLDMRVSALINDTVGTLAAGSYYDEDIVVGVILGTGSNAAYLEKANAIPKLEGELPKSGNMVINTEWGNFSSSCLPITEYDEALDKESLNPGEQIFEKLISGMYLGEIVRRVLLKISLQSSIFGNLDQTKLKTRFILRTPDISVMHHDGTPDLRIVAEKLADNLKITDTSLETRKMVVEICDIVTRRSDRLAAAGIVGILRKIGRGVPGDKRKSVIAIDGGLYEHYTEFRQCLETTLTELLGEEASKSVAVKLANDGSGLGAALIAAAHSQYLN

SEQ ID NO: 9908 - protein, 484 aa, Agrobacterium tumefaciens
MIKLKNAALLRDACLVNGRWLKAADGKTIAVENPANSMIIGHVPSLSADEVKAAVESAGKAFSEWSRRSAKDRAAILRRWFDLMVANADDLGALMTAEQGKPFAEAKGEALYAASFVEWFAEEAKRVYGDTIPSPTTDKRITILKQPIGVCAAITPWNFPAAMITRKAAPALAAGCAMIVKPAEQTPLTALALGVLAEEAGVPAGVFQVVTGAARDIGKVFTESDTVRKISFTGSTEVGRLLMAQSAPTIKKLSLELGGNAPFIVFDDADLDAAVEGAIVSKYRNAGQTCVCSNRIYVQDGVYDAFAEKLVKRVESLSVGEGTEPVVLIGPLIDQEAVPKVEDHVADALGKGAKIVIGGKRHALGGTFYEPTVLTGATQAMKVAREETFGPVAPLFRFGTEDEAVAMANDTEFGLAAYFYTENVRRTWRVAEALEYGMVGHNTGLISNEVAPFGGVKQSDLGREGSHYGIDEYLEIKYLCSAIG

SEQ ID NO: 9909 - protein, 502 aa, Arabidopsis thaliana
MATAAVIGLNTGKRLLSSSFYHSDVTEKFLSVNDHCSSQYHIASTKSGITAKKASNYRPSFPSSNRHTQSAKALKESVDVASTEKPWLPNGTDKELEEECYDDDDLISHSVEAILLLQKSMLEKSWNLSFEKAVSSEYPGKGTIRKKKIPVITCSGISARQRRIGAKKKTNMTHVKAVSDVSSGKQVRGYVKGVISEDVLSHAEVVRLSKKIKSGLRLDDHKSRLKDRLGCEPSDEQLAVSLKISRAELQAWLMECHLAREKLAMSNVRLVMSIAQRYDNLGAEMSDLVQGGLIGLLRGIEKFDSSKGFRISTYVYWWIRQGVSRALVDNSRTLRLPTHLHERLGLIRNAKLRLQEKGITPSIDRIAESLNMSQKKVRNATEAVSKVFSLDRDAFPSLNGLPGETHHSYIADTRLENNPWHGYDDLALKEEVSKLISATLGEREKEIIRLYYGLDKECLTWEDISKRIGLSRERVRQVGLVALEKLKHAARKRKMEAMILKN

SEQ ID NO: 9910 - protein, 606 aa, Mycobacterium leprae
MAIMDTNTEVHTLFTQEVAATQQYFDDPRFAGIIRLYTARQVVEQRGTIPTDYTVARDAATAFYARLRELFAAGKSVTTFGPYSPGQAVSLKRMGIEAIYLGGWATSAKGSITEDPGPDLASYPLSQVPDDAAVLVRALLAADRNQQYLRLHMTEQQLAATPAYDYRPFIIADADTGHGGDSHVRNLIRRFVEIGVPGYHIEDQRPGTKKCGHQGGKVLVPSDEQIKRLNAARFQLDIMRVPGIIVARTDAEAANLIDSRADERDQPFLLGATNLKIPSYKACFLALVRCFYELGVKELHGHLLYALGDGEYAAASAWLDRQGILAQVSGTVNAWQENGKQSIDDLFEQVEYRLLAAWEKDAGLMTYGEAVEEMLQFGESEGELIGMSPEEWRRFVGRASLYAAREKAKELGVDPGWDCELAKTPEGYYQIRGGIQYAIAKSLAAAPFADILWMETKTADLADARQFAEAIHAEFPEQMLAYNLSPSFNWDTTGMSDEEMKRFPEELGKMGFVFNFITYGGHQIDGVAAEEFATALRQDGMLALARLQRKMRLVESPYRTPQTLVGGPLAMQRWLRPPDVRRQPRPWAKVRPSTSILCRPRCRRSC

SEQ ID NO: 9911 - protein, 222 aa, Zea mays
  misc_feature (171)..(171): Xaa can be any naturally occurring amino acid
  misc_feature (193)..(193): Xaa can be any naturally occurring amino acid
  unsure (1)..(222): unsure at all Xaa locations
MITFADLTEPAAAGAERCVDRQLWLACAGSMCTVPLVGASVCYFPQGHAEHALGLDGAADLSAARVPALVPCRVTAVRYMADPDTDEVFARIRLVPLRGGEAHAGGLDDDVAAADEQEKPASFAKTLTQSDANNGGGFSVPRYCAETIFPRLDYAADPPVQNVVAKDVHGXAWKFRHIYRGTPRRHLLTTGWXSTFVNQKKLIAGDSIGFLRGDSGELHVGI

SEQ ID NO: 9912 - protein, 248 aa, Zea mays
KNYPTVSAEYSEAVEKARRKLRALIAEKSCAPLMLRLAWHSAGTFDVSSRTGGPFGTMKCPAELAHGANAGLDIAVRLLEPIKEEFPTLSYADFYQLAGVVAVEVTGGPEIPFHPGREDKPQPPPEGRLPDATKGSDHLRQVFGKQMGLSDQDIVALSGGHTLGRCHKERSGFEGAWTTNPLVFDNSYFKELLSGDKEGLLQLPSDKALLSDPVFRPLVEKYAADEKAFFDDYKEAHLKLSELGYADA

SEQ ID NO: 9913 - protein, 189 aa, Zea mays
MYPAAEIASVPYLSPAASFKPHYHVATDDGGGFLYQQYSNLLLPHPPSYYQEVAYDQLVLEASFPVGGNNRSNSESDEYQRSVAEERRKRRMVSNRESARRSRMRKQKQLSELWAQVVHLRSTNRQLLDQLNHAIRDCDRVLRENSQLRDEQTKLQQQLEMLPVETTREWCHESWLLKYLLFQVVDEII

SEQ ID NO: 9914 - protein, 504 aa, Methanococcoides burtonii DSM 6242
MSDEKTSSLTTAFGIPVGDDQNSLTAGERGPVLIQDVHLLEKLGHFNRERIPERVVHAKGAGAGGYFEVTADVTKYTKAKFLSEIGKRTEVFARFSTVGGEKGSADAARDPRGFAIKFYTEDGNHDLTGNNTPVFFIRDPLKFPDFIHTQKRNPATNCKDPNMFWDFLSLTPESIHQVTILFSDRGTPATFRNMNGYSSHTYKWYNDKGEYFWVQYHFKTDQGTKTLTREEAEKLSGTDPDHAVRDLYDAIEKGDYPSWTLEMQIMTPEQAEEYRFDILDITKVWPHGDFPTIKIGKMVLNRNPTNYFAEVEQSAFSPGNLVPGIDISPDKMLQARVFSYHDSHVHRLGPNYHQIPVNAPKNAPETSYQRDGFMRIDANGGSGPNYWPNSFGGPAPDPDALKPPFEVSGKADRTPYVHSNDDFVQAGNLYRDVMDDQARENLVGNIISHLSGAQKRIQLRQTALFFKADPDYGGRVADGLGLDVKEIERLANMTQTERVKATEK

SEQ ID NO: 9915 - protein, 455 aa, Psychrobacter arcticus 273-4
MVFPLSFVDFKSYSLRLGVLALPILITQFCQAALGVVDAIMAGQVSALDLAAVAVGSGIWLPLFLLATGILIATTPLIGEAIGQKQLDKVPHITQQSLWTAAVIGILGFIIVNLAPNVLALMGVPENIQPIATQYLHGVSFGFPAIAVYAVLRSYCEALGRPEPVTVISIIGLLADIPLNYIFIHGLFGMPEMGGAGCGVATAIVLWINVLLLAAYTSFTKRHQFASTRFFYAFASPNRAQIKKLLKLGIPIGVSIFFEASLFSLGALVISPLGELATASHQVALSVTSQLFMIPISVAMALTIMVSNHFGEKNLMALRQVQATGLIWTVLIAMACMIGVWLFRPQLAAAFTDNPVVRAQAMHLLIFALAYQLFDGWQVNVAGILRGMQDTTIPMWVTLFCYWIVALPLGIYLVRFTDIGAQGFWMALITGLFLSSILLTIRLCYQQKRLLAMWS

SEQ ID NO: 9916 - protein, 452 aa, Synechococcus sp. CC9605
MGADLDLVVLGAGSGGLAAAKRAARHGARVAIVEGDRVGGTCVIRGCVPKKLLVYGAQARHQLADASAYGLEIGAVRSDVPDLLRRVRAEVDRLNALHLGFLEKAGVQLLSGWGRFTAPDRIGISDQRGGPVREELTAPRFLVAVGGRPERPDIPGTEKTWVSDDMFLREDFPPAMVVVGAGFIACEFACILRGLGVAVTQVVRGTRLLRGFDAELADTLLDGMREQGIDVLLGQTVVAVEGEPGSLTARLGNGQSLDCGGVLMATGRRPWLSDLGLDAAGVALDNGRITVDANSCTSVAHIHAVGDVTDRVNLTPVAIDEGRAFADSVFGSRQRQVNHDLVACAVFSDPELATVGLSEEQAIERHGVDGVVVHRARFRSMARALPASGPRCLLKLVVEKHTDRVLGCHMVGEHAAEIIQMAAIAVGMGATKADFDRTMALHPSVSEEFVTM

SEQ ID NO: 9917 - protein, 463 aa, Mycobacterium bovis AF2122/97
MHHPVAPVIDTVVNLAKRRGFVYPSGEIYGGTKSAWDYGPLGVELKENIKRQWWRSVVTGRDDVVGIDSSIILPREVWVASGHVDVFHDPLVESLITHKRYRADHLIEAYEAKHGHPPPNGLADIRDPETGEPGQWTQPREFNMMLKTYLGPIETEEGLHYLRPETAQGIFVNFANVVTTARKKPPFGIGQIGKSFRNEITPGNFIFRTREFEQMEMEFFVEPATAKEWHQYWIDNRLQWYIDLGIRRENLRLWEHPKDKLSHYSDRTVDIEYKFGFMGNPWGELEGVANRTDFDLSTHARHSGVDLSFYDQINDVRYTPYVIEPAAGLTRSFMAFLIDAYTEDEAPNTKGGMDKRTVLRLDPRLAPVKAAVLPLSRHADLSPKARDLGAELRKCWNIDFDDAGAIGRRYRRQDEVGTPFCVTVDFDSLQDNAVTVRERDAMTQDRVAMSSVADYLAVRLKGS

SEQ ID NO: 9918 - protein, 112 aa, Triticum aestivum
RGLLALCGMLLKSLVDHADAWPFKEPVDSRDVPDYYDIIKDPIDLKTMSRRVESEQYYVTLEMFVADLKRMFINARTYNSPDTIYFKCSTRLEAYFTNRIQSHLAQAASTKN

SEQ ID NO: 9919 - protein, 380 aa, Methanococcoides burtonii DSM 6242
MDLEDTLLMMPGPVPVAPRVLRAMSRPMINHRGKEFSAMFDDCTTMLKEIFQTENDLFTISGSGTASMEAALGCTIDKDDKVVTIENGKFGERFKDIAARYGQVVPVECEWGTSVDLDVVEEKLAEGAKAVTMVHNETSAGIRNPALEVGMLAKKYGALFIMDGVTSIGGDDVKVDEWGVDIAVVGSQKCIAAPPGLSMLSVSERAFEAMNKENLPYYLDLKAYQKSAAKSQTPYTPAVPLFFGLQEALKIVMEEGMDARIKRQATGAAAVRAAMDAIGIEMFPQLNATSAYSSTVSAMKSPEGVDSNDIKNGMMDKGIIIAGGQNRLSGKIFRIGSMGNVAPKDLMMTIQHLELVFRNLNVINEMGAGTEAAAKVFDTL

SEQ ID NO: 9920 - protein, 451 aa, Psychrobacter arcticus 273-4
MKIHRPHLLKHTFNVVNRVRQTVSIAGLSALRVAKGEKPDAMLLKETFEQLGTTYIKIGQFIASTPSLFPRDYVQAFQSCLDQTTPLSYAYIEQVLKEEFAVNGLTLEETFAYIDSQPLASASIAQVHAARLHNGDEVVLKVQKPDVETIMQTDLGVLHGVTKLVELLMPSMRFASIAPIIDEIRLRMLAETDFIAEAQNIRDFQQFLAVSGNTRVVAPKVYEAHTTKRVLTMSRLYGVSMVDESLMRQYCTDPAQVMADTLNTWFASLMLCNSFHADLHAGNLMLLTDGRIGFLDFGIVGKLKAESWHACMGMMQAMQDNDYYAMARHMIDMEMTHSSNQVDVVALGNDLQRMMKTIMAEDKAFTSGVPFNTKEQADELNTMMLEIVEVGKRHGIHFPRDFALLTKQMLYFDRFMRTLAPDMDMFSDQRVQMLGKAEINDQENHPILNVL

SEQ ID NO: 9921 - protein, 493 aa, Oryza sativa (japonica cultivar-group)
MDSKSVIKKVLGIWYPYILKVAAAPVQEQEKCNGGGGGGFRGAAVRCHPALSTEKKASIRGVVGELLGAAAAAAGAGEERRRSLISLGVGDASSHACFRRGGEFAADAVADAARSGVFDCYAPSCGFPAARRWSNVSLFLEKVKLINIHICNSRAPETSAVADHLSAGARHRTRDADVFMTAGGTGAITAIATVLGGAPGANVLLPRPGFAPYEAACELAGAEPRFYDLLPRRGWEADLAGVRAMADGATAAIVVINPNNPCGAVYSAQHLFQIAETARELGIPIIADEVYAHMVFGGSKFVPMATFAHITPVITIGALSKKFMLPGWRLGWLAFCDPNGALKHVRNATEMLLNVTSGPASIVQAAVPKILSNEHNEFHRNVVNLLESAADALYRRVNQIEALQCYSKPHGSMFMMVEVNTSLLFGVEDDMDFARELIKEESVLVLPGSVIGLKNWIRIFFGAPTSVILEACDRIEAFCQKRAVQVKLLKKKF

SEQ ID NO: 9922 - protein, 446 aa, Streptococcus thermophilus LMG 18311
MTSIGLNITSFELALLFMLLFVAFYFIFLAYRDYQQVKNIRKLTKRVKSLMAGNYNEKLCIKGDSELLELANSLNDLSDVFRLTHENLIQEKNRLSSVLSYMSDGVIATNRLGQITMINSTAQRLLNLDRETATQMSILDILDGENPYTYSELLSKTPEIHLSRRDANDEFVTLRVNFALIRKESGFISGLVAVLHDATEQEKEERERRLFVSNVSHELRTPLTSVKSYLEALDDGALNEEIAPNFIKVSLDETNRMMRMITDLLALSRIDNKSTQLNVEMTNFTAFMTYILNRFGQIKSQETNPGKSYEIIRDYPVNSIWVEIDTDKMTQVIDNILNNAIKYSPDGGKITVSMKTTDTQLIVSISDQGLGIPKKDLPLIFDRFYRVDKARSRAQGGTGLGLSIAKEIVKQHNGFIWAKSEYGKGSTFTIVLPYDQDAMMVDEWEM

SEQ ID NO: 9923 - protein, 236 aa, Spartina pectinata
DRHGMDVSEWDPRRDKYIAVKYDVETAIQAKALNKEALQASVGLPVDRNIPVIAFVGRLEEQKGPDVMAAAIPHILAKKNVQIVLLGTGKKKFERLFKGAEEKYPDNVRAVVKFNAPLAHHIMAGSDLLAVTSRFEPCGLIQLQGMRYGTPCACASTGGLVDTVVEGMTGFQMGRLSVDCDVVEPADVQKVATTLKRAIKVVGTPAYNEMVRNCMTQDLSWKGPAKNWEKVLLSMG

SEQ ID NO: 9924 - protein, 166 aa, Glycine max
GKPEEKKEAKAAAKKGGKKEGVAKEPEVVHLGPPGVAPGELVFGVAHIFASFNDTFVHITDLSGRETISRVTGGMKVKADRDESSPYAAMLAAQDVAVRCQQLGINALHIKLRATGGNGTKTPGPGAQSALRALARAGMKIGRIEDVTPIPTDSTRKKGGRRGRRL

SEQ ID NO: 9925 - protein, 611 aa, Bradyrhizobium japonicum USDA 110
MANETNGKGNGAPATNGKAYPIEDHTYDVVVVGAGGAGLRAVVGCSEAGLRTACITKVFPTRSHTVAAQGGISASLGNMHKDDWRWHMYDTVKGSDWLGDQDAIEYMVRNAPDAVYELEHWGVPFSRTEDGKIYQRPFGGMTLDFGKGQAQRTCAAADRTGHAMLHTMYGQSLRHAAEFFIEFFAIDLIMDDQGTCRGVIALKLDDGTLHRFRAQTVILATGGYGRAYASCTSAHTCTGDGGGMVLRAGLPMQDMEFVQFHPTGIYGSGCLVTEGARGEGGYLVNSEGERFMERYAPSAKDLASRDVVSRAMTIEIREGRGVGKKKDHIFLHLDHLDPAVLAERLPGISESAKIFANVDVTREPIPIVPTVHYNMGGIPTNYHGEVLTKKDGDDNAVIPGLMAIGEAACVSVHGANRLGSNSLIDLVVFGRAAALRLAEKLTPNAKQPELPANSAELALGRLDHYRYASGGTPTAKLREGMQHVMQSNCAVFRTGEVLSEGQNLIEKVHSGITDIAVSDRSLVWNSDLVETLEFDNLIAQAVVTMNSAANRTESRGAHAREDFSERDDKNWMKHTLAWLDDAGKVKIEYRPVHDYTMTNDVQYIPPKARVY

SEQ ID NO: 9926 - protein, 237 aa, Eragrostis advena
GIVNGMDVSEWDPSKDKYIAVKYDAETAAQAKALNKEALQAAVGLPVDRKIPLIAFVGRLEEQKGPDVMAAAIPQIMAEKNVQIVVLGTGKKKFERLFKGAEEKYPDNVRAVVKFNAPLAHHIMAGADLLAVTSRFEPCGLIQLQGMRYGTPCACASTGGLVDTVVEGKTGFQMGRLSVDCNVVEPADVQKVATTLKRAIKVVGMPAYYEMVRNCMAQDLSWKGPAKNWENVLLSMG

SEQ ID NO: 9927 - protein, 236 aa, Pappophorum mucronulatum
RDRHGMDVSEWDPSKDKYIAVKYDVETAIEAKALNKEALQAAVGLPVDRKVPLIAFVGRLEEQKGPDVMAAAIPEIMEENAQIVLLGTGKMKFERLFKGAEEKYPDNVRAVVKFNAPLAHHIMAGADLLAVTSRFEPCGLIQLQGMRYGTPCACASTGGLVDTVVEGKTGFQMGRLSVDCNVVEPGDVQKVATTLKRAIRVVGTPAYNEMVRNCMAQDLSWKGPAKNWENVLLSMG

SEQ ID NO: 9928 - protein, 236 aa, Pappophorum bicolor
  misc_feature (234)..(235): Xaa can be any naturally occurring amino acid
  unsure (1)..(236): unsure at all Xaa locations
GIVNGMDVSEWDPSNDKYIAVKYDVETAIEAKALNKEALQAAVGLPVDRKVPLVAFVGRLEEQKGPDVMAAAIPEIMEENAQIVLLGTGKKKFERLFKGAEEKYPDNVRAVVKFNAPLAHHIMAGADLLAVTSRFEPCGLIQLQGMRYGTPCACASTGGLVDTVVEGKTGFQMGRLSVDCNVVEPGDVQKVATTLKRAIRVVGTPAYNEMVRNCMAQDLSWKGPAKNWENVLLXXG

SEQ ID NO: 9929 - protein, 480 aa, Bacteroides fragilis NCTC 9343
MEDLNFRKGDAKTEAFGSNRMLQPSPVEKIPDGPTTPEIAYQMVKDETFAQTQPRLNLATFVTTYMDDYATKLMNEAININYIDETEYPRIAVMNGKCINIVANLWNSPEKDTWKTGALAIGSSEACMLGGVAAWLRWRKKRQAQGKPFDKPNFVISTGFQVVWEKFAQLWQIEMRQVPLTLDKTTLDPEEALKMCDENTICVVPIQGVTWTGLNDDVEALDKALDAYNAKTGYDIPIHVDAASGGFILPFLYPDTKWDFRLKWVLSISVSGHKFGLVYPGLGWVVWKGKEYLPEEMAFSVNYLGANITQVGLNFSRPAAQILGQYYQFIRLGFQGYKEVQYNSLQIAKYIHSQIAKMTPFVNYSEDVVNPLFIWYMKPEYAKNAKWTLYDLQDKLAQHGWMVPAYTLPAKLQDYVVMRVVVRQGFSRDMADMLLGDIKNAIAELEKLEYPTSTRIAQEKNLPVEAKVFNHTGKPQAAKK

SEQ ID NO: 9930 - protein, 252 aa, Tropheryma whipplei TW08/27
MLSTHFQVRAFPNKSLLVEEVANRFLLTLENVLQKKASAHVGLEGGTMSELTLSRIAMYAARAKVIWNRVHFWWSDERYLPDGNSHRNYEQAKRCLFSRVKVPEGNIHQIPFIPGDINLAVRRYSDELERLSPDNGKVPEFDILFLGMGPDGHTASLFPNMSHPNVSVVPVFNAPKPPPERISMTLGAINNANRIWVQLSGLEKAKPLKSALEGADVLELPIAGVRGRLETIIFADKDAASLIPAEAHTQDY

SEQ ID NO: 9931 - protein, 238 aa, Enneapogon scoparius
  misc_feature (30)..(30): Xaa can be any naturally occurring amino acid
  unsure (1)..(238): unsure at all Xaa locations
RDRHGMDISEWDPSKDKYIAVKYDAETAVXAKALNKEALQAAVGLPVDRDIPLVAFVGRLEEQKGPDVMAAAIPEILEEEEDVQNVLLGTGKKKFERLFKSIEEEYPDKVCAVVRFNAPLAHHIMAGADLLAVTSRFEPCGLTQLQGMRYGTPCACASTGGLVDTVVEGKTGFLMGRLSVDCNVVEPADVKKVATTLKRAVKVVGTPAYKEMVRNCMAQDLSWKGPAKNWENVLLSMG

SEQ ID NO: 9932 - protein, 402 aa, Deinococcus radiodurans R1
MRLGTGGLVMPEAVIVSTARTPIGKAYRGFLNDTHGSDLGAHAVKHAIERAGVNPADIEDVIMGAGNPEGATGSNIARQIALRAGLPVTVSGVTVNRFCSSGLNTIALAANHVMAGQGDVFVAGGLESISLTQNEHANTFHLRGEWLLEHKPDIYMSMLQTAEVVAERYGISRERQDEYGYQSQMRTAAAQQAGKFDHEIVPMTATMKVQDKATGEISTQEVTRKLDEGNRPDTTLEGLAKLKPVFEGGVITAGNASQLSDGAAAVVVMNSDVARERGLQPLGVFKGFAVAGCEPDEMGIGPVLAVPKLLKRHGLSVDDIDLWELNEAFAVQTLYCRDKLGIDPEKFNVNGGAISIGHPYGMSGARLTGHILLEGQRRGAKHVVVTMCVGGGMGAAGLFEVL

SEQ ID NO: 9933 - protein, 60 aa, Glycine max
  misc_feature (42)..(42): Xaa can be any naturally occurring amino acid
  unsure (1)..(60): unsure at all Xaa locations
MRHPLTGGGMTGAWADIVVQIKMLSSLGDLNDAPTLWKYLEXLYTLSNPDSSTINTSTSA

SEQ ID NO: 9934 - protein, 483 aa, Photobacterium profundum SS9
MYIGIDLGTSGVKSIAMLSSGEIVASETVSLGISRPQPLWSEQNPIDWWEATCASIKGLKQQVDLTAVQAIGLSGQMHGATLLNKQGDVLRPAILWNDGRCDQECRELEAAVPNSRDITGNIMMPGFTAPKVKWVANHEPDIFEQIDKVLLPKDYLRFKMTGDFASDLSDSAGTLWLDVNRRDWDDSLLVATGLTRHHMPALFEGNEVTGTLTPDIADQWGMSCVPVIAGGGDNAAGAIGVGITQSGQAMLSLGTSGVYLAVSDGFIANPESALHSFCHALPNTWHTMSVILSAASCLKWVAGLTGFDDVGNMIKQVETQADKSSQVIFLPYLSGERTPHNNPNAKGVFFGMTHSTTKFELALAVLEGVGFAFADGFDALHVTKNVPDEVSLIGGGARSEYWRQMLADIVGLPLVYRKGGDVGPALGAARLAMLSQSKGAMISDVCPVPEVVQRHEPDKDNQARYQAKRDVFQALYQQLNGLF

SEQ ID NO: 9935 - protein, 375 aa, Agrobacterium tumefaciens str. C58
MTETAPAKPIPVTVLTGYLGAGKTTLLNRILSENHGKKYAVIVNEFGEIGIDNDLIVESDEEIYEMNNGCVCCTVRGDLIRVVEGLMRRPGRFDGIIVETTGLADPVPVAQTFFMDDDVRAKTELDAVVALVDAKHLPLRLKDSREAEDQIAFADVVVVNKTDLVTPEEVARIEDIVRAINPSARIYKTTRSGVDLARVLDQGAFNLERALENDPHFLEHGHEDHACGPDCDHHHHDHGHDHGHDHHHHDHDHGHHDHAHDHGHDHHHGAVSPIHDVTVQSVSLRGGEMNPERFFPWIQKVTQTDGPNILRLKGIIAFKGDAERYVVQGVHMIIEGDHQRPWKEDEKRESRLVFIGRELDREKLENSFKACLATA

SEQ ID NO: 9936 - protein, 399 aa, Bacillus anthracis str. 'Ames Ancestor'
MGKVKEISKRKLLGIAGLGWLFDAMDVGMLSFVMVALQKDWGLSTQEMGWIGSINSIGMAVGALVFGILSDKIGRKSVFIITLLLFSIGSGLTALTTTLAMFLVLRFLIGMGLGGELPVASTLVSESVEAHERGKIVVLLESFWAGGWLIAALISYFVIPKYGWEVAMILSAIPALYALYLRWNLPDSPRFQKVEKRPSVIENIKSVWSGEYRKATIMLWILWFSVVFSYYGMFLWLPSVMVLKGFSLIKSFQYVLIMTLAQLPGYFTAAWFIERLGRKFVLVTYLIGTACSAYLFGVAESLTVLIVAGMLLSFFNLGAWGALYAYTPEQYPTVIRGTGAGMAAAFGRIGGILGPLLVGYLVASQASLSLIFTIFCGSILIGVFAVIILGQETKQRELV

SEQ ID NO: 9937 - protein, 497 aa, Wolbachia endosymbiont of Drosophila melanogaster
MKSKAFILSIFAYFLIAFSSYANMFDWNAKKVVDASTTACNCNQGLADLVEELIPAVVNISSEQIIKQENNSRTRVPSMPGNNFFDDFREFFEHFDQFFMDRGPSVNKEVVLLGSGFIIDKGGTIVTNYHVIKNAKDITVTMNDNTYFKAEVLGYDARTDLAVLKINSDKDLSSVAFGDSDKARVGDTVMAIGNPFGLGGSVSTGIISARSRDISIGTMNEFIQTDAAINRGNSGGPLFDLNGKVIGINTAIYSPSESGGNVGIGFAIPSNLAMSIIDTLKSGKKIKHGWLGVQVQPITKEFAESLGLKDIKGALVASIVKDSPAEKGGIKVGDILLEFDGKKIDRMTQLPQMVSRAGPEKKVQVKLLRKSKEVNIKVVIGESTNDGQDNNQEENKSTSDYVTGLTVSNLPKESKESKNNVPTKGVIVTNVDSNSNATLRGIKKGDIIIQLDGTDIENTNDFQKQVDSAVKKNGKDSIMLLIYRNGNQFFTSIKLKK

SEQ ID NO: 9938 - protein, 120 aa, Glycine max; identical to SEQ ID NO: 1440

SEQ ID NO: 9939 - protein, 320 aa, Agrobacterium tumefaciens str. C58
MSDKKAVVLVPGKINPRVLERLECKVEIVAVPAGAEPVLPEGAAERINAIAVSGVVNAKWIDALPKLEIIANFGVGYDGVDAKHAATRGIVVTNTPDVLNDEVADTTIALLINTVRRLYQAETWLRDGKWVGEGPFALSPFSLRGRKVGLFGMGRIGQEIAKRLEPFKVEIGYHTRSKRDELSYTYYGSLKEMAEAVDILICIVPGTPETHKAINADILAALGAQGVFINVGRGSSVDEDALLQALQSGALGAAGLDVFYAEPKVPEAFLALPNVSLLPHVASASVPTRNAMADLVADNILGWFRDGKVLTPVPETPVKG

SEQ ID NO: 9940 - protein, 668 aa, Pasteurella multocida subsp. multocida str. Pm70
MATRRELANAIRFLSMDAVQKAKSGHPGAPMGMADIAEVLWRDFLKHNPSNPHWADRDRFILSNGHGSMLIYSLLHLSGYDLSIEDLKQFRQLHSKTPGHPEYGYAPGVETTTGPLGQGITNAVGFAIAEKTLAHQFNRPGHEIVDHHTYVFLGDGCLMEGISHEACSLAGTLGLGKLIAFYDDNNISIDGHVDGWFTDDTQKRFEAYGWHVIPAVDGHNPEQILEAVKQAQAETTKPTLIICKTIIGYGSPNKANSHDCHGAPLGDDEIAAAREFLKWEHAPFEIPAEIYAQWDAKEKGQVAEKAWEEKLAAYAKAYPELAAEFTRRVNAELPANWAAESQAFIEHLQANPANIASRKASQNAIEAYAKLLPEFLGGSADLASSNLTLWSGSKPIRAVENADGNYINYGVREFGMSAIMNGIALHGGFIPYGATFLMFMEYAHNAVRMAALMKQRSLFVYTHDSIGLGEDGPTHQPVEQTSALRLIPNLETWRPCDQVESAVAWKAAVERKEGPSALIFTRQNLAQMDRTAEQLANVARGGYVLRHCCENQNCPDLILIATGSEVELAMKAADVLDAEGVKVRVVSMPSTNVFDKQDAAYRESVLPSHITKRVAIEAGIADFWYKYVGFEGRVVGMNSFGESAPADQLFKLFGFTVENVVAKAKEIL

SEQ ID NO: 9941 - protein, 342 aa, Sporidiobolus salmonicolor
AKIDNAVLPEGSLVLVTGANGFVASHVVEQLLEHGYKVRGTARSASKLANLQKRWDAKYPGRFETAVVEDMLKQGAYDEVIKGAAGVAHIASVVSFSNKYDEVVTPAIGGTLNALRAAAATPSVKRFVLTSSTVSALIPKPNVEGIYLDEKSWNLESIDKAKTLPESDPQKSLWVYAASKTEAELAAWKFMDENKPHFTLNAVLPNYTIGTIFDPETQSGSTSGWMMSLFNGEVSPALALMPPQYYVSAVDIGLLHLGCLVLPQIERRRVYGTAGTFDWNTVLATFRKLYPSKTFPADFPDQGQDLSKFDTAPSLEILKSLGRPGWRSIEESIKDLVGSETA

SEQ ID NO: 9942 - protein, 357 aa, Oryza sativa (japonica cultivar-group)
MDFPGGSGRQQQLPPMTPLPLARQGSVYSLTFDEFQSTLGGVGKDFGSMNMDELLRSIWTAEESHAVGAATTTTATTASVAAAEHAAVGAPPVQRQGSLTLPRTLSQKTVDEVWRDMMCFGGGGASTAPAAAEPPPPAHRQQTLGEITLEEFLVRAGVVREDMSVPPVPPAPTPTAAAVPPPPPPQQQTPMLFGQSNVFPPMVPPLSLGNGLVSGAVGHGGGGAASLVSPVRPVSSNGFGKMEGGDLSSLSPSPVPYVFKGGLRGRKAPGIEKVVERRQRRMIKNRESAARSRQRKQAYMMELEAEVAKLKELNDELQKKQDEMLEQQKNEVLERMSRQVGPTAKRICLRRTLTGPW

SEQ ID NO: 9943 - protein, 750 aa, Arabidopsis thaliana
MAPCIDFVFMAFGLLLLLIAVTTSRPITRPKVFDVRSYGAKGDGKMDNTNAFTNAWKDACRWNGPSKMYIPLGTFYLGGVTFVGPCDGKISFVIDGTLLAPPNNDDIKKEIWINFRYINYLTVFGDGTLDGQGKKSWSLIDCQKDNNCPKLAINMGFDFVKNSSMNGITSLNSKAGHFNFLSVDHFSITRVNIIAPSNSPNTDGIKIALSSNMQISNTHISTGDDCIAMLSGNTNFDIYNVKCGPGHGISIGSLGKNKDEKNVNGLMVRNSVFTGTTNGIRIKTWESSASTIRIINLVYENLQMINVENPIGIDQKYCPYPPCSNMGDSHIQIRNVTLKNIWGTSKNKVAVKFQCSKTFPCKDVQLIDINLTHHGVDGPASALCENVDGSATGKMLPPRSLNPNPAQSRFSRPRSLRVLSLSADPSANRNPKSAVDAHAPPLVVVGSANADIYVEIERLPKEGETISAKTGQTLAGGKGANQAACGAKLMYPTYFVGRLGEDAHGKLIAEALGDDGCGVHLDYVRSVNNEPTGHAVVMLQSDGQNSIIIVGGANMKAWPEIMSDDDLEIVRNAGIVLLQREIPDSINIQVAKAVKKAGVPVILDVGGMDTPIPNELLDSIDILSPNETELSRLTGMPTETFEQISQAVAKCHKLGVKQVLVKLGSKGSALFIQGEKPIQQSIIPAAQVVDTTGAGDTFTAAFAVAMVEGKSHEECLRFAAAAASLCVQVKGAIPSMPDRKSVLKLLKFSI

SEQ ID NO: 9944 - protein, 316 aa, Pasteurella multocida subsp. multocida str. Pm70
MTQLDSLRSMTVVVADTGDIEAIKQYQPQDATTNPSLILSASALPQYAPLIDDAIAYAKTKSDCPRQQLVDAEDKLAVNIGLEILKIIPGRISTEVDARLSYDTQATIEKARKLIKLYNEAGIENHRILIKIASTWQGIRAAEVLEKEGINCNLTLLFSEAQARACAEAGVYLISPFVGRILDWHKANTGRQDYPAAEDPGVISVTQIYNYYKQHNYKTVVMGASFRNVDEIIELAGCDRLTISPTLLSHLQAREGELVRKLAFSGELKDRPQPLTESEFYWQHNSDPMAVAKLAEGICKFAEDQEKLEKMLLERL

SEQ ID NO: 9945 - protein, 290 aa, Synechococcus sp. CC9605
MRPPSTHRLSKFVPGRLTEMPNQQSSSIAQRFEQLKQDGRLALMPFLMAGDPDLAVTADVLLSLQMAGADMVELGMPYSDPLADGPVIQAAASRALAAGTTPTGVLDMLQSLKGQLQIPVILFTYSNPLLNVGMEAFCQSAAEAGAAGLVVPDLPLEEAERLSTIAERHGLDLVLLVAPTTPQDRMGRIAKCSRGFTYLVSVTGVTGERAQMESRVEGLVQQLKQTSPVPVAVGFGISGAEQVRQVRGWGSDGAIVGSALVKRMAAASPGEIAQEAGRFCAELRAAADQP

SEQ ID NO: 9946 - protein, 157 aa, Glycine max
YYLQPPKFEFYDPKTPFFTSPRFLPPTKVEKCKIVDAIISHGCFLRECSVQHSIVGVRSRLESGVELQDTMMMGADYYQTEYEIASLVAEGKVPIGVGANTKIRNCIIDKNAKIGRNVIIANPDGVQEADRAKEGFYIRSGITVTLKNATIKDGTVI

SEQ ID NO: 9947 - protein, 337 aa, Streptococcus thermophilus LMG 18311
MSILITGGAGYIGSHTTVELLNAGFDVVLVDDFSNSSPAVLERLEKITGKKFPFYQGSILDTEFLDKVFTKEDIELVIHFAAFKAVGESVQKPLKYYKNNISGTITLLEKMKEYDVKNIVFSSSATVYGTNNPSPMTEDMPTSAINPYGYTKLMMEQILTDVAASDPSWSVTNLRYFNPIGAHESGLIGELPNGIPNNLMPYITQVAIGKLPELNVFGDDYPTPDGTGVRDYIHVLDLASGHLAAVKYNLSHKGAEIFNLGTGHGYSVLDLVKTFEAENKVTIPYRIQGRRAGDIATCYASPEKAKEVLGWEAKKTLKDMVRDSWRWQTTNPNGYED

SEQ ID NO: 9948 - protein, 101 aa, Penicillium biourgeianum
EYKEAFSLFDKDGDGQITTKELGTVMRSLGQNPSESELQDMINEVDADNNGTIDFPEFLTMMARKMKDTDSEEEIREAFKVFDRDNNGFISAVELRHVMTS

SEQ ID NO: 9949 - protein, 509 aa, Vicia faba
MDGSAGPGGGNVNAFLRNYKMGKTLGIGSFGKVKIAEHVLTGHKVAIKILNRRKIKNMEMEEKVRREIKILRLFMHHHIIRLYEVVETPTDIYVVMEYVKSGELFDYIVEKGRLQEDEARSFFQQIISGVEYCHRNMVVHRDLKPENLLLDSKWSVKIADFGLSNIMRDGHFLKTSCGSPNYAAPEVISGKLYAGPEVDVWSCGVILYALLCGTLPFDDENIPNLFKKIKGGIYTLPSHLSPGARDLIPRLLVVDPMKRITIPEIRQHQWFQLRLPRYLAVPPPDTLQQAKKIDEEILQEVVNRGFDRDQLVESLSNRVQNEGTVTYYLLLDNRYRVSTGYLGAEFQETMDPGLNRINSGEVVSPAGGHHFLAYQGVGMRQQFPAERKWALGLQSRAQPREIMVEVLKALQGLNVCWKKIGHYNMKCRWVVGIPGHQGGMVNNSVLNNNFLGNVGIIENEAVPKSSVVKFELQLYKTQEKYLLDLQRVEGPQFLFLDLCAAFLAQLRVL

SEQ ID NO: 9950 - protein, 237 aa, Schmidtia pappophoroides
RDRHGMDVSEWDPSKDKYIALKYDAETAVEAKALNKEALQAAVGLPVDREIPLIAFVGRLEEQKGPDVMAAAIPEILKEEDVQTVLLGTGKKKFERLFKSIEEEYPDKVCAVVKFNAPLAHHIMAGADLLAVTSRFEPCGLIQLQGMRYGTPCACASTGGLVDTVVEGKTGFQMGRLSVDCNVVEPADVKKVATTLKRAVKVVGTPAYKEMVRNCMAQDLSWKGPAKNWENVLLSMG

SEQ ID NO: 9951 - protein, 433 aa, Nitrosomonas europaea ATCC 19718
MKVQPAVQTNDNPRFVSTLTRNTLALILAGGRGTRLKNLTDWRAKPAVPFGGKFRIIDFTLSNCVNSGVRRIGVVTQYKAQSLIRHIQRGWSFLDGRFQEFIELLPAQQRTEEGTWYQGTADAVFQNLDILRTHNPGYVLILGGDHIYKMDYGRILAEHVERQADLTIACLEVPVEDASAFGVMAVDDSWRTTSFAEKPEHPAPIPGKPGHALISMGIYVFNAKFLYEQLIQDHDMDQSSHDFGKDVIPRLVASNARVYAHRFQNSCVNMASGVPYWRDVGTVDAYWKANIDLTTITPDLNLYDEDWPIWTHQEQLPPAKFVFDDDDRRGQALDSMVSGGCIISGATVRRSLLFSNVQIRGYSTIEDSVILPNVSIDRHAYLKRVVVEKECQIPEGLKVGFNPDEDRKHFYVTDDGITLITPEMLGQGIHYIR

SEQ ID NO: 9952 - protein, 509 aa, Pisum sativum
MDGSAGPGGGNVNAFLRNYKMGKTLGIGSFGKVKIAEHVLTGHKVAIKILNRRKIKNMEMEEKVRREIQILRLFMHHHIIRLYEVVETPTDIYVVMEYVKSGELFDYIVEKGRLQEDEARSFFQQIISGVEYCHRNMVVHRDLKPENVLLDSKWSVKIADFGLSNIMRDGHFLKTSCGSPNYAAPEVISGKLYAGPEVDVWSCGVILYALLCGTLPFDDENIPNLFKKIKGGIYTLPSHLSPGARDLIPRLLVVDPMKRITIPEIRQHQWFQLRLPRYLAVPPPDTLQQAKKIDEEILQEVVNRGFDRDQLVESLSNRVQNEGTVTYYLLLDNRYRVSTGYLGAEFQETMDPGLNRINSGEVVSPAGGHHFLGYQGVGMRQQFPAERKWALGLQSRAQPREIMVEVLKALQGLNVCWKKIGHYNMKCRWVVGIPGHQGGMVNNSVLNNNFLGNVGIIESEAVPKSSVVKFELQLYKTQEKYLLDLQRVEGPQFLFLDLCAAFLAQLRVL

SEQ ID NO: 9953 - protein, 609 aa, Emericella nidulans
MYLSTVLFPLLALNLGLSHARFVRETLELTWEYGSPNGGTPREMVFTNGEYPGPDLIFDEDDDVEVLVINNLPFNTTVHWHGLEMRETPEADGVPGLTQTPIEPGATFTYRFRAYPAGTFWYHSHYKGLMQDGQVGAMYIRRKPDALRPYAVITEDPRELAEIQYAEDNPYLMLATDWTYLTSAEYHNIEVESGYNVFCVDSLLINGRGSVYCPGYQYLEEVSDTALLSVLEGTHLTEKGCLQPDLHNVQGDYGPWNLSAVPTEVVFNCTPSSVEPPVIYVDPEFNGWVSLNFIGGAAQKAITFSVDNHPMWVYEVDGQFVEPREVEMVGVYSGARYAVMIKLDQTPGDYAIRIAVNGADQVMSVYAILSYVNQDWIHRENVPKAAIGPHTDTVGYMNYGGGNTSADVRQLLFTENLPAFAVPPPPPSSEVSTTLRTGMIRVNNSYSWSLGNNVLYEPEMTSSTPLLFEPDPLAVIAPKYALTTENNTWVDIVLEITADPRDLIHPPHPIHKHGNRAYIIGNGVGKFRWENVSAAEAEVPDLFYVNETAALRDTFVTDFFDSRLMDGAWIVIRYFVQDKFPSILHCHIASHQMGGMALALLDGVDVWDS

SEQ ID NO: 9954 - protein, 237 aa, Fingerhuthia sesleriiformis
RDRHGMDVSEWDPSKDKYVAVKYDAETAVEAKALNKEALQAAVGLPVDRTIPLVAFVGRLEEQKGPDVMAAAIPEILEEEDVQIVLLGTGKKKFERLFKSAEEKYPDKVCAVVKFNAPLAHHIMAGADLLAVTSRFEPCGLIQLQGMRYGTPCACASTGGLVDTVVEGKTGFQMGRLSVDCNVVEPADVKKVATTLKRAIKVVGTPEYKEMVRNCMALDLSWKGPAKNWENVLLSMG

SEQ ID NO: 9955 - protein, 393 aa, Yarrowia lipolytica CLIB122
MLLSTLLLSTLAATVFAAPTAAKVVALPVTRHHNTTRHPALSKRSSTYQIPITNKEYYYSVALSLGTPAQDFNVILDTGSSDLWVFASNATQSCENHACDFTGQFNALDSSSYHFIGNNYSIEYVSGDNATGNWGTDTLSIGSVKLENLQFAAVTHTSAQSGILGISLQGSESVVFVKNEYPNFPVQLVNQGWIDRTVYSLYLNSINATEGTLLLGGIDTAKYSGHLEVLDLADHDDFSVPYSDVSWNGNSYGRASAAVFDSGTSYIYMPNDVFYGLSSDINLNETTNADTNLQYIACDADINVVVTFGNTDITLGADQLVLHLSELLDDKTQTECVFGIQSTDYSSDNILFGDVFLRSVYAVYDLDNYQIGVAQAVYTDETNIVAVGANDNI

SEQ ID NO: 9956 - protein, 279 aa, Pisum sativum
MGNANGREDGAISDGVDLGGREPHAPDSRPPVRAFSSDSMANSPPQSPRRSRSPILFGPQVPLAPLQRGNGPPFLNQMWQNEPHGIVHQPPEQGIPVMITWNYGGNSVAVEGSWDNWTSRKAMQRGGKDHSILIVLPSGIYHYRFIVDGEQRYIPDLPYVADEMGNVCNLLDANDYVPENPESVSEFEAPLSPESSYGQAYPAEEDFAKEPLAVPSQLHLTVLGMENADSGPSSKPQHVVLNHVFIEKNMASKSVVALGLTHRFQSKYVTVVLYKPLKR

SEQ ID NO: 9957 - protein, 238 aa, Tetrachne dregei
RDRHGMDVSEWDPSKDKYIAVKYDAETAVEAKALNKEELQAAVGLPVDRKIPLVAFVGRLEEQKGPDVMAAAIPEILEEEEDVQIVLLGTGKKKFERLFKSVEEKYPDKVCAVVKFNAPLAHHIMAGADLLAVTSRFEPCGLIQLQGTRYGTPCACASTGGLVDTVVEGKTGFQMGRLSVDCNVVEPADVKKVATTLKRAIKVVGTPAYKEMVRNCMALDLSWKGPAKNWENVLLSMG

SEQ ID NO: 9958 - protein, 136 aa, Pisum sativum
VDGRWRHAPDLPWEQDDAANTYNILDLQDYVPEDIGSISSFEPPKSPDSSYNNLHLSSEDYAKEPPLVPPFMQMTLLNVPSTNMEFEPLVSRPQHVMLNHLYMQKGKNSPSVVALGTTHRFVAKYVTVVLYKSLQR

SEQ ID NO: 9959 - protein, 500 aa, Mirabilis jalapa
MTAIKMNTNGEGETQHILMIPFMAQGHLRPFLELAMFLYKRSHVIITLLTTPLNAGFLRHLLHHHSYSSSGIRIVELPFNSTNHGLPPGIENTDKLTLPLVVSLFHSTISLDPHLRDYISRHFSPARPPLCVIHDVFLGWVDQVAKDVGSTGVVFTTGGAYGTSAYVSIWNDLPHQNYSDDQEFPLPGFPENHKFRRSQLHRFLRYADGSDDWSKYFQPQLRQSMKSFGWLCNSVEEIETLGFSILRNYTKLPIWGIGPLIASPVQHSSSDNNSTGAEFVQWLSLKEPDSVLYISFGSQNTISPTQMMELAAGLESSEKPFLWVIRAPFGFDINEEMRPEWLPEGFEERMKVKKQGKLVYKLGPQLEILNHESIGGFLTHCGWNSILESLREGVPMLGWPLAAEQAYNLKYLEDEMGVAVELARGLEGEISKEKVKRIVEMILERNEGSKGWEMKNRAVEMGKKLKDAVNEEKELKGSSVKAIDDFLDAVMQAKLEPSLQ

SEQ ID NO: 9960 - protein, 222 aa, Pogonarthria squarrosa
RDRHGMDVSEWDPSKDKYIAMKYDAETAMEAKALNKEALQAAVGLPVDRKIPLVAFVGRLEEQKGPDVMAAAIPEILEQDVQIVLLGTGKKKFERLFRSAEEKYPDKVCAVVKFNAPLAHHIMAGADLLAVTSRFEPCGLIQLQGMRYGTPCACASTGGLVDTVVEGKTGFQMGRLSVDCKVVEPADVKKVATTIKRAIKIVGTPAYKQMVMNCMAQDLSWK

SEQ ID NO: 9961 - protein, 236 aa, Eragrostis airoides
  misc_feature (234)..(234): Xaa can be any naturally occurring amino acid
  unsure (1)..(236): unsure at all Xaa locations
GIVNGMDVSEWDPSKDKYIAMKYDAETAMEAKALNKEALQAAVGLPVDRKIPLVAFVGRLEEQKGPDVMAAAIPEILEQNVQIVLLGTGKKKFERLFKSAEEKYPDKVCAVVKFNAPLAHHIMAGADLLAVTSRFEPCGLIQLQGMRYGTPCACASTGGLVDTVVEGKTGFQMGRLSVDCKVVEPADVKKVATTIKRALKFVGTPAYQEMVRNCMAQDLSWKGPAKNWENVLLXMG

SEQ ID NO: 9962 - protein, 585 aa, Nostoc sp. PCC 7120
MTITANSQLPNRFPQNLESMNHKADGLLANLGAELVYVQDGVGRYLSFYWQKSELLGFNPEQIVCDGNGQEIFVPLDKVSYMKRLHCIMANLAPEKFPCWFSCHQNLFELELAITPIIPPLGTGATTVLVMGRLLQVKVNNQEVNVAITTPTQTDLASRSQQHQRLVNKITRNIRRTLDLDLIWQQTVDSLGKALRLERCIICPYQPSSSKVRVIAEYHQPDRPSMLGLEIDVTSEPAFAQALTTLEPIIMEVPGYELCPQQKILVVATCYQDQANGLIAINLRHECYPLTNAELELAKEVADQLGTAIAHATLYKELEAARQKAEEASRLKSEFLANVSHEIRTPLNGMIGFLKLILEGMADDVEEKNQFLSEAHQLSLHLLNIINDILDIAKIEAGKMELVCAPIKLEELFSDVDNFMRPQAEVKNLSFRMQLPPTSDEIVVQGNYQRLLQVMLNIVGNAIKFTHEGGITVTADVVLKKGKLQEQNFPGMVRVRIADTGIGVSLDQQDKLFQLFSQVDGSRTRQYGGTGLGLAISQKLVETMGGEVHFYSLGEGLGSTVTFTVPLYQQPVMLSSNDTDAECIG

SEQ ID NO: 9963 - protein, 407 aa, Haemophilus influenzae Rd KW20
MTNKVNSYGWKALIGSAVGYGMDGFDLLILGFMLSAISADLNLTPAQGGSLVTWTLIGAVFGGILFGALSDKYGRVRVLTWTILLFAVFTGLCAIAQGYWDLLIYRTIAGIGLGGEFGIGMALAAEAWPARHRAKAASYVALGWQVGVLGAALLTPLLLPHIGWRGMFLVGIFPAFVAWFLRSHLHEPEIFTQKQTALSTQSSFTDKLRSFQLLIKDKATSKISLGIVVLTSVQNFGYYGIMIWLPNFLSKQLGFSLTKSGLWTAVTVCGMMAGIWIFGQLADRIGRKPSFLLFQLGAVISIVVYSQLTDPDIMLLAGAFLGMFVNGMLGGYGALMAEAYPTEARATAQNVLFNIGRAVGGFGPVVVGSVVLAYSFQTAIALLAIIYVIDMLATIFLIPELKGKALD

SEQ ID NO: 9964 - protein, 702 aa, Hordeum vulgare subsp. vulgare
MEREDRYVRFQDCKSEQSVISENAVSPRRHCVFRSLKERTGGLFAFLGNFLRSETLKRSMLEDRKSMQNVFHPQGPFLQRWNKIFVLSCIFAVSVDPLFLYIPVINDKNLCWYLDRKMKITASVLRSFTDIFYILHIIFQFRTGFITSSSTNFGRGVLVEDRYAIAKRYLSTYFLIDVCAVLPLPQVVIWIVLPTLQVSQFMKAKNILMLIVICQYVPRVIRIRPLYLQITRSAGIITETAWAGAAFNLIIYMLASHVLGAVWYLLSIQRKDACWKQNCSLTRDCNPAYLYCGNGGTNAGNAFLQNVCVPNITKDNLPDPLFGIFVPAINNVSQSTDFFAKLFYCVWWGLQNLSSLGQNLKTSTYAWENLFAVFVSISGLVLFSLLIGNMQTYLQSATLRIEETRVKSRDTDQWMSYRLLPDNLKERIRRYEQYRWQETSGVDEEHLLMNLPKDLRRAIKRHLCLSLLKRVPMFEKMDDQLLNALCDCLKPVLYTEGGCIVREGDPVNEMFFITRGNLMSMTTNGGKTGFFNSDVLKSGDFCGEELLTWALDPNSATSLPSSTRTVKSMSEVEAFALMAEDLKFVAMQFRRLHSKQLRHTFRFYSQQWRTWAACFIQAAWHRRCRKKMEDALREKEERLQLAIVNDGSTSLSFGAAIYASRFARNMMRTLRRNATRKARLQERVPARLLQKPAEPNFSAEEQ

SEQ ID NO: 9965 - protein, 490 aa, Sinorhizobium meliloti
MANSAEETVSPTRPEDEKLGIGANLAYGLQHVLTMYGGIVAVPLILGQAAGLGSGDIGLLITASLFAGGLATILQTMGLPFFGSQLPLVQGVSFSGVATMIAISGNGGLQSVLGAVIAASLIGLLITPIFSRITRFFPPLVTGIVITTIGLTLMPVAARWAMGGNSSAPDFGSPANIQLAAVTLVIVLLLSKLGSAAISRLSILLALIIGTVIAYFAGMADFSQVTEGPFFALPLVFHFGYPTFEVAAIASMFIVIMVTLVETSADILAVGEIIETKVDSRRLGDGLRADMLSSLLAPIFGSFTQSAFAQNVGLVAVTGVKSRYVVATGGLFLVTLGLLPVMGRIVAAVPSSVLGGAGIVLFGTVAASGIRTLSKVDYANNMNLVIVATSIGFGMIPIASPTFYEHFPAWVETIFHSGISSAALMAISLNLIFNHMTAGNSDQQSVFVAGTERTLRYQDIARLHDGDYFLNGKLYDANGTEVPVLAAEAH

SEQ ID NO: 9966 - protein, 478 aa, Vitreoscilla sp. C1
MYKKSTIRIFATTSHKMNIDKEINMTNTTLNATANHLHPFSDNQQLKEKGVRVITKADGIYIYDDAGNKIIDGMAGLWCVNIGYGRKELADIARDQMNELAYYNTFFKTSHPAVINLSAKLASIAPAGFNHVFYTGSGSESVDSMIRMVRHYWDSVGKPSKKTLIGRWNGYHGSTIGGVSMGGMKGMHKQGGFPIEGIVHIEQPWFYGLHEEGETAEQFGIRAANWLEEKILEIGADNVAAFVGEPIQGAGGVIIPPSTYWPRIQEICQKYDILLVADEVICGFGRTGEWFGHETFGFQPDIFTTAKGLSSGYLPIGAVFVGDKVVEGILKGGDFNHGFTYAGHPVAAAVALKNVEILDDEGIIKNVHDKTGPYMQAKWREMLSQFKYVDDVRGVGLIQGFTLVKNKATREMFPNEGETGTMLRDIFFSNNLIMRACGDHIVASPPLTITKEEIDLMLATAEKCLQEFETAMDSKLGA

SEQ ID NO: 9967 - protein, 633 aa, Arabidopsis thaliana
MAAPIRFFELNTGAKLPCVGLGTYAMVATAIEQAIKIGYRHIDCASIYGNEKEIGGVLKKLIGDGFVKREELFITSKLWSNDHLPEDVPKALEKTLQDLQIDYVDLYLIHWPASLKKESLMPTPEMLTKPDITSTWKAMEALYDSGKARAIGVSNFSSKKLTDLLNVARVTPAVNQVECHPVWQQQGLHELCKSKGVHLSGYSPLGSQSKGEVRLKVLQNPIVTEVAEKLGKTTAQVALRWGLQTGHSVLPKSSSGARLKENLDVFDWSIPEDLFTKRSFAELLSLRMRHTASIRPLRNCGTLVPSAVCVEQPPPHLIMANAITFFKLNTGAKFPSVGLGTWQASPGLVGDAVAAAVKIGYRHIDCAQIYGNEKEIGAVLKKLFEDRVVKREDLFITSKLWCTDHDPQDVPEALNRTLKDLQLEYVDLYLIHWPARIKKGSVGIKPENLLPVDIPSTWKAMEALYDSGKARAIGVSNFSTKKLADLLELARVPPAVNQVECHPSWRQTKLQEFCKSKGVHLSAYSPLGSPGTTWLKSDVLKNPILNMVAEKLGKSPAQVALRWGLQMGHSVLPKSTNEGRIKENFNVFDWSIPDYMFAKFAEIEQARLVTGSFLVHETLSPYKSIEELWDGEI

SEQ ID NO: 9968 - protein, 494 aa, Sinorhizobium meliloti
MNDASSIHPVDERLPIGRLATLGIQHVLVMYGGAVAVPLIVGRALQLSPEDVAFLISADLFVCGIVTIIQSLGLTRGIGIRLPVMMGVTFAAVGPMVSMAAMTPGIDGARTIFGAIIGAGLVALLIAPIMGRLLKFFPPVVTGTIILVIGVTLMRVGVNWIFGNPFGPTAPKLVDPAHAQWLAGLKQLAATGGPAVPDGLVLGATVPNPIYAEPGHVALAAFVLVSILVVARFGKGLISNIAVLIGIVIGCVAAALLGMMHFDRVASAGWFAVVTPLRFGMPIFDPVLIATMSLVMIVVMIESTGMFLALGEMTNREVKQQQLTAGLRVDGLGTIIGGLFNTFPYTSFSQNVGLVGVTGVKSRYVCVMGGVIMILLGVIPKMGALVEAVPTFVLGGAGLVMFGMVAATGVRILSTVDFKSSRNNLFVVAVSVGFGLIPMIAPNFLMWMPHAIHPIIESGIVLAAVSAVVLNAFFNGLSIERSACVEAARLADGH

SEQ ID NO: 9969 - protein, 185 aa, Brassica napus
  misc_feature (142)..(142): Xaa can be any naturally occurring amino acid
  unsure (1)..(185): unsure at all Xaa locations
MKKGGFSNNLKLSIPPAGEQSITKFLTQSGTFKDGDLRVNKDGVRIVSQSEPEALSPIKPADDELSLSDLDMVKVIGKGSSGVVQLVQHKWTGQFFALKVIQLNVDEAIRKSIAQELKINQSSQCPYLVTSFQSSFASRAIXAPVSYLSAIFKQVLQGLIYLHHDKHIIHRDLKPSNLLVNHRGE

SEQ ID NO: 9970 - protein, 426 aa, Arabidopsis thaliana
MADLSLPPDSLFLGFDSSTQSMKATVLDSNLNIIKTELVHFDSDLPQYKTKDGVYRDTTVNGRIVSPTLMWVEAFDLILQKLSNANFDFAKVIAVSGSGQQHGSVYWSKGSSEVLRSLDSKRSLKEQLENAFSVKESPIWMDSSTTLQCKEIENAVGGAMELSKITGSRAYERFTGPQIRKLFMTQGEVYKSTERISLVSSFMASLLVGDYACIDETDAAGMNLMDIEKRCWSKAALEATATGLEEKLGKLAPAYATAGSISQYFVQRFGFEKNCVVVQWSGDNPNSLAGLTLSTPGDLAISLGTSDTVFGITKELQPSLEGHVLPNPVDPESYMVMLVYKNASLTREEIRDRCAEGSWDVFNKYLQQTQPLNNGKLGFYYTENEILPPLPVGSHRYILENFSGESLEGVKEQEVGEFDPPSEGID

SEQ ID NO: 9971 - protein, 441 aa, Pseudomonas fluorescens Pf-5
MGRRDSYNQPLSSLPRPHQTMTESVLDYMTRLGRAARQASRVIARATTAQKNRALLAAADALDAARPELTAANEQDLANGRANGLEPALLDRLALTPARIDEMIEGLRQVAKLPDPIGEIRDMRYLPSGIQVGKMRVPLGVIGIIYESRPNVTIDAASLCLKSGNATILRGGSEAIHSNRAIATCIQQGLAAADLPPHVVQVVETTDRAAVGALITMPEFVDVIVPRGGKSLIERVSRDAKVPVIKHLDGVCHVYIDVAADLDKAIRIADNAKTQRYAPCNTMETLLVHSAIAERVLPPLAAIYRDKGVELRGCAQTRALLGAGVLEATEEDWRTEYTAPILSIRVLDNLEQAIEHINTYGSHHTDSIVTENFSDARRFLNEVDSSSVMVNASTRFADGFEYGLGAEIGISTDKLHARGPVGLEGLTSEKYVVFGDGHVRT

SEQ ID NO: 9972 - protein, 735 aa, Schizosaccharomyces pombe
MPSKFSSKYVDTEAISNDDDNPFATAKSYYSKDTDLSTRVSAGRPRTLSTSMEASAAPTIPELKNLRRRGSLDEHKQPRKFLVDVDKTLNALLESEDTDRNMQITIEDTGPKVVSLGSASSGGYRLYELRGTYQLSNLLQELTLAKDYGRRYILLDERRLNENPVNRLSRLIKGTFWDALTRRIDASVLDVICRDTKDRSGSHVNRIYVPKAEQEMYEYYVRAAKERPYLNLQVEYLPEEITPEWVRDVNDKPGLLALAMEKYQDDEGNTHLRGVPFVVPGGRFNELYGWDSYFESLGLLVDDRVDLAKGMVENFIFEITYYGKILNANRTYYLLRSQPPFLTDMALRVYERIKNEEGSLDFLHRAFSATIKEYHTVWTATPRLDPKTGLSRYRPGGLGIPPETEASHFEHLLRPYMEKYHMTLEEFTHAYNYQQIHEPALDEYFVHDRAVRESGHDTTYRLEKVCADLATVDLNSLLYKYETDISHVILEYFDDKFVLPNGTIETSAIWDRRARARRAAMEKYLWSEADSMWYDYNTKLETKSTYESATAFWALWAGVATPRQAAKFVDVSLPKFEVAGGIVAGTKRSLGKVGLDNPSRQWDYPNGWSPQQILAWYGLIRYGYEEETRRLVYRWLYTITKSFVDFNGIVVEKYDLTRPVDPHRVEAEYGNQGVNIKGVAREGFGWVNASYEVGLTFCNSHMRRALGACTTPDVFFAGIKEESLPAFENLSIHKN

SEQ ID NO: 9973 - protein, 602 aa, Thiobacillus denitrificans ATCC 25259
MTAFHPDQLGTLCGLFRARVAATPARVAYRQFDEARDSWVSFTWSEVAAEAARWQAALAREGLAPGDRVAVMLKNCVEWVIFDQAALALGLVTVPLYLDDRAESAAYILDNADAKLLLVEGRFQLKKLAEIAASSPGLQRIVCLVAPESRLADWSPRFVVAAEWLENAVATAVPERSLAPDLLASIVYTSGTTGRPKGVMLTHDNLLWNAYYASHCADFGPHEVFLSFLPLSHTLERTGGYYLAMLLGAEVAYARSIAQLAQDLQAIRPTVLISVPRIYERVYGRIQDGLEKKGAPARALFRLAVHVGWRRFERSQGRAYWHPELLLWPLLERLVARNVTQKLGGRLRLAISGGAALSPEVARVFIGLGVPVYQGYGLTETSPVVCVNRPDSNSPATIGQPLPGVEVRIGDNDELLTRSRCVMRGYWKDEAATRAMIDADGWLHSGDQARVDADGHYTIIGRIKDIIVLNNGEKVPPTDMESAILLDPLFEQVMVVGEGRPYLAALTVLNEAHWEAFAASLHLDPAQPATLRDPKVTRALTHRVAHHLRHFPGYAQIRRLHPDLRPWTVEDGLLTPTLKVRRAQVLDRYRAAVEAMYANFAR

SEQ ID NO: 9974 - protein, 137 aa, Triticum aestivum
QVEQFSKGVLSASPRSLLCTNLSPSFNWDAAGLNDNDMGSYIANLGKLGFVWQFITLGGLHANALASATFAKSFKESGMYGYVSQVQRKEREHGVDVLQHQKWSGANYVDELMKMVTGGVSSTAAMGKGVTEDQFKH

SEQ ID NO: 9975 - protein, 259 aa, Sulfolobus solfataricus P2
MVVSYHMRFKDKVILITGGTRGIGRAITEAFLREGGLPIVLYNSAEDEAKKLREKGVFTIKCDVGNREDVKKSKEIVEKEFRRVNVVVNNAGIMLTMPFEEFDEEKYNKMIRINLNGTIYTTYEFLPLLKASENGAIVNIASNAGIGTAAEGTTFYAITKASIIILTKRLAFELGKYGIRVNAVAPGWVETDMTLSGKSKEEVERLRDLFRNKTVLKTTGKPEDIANIVLFLASNEARYITGQVIVADGGRIDNLTHSL

SEQ ID NO: 9976 - protein, 471 aa, Tropheryma whipplei TW08/27
MRRAKIVVTLGPAVSDLDSVRDLISAGADVFRMNLSHGSLDFHREVFLNVRTAAAELDRHIAIFADLQGPKIRLGRFASGPYTLQEGDIFTITTEQVLGTKELSSTTLPTLPDNVSEGDLLLIDDGKVALRAIGNDGVRITTRVEVPGKVSNNKGINLPGVGVKVPALSEKDIDSLRWALSLPVDMIALSFVRCASDVDAVHKVMDEEGIRLPVIAKIEKPQAVSAIEEIALRFDAIMVARGDLGVELPLEDVPVAQKEIVKVARRFARPVIIATQMLESMISSSRPTRAEASDVANAVLDGADALMLSGETSVGEWPVEAVRVMSRVIEKTEEKAISQIVGFGTTPKTQGGALAWAAAKVAEFIDARYLCVFSESGDSIRRVSRLRHDIPIIGFSPVESVVRQVSLSWGVRCFLIERLHQTDQMMRKAEHVLLTNNLAEIGEKIVIISGSPVGVPGSTNHMRIHELGSTS

SEQ ID NO: 9977 - protein, 305 aa, Triticum aestivum
  misc_feature (10)..(11): Xaa can be any naturally occurring amino acid
  misc_feature (23)..(23): Xaa can be any naturally occurring amino acid
  misc_feature (79)..(79): Xaa can be any naturally occurring amino acid
  misc_feature (99)..(99): Xaa can be any naturally occurring amino acid
  misc_feature (155)..(155): Xaa can be any naturally occurring amino acid
  misc_feature (164)..(164): Xaa can be any naturally occurring amino acid
  misc_feature (176)..(176): Xaa can be any naturally occurring amino acid
  misc_feature (188)..(188): Xaa can be any naturally occurring amino acid
  misc_feature (196)..(197): Xaa can be any naturally occurring amino acid
  misc_feature (201)..(201): Xaa can be any naturally occurring amino acid
  misc_feature (212)..(212): Xaa can be any naturally occurring amino acid
  misc_feature (215)..(216): Xaa can be any naturally occurring amino acid
  misc_feature (221)..(221): Xaa can be any naturally occurring amino acid
  misc_feature (226)..(226): Xaa can be any naturally occurring amino acid
  misc_feature (229)..(229): Xaa can be any naturally occurring amino acid
  misc_feature (234)..(234): Xaa can be any naturally occurring amino acid
  misc_feature (237)..(237): Xaa can be any naturally occurring amino acid
  misc_feature (241)..(241): Xaa can be any naturally occurring amino acid
  misc_feature (245)..(245): Xaa can be any naturally occurring amino acid
  misc_feature (254)..(255): Xaa can be any naturally occurring amino acid
  misc_feature (260)..(260): Xaa can be any naturally occurring amino acid
  misc_feature (262)..(262): Xaa can be any naturally occurring amino acid
  misc_feature (265)..(265): Xaa can be any naturally occurring amino acid
  misc_feature (267)..(267): Xaa can be any naturally occurring amino acid
  misc_feature (269)..(270): Xaa can be any naturally occurring amino acid
  misc_feature (273)..(274): Xaa can be any naturally occurring amino acid
  misc_feature (282)..(282): Xaa can be any naturally occurring amino acid
  misc_feature (284)..(284): Xaa can be any naturally occurring amino acid
  misc_feature (287)..(290): Xaa can be any naturally occurring amino acid
  misc_feature (292)..(294): Xaa can be any naturally occurring amino acid
  misc_feature (297)..(297): Xaa can be any naturally occurring amino acid
  misc_feature (299)..(299): Xaa can be any naturally occurring amino acid
  misc_feature (301)..(301): Xaa can be any naturally occurring amino acid
  misc_feature (304)..(304): Xaa can be any naturally occurring amino acid
  unsure (1)..(305): unsure at all Xaa locations
DEERLIFAGXXLEDGRTLADYNXQKESTLHLVLRLRGGMQIFVKTLTGKTITLEVESSDTIDNVKAKIQDKEGIPPDQXRLIFAGKQLEDGRTLADYNXQKESTLHLVLRLRGGMQIFVKTLTGKTITLEVESSDTIDNVKAKIQDKEGIPPDQXRLIFAGKQXLEDGRTLADYNXQKESTLHLVLRXRGGMQIFXXTLTXKTITLEVESSXTHXXNVKAXIQDKXGIXPDQQXLIXAGKXLEDXRTLADYIIXXESTLXLXLRXRXGXXIFXXTLTGKNIXLXVEXXXXFXXXRAXIXDXEGXP

SEQ ID NO: 9978 - protein, 344 aa, Acinetobacter sp. ADP1
MIMKRVLPTSTAGSLPKPSWIAEPEKLWSPWKLEGADLAQGKRDALLVSLQEQLHAGIDIVSDGEQTRQHFVTTFIEHLDGVDFAKRETVRIRNRYDASVPTVVGAVSRQKPVFVEDAKFLRQQTTQPIKWALPGPMTMIDTLYDAHYKSREKLAWEFAKILNQEALELEAAGVDIIQFDEPAFNVFFDEVNDWGVATLERALEGLKCETAVHICYGYGIKANTDWKKTLGSEWRQYEEAFPKLQQSKIDIISLECHNSRVPMDLIELIRGKKVMVGAIDVATNTIETPEEVADTLRKALQFVDADKLYPSTNCGMTPLSRDVARGKLQALSAGAEIIRRELSA

SEQ ID NO: 9979 - protein, 144 aa, GIBBERELLA ZEAE PH-1
MARTKQTARKSTGGKAPRKQLASKAASSLTSSSARKSAPSTGGVKKPHRYKPGTVALREIRRYQKSTELLIRKLPFQRLVREIAQDFKSDLRFQSSAIGALQESVESYLVSLFEDTNLCAIHAKRVTIQSKDIQLARRLRGERN

SEQ ID NO: 9980 - protein, 519 aa, Rhodospirillum rubrum
MIGHLRNLTRLITIARVLARHDALFPLERLGVAKPAVWIAKAASRRNVPGRPGEKLAAAFGELGPSFIKLGQALSTRADLMGEEVAADLSNLQDSLPPFPFEDVRRTVETELDRPLESAFSVFDPVPVAAASIAQVHFAITAPDAEGHTREVAVKVLRPGVEEAFRRDIDLLFWLSRLVEFAQPQWRRLRPVENARAFEESVVIEMDLRFEAAAACELAENFADDPTFRVPAIDWQRTGRRIMTQERVRGLRIDEPDKLIAAGLDPRVLVGNAANAFFSMVFRDGFFHADLHPGNMFVDAEGVLVAVDFGIMGRIDRQTRRYLGEMLLGFLTGNYRRAAEVHFEAGWVPADKSVEGFTQACRSIAEPIMGRPLNEISVARLLGQLFQVTETFDMQAQPQLLLLQKSMLVTEGVGRTLAPDVNMWELSRPLIESWMADNLGPQARLADGMKTLSDSVGRLPRLLESAENLLGGMDKGGFRLHPETVKALRGNRGPLSGVITVAPWLIAIVLGVLLFLKES

SEQ ID NO: 9981 - protein, 698 aa, GIBBERELLA ZEAE PH-1
MTTVTLARPIPPHRPSSTITPPLSLESSTTSSSSPCSGPIPNKHLPICPTGPACPDELDTPPPSPPAQDQLQQTSALYPLDSFKRVDSGELSIYELDAFNVAEAVDVASRQPLPDPALVFPWFHGLHPQNHVQQSFFAARRRATRPTPSCIRALTLVKADGDLNYARLKGAIAPNEIIQPNSPARFIEADPREGFSVRNFQIQTVKTAVLSDIIVYGQDLNKTRKVAWDIANAQKLWREKHQDQGEWMPEYHTFVCTNPFSKFEENHSEIVAVDESGHLTGNVLDFFSQERREMWAMTEASEFSKNVFMGPTPEQGSPEEQKYDILIECSDLGRLNPLALQLIAESPDQDGKQRFLDFPSSGSILPPTWSHSEADGVLETCKWIYHLAHGSYPEPDPGLSIGDVDAEGDSPMPSDHGSAFEVRPHKILLHCADGYTESTMLSIAYFSYSTGRPVPEAWLQLHTEKKRNFFAYPTDVALLTSITPRLLRESPVCKGLSLTDITHLTRDEPSWFAALDGSFPSRVLDYMYLGNLGHANNPDLLRALGITQILSVGEIAMWREGDLEAWGKENVCVVQGVQDNGIDPLTEEFARCLDFIDRGRRNGTATLVHCRVGVSRSATICIAEVMRSKGMSFPHAYCYVRARRLNVIIQPHLRFAYELLKYEEALQQDGDPDAEVKRTLEWAEIAREIALMNRPYSR

SEQ ID NO: 9982 - protein, 482 aa, Escherichia coli
MSAIDSQLPSSSGQDRPTDEVDRILSPGKLIILGLQHVLVMYAGAVAVPLMIGDRLGLSKEAIAMLISSDLFCCGIVTLLQCIGIGRFMGIRLPVIMSVTFAAVTPMIAIGMNPDIGLLGIFGATIAAGFITTLLAPLIGRLMPLFPPLVTGVVITSIGLSIIQVGIDWAAGGKGNPQYGNPVYLGISFAVLIFILLITRYAKGFMSNVAVLLGIVFGFLLSWMMNEVNLSGLHDASWFAIVTPMSFGMPIFDPVSILTMTAVLIIVFIESMGMFLALGEIVGRKLSSHDIIRGLRVDGVGTMIGGTFNSFPHTSFSQNVGLVSVTRVHSRWVCISSGIILILFGMVPKMAVLVASIPQFVLGGAGLVMFGMVLATGIRILSRCNYTTNRYNLYIVAISLGVGMTPTLSHDFFSKLPAVLQPLLHSGIMLATLSAVVLNVFFNGYQHHADLVKESVSDKDLKVRTVRMWLLMRKLKKNEHGE

SEQ ID NO: 9983 - protein, 466 aa, Arabidopsis thaliana
MRNVIRRVTTMTFTFLLQSPPLPISPSPPQFSLSSSPLSKTQRFITPSQGSRLRTLCTKVIIPNMQDSGSPPLSYLTQREAAEIDETLMGPLGFSIDQLMELAGLSVAASIAEVYKPEEYSRVLAICGPGNNGGDGLVAARHLHHFGYKPFICYPKRTAKPLYTGLVTQLDSLSVPFVSVEDLPDDLSKDFDVIVDAMFGFSFHGAPRPPFDDLIRRLVSLQNYEQTLQKHPVIVSVDIPSGWHVEEGDHEDGGIKPDMLRFRGPHHFLGGRFVPPSVAEKYKLELPSYPGTSMCVRIGKPPKVDISAMRVNYVSPELLEEQVETDPTVQFRKWFDEAVAAGLRETNAMALSTANKDKKPSSRMVLLKGFDENGFVWFTNYESKKGSDLSENPSAALLFYWEILNRQVRIEGPVERIPESESENYFHSRPRGSQIGAIVSKQSSVVPGRHVLYDEYEELTKQYSDG

SEQ ID NO: 9984 - protein, 499 aa, Saccharomyces cerevisiae
MLRIRSLLNNKRAFSSTVRTLTINKSHDVVIIGGGPAGYVAAIKAAQLGFNTACVEKRGKLGGTCLNVGCIPSKALLNNSHLFHQMHTEAQKRGIDVNGDIKINVANFQKAKDDAVKQLTGGIELLFKKNKVTYYKGNGSFEDETKIRVTPVDGLEGTVKEDHILDVKNIIVATGSEVTPFPGIEIDEEKIVSSTGALSLKEIPKRLTIIGGGIIGLEMGSVYSRLGSKVTVVEFQPQIGASMDGEVAKATQKFLKKQGLDFKLSTKVISAKRNDDKNVVEIVVEDTKTNKQENLEAEVLLVAVGRRPYIAGLGAEKIGLEVDKRGRLVIDDQFNSKFPHIKVVGDVTFGPMLAHKAEEEGIAAVEMLKTGHGHVNYNNIPSVMYSHPEVAWVGKTEEQLKEAGIDYKIGKFPFAANSRAKTNQDTEGFVKILIDSKTERILGAHIIGPNAGEMIAEAGLALEYGASAEDVARVCHAHPTLSEAFKEANMAAYDKAIHC

SEQ ID NO: 9985 - protein, 683 aa, Oryza sativa
  misc_feature (16)..(16): Xaa can be any naturally occurring amino acid
  misc_feature (149)..(149): Xaa can be any naturally occurring amino acid
  misc_feature (413)..(413): Xaa can be any naturally occurring amino acid
  unsure (1)..(683): unsure at all Xaa locations
MNPYFIGFAIPFLASXLFTKRKGEKKRGVPVDVGGEPGYVIRNHKFERPVETHWEGVSTLAELFEQSCEQYVYMPLLGTRKLISREMEAARDGRSFEKLHLGQYEWKSYADAFKTVCNFSSGLVRIGHQRDERVAIFADTRAEWQIALXACFRQSITVVTIYSSLGEGALCHSLNETEVTTVICGRKELKKLLDISGQLDTVKHVIYVNEEGVSSEVSLAQKCTSWRVESFEEVERLGLETPVEAKLPLPSDTAVIMYTSGSTGMPKGVMMSHRNVLAVVSAVMTIVPALGKKDVYLAYLPLAHILELAAETVMSAVGASIGYGSPLTLTDTSNKIKKGTQGDASALKPTLMTAVPAILDRVRDGVRKNVDAKGGAAKKLFDIAYSRRLAAINGSWFGAWGLEKHLWDMLVFXEGGAPLSGDTQRFINICLGAPIGQGYGLTETCAGGTFSEYDDNSVGRVGAPLPCSYIKLIDWAEGGYLTNDSPMPRGEIVIGGPNVTKGYFKNEAKTNEVYKDDERGMRWFYSGDIGRLHPDGCLEIIDRKKDIVKLQHGEYVSLGKVEAALSVCPYVDNIMIHADPFHNYCVALVVVAHSELKSWASQQGITYSDVSDLCEKQETVKEVLQCLAKAAKQARLEKFEIPAKVKLVPEPWTPESGLVTAALKLKREAIKKAYEDDLAALYS

SEQ ID NO: 9986 - protein, 635 aa, Geobacter sulfurreducens PCA
MERWSINESAKIYNLPNWGADLFSINKKGNVCVHPSPTSKHSIDLRALVDDLIKRKIKPPILLRFMDVLQGRIASINRVFKNAIDENDYPATYQTFYPIKVNQQRQVVEAIAKFGKRYNIGLEVGSKPELVIGISFATGNGIPIICNGYKDTEYIETVLYATKIGYDITIVVEKMFELEKIIALSKKTGIKPKLGIRVKLSSKGTGKWATSGGEDAKFGLRMSEIIAAIGLLEQNDLLDRVKLLHFHIGSQITKIDKIKSALIEGTRIYAEMRKLGVGIRYVDIGGGLGVDYDGSKSSYFSSVNYSIEEYANDVIYQIKNICEDAGVECPNIISESGRATAAHYSVLVTNLLNTNTSNAMPDFEETLNGTEKLAPTVKKLVDIYKSIDRYSLREDYHDTVQLIQEAVSLFNLGYLTLNERAMAEWLHGKILRKINGIVEKIKPIPEELQNFQLSLRQTYFANFSLFQSIPDSWAIDQLFPIVPIQRLNQKPDVMASIADITCDSDGEITSFVGENGRTKYLPLHKMRKDEDYFVGFFLIGAYQEILGDMHNLFGDTNAVHVTFNKKTGYKIDTVIHGDATWESLKYVQYKGPEILKHVRDTLEKDVALRKVTIEESSHFLELLDRTLLGYTYLGE

SEQ ID NO: 9987 - protein, 424 aa, Stevia rebaudiana
MLQLATYLHSQGISITIAQYPNFNSPDSSNHPELTFLPLSSGNLSVADISGGFFKFIQTLNHNCKPHFREYLVQNMSSDDKESIVIIRDNLMFFAGEIAGELGLPSIILRGSNAVMLTASDIIPQLHQEGRFPPPDSLLQETIPELVPFRYKDLPFIGYPIHQTLEFSITMMTPKSPASAILINTLEFLEQSALTQIRDHYKVPVFTIGPLHKIVTTRSTSILEEDTSCINWLDKQSPKSVVYVSLGSLAKLDEKVASEMACGLAMSNHKFLWVVRPGMVHGFEWVEFLPDSLVGEMKARGLIVKWAPQTTVLAHNAVGGFWSHCGWNSTIECLAEGVPMMCQPFFADQLLNARYVSDVWKTGFEIVIEKGEIACAIKRVLVDEEGEEMRQRAMEIKEKVKIAINDGGSSYDSFKDLVAFISSL

SEQ ID NO: 9988 - protein, 424 aa, Oryza sativa (japonica cultivar-group)
MSSSSLRKKSDAALVRKVPVAPLRPLLANLQEVFLATKLAVLFPAVPLAIAAQCFRFDQVWVFALSLLGLIPLAERVSFLTEQIALYTGPTVGGLLNATCGNATELIIALFALLKGKIEVVKCSLLGSVLSNLLLVLGTSLFCGGVVNLGARQPYDRNQSDVSTALLFLAVLCHSAPLLLRYAVAAGEHSVSATSAAASLDLSRACSFVMLASYVAYLFFQLKTHRQLFEPQEVDGGDAGDDDEEPALGFASALFWLALMTAVISVLSEYVVGTIEPTSQSWGLSVSFISIILLPIVGNAAEHAGAIIFALKNKLDITLGVALGSATQISMFVVPLSVLVAWIMGVQMDLDFKLLETGSLFMAVLVTAFTLQDGTSHYLKGILLLLCYIVIGACFFVARQPAGHANSNGALLDVPTGSMSVQAA

SEQ ID NO: 9989 - protein, 157 aa, Musa acuminata
MNREKLMKMAGAVRTGGKGSMRRKKKAVHKTPTTDDKRLQSTLKRIGVNTIPAIEEVNIFKDDIVIQFPNPKVQASIAANTWVVSGSPQTKKLQDLLPAIINQLGPDNLENLRKLAEQFQRQAPAASAATGEEDDDDVPELVPGETFEEAAEEKQAS

SEQ ID NO: 9990 - protein, 422 aa, Thermotoga maritima MSB8
MRIDEIVEKYVDRKTQRRFLILTSIAWMFDAAGVMLLSFVLPYVIKEWNLTSTQGATIASATFLGMLFGALSVGFVADLLGRKVSNLFFFIVTITFTFLSGFSSSFETLLVLRGLSGFGYGGLMPSFNAYLAEFTSIRLRGRYLVLLESSWAVGSILIGLFAVNVLPNWRWVFWIFSIGYLFVPVFLRMPETPKYAFLKGGKEALERSLGKRVEEEVELPKKEKVPILALLKREHLKDTVVIWIAWFVVSFVYYALFTWAPRIFSSLGVSVVKSSWFTFYMMVAQLPGYLSAAYFIEKWGRKASLGVYFIGTGLAALLWANVRGDASLLAAALVLSFFCLGVWGLVYAYTPELYPTSLRGTGNGAAGVWARIAGIIAPYYTGFMMEKGKSIAETLAWISAMAMFAGVIVLIFGRETKGKYVD

SEQ ID NO: 9991 - protein, 550 aa, Burkholderia mallei
MAAKDVVFGDSARAKMVEGVNILANAVKVTLGPKGRNVVLERSFGGPTVTKDGVSVAKEIELKDKLQNMGAQMVKEVASKTSDNAGDGTTTATVLAQSIVREGMKYVASGMNPMDLKRGIDKAVAAAVEELKKISKPCTTNKEIAQVGAISANSDSSIGDRIAEAMDKVGKEGVITVEDGKSLADELDVVEGMQFDRGYLSPYFINNPDKQVAVLENPFVLLHDKKVSNIRDLLPVLEQVAKAGRPLLIIAEDVEGEALATLVVNNIRGILKTVAVKAPGFGDRRKAMLEDIAILTGGQVIAEETGLTLEKATLAELGQAKRIEVGKENTTIIDGAGEAVNIEARVKQIRTQIEEATSDYDREKLQERVAKLAGGVAVIKVGAATEVEMKEKKARVEDALHATRAAVEEGIVPGGGVALIRARTAIASLTGVNADQNAGIKIVLRAMEEPLRQIVTNGGEEASVVVAAVAAGKGNYGYNAATGEYVDMVEAGVVDPTKVTRTALQNAASVAGLLLTTDAAVAELPKEDAPMPGGMPGGMGGMGMGMGMDM

SEQ ID NO: 9992 - protein, 135 aa, Bradyrhizobium japonicum USDA 110
MPKWPDDDVILFDGVCIFCSRWVRFVAKRDTAKRFRFTPIQSDYGARLARTFGIDAGDPDTNAVVHGGEVFMKSDAALTVLSLLPGWSWVSVLFAVPRPLRDPIYSLIARNRYRIFGKYNTCFVPDADLRARVIE

SEQ ID NO: 9993 - protein, 199 aa, Paracoccidioides brasiliensis
MASGPATQSLKCVVTGDGAVGKTCLLISYTTNAFPGEYIPTVFDNYSASVMVDGKPISLGLWDTAGQEDYDRLRPLSYPQTDVFLICFSIVSPPSFDNVKAKWYPEIEHHAPNVPIILVGTKLDLRDDKTTADNLRAKKMEPVSYEQALAVAKEIKAQKYLECSALTQRNLKSVFDEAIRAVLNPRPIAKPKKSKCRIL

SEQ ID NO: 9994 - protein, 199 aa, Glycine max
MASFDPNVDSSNSDTLRESNHKKRRKIGDHAAGDLDFAAAVPWRSDVEQRIYSRRLVEALRRTPSSATKPRAAGQVRETADRVLAATARGRTRWSRAILKRWRKLRMQHKKAKAASSNNGLKRTRIGNGERRNRLPAVQKKARVLSRLVPGCRKVSFPNLLEEATDYISALEMQVRAMTALAELLAGAAPANLAGSALS

SEQ ID NO: 9995 - protein, 625 aa, Campylobacter lari RM2100
MANETNVLEELFKENSKDYITYEKLVKYFAKLPNVTSAKKIRDLMDKHKVELISSAEIAKKRNLEEAKKLQEEKQKLQDTSLENEFDLANENDLLEWSRSDSPVRMYLREMGQIALLNKDEEVEISKKIELGEDIIIDAFCSVPYLIDFILDYKEPLINRERRVKELFKSFEDDDKNDDDKNDDEIDSEEENENEENENSNDKKIKKTSKKEDERTLKVIESFKALEKAKKEWLKTISTINAENNEDELLNKLIIAFKKNILKEKLMDLGPTSKLISEIVKSMETALKSDEEFDKELKRLEYRLPMFSDELKQRHADILKDITKLSKEEIAERALETTMVSTYMEIKKLIQTKEASQNSFDLEKDQLKEILEQIKRGKKISDEAKTRMAKSNLRLVVSIAKRYTNRGLPFLDLIQEGNIGLMKAVDKFEYKRGYKFSTYATWWIRQAISRAIADQARTIRIPIHMIETINQINKIIREYLQKEGKEPDVSIIAKEVGLSVDKVKQVIKITKEPISLEAPISNEDDGKFGDFVEDRTSISPMDHILKDDLKEQIDEVLDQLNDREKAVIRMRFGLMDDESDRTLEEIGKELNVTRERVRQIESSAIKKLKHPKVGRKLKNYIEGWK

SEQ ID NO: 9996 - protein, 489 aa, Bacillus cereus G9241
MPQDRKEEVQNDTYEEKEIMPDNPQYLPRRVQMELPPEFSINPLFARKGESVVPRFNMPDEGMLPETAYQIVHDEITLDGNARLNLAMFVSTWMEPTAERLYAKSFDKNMIDKDEYPQTAEIEERCVRILANLWHSPSPLTTMGVSTTGSSEACMLGGLALKRRWQNARKREGKSVDRPNIVFSSAVQVVWEKFANYWEVEPRYVKVSPEHSLLDPQGVIAAVDENTIGVVPILGETYTGRYEPVAAIAKALDDLQERTGLDIPMHVDAASGGFIAPFLQPDLVWDFQLPRVKSINVSGHKYGLVYPGLGWIIWREADDLPEDLIFRVSYLGGNMPTFALNFSRPGAQVLLQYYNYLRLGKRGYYDVQRASQKVALFLSKAIQKMEPFELLSNGSDIPVFAWRLKNGHTSNWNLYDLSRQLRVFGWQVPAYPLPPDLEAVTIMRVVVRNGFSVDLAHLFLRNLKQAVAFLDSLDGPMPHDTKCDNGFHH

SEQ ID NO: 9997 - protein, 328 aa, Rhodospirillum rubrum
MPQAKPLVIVTRKLPEAIETRMAELFDARLNVDDHPFTREELCQAVAEADVLVPTVTDRIDGGVLSHCGESLRLIANFGTGIDHIDVATAHQRGVTVTNTPDVLTEDTADMTMAMILAVPRRLAEGERMVREGQWLGWSPTHMLGHRIWGKRLGIIGMGRIGRAVARRARGFGMTIHYHNRRRLHESLEQELDATYWESLDQMLARMDVVSIHCPHTPASYHLLSARRLALLRPEAYVVNTARGEVIDENALVRMLAKGDLAGAALDVFEYEPAVNPKLVAMNNVLLLPHMGSATLEGRIDMGEKVLINIKTFVDGHKPPDRVLPTML

SEQ ID NO: 9998 - protein, 315 aa, Bacillus cereus G9241
MTLNINRVFPRNWYAVSYSKDIKKIPVKKRVAGKDFVLYRDQKGEVQALSPYCPHRGADLSLGQVVNGKLVCPYHGWEFDSCGTCVRIPSQPNKPIPKFSHTFSYPVKEKIGLIWIYPDSEETPPEWQTFHVMENTPFKLSSFHATWNAHLTRSIESVLDIAHLAYVHKKTIGRKTKADSTNYKLEGTLDQFIFSNGDAYLEYKFPHQWMLHSGKQENESFIQYITFTPIDEEETLIMGYTGRTFLKYFPLLDQILAKFSLRVLKEDQIIVESQHPRPIPEALKMEAHVHADMAQVQFRKRWFQFLQNESCFSLD

SEQ ID NO: 9999 - protein, 304 aa, Vibrio parahaemolyticus RIMD 2210633
MAIAQHTHDFVSHNHKGEKRTFYVLILTLVTMVVEIAAGTLFGSMALLADGWHMGTHAAAFCITLFAYRYAKQNANNERFSFGTGKVSVLGGFTSAIALGMVALMMMVESVHRLFNPESIQFNEAIMVAVIGLVVNLASMLLLHDHHHHDHDHPHDHNHSHGHSHEHQDHNLAAAYFHVLADTLTSLLAIVALIIGKFYGWIWLDAIMGIVGALVIGKWTIGLMKQTAPVLLDENINHEYLQAIRETIEPYADVLDLHVWKVSGHHYSAAIVLHNRSDKTLSEFKQLLSKFDKIHHLTLELQNS

SEQ ID NO: 10000 - protein, 473 aa, Tropheryma whipplei str. Twist
MFMRRAKIVVTLGPAVSDLDSVRDLISAGADVFRMNLSHGSLDFHREVFLNVRTAAAELDRHIAIFADLQGPKIRLGRFASGPYTLQEGDIFTITTEQVLGTKELSSTTLPTLPDNVSEGDLLLIDDGKVALRAIGNDGVRITTRVEVPGKVSNNKGINLPGVGVKVPALSEKDIDSLRWALSLPVDMIALSFVRCASDVDAVHKVMDEEGIRLPVIAKIEKPQAVSAIEEIALRFDAIMVARGDLGVELPLEDVPVAQKEIVKVARRFARPVIIATQMLESMISSSRPTRAEASDVANAVLDGADALMLSGETSVGEWPVEAVRVMSRVIEKTEEKAISQIVGFGTTPKTQGGALAWAAAKVAEFIDARYLCVFSESGDSIRRVSRLRHDIPIIGFSPVGSVVRQVSLSWGVRCFLIERLHQTDQMMRKAEHVLLTNNLAEIGEKIVIISGSPVGVPGSTNHMRIHELGSTS

SEQ ID NO: 10001 - protein, 348 aa, Bradyrhizobium japonicum USDA 110
MSEATSQKIPVTVLTGYLGAGKTTLLNRILSENHGKKYAVIVNEFGEIGIDNDLIIGADEEVFEMNNGCICCTVRGDLVRIMDGLMKRKGKFDAIIVETTGLADPAPVAQTFFVDEDVQKNARLDAVVTVADAKWLSDRLKDAPEAKNQIAFADVIVLNKTDLVTKGELAEVEARIRAINPYAKLHRTERCSVALADVLDRGAFDLDRILDIEPDFLEADDHDHDHDHHHHGHDHHHHDHGHGLKHYHDEDMQSLSLKTDKPLDPNMFMPWLQNLVQVEGGKILRSKGILAFHDDDDRYVFQGVHMMLEGNHQRKWKDGEPRESRLVFIGRELPEEAIRKGFESCIVS

SEQ ID NO: 10002 - protein, 361 aa, Zea mays
  misc_feature (29)..(29): Xaa can be any naturally occurring amino acid
  unsure (1)..(361): unsure at all Xaa locations
MALVTSGSGADQVIAEVAMNGGADPSATXVRATVVQASTIFHDTPATLDKAERLIAEAAGYGSQLVVFPEAFIGGYPRGSTFGFGISISIINPKDKGKEAFRRYHASAIDVPGPEVTRLAAMAAKYKVFLVMGVIEREGYTLYCSVLFFDPLGRYLGKHRKLMPTALERIIWGFGDGSTIPVYDTPLGKIGALICWENKMPLLRTALYGKGIEIYCAPTADSRPVWQASMTHIALEGGCFVLSANQFCRRKDYPPPPEYEFAGLGEEPSADTVVCPGGSVIISPSGEVLAGPNYEGEALITADLDLGEIVRAKFDFDVVGHYSRPEVLRLVVNDQPQLPVSFTSAAERTPAAKSDIDTKSY

SEQ ID NO: 10003 - protein, 198 aa, Cucumis sativus
AIPWIFAWTQTRFHLPVWLGFGAAFKYAIEKDVKNLHMLQEMYSQWPFFRVTIDLVEMVFAKGDPGIAALYDKLLVSEDLWSFGEQLRANYEETKNLLLQVAKHKDLLEGDPYLRQRLRLRDSYITTLNVCQAYTLKRIRDPNYNVKVRPHLSKEYLESSKSAAELVKLNPQSEYAPGLEDTLILTMKGIAAGMQNTG

SEQ ID NO: 10004 - protein, 381 aa, Brassica napus
MQIFVKTLTGKTITLEVESSDTIDNVKAKIQDKEGIPPDQQRLIFAGKQLEDGRTLADYNIQKESTLHLVLRLRGGMQIFVKTLTGKTITLEVESSDTIDNVKAKIQDKEGIPPDQQRLIFAGKQLEDGRTLADYNIQKESTLHLVLRLRGGMQIFVKTLTGKTITLDVESSDTIDNVKAKIQDKEGIPPDQQRLIFAGKQLEDGRTLADYNIQKESTLHLVLRLRGGMQIFVKTLTGKTITLEVESSDTIDNVKAKIQDKEGIPPDQQRLIFAGKQLEDGRTLADYNIQKESTLHLVLRLRGGMQIFVKTLTGKTITLEVESSDTIDNVKAKIQDKEGIPPDQQRLIFAGKQLEDGRTLADYNIQKESTLHLVLRLRGGF

SEQ ID NO: 10005 - protein, 147 aa, Saccharomyces cerevisiae
MLFFIQQPHIFNNPKVKTSKRTKRWYKNAGLGFKTPKTAIEGSYIDKKCPFTGLVSIRGKILTGTVVSTKMHRTIVIRRAYLHYIPKYNRYEKRHKNVPVHVSPAFRVQVGDIVTVGQCRPISKTVRFNVVKVSAAAGKANKQFAKF

SEQ ID NO: 10006 - protein, 217 aa, Sinorhizobium meliloti
MKFFVDTADVKDIRELNDLGLLDGVTTNPSLILKAGRDIVEVTKEICSIVEGPVSAEVTATEYSAMMKEAAALSKIADNICIKLPLTLDGLKACKALTSDGHQTNVTLCFSANQALLAAKAGATFVSPFIGRLDDIAVDGMDLIREIRQIFDNYGYETEILAASVRTVNHVKEAALIGADVVTAPPATLKALVKHPLTDKGLEMFLADWAKTGQKIA

SEQ ID NO: 10007 - protein, 317 aa, Haemophilus influenzae Rd KW20
MTTQLDSLRNMTVVVADTGDIDAIKKYQPQDATTNPSLILSASALPQYAPLIDEAVAYAKAQSADKAQQLIDAEDKLAVNIGLEILKIVPGRISTEVDARLSYDTQATVEKARKLIALYNAAGISNDRILIKIASTWQGIRAAEILEKEGINCNLTLLFSEAQARACAEAGVYLISPFVGRILDWYKANSDKKEYAPAEDPGVISVTKIYNYYKEYGYNTVVMGASFRNVGEITELAGCDRLTIAPALLKELQENSTALVRKLEYKGEVKAKPQPLTEAEFYWQHNSDAMAVEKLAEGIRKFAIDQEKLETMLSAKL

SEQ ID NO: 10008 - protein, 495 aa, Stevia rebaudiana
MSPKMVAPPTNLHFVLFPLMAQGHLVPMVDIARILAQRGATVTIITTPYHANRVRPVISRAIATNLKIQLLELQLRSTEAGLPEGCESFDQLPSFEYWKNISTAIDLLQQPAEDLLRELSPPPDCIISDFLFPWTTDVARRLNIPRLVFNGPGCFYLLCIHVAITSNILGENEPVSSNTERVVLPGLPDRIEVTKLQIVGSSRPANVDEMGSWLRAVEAEKASFGIVVNTFEELEPEYVEEYKTVKDKKMWCIGPVSLCNKTGPDLAERGNKAAITEHNCLKWLDERKLGSVLYVCLGSLARISAAQAIELGLGLESINRPFIWCVRNETDELKTWFLDGFEERVRDRGLIVHGWAPQVLILSHPTIGGFLTHCGWNSTIESITAGVPMITWPFFADQFLNEAFIVEVLKIGVRIGVERACLFGEEDKVGVLVKKEDVKKAVECLMDEDEDGDQRRKRVIELAKMAKIAMAEGGSSYENVSSLIRDVTETVRAPH

SEQ ID NO: 10009 - protein, 370 aa, Scherffelia dubia
MFGKAVTARPACAPCAPAPSPCAPGKFDEELIKTAKHIASPGKGILAMDESNATCGKRLDSIGVGNTEENRRTYRELLLTAPGLGNYISGAILFEETLYQKASNGKSFVDVMRSTGIAPGIKVDKGLVPCGTATTSWCTGLDGLAGAAEYYKQGARFAKWRSTVAVGAGPSIIHARHAYGLARYAAICQDNGLVPIVKPEILLDGDHTIDETLDVAKATWAETFKYMADNKVMFEGILLKPSMVTPGAECKVRADPQTVASYTLGLSQPRAPPVPGIMFLSGGQSELEASLNLNAMNQSPNPWHVSFSYARALQNTVLKTWKGEPGNVKAAQEALIVRAAANSAAQMGKYDPAKEAESAKAGMFEKGYVY

SEQ ID NO: 10010 - protein, 2352 aa, Arabidopsis thaliana
MNVQAHMSGQVSNQGTMSQQNGNSQMQNLVGGGSAPATGAGLGPSRVSPVDNDILKLRQAMRIRIFNILQQKQPSPADEASKAKYMDVARRLEEGLFKIANTKEDYVNPSTLEPRLASLIKGRQLNNYNQRHANSSSVGTMIPTPGLQHSGGNPNLMITSSGDATMAGSNNITTSAMNTGNLLNSGGMLGGNLSNGYQHSSSNFGLGSGGNMSSMSSQRNTGQMMPTPGFVNSSTNNNSNNGQSYLSVEASNNSGGFSTAPMMVPQTQQQQLRQDIGGQNSRMLQNHGSQMGVGLRPGMQQKLSNVSNSSINGGVGMNAKSVDSGTSYTNPIRNSQQAYDNLQRSGMQGDGYGTNNSDPFGSGNLYGAVTSVGMMTNTQNANTASFQAVSRTSSSLSHQQQQFQQQPNRFQQQPNQFHQQQQQFLHQQQLKQQSQQQQRFISHDAFGQNNVASDMVTHVKHEPGMENPSESIHSQTPEQFQLSQFQNQYQNNAEDRHAGSQILPVTSQSDMCTSVPQNSQQIQQMLHPHSMASDSVNGFSNLSVGVKTESGMRGHWQSQSQEHTQMSNSMSNERHIQEDFRQRMSGTDEAQPNNMSGGSIIGQNRVSTTSESLNPQNPTATTCRNGNGNRDPRFKNQQKWLLFLRHARHCKAPEGKCPDRNCVTVQKLWKHMDSCAAPQCSYPRCLPTKTLINHHRSCKEPNCPVCIPVKAYLQQQANARSLARLKNETDAARSVNGGGISSDAVQTSAGAKSCTSPGADISGHLQPSLKRLKVEQSSQPVDVETESCKSSVVSVTEAQSSQYAERKDHKHSDVRAPSKYFEVKAEVSDFSVQTRPGFKDTKIGIAENIPKQRPVSQPDKQDLSDVSPMQETTKVEKEPESLKKENLAESTEHTSKSGKPEIKGVSLTELFTPEQVREHIRGLRQWVGQSKAKAEKNQAMEHSMSENSCQLCAVEKLTFEPPPIYCTPCGARIKRNAMYYTVGAGDTRHYFCIPCYNESRGDTILAEGTPMPKARLEKKKNDEETEEWWVQCDKCEAWQHQICALFNGRRNDGGQAEYTCPYCFIAEVEQSKRKPLPQSAVLGAKDLPRTILSDHIEQRLFKRLKQERTERARAQGKSYDEIPTAESLVIRVVSSVDKKLEVKPRFLEIFREDSYPTEFAYKSKVVLLFQKIEGVEVCLFGMYVQEFGSECAFPNQRRVYLSYLDSVKYFRPEVRSYNGEALRTFVYHEILIGYLEYCKLRGFTSCYIWACPPLKGEDYILYCHPEIQKTPKSDKLREWYLAMLRKASKEGIVAETINLYDHFFMQTGECRAKVTAARLPYFDGDYWPGAAEDLIYQMSQEEDGRKGNKKGMLKKTITKRALKASGQTDLSGNASKDLLLMHRLGETIHPMKEDFIMVHLQPSCTHCCILMVSGNRWVCSQCKHFQICDKCYEAEQRREDRERHPVNFKDKHALYPVEIMDIPADTRDKDEILESEFFDTRQAFLSLCQGNHYQYDTLRRAKHSSMMVLYHLHNPTAPAFVTTCNACHLDIETGQGWRCEVCPDYDVCNACFSRDGGVNHPHKLTNHPSLADQNAQNKEARQLRVLQLRKMLDLLVHASQCRSAHCQYPNCRKVKGLFRHGINCKVRASGGCVLCKKMWYLLQLHARACKESECHVPKGASEKITAAIRFTAQSSCNGNDETKSCRSRWGLSHGSGINMRALNQGCHFPEEEEREQCQPSSQMTRVLRDSGDSDKYLTGRLVEFEKYLNSKPPETDTGSSKSHQCQCQSRLVTRSAAVRISTATIGAIAAAVMMAAVSVASAELPPPPQDGETLSNVPQTLSGEDCKKQRIQRPKSKNAEKCTVKCVNTCIRSGDGEGPINIRRFQRIAWQIEGIQTASSNNPHHTTFFILSENNNQMGEAAEQARGFHVTTTRKQVITAALPLQDHWLPLSNLDLLLPPLNVHVCFCYKKPLHFTNTVAYETLKTALAETLVSYYAFAGELVTNPTGEPEILCNNRGVDFVEAGADVELRELNLYDPDESIAKLVPIKKHGVIAIQVTQLKCGSIVVGCTFDHRVADAYSMNMFLLSWAEISRSDVPISCVPSFRRSLLNPRRPLVMDPSIDQIYMPVTSLPPPQETTNPENLLASRIYYIKANALQELQTLASSSKNGKRTKLESFSAFLWKLVAEHAAKDPVPIKTSKLGIVVDGRRRLMEKENNTYFGNVLSVPFGGQRIDDLISKPLSWVTEEVHRFLKKSVTKEHFLNLIDWVETCRPTPAVSRIYSVGSDDGPAFVVSSGRSFPVNQVDFGWGSPVFGSYHFPWGGSAGYVMPMPSSVDDRDWMVYLHLTKGQLRFIEEEASHVLKPIDNDYLKI

SEQ ID NO: 10011 - protein, 327 aa, Arabidopsis thaliana
MTLEALSSNGLLNFLLSETLSPTPFKSLVDLEPLPENDVIISKNTISEISNQEPPPQRQPPATNRGKKRRRRKPRVCKNEEEAENQRMTHIAVERNRRRQMNQHLSVLRSLMPQPFAHKGDQASIVGGAIDFIKELEHKLLSLEAQKHHNAKLNQSVTSSTSQDSNGEQENPHQPSSLSLSQFFLHSYDPSQENRNGSTSSVKTPMEDLEVTLIETHANIRILSRRRGFRWSTLATTKPPQLSKLVASLQSLSLSILHLSVTTLDNYAIYSISAKVEESCQLSSVDDIAGAVHHMLSIIEEEPFCCSSMSELPFDFSLNHSNVTHSL

SEQ ID NO: 10012 - protein, 478 aa, Erwinia carotovora subsp. atroseptica SCRI1043
MTRYQHLAGLLEQRIEQGLYQSGERLPSVRALSTEHGVSISTVQQAYHLLETRQLIMPQPRSGYFVTPRKATPPVPALTRPAQRPVEITQWESVLELVNVRLETNVLKFGSGMPDVSQPTIKPLWKEMSRLCQYQDPRVLQYDSVYGVPALREQIARLTVDCGCQLNQDDIVITTGCQEALFVAVRAVCQPGDIVAVESPAFPGTMQILRGLDIKAIEIPTDSVTGISLEALRLALDQWPVKAVLLVPSCNNPLGFIMPDARKKSLVTLAQHFDIAIIEDDAYGELAYEYPRPRAIKSFDEDGRVLLCSSFSKNLAPGLRVGWIAPGRYLERVIHTKYISTGSTVVQPQLAVAEFIRRGHYQPHLRRMRAQYKANLDIFTCWVREYFPSNICVSRPQGGFLVWIELPEYFDSLKLAREVRKAGIQIAAGSLFSASGKYRNCIRLNYANRFTEEMREGLRIVGSEVAKMMHTLPDQSAP

SEQ ID NO: 10013 - protein, 263 aa, Rhodobacter sphaeroides 2.4.1
MTRIDDTFRRLRAEGKKAFVAYIMAGDPDLETSLAVMRGLPEAGVDIIELGMPFTDPMADGPTIQTAGQRALEGGQTLTRTLEMVRAFRAENAETPIVMMGYYNPIYARGVETFLAEATEAGIDGLIVVDLPPEEDAELCLPAQAAGLNFIRLATPTTDSRRLPKVLQNTSGFVYYVSITGITGAAAAQAADVAPEVARIKAATDLPVIVGFGITTPEAAQDLAGIADGCVVGSAIVKLVGEGRPVAEVLDRVAALAAGAHAA

SEQ ID NO: 10014 - protein, 394 aa, Triticum aestivum
AASLPGAPALIEKPPTRPESAARAPPRLPPRAPQSAGGAPPRSPPRHTPEPGSRAAVRRRAEAGVRARAMDVDSVECLSLPDAAMDADDVGLALHPHGGILAAASRPAAYPKAGAGAGGIVAPGSSVHELLECPVCTNSMYPPIHQCQNGHTLCSTCKARVHNRCPTCRQELGDIRCLALEKVAESLELPCKYYSLGCPEIFPYYSKIKHEAMCSFRPYSCPYAGSECSVTGDIPYLVNHLRDDHKVDMHSGCTFNHRYVKSNPREVENATWMLTVFHCFGQYFCLHFEAFQLGMAPVYMAFLRFMGDENEARNYSYSLEVGANGRKMVWEGTPRSVRDSHRKVRDSHDGLLIQRNMALFFSGGDRKELKLRITGRIWKETQTPDGACVPVLCS

SEQ ID NO: 10015 - protein, 90 aa, Triticum aestivum
GLVTNKQSSMEAPRKLVSAALLLVLLLAATGEMGGPVAVAEARKCESLSHRFAGLCLRGHNCANVCRTEGFPGGKCRGASRRCFCTTHCR

SEQ ID NO: 10016 - protein, 625 aa, Pseudomonas fluorescens Pf-5
MTGSSSKSSHASAPPQQQEQLRLITCGSEDDGKSTLVGRLLWELQQVTDDQLRTLQNDTRQYGGQANNLDYALLLDGLADEKKQDMTIDVAYRFFATPRRKFIVADAPGHEQYTRNMLSGASTADIAVLVIDASLGVSTQTRRHAYLLSVLRVRHIVLAINKMDLVNHDRGAFNAIQADFQSTAQALGFESITAIPVSALKGDNLTTRSARTPWYSGPTLIAYLESIEVQHASSDKVIFPVQWIQNPDASSPGISGTLVSGEIAQGDKIRITASGQTANVARLITADGDLSKAKAGDAVTLVLKQEVQASRGDVIALADQPLQMTDQFEATLIWMVDEAGLIGRTYELKLATQWTTASITTLKYQVNVNNQAHEACRQLRLNTIAVANLALNKPLVFAPYSESRALGGFILVDTYSHATVAVGMIRHDLRRAQNVHRQALSITRENREQLNGHKGKVIWFTGLSGSGKSTVANALEKELHAQGKRTYILDGDNVRQGLNKDLGFTDADRVENIRRVAEVARLMMDAGLIVMTAFISPFRAEREMARQLIGEDNFIEVFVDTPLEVCEQRDPKGLYKKARNGLLPNMTGINSPYETPAQPTLKLHTSHVEIGTMVQQVLELLLNKG

SEQ ID NO: 10017 - protein, 551 aa, Arabidopsis thaliana
METAKAWLSKLKSKDKVKSSKKKEATSNVKEGPKTAGGEEALSNITKEKAAAAKLYIENHYKMQMQSLQERKERRKMLEKKLAAAEVSEEEQNNLLKDLEMKETEYMRRQRHKMGADDFEPLTMIGKGAFGEVRICREKGTGNVYAMKKLKKSEMLRRGQVEHVKAERNLLAEVDSNCIVKLYCSFQDEEYLYLIMEYLPGGDMMTLLMRKDTLTEDEARFYIGETVLAIESIHKHNYIHRDIKPDNLLLDKDGHMKLSDFGLCKPLDCSNLQEKDFTVARNVSGALQSDGRPVATRRTQQEQLLNWQRNRRMLAYSTVGTPDYIAPEVLLKKGYGMECDWWSLGAIMYEMLVGFPPFYSDDPMTTCRKIVNWRNYLKFPDEVRLSPEAKDLICRLLCNVEQRLGTKGADEIKGHPWFRGTEWGKLYQMKAAFIPQVNDELDTQNFEKFEETDKQVPKSAKSGPWRKMLSSKDINFVGYTYKNVEIVNDDQIPGIAELKKKSNKPKRPSIKSLFEDETSGGTTTHQGSFLNLLPTQIEDPEKEGSKSSSSG

SEQ ID NO: 10018 - protein, 320 aa, Yarrowia lipolytica CLIB122
MSTETQPAEKTKGLGFANKDGHYRRQVSQFRNAISSKPGAEFPPDKDRYHLYVSLACPWAHRVLITRKLKGLEDLITLNVVDWYMDEDGWKFNPEVPGCTPDTVNNAERIREIYFKVNPEYDGRFTVPLLFDKKQGKIVSNESAEIIRFLFTEMDSLIPEKYHVDYYPEKLRPEIDAVNEWIYNDINNGVYKSGFATTQEAYDQNVYQLFKSLDRVEKILGEHKYLVGDTLTEADIRLFTTIVRFDPVYVMHFKCNLGMIRHDYPNIHRWLRDLYWDIPAFKDTTNFEHIKKHYMISHLKQNPYQIVAAGPKENILPKDK

SEQ ID NO: 10019 - protein, 183 aa, Musa acuminata
GNDVDRSHAVEPAKSTFVVKQQIRRAVEASGIPYTFVSSNFFGGYFLPVLGQAGATGPPTDKVVILGDGNTKAIFLNEDDIGTYTIKAVDDPRTLNKVLYLRPSANILSHNELISLWEKKVGKTFERVYVPEEEVLKQIQEAPIPLNVMLSICHSAFVKGDHTNFEIEPSFGVEATALFPDVK

SEQ ID NO: 10020 - protein, 451 aa, Arabidopsis thaliana
MTSSSHCFLIVSVALLLQVLLSPVSALTLTSTKYINKLCQMSFVDNKPFCLQTLSAYPPAASATGLLPLASAVIRGIVLPQAKKSASFANGAAKKEPSLKTQFQTCQEAFVSIGDSLMSAFEELKRDPHIATYDVMTCTDHTTQVKNLVGKNTDVASKTLIEMTMQMEKLIPLALASTQVANQGEQEESRANEPEGIKSVIDDIYIFEDDPVVDRFNRFGTEMSAMVSALTQVVSARSQTEAEGAHSQTEAEGAHSSSSSAGHKRGWLGIDSAPIPSSFARVDSSHNPIEESMSKAFPEEAREKKRRYRGVRQRPWGKWAAEIRDPHRAARVWLGTFDTAEAAARAYDEAALRFRGNKAKLNFPEDVRILPPPPPLLRSPADTVANKAEEDLINYWSYTKLLQSSGQRSFLERGQEESSNIFEHSPMEQPLPPSSSGPSSSNFPAPSLPNT

SEQ ID NO: 10021 - protein, 246 aa, Mesembryanthemum crystallinum
EFLARRKKISRAQTETQILRMLDHPFLPTLYCQFTSDNLSCLVMEYCPGGDLHVLRQRQPGRCFTEQAARFYLAEVLLALEYLHMLGVVYRDLKPENILVREDSHIMLSDFDLSLRCAVSPTLLVSSSMSATSKKMSGPCVDSRCVQPLCIQPSCQVTCFTPRLLASSSKLRKMKSDLEMKPLLQLVAEHTDAMLTNSFVGTHEYLAPEIYKGEGHGSAVDWWTFGISSTSFYMENSPLKEGNDRT

SEQ ID NO: 10022 - protein, 418 aa, Rhodococcus sp. CIR2
MQEPTARPVGPYASGPPPAALTVHSASLDHFRAARLWRALVIGVVVVAYTLFALVTWPVRRRGRTLADAASEGLVNGFEVLGPTFVKVGQLMASSSGVFPAPLANACLRCLDDVPPVPAEEARRVIEADLGHPVDALFASFDDVPLAAASVAQVHGCVLPDGREAVIKVQRPDIFRRMVVDLRTAYWGARIPTLIRLDQRQQRRHQLRIQRVRTLAAPTRTADPTRRRRLLAGLQLEHAPANRGLADTDRPGHRPHPAMPQRPGLRRQRQTPLPLVQMRQQDLEPLPQPPVDLAHNRPTAPTRLKPQNTMLLPYSHSAFGSVATRPRAGWRRSPTRGRRARRRSPTAPRTNRGRPATGRTPTTRHHPRWRSRPGPGSLGSPRRSRRPRRARARSPPGAGPPGSATRWLSRRNPNWRRR

SEQ ID NO: 10023 - protein, 572 aa, Mesembryanthemum crystallinum
SFDGNGNTDDEDDFYDDDDDDGRPDSVDDKVRKKEMRKGIDLATTLERIEKNFVITDPRLPDNPIIFASDSFLELTEFSRAEILARNRRFLQGPETDPATVAKIRDAIDNETDVTVQLINYTKTGKKFWNVFHLQPMRDQKGEVQYFIGVQLDGSEHVEPVQNSIPVASVMDSEKQVKETATNVDVAVRELPDANKKPEDLWANHSKVVQPKPHRKECSSWKAIEKIKESGEQIGLKHFRPVKPLGAGDTGSVHLVELCGTGEYFAMKAMDKNVMLNRNKVHRACAEREILDMLDHPFLPALYASFQTNTHICLITEYCPGGELFLLLDRQPTKVLKEDAVRFYAAEVIIALEYLHCQGIIYRDLKPENILLQSNGHVSLTDFDLSCLTSCKPQLLIPEIRDKKKQQKAQHQQTPIFMAEPMRASNSFVGTEEYIAPEIIAGAGIQGAVDWWALGILLYEMLYGFTPFRGKTRQKTFSNVLRKDLKFPATKQVSLDASQLIYQLLQKDPKDRLGACEGANEIKRHPFFRGANWALVRCMKPPVLDAPPLLGDPEKEANIVDPDMLDLQTNVF

SEQ ID NO: 10024 - protein, 281 aa, Streptomyces ambofaciens
MATMTARITEHTTTGMPEVADPSKVAPKDARELSKLFFQQLSVLEEGTPEYQYARNTLIEMNMSLVRFAAGRFRSRGPEEMEDIVQVGMIGLIKAIDRFELTREVEFTSFAVPYIVGEIKRFFRDTSWAVHVPRRLQEARVQLARATEELRSRLGRNPTTKELSELMSLPEDEVVEARLAANGYNSASLDAAISGSEDGESALADFIGADDATLALVDDFHALAPMIAELDERDRQIIHWRFVEELTQKDIGERLGVSQMHVSRLISRLLARLREGMLTDH

SEQ ID NO: 10025 - protein, 200 aa, Glycine max
MATSEEVVAAAPEAAALEAGLKHKLERKWTFWCDNQSKPKQGAAWGTSLRKVYTFDTVEEFWCLYDQVFKPSKLQINADFHLFKTGIEPKWEDPECANGGKWSVTSNSGRKANLDNMWLETMMALIGEQFEDAEDICGVVASVRQWQDKLSLWTKTAANEAAQMSIGRKWKEIIDVNDKITYNFHDDSRTKGASKGRYTV

SEQ ID NO: 10026 - protein, 268 aa, Candidatus Portiera aleyrodidarum
MKLNKRIINCFEQKKRAAFVTFITAGDQDYEKSLTLINSLPKAGADIIELGMPFTDPIADGEIIQKSTQRSLKTGQNQKKTLELVKAFRLFNKKTPIILMGYYNPIYRYGIKKFIKDAKNAQIDGLIIVDLPPEHAQEVSVPANKQGIDFINIITPNTNIKRIPFIVKNSSGYIYYISINGVTGGSVPIFYEVEKAVKLIRKYTNLPIAVGFGVKNRNSVKKLANISDAVVVGSALLKQIEIHCYDQKTAISNVLNLTSRLSRGLVKI

SEQ ID NO: 10027 - protein, 583 aa, Alnus glutinosa
MEESKKSCFISDRVDYKGDPADRNTTGGWVPAALIVGIEVSERLSTMGIIVNLVTYLKGTMHQSSTTSSNSTSNVAGTSFLLCLLGGILADSFLGRYWTIAIFSVIHALGTCMLAISAALPELRPSECNLHHDFPLKCEEPSSFQMGILYTALYSMALGVGGIKSSVSGFGTEQFDQNDEKEMSEMAHFFNRFYLIISFGTLLAVTVLVYVQDQVGRSWGYGICSASMFLSIVAFLVGTKRYRYRECTGSPIIQILQVIVAAIRKRKAELPTDLSFLYDKASDKESTISHTDKYSCLDKGAIITGMDRGADGLTISNPWGLCTVTEVEEVKMLIRILPIMASTIIFWTIRAQLLSFSVQQAATMERTIENFPIPPASFNGFFVGSTIITLIMYDRLLPFLRQSSNGVQGFTNLQKIGIAIFLSILGMAAASFAEMKRLEVVRANRGSTSTSSTLPITAFYLLPQFVLVGIGDGFMYTGQLDFFITESPKGMKAISTGLFLTTNALGFFGSSILVTIITKVTGEEVGHGWLLSRINDSRLDFFYALLAVLGFINLVFYLVLASWYKPSPVEDAHQKINGKEEKV

SEQ ID NO: 10028 - protein, 437 aa, Alkaliphilus metalliredigenes QYMF
MEKKSSVYELEGVPPLKEAIPLGMQHVLAMFAGNITPIMVIAGALSISVQDRTFLIQASMFIAGVVTLLQLYFGAKLPIVMGTSSGFIGTSLAIGAKYGLAGILGASLIGGVFEGVLGFFIKPLRKFFPPLVTGTVVLTIGLSLIPIGVRSFGGGSGAADFGSLSNLFLGTVVLVTILMLKQFTKGFSSASAILIGIIVGYLIAIPMGKVDFGTVQGAGWFSFPTPLKFGLAFHWDAIVAMGVMYIVTAVETVGDISGITMGGLKRDATDKELSSGVIMDGIGSSLAALFGVLPNTSFSQNVGIVALTGVVNRFAIATGAIFLIIAGLFPKVGALISIMPSSVLGGAAIIMFSMITISGINLVTQEPLDGRNGIILATALALGLGMSSVPEILVNMPEGIRLLFGGSGIVIAATVALVLNIVFPKTSTPEKAKESAV

SEQ ID NO: 10029 - protein, 455 aa, Bradyrhizobium japonicum USDA 110
MNIASVRRPIVPPTPPRAPDDMSFLGRVAVIRQNMIATWGQRAYEEDVLEGRFFLHKSFILNRPDAIRHVLLSNYENYTRTPAGIRMLRPVLGEGLLIAEGHAWTFQRRTLAPAFTPRATANLVPHMTAVLDETIAKLDARSGETVDLRETMQRMTLEIAGRTMFSFGMDRHGPTLRNFVVEYGERLGRPYFLDMLLPVSWPSPMDFARARFRKRWTEFVAMLIAERRAAGKKDGAPPRDLFDLMDEARDPETGKGFSDEQLIDEVATMILAGHETTATALFWALYLLALDPDTQEEVASETRGEHLDSMADIDRQKFTRAVIEETMRLYPPAFLIARAARAKDNAAGIEIGRGDIIMIAPWLLHRHEKLWDQPNAFVPKRFMSTEAPDRFAYLPFGAGPRVCVGAPFAQAESVLALARLIGAFRVELVDTVPVIPHGVVTTQPDRSPMFRITRR

SEQ ID NO: 10030 - protein, 545 aa, Campylobacter lari RM2100
MAKEIFFSDEARNKLYEGVKKLNDAVKVTMGPRGRNVLIQKSFGAPTITKDGVSVAKEVELKDSLENMGASLVREVASKTADQAGDGTTTATVLAHAIFKEGLRNITAGANPIEVKRGMDKACEAIVAELKKLSREVKDKKEIAQVATISANSDEKIGNLIADAMEKVGKDGVITVEEAKSINDELNVVEGMQFDRGYLSPYFITNTEKMTAELQNPFILLFDKKIANLKDLLPILEQIQKTGKPLLIIAEDIEGEALATLVVNKLRGVLNISAVKAPGFGDRRKAMLEDIAILTGGEVISEELGRTLESASIQDLGQASSVIIDKDNTTIVNGAGEKANINARINQIKAQIAETSSDYDREKLQERLAKLSGGVAVIKVGAATETEMKEKKDRVDDALSATKAAVEEGIVIGGGAALIKAKSKISLNLQGDEAIGAAIVERALRAPLRQIAENAGFDAGVVVNTVENSKEENTGFDAAKGEYVNMLESGIIDPVKVERVALLNAVSVASMLLTTEATISEIKEDKPAMPDMSGMGGMGGMGGMM

SEQ ID NO: 10031 - protein, 86 aa, Campylobacter lari RM2100
MNFQPLGKRILVKRLEEMKTTASGIIIPDNAKEKPLNGEVAAVSKEIEDVKVNDKVMFAKYGGTEIKLDNEEYLVLNIEDVLGIIK

SEQ ID NO: 10032 - protein, 415 aa, Bacteroides fragilis NCTC 9343
MNLNDTFAAVQAAGRHLALLPDDRINQILNAVAEAALEQTSYILSENRKDLERMSPDNPKYDRLRLTEERLRGIASDIRNVATLPSPLGRILKESIRPNGMRLTKISVPFGVIGIIYEARPNVSFDVFSLCLKSGNACILKGGSDADYSNRAIVEVIHQVLRQFNIDTHMVELLPADREATRELLHATGYVDLIIPRGSSALINFVRQNATIPVIETGAGICHTYFDEYGDTAKGAAIIHNAKTRRVSVCNALDCVIVHESRLSDLPLLCEKLKADKVIIYADPSAYQALEGHYPAGLLKPATPESFGTEFLDYKMAIKTVNSFENALGHIQEYSSRHSESIVTENPERAALFTRMVDAACVYTNVSTAFTDGAQFGLGAEIGISTQKLHARGPMGLEEITSYKWIIEGDGQTRQ

SEQ ID NO: 10033 - protein, 483 aa, Deinococcus radiodurans R1
MHHLILPALLLASAASAQAAPTSTGPSFEGQIIYQVMPDRFFDGDPSNNAGVDRANLRAWHGGDLAGLTQKLPYIQKLGATAIWMTPIYRQQTAKSFDTAAYHGYWPADFRQVDPHFGSMATFDTFMKAAKGAGMKVVLDQVINHYGYEAPAVKANPGWFNGKAQCDATKNKDVDCPLAGLPDLRQSVPAVRQQLFGNGDFWRARGVDGFRYDAIKHVERPFLLDLLKKDRAAGTWTLGEWYDADAGTVAEWQKQGFDSLFLFSLQAAMRGSVMGASSLVNVREVLRRSDELARPGEVALFLDNHDVPRFSQGSFFEDEGQARTKYGLRALLTLRGVPVLYQGTEIAMRGGADPDNRRDMRFESQWTPAEKAVYNVARDAIAVRKASPPLSRGTQTLLPVPDRQADDLLLLTREQGGQRVLVAWHNGLKRQSYSLKLSTLGIKANAQDVTKTLFAGQDAKVSVKGGYLHLSLPPKDAAAFVLR

SEQ ID NO: 10034 - protein, 103 aa, Oryza sativa (japonica cultivar-group)
MKGFHLVVLLTAGPGIRDTQCGFKMFTRAAARKLFTNIRLKRWCFDVELVYLCKHLRIPMAEVSVNWTEIPGSKVRMTSILHMVFELLLIKVGYGLSIWKIYS

SEQ ID NO: 10035 - protein, 360 aa, Bacteroides fragilis NCTC 9343
MKKEFTRIAIKVGSNVLTRQDGTLDVTRMSALTDQIAALHKAGVEVILISSGAVASGRSEIRTLRKLDSVDQRQLFSAVGQAKLINRYYELFRDHGIAVGQVLTTKENFGTRRHYLNQKNCMTVMLENGVIPIVNENDTISVTELMFTDNDELSGLIASMMNAQALIILSNIDGIYNGSPSDPDSLVIREIGQGKDLSNYIQTSKSSFGRGGMLTKTNIARKVADEGITVIIANGKRDNILINLIEHPEETVCTRFIPASQPVSSIKKWIAHSEGFAKGEIHINEQATEVLNSDKAVSILPVGITRIEGEFEKDDIVRIIDYRGTPVGVGKVNCDSMQARDSIGKHGKKAVVHYDYLYIE

SEQ ID NO: 10036 - protein, 320 aa, Candida glabrata CBS138
MPGVQNTEGVIEEQRAALESCRHFLRGKSSYDILPVSYRMIVLESGLPVKRALNVLIQNKVLSAPIWDSKRSRFAGILTLMDFIGLVQYFFSNPDQFDTMDKLRLKDLKEIEYSIGMHAPLENCTIHPERSLFEACELMLQSQTRKIALLDKEDFTERELVVGMLTQYRILKFLVLNYKDVHFMHRSINSLQLGTRKNIKSCKMETPLIDTIQLMTTHEVSSVPILDENGVLLNAYEASDILGLVKGGIYNDLSLCVGEALMRRGDDYEGIYTCTGEDKLATIFDIIRKSRVHTFYLVDENGRLIGILTLGDLLRYIIEG

SEQ ID NO: 10037 - protein, 153 aa, Streptococcus dysgalactiae subsp. equisimilis
PMAYTCLPSKCASIQKCQIGSIADRFVLSAGHGSMLLYALLHLSGFKDVTMEEIKNFRQWGSKTPGHPEFGHTTGVDATTGPLGQGISMATGFAQAERFLAAKYNREGYNIFDHYTYVICGDGDLMEGVSSEAASYAGLQKLDKLIVLYDSND

SEQ ID NO: 10038 - protein, 422 aa, Actinobacillus pleuropneumoniae serovar 1 str. 4074
MSIDLEKLIAWRREFHRFPETGWSEFWTTSRIADYLDEMGAELLLGKKIINEEFVRGRNKNVVEQGITNAITYGAKQKWLDRMDGYTGCIAVFDSGKAGKTVALRFDIDCVNVSETKSDVHIPNQLGFASLNNGFMHACGHDGHIAMGLATALWLSQNKDKYSGKVKIVFQPAEEGVRGAAAIAASGVIDDADYFASSHISFCANSGTVLANPRNFLSTTKIDIRYFGQPAHAGAAPQVGKNALLAAAHAVTQLHGIARHGQGMTRINVGVLKAGEGRNVIPSKAELQLEVRGENKEINQYMVDQVMQIAQGIAISFGVSYETEIMGEAVDMVNDPELIKLIEDIAIAQPEVHDSTSDYAFNASEDATILGRRVQERGGKAIYFIVGADRTAGHHEAEFDFDEKQLLTGANIYTTLIQRLLN

SEQ ID NO: 10039 - protein, 468 aa, Sinorhizobium meliloti
MAYDLIVIGSGPGGYVCAIKAAQLGMKVAVVEKRSTYGGTCLNVGCIPSKALLHASEMFHQAQHGLEALGVEVANPKLNLQKMMAHKDATVKSNVDGVSFLFKKNKIDGFQGTGKVLGQGKVSVTNEKGEEQVLEAKNVVIATGSDVAGIPGVEVAFDEKTIVSSTGALALEKVPASMIVVGGGVIGLELGSVWARLGAKVTVVEFLDTILGGMDGEVAKQLQRMLTKQGIDFKLGAKVTGAVKSGDGAKVTFEPVKGGEATTLDAEVVLIATGRKPSTDGLGLAKAGVVLDSRGRVEIDRHFQTSIAGVYAIGDVVRGPMLAHKAEDEGVAVAEIIAGQAGHVNYDVIPGVVYTQPEVASVGKTEEELKAAGVAYKIGKFPFTANGRARAMLQTDGFVKILADKETDRVLGGHIIGFGAGEMIHEIAVLMEFGGSSEDLGRTCHAHPTMSEAVKEAALSTFFKPIHM

SEQ ID NO: 10040 - protein, 405 aa, Streptomyces coelicolor A3(2)
MPRTVRDVVFVDGVRTPFGKAGPKGVYHETRADDLVVKAIRELLRRNPGLDPKKIDEVAVAATTQIGDQGLTIGRTAGILAGLPTSVPGYSIDRMCAGALTAVTSVAGSVAFGAYDVAIAGGVEHMGRHPMGEGVDPNPRFVSEKLVDESALFMGMTAENLHDRYPSITKQRADEYAVRSQEKAAKAYANGQIQADLVPVSVRRTNEEAGETGWGLVTADEPMRPGTTLENLAGLKTPFRVHGRVTAGNAAGLNDGATASLIASEDFAREHNLPVKMRLVAYSFAGVEPEVMGYGPIPATEKALAQAGLSISDIGLFEINEAFAVQVLAFLEHYGIADDDARVNQYGGAIAFGHPLASSGVRLMTQLARQFEEQPHVRYGLTTMCVGFGMGATVIWENPHFEGDK

SEQ ID NO: 10041 - protein, 312 aa, Azotobacter vinelandii
MWDYSEKVKEHFYNPKNAGAVEGANAIGDVGSLSCGDALRLTLKVDPETDVILDAGFQTFGCGSAIASSSALTEMVKGLTLDEALKISNQDMADYLDGLPPEKMHCSVMGREALQAAVANYRGETIEDDHEEGALICKCFAVDEVMVRDTIRANKLSTVEDVTNYTKAGGGCSACHEAIERVLTQELAARGEVFVAAPIKAKKKVKVLAPEPAPAPVAEAPAAAPKLSNLQRIRRIETVLAAIRPTLQRDKGDVELIDVDGKNVYVKLTGACTGCQMASMTLGGIQQRLIEELGEFVKVIPVSAAAHAQMEV

SEQ ID NO: 10042 - protein, 539 aa, Glycine max
  misc_feature (169)..(169): Xaa can be any naturally occurring amino acid
  unsure (1)..(539): unsure at all Xaa locations
MAGGGGAPAPKIDEPQPHPPKDQLPNVSYCSTSPPPWPEAILLGFQHYLVMLGTTVLIPTALVPQMGGGNEEKAKVIQTLLFVAGINTLLQTLFGTRLPAVIGGSYTYVATTISIILSGRFSDEPDPIEKFKRIMRATQGALIVASTLQIVLGFSGLWRNVARLVSGSXFLSPLSAVPLVSLVGFGLYELGFPGVAKCVEIGLPELILLVFISQFVPHVLHAGKHVFDRFAVLFTIAIVWLYAYLLTVGGAYNHAAPKTQSTCRTDRSGLIESAPWIRVPYPFQWGAPTFDAGEAFAMMMASFVALVESSGAFIAVYRYASATPLPPSILSRGIGWQGVGILLSGLFGTGNGSSVSVENAGLLALTRVGSRRVVQIAAGFMIFFSILGKFGAVFASIPPPIVAALYCLFFAYVGAGGLSFLQFCNLNSFRTIFVLGYSIFIGLSVSQYFNEYTAINGYGPVHTKARWFNDIINVPFQSKAFVAGCVAYFLDNTLHKKEAAIRKDRGKHWWDKYRSFKTDTRSEEFYSLPFNLNKYFPSV

SEQ ID NO: 10043 - protein, 260 aa, Brassica napus
  misc_feature (137)..(137): Xaa can be any naturally occurring amino acid
  unsure (1)..(260): unsure at all Xaa locations
MRKRERENPCSLCGHYHKYEEGEVCGICGHRKPDSSDVAAPQVQLSAFPTEILPEFLYLGSYDNASRSEVLKTQGISRVLNTVPMCQNLYRNSFTYHCLSDEKVLQFDDAIQFLDQCEKDKARVLVHCMSGKSRSPXPVVVAYLMKRKGWRLAESHQWVRQRRPTIDITPEFYQQLEAFERTILGSREGMMAAMNINDPPTFGFGFPKVNNNSQAQVPVFNNTSAASIFSSPASSIPQGFTFGAAPPKPTTGDDTIMGGS

SEQ ID NO: 10044 - protein, 157 aa, Methanococcus maripaludis S2
MKNIKTTVFGMGCFWGAEEVFRKINGVVSTEVGFMGGTIKNPTYGQVCRGKSGHIEVVKIDYDPEIISYDELLDLFWNNHNPTTPNKQGWDVGEQYSSYIFYFDDEQKLIAEKSLEKMQENTDLKIVTIIEKAGSFYPAEEYHQKYFMKKNNSILNF

SEQ ID NO: 10045 - protein, 268 aa, Oryza sativa
  misc_feature (79)..(79): Xaa can be any naturally occurring amino acid
  unsure (1)..(268): unsure at all Xaa locations
LEWDGFDPCRQRWFNIPSMPPIECFTLADKESLAVGTNILVFGKKVEAHVVLRYSLLSNSWTTGDMMNSPRCLFGSASXDNGTLSSAELYDSEAKTWTTLPSMNRARKMCSGFFMDGKFYVIGGKADNHNEILNCGEEFDLEKGTWRLIPDMASGLNGGSGAPPLVAVVNNELYAADYAEKEVRRYDKVNNAWITLGSLPEKYTSVNGWGLAFRGCGDKLIVIGGMSAPGGGVIEICSWIPNNGQPDWKIIGSRRSGSFVYNCAVMGC

SEQ ID NO: 10046 - protein, 135 aa, Phaseolus vulgaris
TSVANNGGRVQCIQVWPTVGKKKFETLSYLPPLTKQQLAKEVDYLLRKGWVPCLEFELEHGFVYREHNKSPGYYDGRYWTMWKLPMFGCTDSSQVLKELYEAQTAHPDGFIRIIGFDNVRQVQCISFIAYKPPGY

SEQ ID NO: 10047 - protein, 499 aa, Solanum tuberosum
MSVTVSSPAVRSFHVSRSPHKTIYRPRVIMSAVRSSDSLGVAPILTKLQKDCATPLPVLRHVADAMADDMRAGLAVDGGSDLKMILSYVDTLPTGNEKGLFYALDLGGTNFRVLRVQLGGKEERVVATEFEQVSIPPELMFATSEELFDFIASALGKFAQKEGGNFELQQGRTREIGFTFSFPVKQTSIRTGILIKWTKGFAVSGTAGKDVVACLNEAMERRGMDMQVSALVNDTVGTLAGARYWDDDAMVAVILGTGTNACYVERVDAIPKLTKRMSKSPITIVNTEWGAFSNGLPLTEFDREMDAESINPGEQIFEKTISGMYLGEIVRRVLVKMSKVGGLFGGSYVPEKLVTPFVLRTPDICAMQQDTSRDLEAVESVLYDVAGVKSDLSARKTVVDICDTIAKRGGRLAGAGIVGILQKMEEDSKGLIFGKRAVVAMDGGLYEHYPQYRGYLQEAVTELLGSEISKNVVIEHSKDGSGIGAALLAAANSKYEHDY

SEQ ID NO: 10048 - protein, 208 aa, Triticum aestivum
GPAAAAAAMARKRKTDAAPRLDEADRTLYSSFCGAANSLSQLYSQAMAQQKLSFQAGERHALEKLHQWILRKHDEESRLTVADIMSHIQHEIDYGGTDAHVSPRVHQHPMSVNPFTSIQPSAGSYAQATSGHAPRPSLSDQSKNTIFSNALSSPVRRSLQTYHLTQGAGNGGRNTEANSAGQNREANSASSNDTSMDMVSDSAGNGYY

SEQ ID NO: 10049 - protein, 529 aa, Metroxylon sagu
MAATGISRIPLLKTLIPSTSPSPSSDRGSNDLPLCLKPSLNWRLSSSFHFSGEALFSKAVLGSGKTAAGGRTPVLVSPKAVSDSKSSQTCLDPDASRSVLGIILGGGAGTRLYPLTKKRAKPAVPLGANYRLIDIPVSNCLNSNISKIYVLTQFNSASLNRHLSRAYGSNMGGYKNEGFVEVLAAQQSPENPNWFQGTADAVRQYLWLFEEHNVMEFLVLAGDHLYRMDYERFIQAHRETDADITVAALPVDERRATAFGLMKIDEEGRIIEFSEKPKGEQLKAMKVDTTILGLDEERAKEMPYIASMGIYVISKDIMLQLLRDKFPGANDFGSEVIPGATNIGMRVQAYLYDGYWEDIGTIEAFYNANLGITKKPVPDFSFYDRSSPIYTQPRYLPPSKMLDADVTDSVIGEGCVIKNCKIHHSVVGLRSCISEGAIIEDSLLMGADYYETDQEKRFLAAKGSIPIGIGKNSHIKRAIIDKNARIGENVQIVNNDNVQEAARETDGYFIKSGIVTVIKDALIPSGTLI

SEQ ID NO: 10050 - protein, 170 aa, Metroxylon sagu
MGIYVFKTDVPLKLLRWHYPTANDFGSEIIPMAAKDYNVQAYLFDEYWEDIGTIKSFFDANLALTDQSPKFRFHDPKKPIFTSPRFLPPTKIEKCRVVDSIISHGCFLTQCSVEHSVIGIRSRLEHGVELKDTMMIGADYYQTGAERASLLAEGKVPVGVGENTKIRNCI

SEQ ID NO: 10051 - protein, 435 aa, Synechococcus sp. CC9605
MSSVPEPSAALLQRAVAVRRAAVDLGQTDDGQRALALQAMADALTERAATILAANREDLERSAGEGLAPALMARLKLDDTKLAAAIDGVRKVASLSDPLGCRQLHRELDQGLVLERVSVPLGVVGVIFEARPDAVMQIASLAIRSGNGALLKGGSEARCTNEAVMDALQAGLAASPVSADALALLTTRQESLALLRLDGLVDLIIPRGSNELVRFIQDNTRIPVLGHADGVCHLYVDAAADIAKAVRVAVDSKSQYPAACNAIETLLVHRSIAQPFLAAALPAFAAAGVKLRGDAESVALGVAEAATEEDWSTEYLDLILAVKLVDDLEAATDHIRSYGSRHTEVILTEDAQTADRFLAAVDSAGVYHNCSSRFADGFRYGFGAEVGISTQTLPPRGPVGLEGLVTYRYRLRGEGHITADYANGSCVFTHIDRPL

SEQ ID NO: 10052 - protein, 351 aa, Gossypium arboreum
MTVSVANGRVLIVGATGFIGRFVADASLDAGRPTYVLVRPSSGNQYSKDKVAKALQDRGAILLNGLANDKELMVKLLKEHQIEIVISALGGATILDQLSLVEAIHSVGTVKRFLPSEFGHDVDRADPVEPGLTMYKEKRQVRRLIEKLEIPYTYICCNSIASWPYHNNTHPSEVIPPLDHFEIYGDGSVKAYFVAGTDIGKFTMKTVDDIRTLNKSVHFRPACNFYNMNELAALWERKIRRTLPRVTVTEEDLLSAAAENIIPQSVVASFTHDIFIKGCQINFPIEGPNETEACSLYPNEPFRTLDDCFNDFLAKMKDENMKQSDENTKQSNEIPPPKPVVEAFAITATCA

SEQ ID NO: 10053 - protein, 170 aa, Metroxylon sagu
MGVYVFKRDVLLKLLRWRYPKSNDFGSEILPSAVKERNVQAYLFNDYWEDIGTIKSFFDANLALTDQLPKFQFYDPRTPFFTSPRFLPPTKIKKCRILDAIISHGCFLRECSVQHSIVGVRSRLDYGADLKDTMMMGADSYETEAEIASLLAEGKVPIGVGQNTKISNCI

SEQ ID NO: 10054 - protein, 392 aa, Yarrowia lipolytica CLIB122
MSTMHFSTTLLASFLALVAAAPSNPKYLTFPITRHHNDSDFVQQHHHLLTRQAPIPVDILNKGAYYSIALNLGTPAQDFNLLLDTGSSDLWVYNITDTTDCNNNQCDVTGQFDGSASSTYNFLSDDYFIQYVSGNASGNWGTDTLTLGSVSLTDFQFACASNAAGNTGILGISVQGQESVGRYGSEYPNFPVALQNAGYIDRQVYSLYLNNADSSDGTFLIGGIDTAKYSGSLTVLPLTQQDALQISYNSITYDGAQVGGSGQAVLDSGTSLTYIPDAAYQALATKLGLSSSPDPISGLIDIPCDSDVSVEFNFDGVIITATSEQIVLSTGGSTCGFGIQSNANSQGNTLFGDTFLRNAYVVYDLQDSQIGLAQAVYTSASNIQAQNGPLSN

SEQ ID NO: 10055 - protein, 352 aa, Hordeum vulgare subsp. vulgare
MAPCEELQEEVARSGPALIVGATGYIGRFVAEACLDSGRRTFILVRPGNACPARAASVDALLRKGAFVVEGRVDGKDGKRSVETALRAHGIEVVISVMGGANILDQLGLIKAIQAAGTVKRFLPSEFGHDVDRARPVGAGLGFYEEKRRVRRAAEAAGVPYTYICCNSIAGWPYFDNMHPSEVRPPLDRFQIYGDGTVRAFFVAGTDIGKFTVKAAYDARSVNKAVHFRPACNLLSTNEMACLWESKIGRTLPRVTLSKEELLAMAAEDIIPESIVASLTHDIFINGCQTNFGIDGSRDIEISSLYPDIPFRTIDECFDDYARGLHLEEEAEESKKSNAPMVEILAVYPTCA

SEQ ID NO: 10056 - protein, 226 aa, Arabidopsis thaliana
MVKKTLGRRKVEIVKMTKESNLQVTFSKRKAGLFKKASEFCTLCDAKIAMIVFSPAGKVFSFGHPNVDVLLDHFRGCVVGHNNTNLDESYTKLHVQMLNKSYTEVKAEVEKEQKNKQSRAQNERENENAEEWWSKSPLELNLSQSTCMIRVLKDLKKIVDEKAIQLIHQTNPNFYVGSSSNAAAPATVSGGNISTNQGFFDQNGMTTNPTQTLLFGFDIMNRTPGV

SEQ ID NO: 10057 - protein, 170 aa, Metroxylon sagu
MGVYVFKRDVLLKLLRWRYPKCNDFGSEILPLAVKEHNVQAYLFNDYWEDIGTIKSFFDANLALTDQPPKFQFYDPKTPFFTSPRFLPPTKIEKCRILDAIISHGCFLRECSVQHSIIGVRSRLDYSAELKDTLMMGADYYETEAEIASLLSEGKVPIGVGQNTKISNCI

SEQ ID NO: 10058 - protein, 518 aa, Thiobacillus denitrificans ATCC 25259
MAASLVIVYHRQPYEEHVEGGKTVFRENASPNGIVPALKGFIGQTERASWIAWKKSPAGKPVRFERRITVEDSYGSYEVVRLPLSAEQISQFYHVTSKEALWPILNSFPSLYSTENCDWAAFREVNRLFAEAACEEAAPGAVVWVHDYNLWLVPKFVRALRPDVRIAFFHHTPFPAADVFNILPWRDEIVDSLLDCDLVGFHVPRYARNFVSVVQSLRPVDALVERDVPPDLRATGTALSEPVTPVVLHSGKRRVQIDAFPIGTHASLIRETVQQPERLAQVAQIRHDIPQEKIIVSIGRVDYAKGTREMLLAYERLLQRRPELHGRIKLLVTAVAAADGMRVYKRAQQSIEQLAGRINGRIGTLAWQPILLSTTPMPFAETLCYYRAADICWITPLRDGLNLVAKEFIAAHVNESGVLVLSEFAGAAVELQDAVLVNPYSLVQMDAAIDRALDMPAAEQRARMQRMDALMDRYDIGHWTRHVLELFAQLPARAQADADPAPQRARRAGRAPAAVPVH

SEQ ID NO: 10059 - protein, 66 aa, Nicotiana tabacum
KELGINALHIKLRATGGNKTKTPGPGAQSALRALARSGMKIGRIEDVTPIPTDSTPRKGGRRGRRL

SEQ ID NO: 10060 - protein, 131 aa, Schizosaccharomyces pombe
MGRYYPVHLKSRCYVCAKCKTHLAFKGHLLSHDYRGKNGPACLFKRVENVIEMEPKTEQMSTGRFIVRHIHCCRCHTYIGWKYVSSYEPSQKFKDGHYILEMQDAVLQRDDPEPDDCFIHPPITFLSSSFS

SEQ ID NO: 10061 - protein, 641 aa, Oryza sativa (japonica cultivar-group)
MDELNLLRQHQHQHQHHLVVRGLGEEIDLEIGPGDDPSFPGAALVGVTPGAHDPADDHKSLLIPCSQPVAEGQPQPTPPQVEEHDGLLRLPGQTKKKKKVVKKWREEWADTYKWAYVAVHDNTSRIFCTVCKEYGRKHRRNPYGNEGSRNMQMSALEEHNNSLLHKEALRLQTASKENAQPPEIERPVYVKALSKTAASILESILKKDPHEAEFIQSIQEVVHSLEPVLVKNSQHVQILERLLEPERCFIFRVPWVDDRGEAHVNRGFRVQFSQALGPCRGGLRFHPSMTLSVAKFLAFEQTLKNALSQYKLGGAAGGSDFDPKGKSESEIMRFCQSFMDELYRYLGPDQDFPAEDVGVGPREMGYLFGQYRRLSGHFQQGNFTGPKIFWSGSSFRTEATGYGLVFFARVVLADMNKELKGLRCVISGSGKIAMHVLEKLLSCEAIPVTVSDSKGYLLDTEGFDYMKYSVLRNIKAQQRSLKEYLKSYPNAKYIDDAKPWSEKCDVAFPCASQNEIDQAEALAIINSGCRVLIECSNMPCTAQAVDILRTAKVVVAPAKATAAGGVAVGELELNPEFSLMQWSVEDFENKIQDAVKQTYDRSIKAAQDYGIMKENPESLVHGANICAFLNIAQAMTDQGCV

SEQ ID NO: 10062 - protein, 401 aa, Glycine max
MDYFNAPGRNHLFVPGPVNIPDQIIRAMNRNNEDYRSPAIPAMTKTLLEDVKKIFKTTTGTPFLIPTTGTGAWESALTNTLSPGDRIVSFLIGQFSLLWIDQQQRLKFNVDVVESEWGHGAKLDVLESKIASDTSHTIKAICIVHNETATGVTNDLAKVRQILDSYQHPALLIVDGVSSICALDFRMDEWGVDVAITGSQKALSLPTGIGIVVAGPRAIEASKHAKSLRVFFDWKDYLKFYQLGTYWPYTPSIHLLYGLRAALNLIFEEGLENVIARHSRLGKATRLAVEAWGLKNCTQKEEWYSDTVTAVLVPAYIDSTEIVRRAWKRYNLSLGLGLNKVAGKVFRIGHLGNLNELQLLGCLAGVEMILKDVGYPVKLGSGVAAASAYLQDTIPMIPSRI

SEQ ID NO: 10063 - protein, 210 aa, Nicotiana tabacum
MKTNQLFLPFLIFTISFNSFLSSSAEAPPAVVDIAGKKLRTGIDYYILPVVRGRGGGLTLDSTGNESCPLDAVVQEQQEIKNGLPLTFTPVNPKKGVIRESTDLNIKFSAASICVQTTLWKLDDFDETTGKYFITIGGNEGNPGRETISNWFKIEKFERDYKLVYCPTVCNFCKVICKDVGIFIQDGIRRLALSDVPFKVMFKKAQVVKD

SEQ ID NO: 10064 - protein, 157 aa, Thiobacillus denitrificans ATCC 25259
MERRNFLILAGGAVLAWSSRAAAAPRVEKLVLSDAEWKKRLTPAAYHILREEGTEAPFSSPLDREKRSGLFVCAACALPLFPSRFKFDSGTGWPSFYDVLPGHVETEIDRKLFVPRTEYHCARCGGHHGHVLKDGPKPTGLRYCNNGLALRFIPDPA

SEQ ID NO: 10065 - protein, 192 aa, Zea mays
  misc_feature (168)..(168): Xaa can be any naturally occurring amino acid
  unsure (1)..(192): unsure at all Xaa locations
MVLSHAASAGSSDDSVHSTFASRYVRASLPRFRMPENSIPKEAAYQIINDELMLDGNPRLNLASFVTTWMEPECNKLMMDSINKNYVDMDEYPVTTELQNRCVNMIAHLFNAPLGETETAVGVGTVRSSEAIMLAGLAFKRRWQNKMKAAGKPCDKPNIVTGANVQVXCWEKFARYFEVELKEVKLSEGYYV

SEQ ID NO: 10066 - protein, 639 aa, Cryptococcus neoformans var. neoformans JEC21
MPRLSSLFLASATAASVAMAAVHDLYWNITYATANPDQLHNKTQAIGVNGTWPPPPIVVNQGDTLTVHAFNGLESVGTTLHSHGNYFNGSNYYDGAAAVTQCPIPPGETLVYEIPVNDQWGTYWIHGHYKGQYVDGLRAPLIIMPNETNERTDITWDEDFTIIMGDWYHDTSPYLVSSYFLNWVNPTGAEPVPDSVTFYVMNTTSGEYLSSNVAQGVDVTADVNNNAAIPFEPGKKYRIRFINMSALSMLHIYMGGHTFDIIEVDAVDIEPYQSANLTISVAQRYSVLVEALNTTDANYAIMFYQDTDMYDTVPDTLAVNNSVTLQYDASLGPADMFNITDDTWPILDDTRFVPLQAKGSAEADVSYELGAYFDTFDDGTNRAAFNNVTYVMPTTPSLFTQLSMGTDAWDTRIYGQQTHALMMPHLEMIELVIVNWDTGYHPFHLHGHEFQIMGKSFDVTSNDSSINPPVLENQSNPARRDTIMVPPGGSVHIRFRADNPGAWIFHCHIDWHMDSGLAVIMITDPSYSQSKLEIPQTMKDHCAYWGYSATGNVVGLNSTTDFKGEAVGPFPLVMGWTTKAKGALAGCIIAALAGFASVVWYGAEHLDEEEIEAEIRRKAEIKAASGGKFGMIKKVVKRE

SEQ ID NO: 10067 - protein, 258 aa, Brassica napus
  misc_feature (143)..(143): Xaa can be any naturally occurring amino acid
  misc_feature (221)..(221): Xaa can be any naturally occurring amino acid
  unsure (1)..(258): unsure at all Xaa locations
VDPASGSRTAGEQNTALQDKNMASKSPSSSSDDSEETGVTKLNNAGSKTNGDKEEVVAAALHDPNASPKKKLVDRSSCGSNTPSGSDAETDALDKMEKDNEDVKEADPNQPSVIELSNRRSKIRDNNNNNNQTTDSWKEVSQXGRKAFQALFARQRLPQSFPPPQGGAENVKGKQSDTSMPMAPDPNKVQDSCDADQESGVVMIGDGTGKSLKTRQSGFKXPYKRCSMGAKESQDGNANHESDEKVCKRIRLEGEAST

SEQ ID NO: 10068 - protein, 291 aa, Tropheryma whipplei str. Twist
MHFPYILKACSDKDLLGLREIYLVVLHAFVCARPRFGGIMLSTHFQVRAFPNKSLLVEEVANRFLLTLENVLQKKASAHVGLEGGTMSELTLSRIAMYAARAKVIWNRVHFWWSDERYLPDGNSHRNYEQAKRCLFSRVKVPEGNIHQIPFIPGDINLAVRRYSDELERLSQDNGKVPEFDILFLGMGPDGHTASLFPNMSHPNVSVVPVFNAPKPPPERISMTLGAINSANRIWVQLSGLEKAKPLKSALEGADVLELPIAGVRGRLETIIFADKDAASLIPAEAHTQDY

SEQ ID NO: 10069 - protein, 439 aa, Zea mays
  misc_feature (191)..(191): Xaa can be any naturally occurring amino acid
  unsure (1)..(439): unsure at all Xaa locations
MASAGISGSGDDDAGGKLLADRYQKGEVLGEGTYGVVFKAIDTKTGNTVAVKRIWVGKDKKEGVNFTALREIKLLKELKGPNIIELIDCFPYKENLHLVFEFMETDLEALIKDKNIILSPADTKSYLQMLLKGLSFCHKKWVIHRDMKPNNLLIGADGQLKLADFGLARMFGSPGRNFTHQAHEFLLFLHXVFARWYRAPELLFGSKHYGSGVDIWAAGCIFAELLTRRAFLQGSSDIDQLGKIFAALGTPKSSQWPDMVYLPDYVEYQYVAAPPLRTLLPMASDDALDLLSRMLTYDPKARISAQQALEHRYFSSLPAPTRPSQLLRSRWKGDQGNNKMPDLNLQHGPLVLSPPRKLRRVIAHEWMEGMHRADKVDEHPSGMRHTDDMPSQKSSRIPMSVDVGALFGTRPAPRPTLNSADKSRLKRKLDMDPEFGFAE

SEQ ID NO: 10070 - protein, 411 aa, Tropheryma whipplei TW08/27
MSRQVVVTGLGVCCPLGIGTELAWQALLDGESGVRTLPDRCTKGFDLPVTFAGLVPDGVEDLLARTEVNRLDRAGQISLIAARQAVEDAGDIKQNPERTAVSWGTGIGCINTVLSAWDRLAEKGPGRVLPMTVPMLMPNAPAVAVGMKMQARAGIHTSVSACAASTESIAVGFDMIRSNKADVVIAGGSESAINPLTISAFASLSALSTYSGNPEHASRPFSKNRDGFVVSEGAAVLILEEKTRAKARGAKIYAEISGALFNSDAHHITAPEPDGKMATTAMRNTLKMGGLSPEEITYVNAHATATILGDISEYKALLALFEDHLANVYVSATKASTGHLLGGAGALEAVFTVKAVSESIIPPTINCDEQDPDIQLRIQRQPKKLSRPFAAISNSFGFGGHNAVVAFTPTD

SEQ ID NO: 10071 - protein, 363 aa, Actinobacillus pleuropneumoniae serovar 1 str. 4074
MQKTIVIKFGTSTLTHGGKSLSRPYMLELVKQIAQLHQHHRVIVVTSGAAAAGRDYLGHPELPKTLAYKQMLAAVGQSQLIRTWENLFDIYGIHIGQILLTRADIDDRERFLNARDTLNALLEQRIIPVINENDTVATEEFKVGDNDNLSALVAILAHADQLYLLTDQEGLFDSDPRSNPQAKLLSVVEKITPEIRQMAGGSVTGLGTGGMSTKITAADIATRSGVETVIASGSRANVLVDLANGESIGSKFLVQSDRLEGRKQWLFAAPQVGSLVVDKGAEAALLQHKSLLPVGVSEINGVFSRGEVVKIFNQEGKALALGLARYNSDALIRIKGKKSKEIESLLGYEFGSVAVHIDEMVIY

SEQ ID NO: 10072 - protein, 474 aa, Haemophilus ducreyi 35000HP
MSKEIKTQVVVLGAGPAGYSAAFRCADLGLETVIVERYSTLGGVCLNVGCIPSKALLHVAKVIEEAKHADKNGITFGEPIIDLDKVRKGKEAVVSKLTGGLAGMAKARKVTVVEGLAAFTDSHTLVARDRDGNPTTIKFDNAIIAGGSRPIELPFIPHEDPRIWNSTDALKLKEIPKKLLIMGGGIIGLEMGTVYQSLGSEIEVVEMFDQVIPAADKDVVSIYSKQVEKKFKLMLETKVTAVKAEDDGIYVSMEGKACNDTKRYDAVLVAIGRVPNGKLIDVGKAGVEVDERGFIHTDKQMRTNVPHIFAIGDVVGQPMLAHKGVHEGHVAAEVIAGKKRYFDPKVIPSIAYTEPEVAWVGKTEKECKQEGLNYEVAKFPWAASGRAIASECSEGMTKLIFDKDTHRLLGGAIVGSNGGELLGEIGLAIEMGCDAEDIALTIHAHPTLHESVGLAAEVFEGSITDLPNAKAKKR

SEQ ID NO: 10073 - protein, 348 aa, Glycine max
MAPPPPVEHNGDSAATASASASAESQRSIPTPFLTKTYQLVDDQSIDDVISWNDDGSTFIVWNPTVFARDLLPKFFKHNNFSSFVRQLNTYGFRKVVPDRWEFSNDYFRRGEKRLLCEIQRRKISSPAPSPTAPTTVTVPMPLTAIPIISPSNSGEEQVISSNSSPLRAPAELLDENERLRKENVQLTKELAEMRSLCNNIYSLMSSYGNKNGNSNGSYQTDGGAGGAQGSRESGMTAVKPLDLMPVKRSSGEDAADTVPKEINLIPNPKLFGVAIGAKRAREGGGGSGSGRDCGGGGGGGEEDTLLRLHHVGSADVKSEPLDCQNHRENQETPWLSPCHRTNQRVCN

SEQ ID NO: 10074 - protein, 447 aa, Candida glabrata CBS138
MLSGKEIRIGALLTLDTVFFVIEITIGYMSHSLALIADSFHMLNDIFSLLVALWAVSVAKNRGPDAKYTYGWKRAEILGALVNAVFLIALCFSIFIEALQRLIEVQEIQNPKLVLIVGCAGLASNIVGLFLFHDDGHGHGHSHGGLGSDIEAGESHGHDHGHSHGHDHSHQEEINAGLDPNCPAHRSDEELEEEDTESDGNGFYNNNIGDILTQTAMTRLATENTSLLADSDEAAKKKAEAKKKSQKSLNMHGVFLHVLGDALGNVGVIVAALFIWKTDYSWRHYSDPVVSLLITAIIFSSALPLSRRASRILLQATPSTISADEVQREILAVPGVKAVHDFHIWNLTESIYIASIHVEIDCAADKFESSARKIRRIFRQHGINSATVQPEFIRDDVSPDERRRFSMIAGGSEELPPEPLNPDHLKSSRYGTLSASNISEDAIADDN

SEQ ID NO: 10075 - protein, 282 aa, Kluyveromyces lactis NRRL Y-1140
MSDSPEYELTYKVGVAENNNSKFRKTMEDVHTYVENFASRLDWGYFAIFDGHVGSEASKWCGANLHRYLEQKILEDEARDLRDVLNDSFVHADNEINNALKGNSGCTAAVCVLRWEIPDTTVPSEDETINLQQHKRMLYTANVGDTRVVLFRNGNSIRLTYDHKASDILELQRVENAGGLIMKSRVNGMLAVTRSLGDKFFDSLVVANPFTTSVEITTSDQFLIIACDGLWDVIEDHEACEMIKDINNPNEAARVLVRYALENGTTDNVTVMVIFLDTSQEN

SEQ ID NO: 10076 - protein, 407 aa, Vibrio sp. Ex25
MSRRVVVTGMSGVTAFGNDWQSVEPKLRDCQNATQYMPSYEQYDGLNTKLAAPILDFDLPKHYKRKQVRGMGRVSKLATVATENALSQAGLIGNDVLTNGQTGIAYGSSTGSTDAIGAFGVMLNEKTTKAITATTYVQMMPHTTAVNVGLFFGLKGRVIPTSSACTSGSQAIGYAYEAIKHGYQTVMVAGGAEELCPTESAVFDTLFATSLKNEDPKSTPRPYDSDRDGLVIGEGAGTLVLEEYEHAVARGAKIYAEIIGFASNCDAAHVTQPQMETMQICMEMALQNAGIPAEKIDYVSAHGTATDRGDIAESNATANALGKVPISSLKSYFGHTLGACGAIEAWLGLEMMHTGWFNPTLNLENLDEQCGNLDYIAGQGRELDVKYLMSNNFAFGGINTSIIFKKM

SEQ ID NO: 10077 - protein, 261 aa, Xylella fastidiosa Temecula1
MRTMTQSRWRLDGRTALITGASTGIGLAVARELLGLGADVLLVARDADLLGRVRDELAEEFPERELHGLAADVADDVDRRAILDWVEDCSNGLHVLINNAGGNVTRAALEYTEDEWREIFEINLFSAFELCRYTQPLLACHASTAIVNIGSVSGLTHVRSGVPYGMSKAALHQMTRNLAVEWAEDGIRVNAVAPWYIRTRRTSEPLSDLYYYEQVIERTPMRRIGEPEEVAAAVAFLCLPASSYVTGECIAVDGGFMRYGF

SEQ ID NO: 10078 - protein, 236 aa, Brassica napus
  misc_feature (196)..(196): Xaa can be any naturally occurring amino acid
  unsure (1)..(236): unsure at all Xaa locations
MASLTSDNEQPPTNSNSSSTDHVRKKKSLFASSPSSSRGNAASVPTRDGDSHPRWRSEKQQRIYSAKLIQALRQVRLSSSSSATTSSPTAQKRGKAVREAADRALAVSARGRTLWSRAILANRIKLKFRKQKRPRQTVIPAVTTVVTTGATSSRGRKRRVSVVGLNKKSLPTVNRKVRSLGRLVPGCKKESVPVIXEEATDYIQALEMQVRAMNSLVELLSGYSTPGSDSAPPPIR

SEQ ID NO: 10079 - protein, 372 aa, Agrobacterium tumefaciens str. C58
MPAPDYALLLDPPAFPAERYAMLADRLAALMGTKNDVLLIQAEAVLALEAAATSLARPGLRALNIITSPYGAWFGGWLERGGATVRNLTASPAKPVTLAEVERALDDGPGFDLLAIVHAESASGILNPLPAIAALAQTRGVVTLVDAVASIGGHAFEVDQLGIDIAVIGPQKALAGPAGVSAISVSPKAWEFLSHDKAPTNSMLSLLDQKQLWLDAGRGALPGTPAPLEFYALDAALDRIEAEGLPAANARHERAAAATRHGIRALGIANWVEETHASALVSTAVLPDSVEAGAFHAAVSRQHGADISVGVGPGAERLIRLNHTGRRAHPQAVKANIAAVANALKTLGHSTNTDSALEAAEKGYSEAPAKEV

SEQ ID NO: 10080 - protein, 429 aa, Staphylococcus aureus subsp. aureus MSSA476
MNFSESERLQQLSNEYILGGVNSPSRSYKAVGGGAPVVMKEGHGAYLYDVDGNKFIDYLQAYGPIITGHAHPHITKAIQEQAAKGVLFGTPTELEIEFSKKLRDAIPSLEKIRFVNSGTEAVMTTIRVARAYTKRNKIIKFAGSYHGHSDLVLVAAGSGPSQLGSPDSAGVPESVAREVITVPFNDINAYKEAIEFWGDEIAAVLVEPIVGNFGMVMPQPGFLEEVNEISHNNGTLVIYDEVITAFRFHYGAAQDLLGVIPDLTAFGKIVGGGLPIGGYGGRQDIMEQVAPLGPAYQAGTMAGNPLSMKAGIALLEVLEQDGVYEKLDSLGQQLEEGLLKLIEKHNITATINRIYGSLTLYFTDEKVTHYDQVEHSDGEAFGKFFKLMLNQGINLAPSKFEAWFLTTEHTEEDIQQTLKAADYAFSQMK

SEQ ID NO: 10081 - protein, 395 aa, Vibrio sp. Ex25
MPIRSSQPLYIQACGFHSAMGQDDAIIHQCLSGAKPSNMVVDQDILNSGRQTVIGRIAQTLPQLPTALSQFDTRNNRLALSALQQIESDVRDAMAKYGRDRIAVVIGTSTSGISDGEIAFGEKLANGEFPADYHYTKQELGNCSDFIAAYFDLSGPHYSVSTACSSSGRVFLTAQRLIRSGIVDAVIVGGVDTICRLTLNGFNGLEALSDTLCKPFDQHRNGINIGEAAALMLLSKTPAPVALLGAGDSSDAHHISAPHPEGLGAEEAMKKALANAGLAAQDIGYINAHGTATPLNDAMESKAIHRCFGDSVPVSSTKPLTGHTLGAASATEAAIAWHILKYNLDLPIQHCETKADDIHISLVETPTKLGNKAILSNSFAFGGNNISLIFGYAHD

SEQ ID NO: 10082 - protein, 235 aa, Oryza sativa
MAPRAATVEKVAVAPPTGLGLGVGGGVGAGGPHYRGVRKRPWGRYAAEIRDPAKKSRVWLGTYDTAEEAARAYDAAAREFRGAKAKTNFPFASQSMVGCGGSPSSNSTVDTGGGGVQTPMRAMPLPPTLDLDLFHRAAAVTAVAGTGVRFPFRGYPVARPATHPYFFYEQAAAAAAAEAGYRMMKLAPPVTVAAVAQSDSDSSSVVDLAPSPPAVTANKAAAFDLDLNRPPPVEN

SEQ ID NO: 10083 - protein, 352 aa, Phaseolus coccineus
MVTSPTIPSHTKARVLIIGATGFIGKFVTEASLLTAHPTYLLLRPPPLVPSKDAIVKTFQEKGAMIIHGVINNKDFVEKILKEHEIDIVISAIGAKSLLDQLILVEAMKSLKTIKRFLASEFGHDVDRADPVEPGLTMYKEKQLVRRVVEQSGVPYTNICCNSIASWPYYDNCHPSQLPPPLDQLQIYGHGNVKAYFVDGIDIGKFTMKVIDDVKTINKNVHFRPSKNCYSINELASLGEMKIGRTIPRVTISEDDLLAAAAENCIPQSIVASFTHDIFIKGCQVNFSIDGVDDVEISTLYPDEEFRSLEDCYEDFAHMIEDNIHKGEHKITGTKSVVEAVPIMASCGNIYE

SEQ ID NO: 10084 - protein, 377 aa, ASPERGILLUS NIDULANS FGSC A4
MAPTALEKENHQRDAEFNAAMHGNSAQAKGGFAAMRQKSAAAQKAAVDEYFKHWDNKSAETETEEIREARRAEYATLTRHYYNLATDLYEYGWGTSFHFCRFAYGEPFYQAIARHEHYLAHQMGIKPGMKVLDVGCGVGGPAREIVKFTDAHVTGLNNNDYQIQRATRYAEREGLSHKLNFVKGDFMQMQFPDNSFDAVYAIEATVHAPELAGVYKEIMRVLKPGGVFGVYEWLMTDAYDNDNPEHRKIRLGIEQGDGISNMVKVSEGLAAIKEAGLELLHHEDLADRPDEIPWYYPLAGSFKHMTSPWDFFTIARMTWWGRGLVHRFVGAMETIKLIPQGTQKTADSLALAADCLVAGGEKKLFTPMYLMVARKPE

SEQ ID NO: 10085 - protein, 473 aa, Oryza sativa
MDQHQLDEENQRAALFHSSAPSSSLGADGEEERETVPLLSCKMADDKSDTVQVSEDTAHQISIDPWYQVGFILTTGVNSAYVLGYSASIMVPLGWIGGTCGLILAAAISMYANALLAHLHEVGGKRHIRYRDLAGHIYGRKMYSLTWALQYVNLFMINTGLIILAGQALKAIYVLFRDDGVLKLPYCIALSGFVCALFAFGIPYLSALRIWLGLSTVFSLIYIMIAFVMSLRDGITTPAKDYTIPGSHSDRIFTTIGAVANLVFAYNTGMLPEIQATIRPPVVKNMEKALWFQFTVGSLPLYAVTFMGYWAYGSSTSSYLLNSVKGPIWIKTVANLSAFLQTVIALHIFASPMYEFLDTRFGSGHGGPFAIHNIMFRVGVRGGYLTVNTLVAAMLPFLGDFMSLTGALSTFPLTFVLANHMYLTVKQNKMSIFRKCWHWLNVVGFSCLSVAAAVAAVRLITVDYSTYHLFADM

SEQ ID NO: 10086 - protein, 359 aa, Gossypium arboreum
MKSTQMNGSYPNESEAGQTVVIGSSGFIGRFITEACLDSGRPTYILVRSSSNSPSKASTIKFLQDKGAIVIYGSITDQEFMEKVLREYKIEVVISAVGGESILDQLSLIEAIKNVNTVKRFVPSEFGHDIDRAEPVEPGLTMYEQKRKIRRQIEECGIPYSYICCNSIAAWPYHDNTHPTDVLPPLDRFQIYGDGTVKAYFVAGSDIGKFTVMSIDDDRTLNKTVHFQPPSNLLNMNEMASLWETKIGRVLPRVTITEQDLLQRAQEMRIPQSVVAAITHDIFINGCQINFSLDKTTDVEICSLYPNTSFRTIAECFDDSAKKISDNEKAVSKPVTASNTDIFVPTAKPEALAITAICT

SEQ ID NO: 10087 - protein, 309 aa, Dechloromonas aromatica RCB
MSDTGEGLEEEFEGQPDETVLPPEPERVLPEIELLEDVTQLYLSEIGAKPLLTPAEELATSRLVREGDFSARQRMIEHNLRLVVNIAKHYLNRGIPLLDLIEEGNLGLIHALEKFDPERGFRFSTYATWWIRQNIERGIMNQSRTIRLPVHIVKEINVVLRAMRHLESADKRDSTVERIALLIDRPVADVRRILSLNEHIASLDAPLEIDPNHTMAEVIADDGESDPESLLQSSEVGSLVDDWLEQLTERQRSVIERRYGLSGADLATLDVIACDLGLTRERVRQIQMEGLDRLRKIIKRGNISRDSLL

SEQ ID NO: 10088 - protein, 467 aa, Methanococcus maripaludis S2
MKSENYSKNDLEKWDKEYVWHPFTQMKEYREGKPLLIESGEGIYLIDVDGKKYMDAVSSIWCNFFGHSEKRIADAISKQALNIGHSTQLGCGNVPSAILAKRYVDFSPEQFKKVFFSEDGAEAIEIAVKMAFEYCKLKGFTNKTKFVSVKEGYHGDTVGAMSVGGSELFHGCFEPLLFEGYHASAPYCYRCKYCNFKNTDERNKQGCEMKCLKEMEDLIRTNKDEIFCVILEAGVMGSAGMIPYPKGYIEGVAKICKKLNIILILDEIATFGRLGRAFYSDMDELKELEKPDILCLGKGITGGYLPLALTLATDEIYNAFLGSFDECKQLFHGHTYAGNQIICASAIETLNILEETNICEEIRPNIKLLHENLDKLKEFPCVGDIRKSGYMIGIELVKDKETKEPYEYSYKAGYKVAGRLLEKGIYIRPIGNTLIFVLPLIIKPEEIKLLTEKIYESISELLDEKVL

SEQ ID NO: 10089 - protein, 351 aa, Gossypium raimondii
MTVSVANGRVLIVGATGFIGRFVADASLDAGRPTYVLVRPSSGNQYSKDKVAKALRDRGAILLNGLANDKELMVKLLKEHQIEIVISALGGATILDQLSLVEAIHSAGTVKRFLPSEFGHDVDRADPVEPGLTMYKEKRQVRRLIEKLEIPYTYICCNSIASWPYHNNRHPSEVIPPLDHFEIYGDGSVKAYFVAGTDIGKFTMKTVDDIRTLNKSVHFRPACNFYNMNELAALWERKIRRTLPRVTVTEEDLLSAAAENIIPQSVVASFTHDIFIKGCQINFPIEGPNETEACSLYPNEPFRTLDDCFNDFVAKMKDENMKQSDENTKQSNEIPPPKPVVEAFAITATCA

SEQ ID NO: 10090 - protein, 225 aa, Thiobacillus denitrificans ATCC 25259
MKRPIAAVLVRRVAAAAAFALVAAPGAAGATSLPDPAVDIPLAKTGGTATAVLAGGCFWGVEGVFEHVKGVKRVVSGYSGGEAGTARYERVSSGDTGHAEAVRVEYDPARISYGQLLKVFFSVAHDPSQRDRQGPDIGRQYRSAIFYATPEQRRVAEHYVSQLQKADAFSRPLATELVPLRAFYDAEAYHQDYLVRHPTQPYIVIHDLPKIAELKRRFPTLYEDD

SEQ ID NO: 10091 - protein, 527 aa, Pasteurella multocida subsp. multocida str. Pm70
MQIKDISHLYNIIKTFLLYGIDEALPQHRYTRAIRCWRKTLFWLRNQHKDKTFGLRLRLALQELGPVWIKLGQMLSTRRDLFPPDIADELALLQDQVDPFDGKIARAQIEKALGAPLETWFDEFNETALASASIAQVHTAKFKQNAPHLENRLAGKEVVLKVLRPNIQQMINADLSLMYKVASWIPRIKAEGRRLRPVEVVREYEKNLRDELDLRREMANAIQLRANFENSPMLYIPEMYKQFCHQTVIVMERIYGIPVSNIEELHANGTNMKLLAERGVQVFFTQVFRDSFFHADMHPGNIFVNRAHPDDPQYIGIDCGIVGRLNDHDKRYLAESFVAFFNRDYRRVAEMHVASGWTPKDTNIDDFEQAFREVCEPIFAKPLSEISFGHVLLNLFNVAREYNMEVQPQLVLLQKTLLYIEGLGRQLYPQLDLWDTAKPFLQKWLDEQMGIKAFTKSVKQKLPYWREHLVDLPENVMDALAQQKIIADELIHLNRTLAKKRNIPHFTSFILGLCTGLAIWLLIYLLS

SEQ ID NO: 10092 - protein, 359 aa, Gossypium raimondii
MKSTHMNGSYPNESETGQTLVIGSSGFIGRFITEACLDSGRPTYILVRSSSNSPSKASTIKFLQDKGAIVIYGSITDQEFMEKVLREYKIEVVISAVGGESILDQFSLIEAIKNVNTVKRFVPSEFGHDIDRAEPVEPGLTMYEQKSKIRRQIEECGIPYSYICCNSIAAWPYHDNTHPADVLPPLDRFQIYGDGTVKAYFVAGSDIGKFTVMSIDDDRTLNKTVHFQPPSNLLNMNEMASLWETKIGRVLPRVNITEQDLLQRAQEMRIPQSVVAAITHDIFINGCQINFSLDKTTDVEVCSLYPNTSFRTIAECFDDFAKKISDNEKAVSKPVTASNTDIFVPTAKPEALAITAICT

SEQ ID NO: 10093 - protein, 248 aa, Clostridium thermocellum ATCC 27405
MNMDELHEKETLELIAAAKAGDKDAQSLLVEKNVGLVWSIVRRFQNRGYEAEDIFQIGCIGLIKAINKFDCSYDVKFSTYAVPMIIGEIKRFIRDDGMIKVSRSLKELANKARITKEIMSKELGREPTVGEISEQLGIPVEEVVMAMEASCTPESLYSTLGEGDNSSTLLIDKIANESENQEVDIVDRIDLRKVLDTLKPREKQIIVLRYFKEKTQVQIAKMLGISQVQVSRIEKKILEEIRKKIKYN

SEQ ID NO: 10094 - protein, 292 aa, Oryza sativa (japonica cultivar-group)
MPFHFQFPWLPNNPTSSSSSPTKPPSPAIPNPFLPIQAGLASFLSSLPLPRAAFPPPPWARISSASASAASASALPVAEIEERLAGVPVYALANSSQEFVLVSSARGGGGGGGGARAAVPPPALGLLCFRREDADALLAQMDGDMAAGSTVVPVALNKVIQLKSDGVAFRFVPDSSQVANAMKLMENEGQYVNDGFPGVPVFQSRSLVLMSDNKRYRPVFFRKEDLDNSLHRASRDQQKPNPAVKMGDIQVSSLENIIKSMKDSSSSKWDDAVFIPPGFDLATSSKQSNHDN

SEQ ID NO: 10095 - protein, 436 aa, Pediococcus pentosaceus ATCC 25745
MEDIQKQGAKNVELSTPKTILLAFQHLLAMYAGDILVPLLIGAALKFNAQQMTYLISVDIFMCGVATFLQVKRTPLTGIALPVVLGSAVEYLAPMEHIGNTMGWGYMYGGVIAAGIFVFLISGLFASLRKFFPIVVTGSLITLIGFTLIPVAFQNIGGGNVADKNFGSSSNLILGFLTALVIILIQVFAHGFIKRISVLIGIIVGSVIAVVMGLIDPTPISQAHWIQIPMPFYFATPKFEWSSILTMLLAAVTCMIESTGVYFALADITKRNLTADDLKRGYRSEGIAAILGGIFNTFPYSTFSQNVGIVQLSGIKKLKPIYFSAGMLLILGLIPKFSAIATLIPTSVLGGAMLVMFGMVGAQGIKMLANVKMTVNNLLVIAVSIGIGLGVTTQPTLFHILPTSVQTILDNGMVVGCITAIIMNILLNGNQAVDGE

SEQ ID NO: 10096 - protein, 346 aa, Vitis shuttleworthii
MTVSPVPSLKGRVLIAGATGFIGQFVAAASLDAHRPTYILARPGPRSPSKAKIIKAHEDKGAIIVYGLINEQESMEKILKEHEIDIVVSTVGGESILDQIALVKAMKAVGTIKRFLPSEFGHDVNRADPVEPGLNMYREKRRVRQLVEESGIPFTYICCNSIASWPYYNNIHPSEVLPPTDFFQIYGDGNVKAYFVAGTDIGKFTMKTVDDVRTLNKSVHFRPSCNCLNINELASVWEKKIGRTLPRVTVTEDDLLAAAGENIIPQSVVAAFTHDIFIKGCQVNFSIDGPEDVEVTTLYPEDSFRTVEECFGEYIVKIEEKQPTADSAIANTGPVVGMRQVTATCA

SEQ ID NO: 10097 - protein, 402 aa, Cryptococcus neoformans var. neoformans
MPSTKGVILVGGPSKGTRMRPLTLDCPKPLLPVAGKPMIWHPLQALSKVPDLTEVIIIGFYDDSQMAAFVKEAKREFPNIAISYLREYKALGTAGGLYHFRDSILRPPVPQHIFICNIDICCSFPFAEMLELHTSHGGTGTIMGVNVKKETATQYGCIVTDPETNQMVHYVEKPEGWISNIVNGGVYLFDKSLFDVIKVAMDEKTARAAEDPLVKPDEILRLEQDVIVPLAAARKMYVYQTHDFWRQIKTAASAVTATALYLSNYKLTNPSLLAPAAPNIIAPTFIDPSATIDPSAKIGPNVAIGPNVTVGPGVRIKDAIVLEGSTLEKHSCALNSIVGTNSHIGAWSRVDGEQEFEREVKGKISVTILASEVSLAPETMVRSCIVLPNKTLTKNATNQVLL

SEQ ID NO: 10098 - protein, 111 aa, Glycine max
  misc_feature (98)..(98): Xaa can be any naturally occurring amino acid
  misc_feature (107)..(107): Xaa can be any naturally occurring amino acid
  unsure (1)..(111): unsure at all Xaa locations
MASPSVFAGIAQGPEDPILGVTVAYNKDPSPVKVNLGVGAYRTEEGKPLVLNVVKRAEQMLIHNESRVKEYLPITGLADFNKLSAKLIFGADSPAIQXNRVATVQCXSGTG

SEQ ID NO: 10099 - protein, 390 aa, Cryptococcus neoformans var. neoformans
MTQTSSSSVSVPGEPLKNVLVTGGLGYIGSHVVLSLLMSGRYLPIVIDNAHNAYPQALERCNQIAQSEVGPHAPKPIYHQCDIRNAEEINKVFKQYQSKGGIWAVIHLAALKAVGESSEIPLDYYEVNVGGSISLLKIMQQSQTNNLVFSSSATVYGTPAVIPIPETSEIIPESVYGRTKAITEEVIRDVCRAGAATADNQGLKAISVRYFNPAGAHPSGKLGEEPKGRPGNLLPILAQIAVGRLSSDLKVFGNDYPTRDGTCLRDYLHIMDLAEGHLLALDALAKSEIKTQSSGIFQSIDTKKEGYFRAFNLGRGKGITVLEMINEMKVATGYGYQCEIVERRSGDVPDLTADPRLAQEELGFIARRGLQEMCQDLWRFQSSNVNGYSS

SEQ ID NO: 10100 - protein, 375 aa, Pseudomonas syringae pv. syringae B728a
MAEAKVLSGAGLRGQVAGQTALSTVGMAGAGLTYRGYDVRDLAAEARFEEVAYLLLYGELPNQAELSAYMDKLKRLRDLPQALKEVLERIPADTHPMDVMRTGASMLGTLEPERSFDQQRDSTGRLLAAFPAIMCYWYRFSHDGRRIDCTSAEDSIGGHFLHLLLDKAPSELHRKVMDVSLILYAEHEFNASTFTARVCASTLSDLYSCVTAAIGTLRGPLHGGANEAAMEMIQRFASAEEATKGTLGMLERKEKIMGFGHAIYKESDPRNEVIKGWSKKLADEVGDTVLFPVSEAIDKVMWEQKKLFPNADFYHASAYHFMGIPTKLFTPIFVCSRLTGWAAHVFEQRANNRIIRPSAEYIGVEQRAFVPLEQR

SEQ ID NO: 10101 - protein, 336 aa, Zea mays
MEEEEGSSTSSVAVPVPPPPNKYDSWTTDPEELMMMMVDEAAVQQEGPRRRRDSMLNKLISTVYSGPTISDIESALSFTGGGDVDARNYNNSSAGPGALSSPEKVLMSKMENKYTLKIKTCGNGSSLAEDGYKWRKYGQKSIKNSPNPRSYYRCTNPRCNAKKQVERSTDEPDTLVVTYEGLHLHYTYSHFLHHQQPPPQPKKPKLGAGPPQQPIVVMDDDLLHGPAQQDIITTGPLGAAVMAPAPAPPPAAASFCYDLDDDVPAFFDDHDHHHQQQHITNGGLLEDMVPLLVRRPCTTTTTTSAGSTSPDLSASSSVSWNPTSPYIDMAILSNIF

SEQ ID NO: 10102 - protein, 135 aa, Zea mays
MWSIPPVSASKGQFMCSASDLFDFLTDETKIPMWSRNPAQMKPEVGAEMSLFGGNVTGEVISVDRPKEVVTTWRAPTWPAGHFGKLKISLTEGSDSTKLELHLTGVPVGTEEETERNLDIFYLRSLKQIGLGTIL

SEQ ID NO: 10103 - protein, 582 aa, Haemophilus ducreyi 35000HP
MQETDLSIIKTFKRLFPIIRNYKWGLIAASVALILNALVDSSLIYLLKPLLDDGFGKADNAFLKQMAILVMLFILLRGVSNYIASYCLSWVSGKVVMTLRRNIFQHLMYMPVSYFDKNPTGRLLSRVTYDTEMVASSSSYVLVTIVREGAYLISLFAVMVYTSWQLSIVLFLLAPIIAFLISIVSKRFRILSRNIQNSMGELTVTTEQMLKGHKVVLSFGGQKVEKARFDRVSNDMRRKGMKIVSADGISDGLVQLIASLALSAVLYVATFPEVMSENLTAGSFTVVFSSMMAMLRPLKSLTSVNSQFQRGMAACQTLFEFLDLKTEKNNGTKQVERAQGCITFDNVIFSYEGKEEQALNQVSFTIPQGKTVALVGRSGSGKSTIASLLTRFYDVNEGQILLDGVNIEEYTLENLREQCSVVSQQVHLFNDTIANNIAYAAKDKYSRAQIIAAAQAAHAMEFIEKLEQGLDTVIGENGASLSGGQRQRLAIARALLRNAPVLVLDEATSALDTESELAIQSALAALQKNKTVLVIAHRLSTIEKADEILVVDQGKIVERGSHEQLLAKGGAYKQLYSMQFSE

SEQ ID NO: 10104 - protein, 704 aa, Candida glabrata CBS138
MYGWKLHRFKFGRGKDDDSRKKKMIISSSQSSLNSADTAAGDSIFSRPSVERRDTVTAANGSIAPVRVSQDSYMSYFKESNENMSKFDLPSWLRSHKDSFSPFNSSSNSSSNLGSNRDSSMTDVTELLNDTAFKSTPFDRIDENMHSGLLTVKVYSGSNFTMPVPITSDQGILHNLLNSSISSLEGDNNTYAEMEQLITQLSQVHLANQTSEEQLISNAFSSTFIPAVIKVPGHDDYPLIYMTVEYDNTMATIYPEGGTISKPVFNKISTFDVTRKLPFLKCSVFIKIPSALLPSMRWQQEAALADPNMRSILETIHAGKEIFLDSFTLPVVLDMNSASNFRLFNHQWINLKQGLGTINLTVDFKPSYSKPVGIDDFELLTVLGKGSYGKVMQVRKKDTQKIYALKAIRKSYIVAKSEVIHTLAERTILARVECPFIVPLKFTFQTPEKLYLVLACINGGELFHHLQREGIFDISRARFYASELLLALDSLHKMDVVYRDLKPENILLDSQGHIALCDFGLCKLNMKDNEKTSTFCGTPEYLAPEVLLGKGYTKVVDWWTLGVLLYEMLTGLPPYYDENVSEMYKKILKSPLIFPDGMDPDAKDLLKRLLNRDPNRRLGANGADEIKNHKFFNDLIWDSIWNKEYLPPFRPDVQNANDTSNFDNEFTKQKPVDSVIDEYLSESVQNQFKGWSYLGSEQLGSSMA

SEQ ID NO: 10105 - protein, 480 aa, Saccharomyces cerevisiae
MSELGEYSKLENKELRTEFELTNFPFPGTTDNDSDDGSQGQNSLNIITPDMDDTLVNDVLRENDKKSSMRMAFMNLANSILGAGIITQPFAIKNAGILGGLLSYVALGFIVDWTLRLIVINLTLAGKRTYQGTVEHVMGKKGKLLILFTNGLFAFGGCIGYCIIIGDTIPHVLRAIFSQNDGNVHFWLRRNVIIVMVTTFISFPLSMKRNIEALSKASFLAVISMIIIVLTVVIRGPMLPYDWKGHSLKLSDFFMKATIFRSLSVISFALVCHHNTSFIFFSMRNRSVAKFTRLTHISIIISVICCALMGYSGFAVFKEKTKGNVLNSFPGTDTAINIARLCFGFNMLTTFPMEIFVLRDVVGNLLHECNLIKNYDEHTQLSGKQHVVITSSLVFITMGISLTTCNLGALFELIGATTASTMAYILPPYTNLLLTSKKKSWKERLPFYLCICFGFMIMIISSTQTIIDAVNGSDGQHCQI

SEQ ID NO: 10106 - protein, 349 aa, Glycine max
MEFHILPIITFLMLVVATNADAALPPAFYWKSKLPTTPMPKAITDLLQPDWKEEKDTSVDVGKGGVNVGVEKGNQGPGDGTDVNVGGGDGGVNVHTGPKGKPVHVGVGPHSPFDYNYAASETQLHDDPNVALFFLEKDLHHGTKLNLHFTIYYTSNVDATFLPRSVSDSIPFSSNKVNDVLNKFSIKDGSDEAKTVKNTINECEGPSIKGEEKRCVTSLESMVDFATTKLGSNNVDAVSTEVTKKDNELQQYTMAPGVKRLGEDKASVVCHKENYPYAVFYCHKSETTKAYSVPLEGADGSRVKAVAVCHTDTSKWNPKHLAFQVLKVQPGTVPVCHFLPQDHVVFVPK

SEQ ID NO: 10107 - protein, 420 aa, Stigmatella aurantiaca
MDTHSKRHPSLPRPIQGEMKLENSNRLLAEAKRLIPGVTLSMMKRPEHFAPDAFPVYLARGQGALVEDVDGQQYIDFIGGLGANMLGHNHPAVVESIRKHLDEGLIHSLPTPVELSASQTLIEMIPGAEMARFFKTGADATSAAMRLARIITGKERIITVGYNGWHDHFMVGTPGVPAVMSQYTIRMPLFTPQDETALLACIGENAKQLAAVLISIPFNRCLSREFMHQLRAACTAHEVLMVQDEVITGFRLARGGAQEFFDVKADFVCLSKALAAGMPLSAVAGPAKHLSKLGAMEVQVSTTFGGEMLSLAVCEATLKEYRKGGYIEQLAALGSRLRTGINAKAEKAGSPLRVLGYDSIPFLLFDKNPTEHAKRMQPFQAGMARRGILLRRDVNFISAVHTQEQIDYTIEMAGEVLQSL

SEQ ID NO: 10108 - protein, 198 aa, Sinorhizobium meliloti
MLRLLFGFLVTCFLLLPARAAEPQYAIFAGGCFWCVESDFDAVPGVLETISGYAGGKSANPTYEDYAKGGHREVVRVKFDPDRVSYAELVGVLFRTTDPTDGDGQFCDRGFAYTTAIHALNERQAMDAKAEKIKAEAELGRPIVTPVEGAAKFWPAEDYHQDFGKRNPIRYWYYRNGCGRNRTVEKLWGDRAYAGVSH

SEQ ID NO: 10109 - protein, 124 aa, Zea mays
  misc_feature (34)..(34): Xaa can be any naturally occurring amino acid
  misc_feature (49)..(49): Xaa can be any naturally occurring amino acid
  misc_feature (98)..(98): Xaa can be any naturally occurring amino acid
  unsure (1)..(124): unsure at all Xaa locations
VSWVDAWILRSGLWLSPPDISQAKRFLDHMVHDXVPLVVSRQLLQTYAXDLWKLESDAHNEVAHYALTRSSRVRFATGAGGDVIENLAQVYEYEQHWXNAVQRLRGIDLDSGIRMLDDTYKLYK

SEQ ID NO: 10110 - protein, 400 aa, Novosphingobium aromaticivorans DSM 12444
MREAAIVSTARTGVGKAYRGAFNDTEAPVLSSHVVNAAIERAGIDPARVDDVYLGVGNHWNTQSYNLGRLTVHGSVLPDTTAGFTLDRKCSSGLNAIALAARGIMCNEIDVAVAGGMESISLTINKHAPAFRNRSEFIKAADPHAYMVMIETAEIVAERYGVSREDQDRFAALSQQRAAAAQEAGRFDDEIVPITVTKALFDKEGNETGKEQVTLDRDEGVRAGTTYEALAGLKPVFKGGQVIAEGRHVTAGNASQLSDGASAQVLMDLDTARAEGRPVLGIYRGFQVAGCGAEEMGIGPVFAIPKLLDRAGLKVEDIGLFEINEAFASQAVYCQQKLDIDPERLNVNGGGIAIGHPFGMTGSRLVGHALIEGRRRGVKYAVVSMCVAGGMGAAGLFEVA

SEQ ID NO: 10111 - protein, 613 aa, Sinorhizobium meliloti
MASISSPAANGKAYQYVDHSFDVVVVGAGGAGLRATLGMAEQGLRTACITKVFPTRSHTVAAQGGIAASLQNMTPDSWQWHLYDTVKGSDWLGDVDAMQYLAMEAPKAVYELEHYGVPFSRNAEGKIYQRPFGGHMQNYGEGPPVQRTCAAADRTGHAILHTLYGQSLRNNAEFFIEYFAIDLIMSDDGRCTGVVAWNLDDGTIHRFAAKMVVLATGGYGRAYFSATSAHTCTGDGGGMIARAGLPLQDMEFVQFHPTGIYGAGCLITEGARGEGGYLVNSEGERFMERYAPSAKDLASRDVVSRCMTMEIREGRGVGKNKDHIFLHLDHLDPAVLHERLPGISESAKIFAGVDVTREPIPVLPTVHYNMGGVPTNYWGEVLNADSQNPERIAPGLMAVGEAGCASVHGANRLGSNSLIDLVVFGRAAAIRAGQIIDRNEAVPEVNTAACDRIMERFDRLRHANGTTPTAVLRDKMQRAMQEDAAVFRTQESLESGCRRLSAIWKELPDVRVTDRSMIWNSDLVETLELENLMANAITTVYGAEARKESRGAHAREDYKDGPLGGRDDVNWRKHTLAWVNDAGDVRLDFRPVHTELIAEGIDPYKIEPKARVY

SEQ ID NO: 10112 - protein, 168 aa, Deinococcus proteolyticus
TYATWWIRQAINRAIADQARTIRIPVHMVETINKLTRTARQLQQELSREATYEEIAEAMGPGWDAAKVEEVQKVSQEPVSLETPIGDEKDSFYGDFIPDENLDSPVENAAKTLLSEELEKALSKLTEREAMVLKFRKGLVDGREHTLEEVGQRFSVTRERIRQIENKA

SEQ ID NO: 10113 - protein, 168 aa, Meiothermus silvanus
TYATWWIRQAINRAIADQARTIRIPVHMVETINKLTRTARQMQQELGREPTYEEISEAMGPGWDAKKVEETFKIAQEPVSLETPIGDEKDSFYGDFIPDEHMASPVDSAAQSMLSEELEKALGKLSDREAMVLKLRKGLIDGREHTLEEVGAYFGVTRERIRQIENKA

SEQ ID NO: 10114 - protein, 388 aa, Arabidopsis thaliana
MILSLCCLGSWPAILTLLERRGRLPQHTFLDFATANLLAAIVIAFSLGEIGKSTFLKPDFTTQLPQDNWPSVLLAVAGGVLLSIGNLATQYAFAFVGLSVTEVITASITVVIGTTLNYFLDNKINKAEILFPGVGCFLIAVFLGAAVHASNAADVKEKLKSLPSEDLYSSIENGEDKPEIEKTDVESQEKLAEKAKAGTAGFYVELENKRAIKVFGKSIMIGLFITLFAGISLSLFSPAFNLATNDQWSTLPKGVPKLVVYTAFFYFSIAGFLISLILNLIFLYRPMVGLARSSLKKYIYDSKGRGWAVFAGFLCGFGNGLQFMGGQAAGYAAADSVQALPLVSTFWGIVLFGEYRKSSKRTYALLVSMLAMFVAAVAILMASSGHRK

SEQ ID NO: 10115 - protein, 349 aa, Medicago truncatula
MAPSSSPTTPISKGRVLIVGATGFMGKFVTEASISTAHPTYLLIRPGPLISSKAATIKTFQEKGAIVIYGVVNNKEFVEMILKKYEIDTVISAIGAESLLDQLTLVEAMKSIKTIKRFLPSEFGHDVDRADPVEPGLAMYKQKRLVRRVIEESGVPYTYICCNSIASWPYYDNCHPSQLPPPLDQLHIYGHGNVKAYFVDGYDIGKFTMKVVDDERTINKSVHFRPSTNCYSMNELASLWENKIARKIPRAIVSEDDLLGIAAENCIPESVVASITHDIFINGCQVNFKIDGIHDVEISTLYPGESFRSLEDCFESFVAMAADKIHKGENGVTGGTKALVEPVPITASC

SEQ ID NO: 10116 - protein, 307 aa, Lactobacillus gasseri
MNKVTIVGSINVDNIMHIKKLPQPGETIAMSEFSKAAGGKGANQAVASSRAKNETIFVGRVGDDDNGRFMLEQFKDNGVNVEHVTVTPNEQTGQAYILLQESGQNSIIIQHGANFDVTAADVRNAKSQIEDSDFVIAQFETPLEATIEAFKIARAAGKTTILNPAPARTDIPKELLELTDLITPNETEAESITGIKVDSEESMKKSSELFHKMGIKGVIITIGERGSYVSYEDIEEIIPAFKVKAVDTTAAGDTFLGALSSELKPDLSNLKESVVYASKSSSFTVQKLGAFPSIPTRDVVEQALKEN

SEQ ID NO: 10117 - protein, 139 aa, Glycine max
  misc_feature (44)..(44): Xaa can be any naturally occurring amino acid
  unsure (1)..(139): unsure at all Xaa locations
MDYFNAPGRNHLFVPGPVNIPDQIIRAMNRNNEDYRSPAIPAMXKTLLEDVKKIFKTTTGTPFLIPTTGTGAWESALTNTLSPGDRIVSFLIGPFSLLWIDQQQRLKFNVDVVESEWGHGAKLDVLESKIASELDILAT

SEQ ID NO: 10118 - protein, 212 aa, Zea mays
MAPRNAVPAASAVANGMVMEPRFRGVRKRPWGRFAAEIRDPARKARVWLGTFDTAEAAARAYDAAALHFRGPKAKTNFPVAFAALPPPPPKKPAAVTVSPSSSSTVESSSSSSRDSPATPPRAASPSQQAPSLDLSLGGTPAMVAAQPFLFLDPRLAVTVAVPAPAGANKHAAASCREEEQSDTGSSSSVVDASPAVGVGFDLNMPPPAEVA

SEQ ID NO: 10119 - protein, 128 aa, Vitis vinifera
MQIFVKTLTGKTITLEVESSDTIDNVKAKIQDKEGIPPDQQRLIFAGKQLEDGRTLADYNIQKESTLHLVRRLRGGIIEPSLMQLARKYNQDKMICRKCYARLHPRAVNCRKKKCGHSNQLRPKKKIK

SEQ ID NO: 10120 - protein, 206 aa, Candida albicans
LFKNIAAGNYPSWTAYIQTMTEAEAKEAEFSVFDLTKVWPHKKYPLRRFGKFTLNENPKNYFAEVEQAAFSPAHTVPYMEPSADPVLQSRLFSYADTHRHRLGTNYTQIPVNCPVTGAVFNPHMRDGAMTVNGNLGSHPNYLASDKPVEFKQFSLQEDQEVWNGAATPFHWKATPADFKQAQELWKVLKRYPNQQEHLAHNIAVHA

SEQ ID NO: 10121 - protein, 312 aa, Vitis vinifera
MEKSKVLVMGGTGYIGRRMVEASLAQGHPTFVLQRPEIGMDIEKLQMLLSFKAKGATLVEGSFADHKSLVEAVKKVDVVICTMSGVHFRSHNLLMQLKLVEAIKEAGNIKRFLPSEFGMDPARMEDALEPGRVTFDEKMVVRKAIEEANIPHTYVSSNCFAAYFVPNCSQLGTLTPPKEKVFLYGDGNVKAVFVDEDDVAAYTIKAIDDPRTLNETVYVRPPENILSQRQIIEMWEKLTGKKLDKSSISAEEFLVSMKGLDYAGQVGVGHFYHIYYEGCLTNFEIGEEGEEASKLYPEVDYIRMDEYLKRYL

SEQ ID NO: 10122 - protein, 527 aa, Yarrowia lipolytica CLIB122
MKFSGLVYLATAVLALPDVSNPVPQNVLQPVQYRVAFAGKQDAAVVSWNTYGKPGYQPTVYYGTDKNQLNSKSTGDSNTYDTSTTWNHHVRIEGLESDRVYYYRVGGAPESEIYNFKTARKAGNTKEFTFAAAIDLGVMGPYGLSTKVGNGASNPLAPGEQNTMDSLLQNIDNFDFLLHPGDLAYADYWLKEELEGYIDTGVNTRDTDTLFKNGVQTYEALLNTYYQQMQHITSFKPYMVGPGNHESNCDNGGTSGYTVQTCFEGQRNFTGIINHFRMPDSESGGVGPFWYSFDYGLVHFVNFNTETDLGKYGPGPDSVGGSDNMDSGEFGEDGEQIAWLKNDLKNVDRSKTPWVIAMGHRPWYVAAKKKHRCLECQAAFEKTFNKYGVDLVLLGHRHLYNRIHPIDDKGNIDPNGLNNPKAPWYIVNGAAGHYDGLDTAKKTDEPWLAYWQDTQYGWSKFTVHNATHLTHSFVVSSDNSLLDTQTLYKSRGQAITKRQVKKDKTSAANALSIGRFVIVAFFLAFFF

SEQ ID NO: 10123 - protein, 242 aa, Petunia x hybrida
  misc_feature (120)..(120): Xaa can be any naturally occurring amino acid
  unsure (1)..(242): unsure at all Xaa locations
MEFQSDLTREISPQRKLGRGKIEIKRIENTTNRQVTFCKRRNGLLKKAYELSVLCDAEVALIVFSSRGRLYEYANNSVKATIERYKKACSDSSNTGSIAEANAQYYQQEASKLRAQIGNXQNQNRNFLGESLAALNLRDLRNLEQKIEKGISKIRAKKNELLFAEIEYMQKREIDLHNNNQYLRAKIAETERSQQMNLMPGSSSYDLVPPQQSFDARNYLQVNGLQTNNHYPRQDQPPLQLV

SEQ ID NO: 10124 - protein, 374 aa, Brassica napus
MGKSEEPKVTKSDNKPSSPPADQTNVHVYPDWAAMQAYYGPRVAIPPYYNSAMAAASGHPPPPYMWNPQHMMSPYGTPYAAVYPHGGGVYAHPGFPMPQSQKGAALSTPGTPLNIDTPSKSTGNTENGLMKKLKEFDGLAMSLGNGNNGDEGKRSRNSSETDGSSDGSDGNTTGADEPKLKRRREGTPTKDEEKHLVQSSSFRSVSQSSGDNVVKHSVQGGGGAIVSAAGVSANSNPTFMSQSLAMVPPETWLQNERELKRERRKQSNRESARRSRLRKQAETEELARKVEALTAENMALRSELNQLNEKSNNLRGANATLLDKLKSSEPEKRVKSSGNGDDKNKKQGDNETNSTSKLHQLLDTKPRADGVAAR

SEQ ID NO: 10125 - protein, 239 aa, Streptococcus mutans UA159
MTKGIETMGEEKIVQKDDNFSGRLNILRAGVLGANDGIISVAGVVIGVASATTNIWFIFLSGLSAILAGAFSMAGGEYVSVSTQKDTEEAAVKREKALLLTDSEKARRSLHNAYLKNGECETSAELLTRKAFLKSPVKAMVEEKYGIEYEEFVNPWHAAVSSFFAFTIGSIFPVIAILLFPVTIRIPATVIVVGLALLMTGYVSARLGGAPTRPAMRRNLIVGLLTMLVTYLVGQLFSV

SEQ ID NO: 10126 - protein, 386 aa, Staphylococcus aureus subsp. aureus COL
MYYHQPLLLTPGPTPVPDAIMREIQAPMVGHRSKDFEDIAQQAFQGLKPIFGSQNDVLILTSSGTSVLEASMLNIVNPEDHFVVIVSGAFGNRFKQIAQTYYKNVHIYDVTWGEAVDVKDFINFLSTLNVEVKAVFSQYCETSTTVLHPIHELGNAINQFNSNIYFVVDGVSCIGAVDVDINKDKIDVLVSGSQKAIMLPPGLAFVAYSHRAKEHFKEVTTPKFYLDLNKYISSQADNSTPFTPNVSLFRGVNAYVETVKAEGFNHVIARHYAIRNALRSALKALDLTLLVNDKDASPTVTAFKPNTNDEVKIIKDELKNRFKITIAGGQGHLKGQILRIGHMGKISPFDILSVVSALEIILTEHRKVNYIGKGISKYMEVIHEAI

SEQ ID NO: 10127 - protein, 336 aa, Clostridium thermocellum ATCC 27405
MAVKIGINGFGRIGRLVFRASLNNPNVEVVGINDPFIDLEYMQYMLKYDTVHGQFKGEISQDNGKLVVNGRKISVYGFTDPAEIPWSECGAEYIVESTGVFTTTEKASAHFKGGAKKVVISAPSADAPMFVMGVNHDKYTKDMNVVSNASCTTNCLAPLAKVIHENFGIVEGLMTTVHATTATQKTVDGPSKKDWRGGRAAAGNIIPSSTGAAKAVGKVIPELNGKLTGMAFRVPTLDVSVVDLTCRLEKPATYDEIKAAVKKASENELKGILGYTEDAVVSSDFIGDPRTSIFDAEAGISLNSNFVKLVAWYDNEWGYSNKVVDLIVHMASVDAK

SEQ ID NO: 10128 - protein, 357 aa, Tropheryma whipplei str. Twist
MVRMKALVYHGPGKRSLDTVDDPTIKLGTDVILEMETTTICGSDLHILKGDVAAVKPGTVLGHEGIGKIVEVGKDVKSHSVGDRVIVSPMSSCGVCRFCRANNNGHCLGDSEGPGGWRLGGLINGVQAQFARIPLADNSLHKLPSGLDPKVGILVSDVLPTGHEVGAQAGQVTLGSVVAVIGCGPVGLGAIVTSLLYSPSKVIAVDADSNRLELARKLGATDTVRVNRERPLDAIEDVKKLTEGGFGVDVAIEAVGVPVTFSMALGIAAPGGRVANIGVHGAPVDFPLQDLWDKNIAVTLGIVSTHTIPLLLAALSEGKIDASQFVTHEFDLSDLERAYDVFSAAAQHNVVKVAIRA

SEQ ID NO: 10129 - protein, 454 aa, Bacillus cereus G9241
MNTKKFAKVNEQIPGPKAASLLERRQNIVPKGVSNGIPTFVQSANGALVTDVDGNQYIDFAGAIGTINVGHCHPAVKEALHKQVDQYIHTGFNVMMYEPYIELAEKLAALAPGSFDKQVLFLNSGAEAVENAVKIARKYTKRPGIIAFSKGFHGRTLMTMTMTSKVKPYKFGFGPFAPEVYKAPFPYEYRRPEGLTEEQYDDFMIEEFKNFFISEVAPETIAAVVMEPVQGEGGFIVPSKKFVQEVRNICSEHGILFVADEIQTGFSRTGKYFAIDHYDVVPDLITVSKSLGAGVPISGVIGRKEIMNESAPGELGGTYAGSPLGCAAALAVLDVIEKENLNDRAIELGKVVMNRFEEMKNKYNCIGDVRGLGAMCAFELVQDRKTKAPDKTLTANLCAEANKRGLLLLSAGTYGNVIRVLMPLVITDEQIEEGLTIIEESLQVCYEKANIARV

SEQ ID NO: 10130 - protein, 661 aa, Yarrowia lipolytica CLIB122
MFRCCLRTVPLRAMLRPRAIHSMRPSFTNARQANFRVAGMATGLAAGFAVGCSMVLNDAPQEKDDKKQDLTREEKFYIESQQQTESRKLPDYEDSSNKLYVFFRRLLTRLEVWIWDPIATTFRFFYLSILFAPVLLTLPVILIGPRDKSKDNERYTAIWWYGFLTKMMERAGASFIKLGQWAASRTDIFPPQLCAEMSDLHSNNKAHSLRVTKKTLEGAFGMPFEEIFDEFVDKPLGVGAIAQVYKGKLSQKALNSTKQKKGERSPSGWVAIKVLHPRVSQIVERDLSIMRFFANIINAVPTMEWLSLPGEVEQFAGMMRLQMDLQIEGKNLEVFNKNFQDKADIHFPHAFLEFTTRDVLVEEYIDAIPVHLFLERAKDGGGFDKEIANKGLDAFLQMLLIDNFIHADLHPGNIFVRLYKPESMMHHLGFGDHNNANEDYIEMQKVNDHLKSLKHDPAAWDKEIERLKADGYHAQLCMIDAGLVTELNELNRRNFIDLFKALAEFDGYKAGDLMVQRSRTPETVIDPETYALKVGKLVAQMKSRTFKLGNFKIGDLLTQVLAMVRQHHVRMEPDFITVILSILLLEGIGRQLNPDLDLFKNAIPVLRELGTHSGDGRALFNNEDMMSMLKVWLALETRQFISASVEEVNQQVKYDGLCPNV

SEQ ID NO: 10131 - protein, 469 aa, Bacillus cereus G9241
MYINGEWITLQEQIEVNNPATKEIFATVPKGGVTEAKQAVDAAHEAFKSWSKLTAADRAVKLKKWFTLIDENKEEIAAIMTREQGKPFAEALGEVNYANSFVEWYAEEGKRVYGEMIPASHPNKRILVMKQPVGVMAAITPWNFPAAMITRKVAPALAAGCTAVVKPASQTPLTALKLAELAHEADIPKGVINIVTGSAKAIADKWMEDGRVRKVSFTGSTEIGKELMASAAQTMKKVSLELGGHAPFIVMNDADLDKAVEAVIGSKFRNAGQTCICTNRVFVQEEVYEAFVEKFQKAVGQLKVGDGFGDGTTVGPLIDENAVSKVQEHIEDAIQKGGTVLYGGQKVAELDGHFIQPTVIGLANDTMLCMNEETFGPVAPVAKFKTVDEVIERANHTPYGLAAYIFTKDISQAFQISEALEYGIIGLNDGLPSVAQAPFGGFKESGIGREGGHFGIEEYLEIKYISLGL

SEQ ID NO: 10132 - protein, 387 aa, Glycine max
  misc_feature (65)..(65): Xaa can be any naturally occurring amino acid
  misc_feature (103)..(103): Xaa can be any naturally occurring amino acid
  unsure (1)..(387): unsure at all Xaa locations
MNALAATNRNFKLASRLLGLDSKLEKSLLIPFREIKVECTIPKDDGTLQSYVGFRVQHDNARGPXMKGGIRYHPEVDPDEVNALAQLMTWKTAVANIPYGGAXGGIGCDPAELSISELERLTRVFTQKIHDLIGTHTDVPAPDMGTGPQDLGGSLGRDAATGRGVLFATEALLNEYGKSVSGQRFVIQGFGNVGSWAAQLISNKGGKVVAVSDITGAIKNSNGLDIPSLLEHSKVHRGVKGFNGSDPIDPNSILVEDCDVLVPAALGGVINRENANEIKAKFIVEAANHPTDPEADEILKKKGVVILPDIFANSGGVTVSYFEWVQNIQGFMWDEEKVNNELKTYMTKGFIDVKEMCKTHECDLRMGAFTLAVNRVARATVLRGWEA

SEQ ID NO: 10133 - protein, 401 aa, Klebsiella sp. PAMU-1.2
MRDAYICDGIRTPIGRYGGALASVRADDLAAIPLRELLSRNPKFDPASIDDVILGCANQAGEDNRNVAHMATLLAGYPHSVPGTTINRLCGSGLDAIGFAARAIKAGEADVMIAGGVESMSRAPFVMGKASAPYQRQAELFDTTIGWRFVNPLMQRQFGTDSMPETAENVAELLNISRADQDAFAFRSQQRTAQAQRGGILAQEIVPVDIIGRKGAVNVVRDDEHPRADTTIEQLSRLKTPFRQGGVVTAGNASGVNDGAAALIIASSQQAIVQGLTPRARIVAMATAGVEPKFMGLGPVPAVRKVLERAGLNINDMDLIELNEAFAAQALGVLRQLGLADDPPHVNPNGGAIALGHPLGMSGARLALSASLELQRRSGRYALCTMCIGVGQGIAMILERV

SEQ ID NO: 10134 - protein, 252 aa, Triticum aestivum
MDHQLYGDPSASSFSPLEAQIFSGQLPPSSTPWPNLDVDLALDLDVLEDDIVRELSAGTVANAASSGSGSGAHKKLSHNAYERDRRKQLNELYLSLRSLLPDADHTKKLSIPTTVCRALKYIPELQKQVENLEKKKEKLASANCKPGVLSVTGSIAPTVSATCLNHKEIMVQISLLRDTDASTALPLSKCINVLENEGLQLISSSTSSTFGNQTFYNLHLQRSQGALNLECPSFCDKLEQAIMEAAGLYLQH

SEQ ID NO: 10135 - protein, 385 aa, Arabidopsis thaliana
MLLALLSLGTWPAVLTLLERRGRLPQHTYLDYSITNLLAAIIIAFTFGQIGSTKPDSPNFITQLAQDNWPSVMFAMAGGIVLSLGNLSTQYAWALVGLSVTEVITSSITVVIGSTLNYFLDDKINKAEILFPGVACFLIAVCLGSAVHRSNADDNKAKLRDFETAKQEASGPSTEIGTNSSKDLETNVTTKPKEGTARFLIELENTRAIKVFGKRKIIGLAITFFAGLCFSLFSPAFNLATNDQWNRLKQGVPKLVVYTAFFYFSVSCFIIALILNVVFLYYPVLGLPKSSFKAYLNDWNGRYWAFLAGFLCGFGNGLQFMGGQAAGYAAADSVQALPLVSTFWGVVLFGEYRRSSRKTYLLLFCMLFMFISAVAVLMASSGHRK

SEQ ID NO: 10136 - protein, 325 aa, Zinnia elegans
MVKAIRIHEFGGVEVMKWEDVEIGEPKAGEIKVQNKAIGLNYLDVYMRKGIVKEVPPFPFTPGMESAGVVIAVGPEVTTCKVGDVVAYAGYPVSAYAEEQILPADRAVPVPPSVDPVLAAAAIFKGLTAEMLVRRCFKVGPGHTILYHAAAGGVGSLACQWANALGATIIGTVSTKEKAVQAKEDGCHHVIIYKEENFVDRVMEITSGKGVDVVYDSIGKSTFQGSMECLKVRGYLVVFGMPSGAPEPPSFQQLAEKGIYCTMPSVMLYTKERNELVAASEELFSNIEKGVLRVRVNHKYPLSQAAQAHSDIESQKTTGSIVLIP

SEQ ID NO: 10137 - protein, 153 aa, Triticum aestivum
MEQLFVDDPAFASSMSSLEADIFSGAGQLPSSPWLDLDLDDDVQDLSMAPTTANAVSSGYGSGGSGSHRKLSHNAYERDRRKQLNELYSSLRALLPDADHTKKLSIPTTVSRVLKYIPELQKQVENLERKKKELTTTSTTNCQPRVLGSQLMS

SEQ ID NO: 10138 - protein, 239 aa, Zea mays
MGSKASFRVTLLLLLLAAAWGPAAQADDAAELPDHIAITLKEQVSSTKIPVRLKSGSPLCSACENFTGKAVSYISEKQTQDKVMGFLHDACSQSFSFEQKCDELMDSYATLLFAKITEIKPEAFCKQYGLCRGTALFSGVTSDSTCVFCHHLLDEVMSKLKDPDAEFEIIQILIKECNKIEGHVQQCKRLVLQYIPLILVNGEKFLEKNDVCALVQACPATHKKTFSSALKEALLLSDA

SEQ ID NO: 10139 - protein, 273 aa, Triticum aestivum
MNPRVNQEWTPFEVEGARSIIDWLKNNYCNDGTIYGINKKHEIVGTLQAWFPRKTMQQVTDLYVDLAAKMHMLQCLEKEYHGTNSDHGVNYTVDGHAHKNFWLQEAAMQGTDFLFGCPLKSMQTMDTQQEVSMVEQNKVVLENRMRIHQPVLAPCAKGFWTPDEHRLFLHGLSICGRGKWKDISKHFVPSRTSTQISSHAQKYFMRLKSKGSGSQRYRINDAELNDANPWKMKSTINSWQALAFQSTVGADNQNPSFDLQTLSSPFVTMNNIA

SEQ ID NO: 10140 - protein, 354 aa, Neisseria meningitidis MC58
MKAARFYDKGDIRIEDIPEPTVAPGTVGINVAWCGICGTDLHEFMEGPIFIPPCGHPHPISGESAPVTMGHEFSGVVYAVGEGVDDIKVGQHVVVEPYIIRDDVPTGEGSNYHLSKDMNFIGLGGCGGGLSEKIAVKRRWVHPISDKIPLDQAALIEPLSVGHHAYVRSGAKEGDVALVGGAGPIGLLLAAVLKAKGIKVIITELSKARKDKARESGVADYILDPSEVDVVAEVKKLTNGEGVDVAFECTSVNKVLDTLVEACKPAANLVIVSIWSHPATINVHSVVMKELDVRGTIAYCNDHAETIKLVEEGKINLEPFITQRIKLDELVSKGFERLIHNNESAVKIIVSPNL

SEQ ID NO: 10141 - protein, 369 aa, Neisseria meningitidis MC58
MSLTRLILKFYALLRLFLGKNARTAWISHPACAGHEPGANHPDSPDRILCIEQALRRAGIWQHLQTIEAEEISDTRLALVHSSKYLNRLESCLPQKGKISRLDNDTAISTGSLSAARFAAGSAVQAVDMVMNRKAWHAFCAARPPGHHAGSGKAGGFCLLNNVAAGVMHAIAEYRLKRIAVIDFDVHYGDGTAEIFKDDPRILFFNLFETDLFPFPENNDMPDGGNMVHLPLPPGTGSRTFREAVRRQWLPRLAAFKPELVLLSAGFDAHRLDESGRLNLHEADFAWLTHKIIQTASGCPGKIISVLEGGYTLEPLAQSAAEHIRVLAGLGKSDAATAYQKTLDPTKKRFAKPKTGQVRQPTQSDRYDI

SEQ ID NO: 10142 - protein, 422 aa, Arabidopsis thaliana
MVSYRDRLSQLPDDFLLQILSWLPTKDVLVTSLLSKRWRFLWTLVPRLNYDLRLHDNTCPRFSQFVDRSLLLHKAPTLESLNIKIGSICFTAEKDVGVWVRIGVDRFVRELSVSYCSGEEPIRLPKCLFTCSTLAVLKLENITLEDASCYVCFQSLKTLHLLDVKYLDDQSLPRIISSCSSLEDLVVQRCPGDNVKVVTVTAPSLKTLSLHKSSQAFEGDDDGFLIDTPKLKRVDIEDYWGGFCYIENMPEVVEANVDVIYKNTEKLLGSITSVKRLALCLITSDAAYPAGTIFSQLVHLELCTCAPRWWDLLTRLIEDSPKLRVLKLRQKHIRRAPSPRASWKQPALPKCLLFHLETFKWELYEGSQKQKEVATFILKHAIRLKTAIISPKPTSTLLEKHEMLKDLSSSPRGSSTCELLFD

SEQ ID NO: 10143 - protein, 159 aa, Glycine max
MSLIPSFFGTGRRTNVFDPFSLDVWDPFHGFPGTTALSAPRSETAAFANTRIDWKETAEAHVFKADLPGLKKEEVKVEIEEEGRVLQISGQRTKEKEDKNDTWHRLERSSGSFLRRFRLPENAKLDQVKAGMENGVLTVTVPKVDVKKPDVKPVQITEG

SEQ ID NO: 10144 - protein, 512 aa, Nanoarchaeum equitans Kin4-M
MDLKEYVLKGFFYPASEIYNSIAGFYDYGYLGTLLKNNFINEWKNYFLRLHPNFWEVDPAIVMPKEVFIASGHLENFNDPIVECKNGHRFRADHLIEEKLNIKAEGLSLSEMEELLKNVRCPICNAPLGKVKWFNLMFPIYIGPDSQEALNLLKNLKENVSEQYIKDIIERVKKMVENEAYLRPETAQGPYVMFKREFILHRQKLPLGLAVVGKAFRNEISPRQLLLRLREFTQAELQIFFDPEDNEFDINEVKDVELNFLDKEGNYKRIKVKDLPFPEFYAYFVGKVKQFYERLGIPEERLRFRELSEKEKAFYNKYHVDIEINFPTYGWKEVGGIHYRTDHDLSGHMKVSGKDLTVQKDNKKFIPHVLELSFGVDRNVLALIDLFLTEEEYEIERDNQKVKEKRVVLKIPKHLAPIKVAVFPLLKKPELIEKAKEVYNMLKNYFYPIIYDEQGSIGRRYRRVDEIGVPYAITIDYQTLEDNTVTIRDRDTMKQVRVKIEDLPNQLTLSSS

SEQ ID NO: 10145 - protein, 167 aa, Arabidopsis thaliana
MATDDVNEPLPAAAELPATEAEKQPHKLERKWSFWFDNQSKKGAAWGASLRKAYTFDTVEDFWGLHETIFQTSKLTANAEIHLFKAGVEPKWEDPECANGGKWTWVVTANRKEALDKGWLETLMALIGEQFDEADEICGVVASVRPQSKQDKLSLWTRTKSNEAVLV

SEQ ID NO: 10146 - protein, 524 aa, Trametes sp. I-62
MSGFRLLPSFASLAVIVSLALNTFAAVGPVTDLTISNANVSPDGFQRAAVVANGGVPGPLINGQKGDHFQINVVNQLTNHTMLKSTSIHWHGFFQKGTNWADGPAFVNQCPIATGHSFLYDFQVPDQAGTFWYHSHLSTQYCDGLRGPFVVYDPNDPHASLYDVDNEDTVITLADWYHVAAKLGPAFPPRADATLINGLGRSTDTPTADLAVIKVTSGKRYRFRLASLSCDPAFTFSIDNHDMTIIEADAVNTQPLEVDSLQIFAGQRYSFVLEANQAVDNYWVRANPFFGTTGFAGGINSAILRYDGAAEVEPTTTQSTSTKPLAETDLVPLASMPVPGSPVSGGVDKAINFAFTFNGTNFFVNGATFTPPSTPVLLQIMSGAQDASALLPSGDVYSLPSNATIELTFPATTGAPGAPHPFHLHGHTFAVVRSAGSTKYNYDNPIWRDVVSTGTPAAGDNVTIRFRTDNPGPWFLHCHIDFHLEAGFAVVMAEDIPDTKLANPVPQAWSDLCPIYDALDPSDQ

SEQ ID NO: 10147 - protein, 452 aa, Geobacter sulfurreducens PCA
MQTFDVVVIGGGPGGMTAGMMLKQAGKSVAIIQENHDSFGGVCLNRGCMPTKSMLKAAKVYRDAQNSEKYGLDLSVNPVDLTRLRAVADADLNMLRHMVQGKLTDARIAVFRGKGSFLSEHELQICQADGSSEQIRGEKIIIATGSVPAELPCAPFDGHSILSSDQILKNTDLPHKLLIIGGGAIGCEFATLYNTFGSRVTLVEAMDSLLPREDKEAGKTLQSTFEQQGITVKTGAAIKSISVEAGTVHVHYDGSCATEEFDKVLVGIGRTANIAGLNLDAAGVATEQGAVKVNEMMQTTVPHIYALGDVIGGMTLAHAAEKEGYLLAQNLIQGTRHPLDHRAVPRVVFCHPEVAAVGTHEARAGIKAFTMPQAPNGRAVVDKVAPAFVKLFIEEDTSQIAGAIIIGEGATEMIHEMAVAVENRLTLEQIGKTVHAHPTHSKNVLLAVQHFN

SEQ ID NO: 10148 - protein, 149 aa, Brassica napus
  misc_feature (107)..(107): Xaa can be any naturally occurring amino acid
  unsure (1)..(149): unsure at all Xaa locations
MSQTVVLKVGMSCQGCVGAVNRVLGKMEGVESFDIDIKEQKVTVKGNVEPEAVFQTVSKTGKKTSYWPVEAEAEPKSVAKPKAEVETKTEVKVDAKADAEPKLAEAXTKPSQVYILKMSMRLLIRVGNASFIVGLCIVRTKRFMVSLYT

SEQ ID NO: 10149 - protein, 431 aa, Magnaporthe grisea 70-15
MPLASHLALRHGSLGYAWCLKPSRSFGGIHGRQLIPRNPWQSSVVTQRSPPSSRFRTDAWPHSRRLGHPEKGSAQSEPRLRYTEVDEHGSITQSVSSSRSELLAKYGLAPRDIRKIDSSTLSHILIRPTTVLLHLFHLKVLVQRNRVLLFDSFQSSPDASSTVSPASRSALLRDLQDRIRQPTNGSQPQTNDDTSSAPLPYEFRALEAVLGCVVTELERELYTIKGPALQLLKSLEEEVDSGLDRRKLHVLLNLHNQLSRFAQQADLVRTAVEDVLDYEDSMAALYLTDKAEGRARATFDDLTTVELLLDSYYRLFDEIAQEAQNLVVTIRNTEESVSAILDANRNLLMLLDLKFRMGTLGLAMGSFFSAFYGMNIMSHIREYLWAFPGVSATSAVLAIVTSCYGMLVLRKFVRLRLSGRGDAATAARKVR

SEQ ID NO: 10150 - protein, 255 aa, Solibacter usitatus Ellin6076
MNHNHGQKLAGKIAVITGGSSGIGLATAKRFVEEGAHVVITGRREKELKEAAAFIGRNVTTVAGDVSRLEDLDRLYVAVKEKHGHIDVLFANAGAGTIAPLAAATEAHFDQTFDVNVKGLFFTVQKALPLFKDGGSIILTSSVSNVLGLPGFSAYAASKAAVRNFARGWTLELKDRKIRVNCLSPGAIDTPALATTTGLTAEQAEQAAAQFTTQIPMGRRGMPEEIAAAVVFLASDESSYITGADLAVDGGMAQV

SEQ ID NO: 10151 - protein, 435 aa, Thermotoga maritima MSB8
MRKRVFSLLLVLAFLSVGFAQDGVTDVGWSLDMVWILISAALVFFMQAGFAMVESGFTRAKNTVNVLMKNLMDFAIGSVVFFIFGYWIMFGKHPLTFDPSTKEGLWDFAMWMFQMAFAGTAATIVSGAMAERTKFPAYLAYTGFITGIIYSVVGRWIWGGGWLAQKGFIDFAGSTVVHSVGGWAAMIGASLLGPRFGKYDSQGNPKPIPGHNIPLAALGTFILWFGWFGFNGGSTLAGTNGAIGMIILNTNLAAATGALAAMVTVWAKYGKPDASMTMNGALAGLVAITAPCAVVSPVSSLIIGAIGGVIVVFAVEFFDKVLKIDDPVGAISVHGVNGAWGTLAVGLFAESKYALASGMGDVNGLFFGGGVHQLGVQFLGVVSVFAWTVVTSFLVFWFIKKTIGLRVDRDIELKGLDIEEHGMEGYADFEIFTTR

SEQ ID NO: 10152 - protein, 330 aa, Pediococcus pentosaceus ATCC 25745
MSILVVGGAGYIGSHMVKRLVEQNRDVVVVDNLSTGHRGAVDKGVKFYEGDIRDHAFLKEVFDQEAIDTVVHFAAFSIVPESMEKPLKYFDNNTAGMVALLEEMRDHDVKRIIFSSTAATYGVPEKSPIEETDRQAPINPYGESKLMMEKIIKWADQAYGIKFVALRYFNVAGAYPDGSIGEDHGPETHLTPIILQVALGKRDQLQIFGDDYHTPDGTNVRDYVHVLDLADAHILAIDYLKAGNDSDVFNLGSSTGFSVKEMVEAAREATGEAIPAKIAARRPGDPDSLIAASQKARKILKWNPQYDDVKEIIKTAWNWTQKHPNGYEDH

SEQ ID NO: 10153 - protein, 471 aa, Escherichia coli
TTHLVWFRQDLRLHDNLALAAACRNSSARVLALYIATPRQWATHNMSPRQAELINAQLNGLQIALAEKGIPLLFREVDDFVASVEIVKQVCAENSVTHLFYNYQYEVNERARDVEVERALRNVVCEGFDDSVILPPGAVMTGNHEMYKVFTPFKNAWLKRLREGMPECVAAPKVRSSGSIEPSPSITLNYPRQSFDTAHFPVEEKAAIAQLRQFCQNGAGEYEQQRDFPAVEGTSRLSASLATGGLSPRQCLHRLLAEQPQALDGGAGSVWLNELIWREFYRHLITYHPSLCKHRPFIAWTDRVQWQSNPAHLQAWQEGKTGYPIVDAAMRQLNSTGWMHNRLRMITASFLVKDLLIDWREGERYFMSQLIDGDLAANNGGWQWAASTGTDAAPYFRIFNPTTQGEKFDHEGEFIRQWLPELRDVPGKVVHEPWKWAQKAGVTLDYPQPIVEHKEARVQTLAAYEAARKGK

SEQ ID NO: 10154 - protein, 191 aa, Cryptococcus neoformans var. neoformans
MMRNTILRSTAAMASTSFARPAVRARPVLAAARTMGAGAGVSKRGYHAKVIDHYENPRNVGNLPKGDFDVGTGLVGAPACGDVMKLQIRVGEDGVISEVKFKTFGCGSAIASSSYMTERVKGMTLDQAGAVKNTEIAKELCLPPVKLHCSLLAEDAIKSAIKDYQTKRAQRLASTNATLASSSSQPQQAAA

SEQ ID NO: 10155 - protein, 72 aa, Glycine max
LKSRGTPGDWSHIIKQIGMFTFTGLNSEQVAFMRQEYHIYMTSDGRISMAGLSMRTVPHLADAIHAAVTQLK

SEQ ID NO: 10156 - protein, 507 aa, Arabidopsis thaliana
MESKIVSKAKRLHFVLIPLMAQGHLIPMVDISKILARQGNIVTIVTTPQNASRFAKTVDRARLESGLEINVVKFPIPYKEFGLPKDCETLDTLPSKDLLRRFYDAVDKLQEPMERFLEQQDIPPSCIISDKCLFWTSRTAKRFKIPRIVFHGMCCFSLLSSHNIHLHSPHLSVSSAVEPFPIPGMPHRIEIARAQLPGAFEKLANMDDVREKMRESESEAFGVIVNSFQELEPGYAEAYAEAINKKVWFVGPVSLCNDRMADLFDRGSNGNIAISETECLQFLDSMRPRSVLYVSLGSLCRLIPNQLIELGLGLEESGKPFIWVIKTEEKHMIELDEWLKRENFEERVRGRGIVIKGWSPQAMILSHGSTGGFLTHCGWNSTIEAICFGVPMITWPLFAEQFLNEKLIVEVLNIGVRVGVEIPVRWGDEERLGVLVKKPSVVKAIKLLMDQDCQRVDENDDDNEFVRRRRRIQELAVMAKKAVEEKGSSSINVSILIQDVLEQLSLV

SEQ ID NO: 10157 - protein, 191 aa, Momordica charantia
EFDSFWFVQQWPPAVCSFQKSGSCPGSGLRTFTIHGLWPQQSGTSLTNCPGSPFDITKISHLQSQLNTLWPTVLRANNQQFWSHEWTKHGTCSESTFNQAAYFKLAVDMRNNYDIIGALRPHAAGPNGRTKSRQAIKGFLKAKFGKFPGLRCRTDPQTKVSYLVEVVACFAQDGSTLIDCTRDTCGANFIF

SEQ ID NO: 10158 - protein, 190 aa, Momordica charantia
MDSFWFVQQWPPAVCSFQKSGSCPGSGLRTFTIHGLWPQQSGTSLTNCPGSPFDITKISHLQSQLNTLWPSVLRANNQQFWSHEWTKHGTCSESTFNQAAYFKLAVDMRNNYDIIGALRPHAAGPNGRTKSRQAIKGFLKAKFGKFPGLRCRTDPQTKVSYLVEVVACFAQDGSTLIDCTRDTCGANFIF

SEQ ID NO: 10159 - protein, 389 aa, Staphylococcus aureus subsp. aureus COL
MQQHSSKTAYVYSDKLLQYRFHDQHPFNQMRLKLTTELLLNANLLSPEQIVQPRIATDDELMLIHKYDYVEAIKHASHGIISEDEAKKYGLNDEENGQFKHMHRHSATIVGGALTLADLIMSGKVLNGCHLGGGLHHAQPGRASGFCIYNDIAITAQYLAKEYNQRVLIIDTDAHHGDGTQWSFYADNHVTTYSIHETGKFLFPGSGHYTERGEDIGYGHTVNVPLEPYTEDASFLECFKLTVEPVVKSFKPDIILSVNGVDIHYRDPLTHLNCTLHSLYEIPYFVKYLADSYTNGKVIMFGGGGYNIWRVVPRAWSHVFLSLIDQPIQSGYLPLEWINKWKHYSSELLPKRWEDRLNDYTYVPRTKEISEKNKKLALHIASWYESTRQ

SEQ ID NO: 10160 - protein, 216 aa, Bordetella pertussis Tohama I
MFPKRLTDGYHAFLQGRFHSERSRYEALAEKGQKPEILLIGCCDSRVSPEVIFDAGPGEIFVVRNVANLVPPCEPDAESSFHGTSAAIEFAVNGLNVKHIVVLGHASCGGIRSFYDDGEPLSKMDFIGKWMSQISPVAERLGPSTGDRATDIKRLELAVVEESLRNLMTFPSISSRVERGELELHGTYFGVATGLLYVLDRATGQFAPWLEEDAAA

SEQ ID NO: 10161 - protein, 321 aa, Saccharomyces cerevisiae
MTIAKDYRTIYRNQIKKQIRLNQEHLQSLTHLGSQINFEVDPPKLPDPDPARKVFFFDIDNTLYRKSTKVQLLMQQSLSNFFKYELGFDDDEAERLIESYYQEYGLSVKGLIKNKQIDDVLQYNTFIDDSLPLQDYLKPDWKLRELLINLKKKKLGKFDKLWLFTNSYKNHAIRCVKILGIADLFDGITYCHYDRPIEEEFICKPDPKFFETAKLQSGLSSFANAWFIDDNESNVRSALSMGMGHVIHLIEDYQYESENIVTKDHKNKQQFSILKDILEIPLIMDVEVYRPSSIAIKEMEELEEEGEAVNWSNQQINVQSS

SEQ ID NO: 10162 - protein, 333 aa, Bacteroides fragilis NCTC 9343
MEFLTNEKLTIVGAAGMIGSNMAQTALMMKLTPNICLYDPYAPALEGVAEELYHCAFEGVNLTYTSDIKEALSGAKYIVSSGGAARKAGMTREDLLKGNAEIAAQFGKDIRQYCPDVKHVVVVFNPADITGLIVLLYAGLKPSQVSTLAALDSTRLQNELVKYLHIPASEIVNCRTYGGHGEQMAVFASTTKVQGEALTKIIDTPRMPMQDWEDLKIRVIQGGKHIIDLRGRSSFQSPAYLSIEMIAAAMGGQPFRWPAGTYVSDKKFDHILMAMETSITKEGVSYKEIQGTPEEQKEMEESYAHLCKLRDEVIAMGILPEINKWHELNKHIN

SEQ ID NO: 10163 - protein, 274 aa, Nocardioides sp. JS614
MSTRTAFDTARAEGRAALVGYLPAGFPDVAGGIDAMLAMVDAGCDVIEVGLPYSDPVMDGPTIQAAAQQALERGVRTADVLRTVEAVAATGTPTVVMTYWNPVERYGVSRFAADLANAGGAGLITPDLTPDSAQEWIAAADEHDLDKVFLVAPSSTEERLAMTTAACRGFVYATAVMGVTGARATTSDLAGPLVARARSAIAAAGADLPVGVGLGVSTGDQAAELAARNGIGADGVIVGSAFVRTLLDHPDDPAAGLRALRELTEDLAAGVRRA

SEQ ID NO: 10164 - protein, 243 aa, Arabidopsis thaliana
MIGQLMNLKATELCLGLPGGAEAVESPAKSAVGSKRGFSETVDLMLNLQSNKEGSVDLKNVSAVPKEKTTLKDPSKPPAKAQVVGWPPVRNYRKNMMTQQKTSSGAEEASSEKAGNFGGGAAGAGLVKVSMDGAPYLRKVDLKMYKSYQDLSDALAKMFSSFTMGNYGAQGMIDFMNESKLMNLLNSSEYVPSYEDKDGDWMLVGDVPWEMFVESCKRLRIMKGSEAVGLAPRAMEKYCKNRS

SEQ ID NO: 10165 - protein, 388 aa, Oryza sativa
MASEMSKNVKVTDDQEVTSQERDQSGGTKVGGEEEIAPLARQSSILSLTLEELQNSLCEPGRNFGSMNMDEFVANIWNAEEFQATTGGCKGAMEEAKVVDSGSGSGDAGGSGLCRQGSFSLPLPLCQKTVEEVWTEINQAPAHTSAPASALQPHAGSGGVAANDRQVTLGEMTLEDFLVKAGVVRGSFTGQAAMGSGMVNGPVNPMQQGQGGPMMFPVGPVNAMYPVMGDGMGYPGGYNGMAIVPPPPPAQGAMVVVSPGSSDGMSAMTHADMMNCIGNGMMIENGTRKRPHREDGCAEKTVERRQRRMIKNRESAARSRARKQAYTVELEAELNYLKQENARLKEAEKTVLLTKKQMLVEKMMEQSKEKMNANRGGSQLRRSGSCMW

SEQ ID NO: 10166 - protein, 227 aa, Haemophilus ducreyi 35000HP
MELVFIRHGFSEWNAKNLFTGWRDVNLTERGVEEAKAAGQKLLAAGYEFDIAFTSVLTRAIKTCNIVLEESNQLWIPQVKHWRLNERHYGELQGLDKKATAEKYGDEQVHIWRRSYDTLPPLLAPSDPNSAHNDRRYAHLPKEVVPNGENLKVTLERVLPFWEDQIAPALLSGKRVLVTAHGNSLRALAKHIIGISDAEIMDFEIPTGQPLVLKLDSKLNFIEKFYL

SEQ ID NO: 10167 - protein, 163 aa, Triticum aestivum
MAAMMVAARQGRELQRYSASTGGRIVVGCIPYRVRDDNGEVEVLVICSRKKGASAGVLFPKGGWELDESMDEAARREALEEAGVRGETGPSLGRWCYQSRSYEATYEGYMFPLRVTDELERWPEMSGRGRTWVTVQDAMDRCPHLWMREALQRFADRVADAAL

SEQ ID NO: 10168 - protein, 220 aa, Xylella fastidiosa Temecula1
MHSLEHLLQNNRNWCERINQEDPEFFARLSKQQSPEYLWIGCSDSRVPANQIIDMAPGEVFVHRNVANVVVHTDLNCLSVIQFAIDVLKVKHILVVGHYGCGGVLASLTRARLGLVDNWIRHVTDVAEKHNPYLETLGALADQHARLCELNVLEQVMNVCSTSIVRDAWSRTQPLSVHGWVYSLSNGLVHDLGIDVDRFEMLPSCYADALARIQADRVVR

SEQ ID NO: 10169 - protein, 55 aa, Zea mays
MAGTANCIDIILAIILPPLGVFLKFGCGHEFWICLLLTFLGYIPGIIYAIYAITK

SEQ ID NO: 10170 - protein, 344 aa, Arabidopsis thaliana
MYVIESKGGTITCMLLALLFLGTWPAIMTLTERRGRLPQHTYLDYTLTNLLAAVIIAFTLGEISPSRPNFTTQLSQDNWPSVMFAMAGGIFLSLGTLATQYAWAFVGLSVTEVITASIAVVIGTTLNYFLDDRINRAEVLFPGVACFLIAVCFGSAVHKSNAADNKSKLQGFKSLETTSSFQMETSSIKEGKAKVGTADFLIEVEKQRAIKVFGKSTIIGLAITFFAVPKLNVYTAFFYFSISSFGVGLILNIIFLYWPILGLPRSSFKAYLNDWNGRGWSFLAGFLCGFGNGLQFMGGQAAGYAAAGAVQIENKHFGGYCCLENTKDHQEKHIHFLSVCYLCS

SEQ ID NO: 10171 - protein, 244 aa, Solibacter usitatus Ellin6076
MGKLEGKVAVITGGATGIGRAAAKRFIEEGAIVFLFGRRQVELDAAVAELGPNARAVKGSVADLADLDRLYAAVKAERETLDIVFANAGAGSPITLGKITAEHIDETFDTNVKGTIFTVQKALPLMGRGGSIILTGSSAGTTGAPTMSVYSASKAAVRNLARTWAEDLKGTGIRVNVLSPGPTATELAKAALGEEGQRVYAAMTPLQRMADPAEIGAAAAFLASDDSSFMTASELAVDGGLAQI

SEQ ID NO: 10172 - protein, 434 aa, Neisseria meningitidis MC58
MKKHIWAASLLPASLSAEPLNWWKPYSAVNSGDTAWVMTAAALVLLMTLPGLALFYGGMVRKKNLLSTMMHSFSIATLVGILWVAVGYSLAFTPGNAFIGGLGRVFLSGMQIDATAQMLTVSPNAPTVPEPVFMFFQMTFAIISTAIITGAFAERMKYSAMMLFSGIWFLLVYVPGAHWVWGGGFMSKGGVLDYAGGTVVHINAGIAGLVAALVLGRRIGYGREAMPPHNMAMTLIGAAMLWFGWFGFNAGSALAADAAAGMAMAVTQVSAVFGAAGWLACEKIAGHKPSALGLASGAVSGLVGITPAAGFTGPSGAAAIGILTAAACFVSVTVVKHKLRYDDSLDAFGIHGFGGLVGGILTGIFFDNRIFGGDAAVWQQLWIQVKDGVVMAAYSGLMSWAILKVVGKICGGLRVGKDVEREGLDLNIHGERVE

SEQ ID NO: 10173 - protein, 358 aa, Clostridium thermocellum ATCC 27405
MKPNSDKKAILLELIEKGKQKGMLTYQEIMDAFEEVDIDPEQIEKIYETLENMGIDVVGDIEAEMEDIQLTEDNLDLSIPEGISIDDPVRMYLKEIGKVPLLTAEEEIELAHRIEQGDAEAKRRLAEANLRLVVSIAKRYVGRGMLFLDLIQEGNLGLIKAVEKFDYRKGFKFSTYATWWIRQAITRAIADQARTIRIPVHMVETINKLIRVSRQLLQELGREPHPEEIAKEMNMPVEKVREIMKISQEPVSLETPIGEEEDSHLGDFIPDDDAPAPSEAAAFTLLKEQLVDVLDTLTPREEKVLRLRFGLDDGRARTLEEVGKEFNVTRERIRQIEAKALRKLRHPSRSKKLKDYLD

SEQ ID NO: 10174 - protein, 395 aa, Magnaporthe grisea 70-15
MAIAQEQELVLITGATGHVGSTTLAHLIRAGYNVRAVVRSEAKSAQLLARPSIQRAIKHSRRWSNRYRNQLTTTTSTGQLSFVVVPDITAPGAYDDAVVGATLVVHIASPLVTADTVPLSKHEEYFLRPAVRGTLGLLEAARAAGTVRRVVITSSIVSLVPVDRMEGNLSPEEARSLPPVQPTDRVRDADGPYTSEFAAYHGSKVASLAHAEEWVARECPGFDVVYLHPSFVLGHNDAATTPAQALKGTNAVVLAMLLGQRFGPYAGATVHVEDVARAHVAALAVDRVPGNQSYILSGPRPTTWNDAKEIVERRFPEAIKSRMLVTRGSVDTTYLPFDVSLTEETFGFEFTSFEEQVVSTVGQFIELRMQQKAALSRKNAAVRARDTLPSVRANA

SEQ ID NO: 10175 - protein, 332 aa, Magnaporthe grisea 70-15
MATMRAVAFDKTGDSSVLSLREDMPKPTASASQILVKVEWHGINFIDTYMRTGLYQFATPPPHVSGTEGGGIVEAVGAEVPADYGLEVGDRVAFMKSPSAAEYAAVNPNLCFKLPEGVSTKDGAAFLLQGLTAWTLVRDAHEVKPGEVVLVQAAAGGTGGLVVQMCKHLGATVIGTVSTDAKAKLAREHGCDHVVVYTRDDVLKAVNEITHDLGCHAVFSGVGKATFEQDLAATRRKGSFITFGNASGAVEPFSLFKLTARNVRLMRPTLFNFVATREEWDARCRELFDLLAKGVVKTHIGGVYDLSEVAKAQDDLTGQKTVGKLLVKVAKD

SEQ ID NO: 10176 - protein, 439 aa, Pasteurella multocida subsp. multocida str. Pm70
MEVIMNSSIVKLPNKYELVKDTLVLILAGGRGSRLYELTDKRAKPALYFGGNRRIIDFALSNCLNSGLNRIGVVTQYAAHSLLRHLQNGWSFLPAERGEFIDMLPARQQIDDSTWYRGTADAVYQNMAIIRDHYCPKYILILAGDHIYKQDYSQMLLDHIHSGAKCTVGCIEVEREKATEFGVMAVNENLKVKSFVEKPKDPPAMVGKPNTSLASMGIYVFDADYLYDVLEREVSSPYTSHDFGKDILPKALEEGVLYAHPFSRSCMGRNTEGEIYWRDVGTLDSFWQSNIDLVCENPQLDIYDQSWPIRGNPVQTYPSKFFYKKENARPVDNSLISGGCVITDASISYSVLFDRIKINEGSQIDHCVVLPQVTIGKNCKLKRCIIDRHSVIPDGMEIGVDLELDRQRFRVSSGGVVLVTPSMLKKLNGEEVASEAHLD

SEQ ID NO: 10177 - protein, 350 aa, Glycine max
  misc_feature (170)..(170): Xaa can be any naturally occurring amino acid
  misc_feature (204)..(204): Xaa can be any naturally occurring amino acid
  unsure (1)..(350): unsure at all Xaa locations
MRLGFASWRFIPCTLVAFLILQDSGARKIATTSGKEIQLKEEVSYDLQKLATEGLVLDSIIQLEGADIEKKKHVHKDDDEDEDDRVKKGMGFDKEEDEEEDKDEHKKMVGKDVHGYKPSHKHMDLELNVFFTPNDLKVGKIMPVYFSKKNSSTSPKFLTREEADQIPFLXKHLPSLLKFFSIPQHSPQAKAMKYTLKQCEFEPXEGETKFCATSLESLFDFAHYLFGSNAQFKVLTTVHLTNSTALLQNYTISEVKVISVPNVIGCHPMPYPYAVFYCHSQHSDTNLYEVMVEGENGGRVQAAAICHMDTSKWDRDHVSFRVLKVQPGTSPVCHFFPPDNLVWVPLPLPP

SEQ ID NO: 10178 - protein, 533 aa, Methanococcus maripaludis S2
MKYIFVTGGVVSSLGKGITSSSLGRLLKARGLNVNMIKIDPYLQIDAGTMSPFEHGEVFVTDDGGETDLDLGNYERFVDIGLKADNNITTGKIYWSVLSKERKGDYLGKTVQVIPHITNEIKDRIKNLGKESDITIIEIGGTVGDIESLPFLEAIRQFKKDVGKENVLYIHVSLLPYIRSAGELKTKPTQHSVKELKGIGIQPDILVCRSEIPISEKIKDKLALFCDVEKEAVIECKDARTIYEVPLNLEKEGLGKLVTEKLNLRDSTPDLTEWRAIVDRIINPMNEITIGIVGKYIELKDSYMSIMEALGHAGAKNDTKVNIAWINSEELETKNYEEILNKMVDDEKLHGILVPGGFGDRGIDGKVNAVRYAREKNIPFLGICLGMQCAVIEFARHVCGLNANSTEFDEETEHPVIDYIPEQREVTEKGGTMRLGAYPAVLTENSLASELYGSINASERHRHRYEVNPEYHEILKKNGLIISGMSPDGKLAEFIELENHKYFIATQAHPEFKSRPNKPHPLFHGLVKASIEK

SEQ ID NO: 10179 - protein, 449 aa, Cicer arietinum
MREILHVQGGQCGNQIGSKFWEVICDEHGIDQTGKYISEGGSDTQLERINVYYNEASGGRYVPRAVLMDLEPGTMESIRSGPFGKIFRPDNFVFGQSGAGNNWAKGHYTEGAELIDSVLDVVRKEAENCDCLQGFQVCHSLGGGTGSGMGTLLISKIREEYPDRMMLTFSVFPSPKVSDTVVEPYNATLSVHQLVENADECMVLDNEALYDICFRTLKLSTPSFGDLNHLISATMSGVTCCLRFPGQLNSDLRKLAVNLIPFPRLHFFMVGFAPLTSRGSQQYVSLTVPELTQQMWDAKNMMCAADPRHGRYLTASAMFRGKMSTKEVDEQIINVQNKNSSYFVEWIPNNVKSSVCDIPPKNLKMSSTFIGNSTSIQEMFRRVSEQFTAMFRRKAFLHWYTGEGMDEMEFTEAESNMNDLVAEYQQYQDAIAEEEDEYEEEGEEQYDEQ

SEQ ID NO: 10180 - protein, 624 aa, Actinidia chinensis
MPPGMEFHHIVPHEGDMDGETEGNEDQPTSPDPPIWPEIVRFFTNPLKPMILALARPDPKKNLATLVEAFGECRPLRELANLTLIMGNRGDVDEMSSTNSSVLLSILKLIDKYDLYGQVAYPKHHKQSDVPDTYRLAAKTKGVFINPAVIEPFGLTLIEAAAYGLPIVATKNGGPVDIHRALDNGLLVDPHDQKSIADALLKLVADKQLWSKCRQNGLKNIYLFSWPEHCKTYLSRIAACKLRQSWWQRSDDGDENSESDSPSDSLRDISLNLKFSLDGEKNEGSGNADSSLEFEDRKIKLENAVLTWSKGFQKGTQKAGVTEKADTNITAGKFPVLRRRKNIIVIAVDFGAISDYSDSIRKIFDAVEKERTEGSIGFILATSFTLSEVHSFLISGGLSPSDFDAFICNSGSDLYYSSLNSEDNPFVVDLYYHSHIEYRWGGEGLRKTLIRWTGSINDKKGENEEQIVTEDEKISTNYCYAFKVRNAGKVPPVKEIRKLMRIQAHRCHVIYCQNGNKINVIPVLASRSQALRYLYLRWGVDLSKMVVFVGESGDTDYEGLLGGIHKSVILKGVCSGPTNQLHANRTYPLSDVLPIDSPNIVQAAEECSSADLRTSLLKLGFIKG

SEQ ID NO: 10181 - protein, 484 aa, Erwinia carotovora subsp. atroseptica SCRI1043
MSGNHLQDHELFKTGYFVAGKWQQGAATFEVVNPATGESIARVAKAGKKETQAAIDAAHAAFPAWKRKTAKERSEILYRWYELILENKRYLAELMTAEQGKPVQEAEGEVVYAANFIQWFAEQGKRVNGEIIPPAKPGSKIYATREPVGVVVAITPWNFPLAMLTRKLGPALAAGCTGVIKPANNTPLSAFALLALAQQAGVPDGVLNGVAGDTQAISDTVMASDKVRKISFTGSTAVGKTLVRNAADTMKKVSMELGGNAPYIVFDDADIQAAVKGAIANRFRNAGQVCVSANRFYIQDGVYDEFVSLLAEEVKKLKVGNGMDDGVVLGPLIDEAAVEKVEKHVNDAVEKGGKALVGGKRHKLGHSFFEPTVIVDANEAMLLAQEETFGPVAPCFRFKTEEEVIQRANNTPFGLAAYFYSQNLQRVFRVAEALESGMIGINECAVSTELAPFGGVKESGLGREGSVLGLDEFLEVKTWHVGGL

SEQ ID NO: 10182 - protein, 573 aa, Elaeis guineensis
MAGYSVAAPLCTWLVAACVTASGGKEGPLAAPAPAVGEARRLSRSARRRRAAALRLDARDSSGGLMSALRGSGIQGLMSSCLAFEPCAEFYGSKGASAFFGESGFSLFGTSKAETTRRQRRAARASCVSGKAMAVAVQPAKEIAEKKRTHTKKRRVVVTGMGVVTPLGVDPGIFYNNLLDGVSGISQIETFDCTNYPTRIAGEIKSFSTDGLVAPKLSKRMDKFMLYLLIAGKKALANGGVTEEVMSQLDKAKCGVLIGSAMGGMKVFNDAIEALRVSYKKMNPFCVPFATTNMGSAILAMDLGWMGPNYSISTACATSNFSILNAANHIIRGEADVMLCGGSDAAIIPIGLGGFVACRALSQRNSDPTKASRPWDIDRDGFVMGEGAGVLLLEELEHAKQRGANIYAEFLGGSFTCDAYHMTEPHPEGAGIALCIENALAQAGVAKEDVNYVNAHATSTPAGDLKEYQALIRCFGQNPELRVNSTKSMIGHLLGASGAVEAVAAIQAIRTGWVHPNVNLENPEKSVDINVLVGSRKERLDVKVALSNSFGFGGHNSSILFAPTNSHGKNFRC

SEQ ID NO: 10183 - protein, 1156 aa, Actinidia chinensis
  misc_feature (201)..(201): Xaa can be any naturally occurring amino acid
  misc_feature (217)..(217): Xaa can be any naturally occurring amino acid
  unsure (1)..(1156): unsure at all Xaa locations
MAGNDWINSYLEAILDVGPGIDDAKSSLLLRERGRFSPTRYFVEQVIGFDETDLYRSWVKAAATRSPQERNTRLENMCWRIWNLARQKKQLEGEEAQRMAKRRLERERGRREATADMSEDLSEGEKGDTVSDLSAHGESNRGRLPRISSVETMEAWVSQQKGKRLYIVLISLHGLIRGENMELGRDSDTGGQVKYVVELAXALGSMPGVYRVDLLTXQVSSPEVDWSYGEPTEMLPPRNSDVLMDEMGESSGAYIIRIPFGPRDKYVPKELLWPHVPEFVDGALNHIIQMSKVLGEQIGSGHPVWPVAIHGHYADAGDAAALLSGALNVPMLFTGHSLGRDKLEQLLRQSRLSKDEINKTYKIMRRIEAEELSLDASEIVITSTRQEIEQQWRLYDGFDPVLERKLRARIRRNVSCYGRFMPRMVVIPPGMEFHHIVPHEGDMDGETEGNEDQPTSPDPPIWPEIMRFFTNPRKPMILALARPDPKKNLTTLVEAFGECRPLRELANLTLIMGNRDDVDEMSSTNSSVLLSILKLIDKYDLYGQVAYPKHHKQSDVPDIYRLAAKTKGVFINPAFIEPFGLTLIEAAAYGLPIVATKNGGPVDIHRALDNGLLVDPHDRQSIADALLKLVADKQLWAKCRQNGLKNIHLFSWPEHCKTYLSRIAACKLRQPWWQRSDDGNENSESDSPSDSWRDIQDISLNLKFSLDGEKNEGSGNADSSLDFEDRKSKLENAVLTWSKGVQKGTQKAGLTEKADQNSTAGKFPALRRRKNIVVIAMDFGAISDLSESIRKIFDAMAKERTEGSIGFILATSFTLSEVQSFLISGGLSPSDFDAFICNSGSDLYYSSLNSEDNPFVVDLYYHSHIEYRWGGEGLRKTLIRWAGSITDKKGENEEQIVTEDEKISTNYCYAFKVQNAGKVPPVKEIRKLMRIQALRCHVIYCQNGNKINVIPVLASRSQALRYLYLRWGVDLSKMVVFVGESGDTDYEGLLGGIHKSVILKGVCSGPTHQLHANRTYPLSDVLPIDSPNIVQAAEECSGADLRTSLGKLEFIKGQKFCTIALRVSLSMVVIWSFLNASRSLTFFGKYIHHHSWKCPEACVWFLHENLVTIHSFVFLPVSLDQKSILRWFCWHIESNLSCTSIVIFVLERIMEPYRVK

SEQ ID NO: 10184 - protein, 655 aa, Actinidia chinensis
DGFDPVLERKLRARIRRNVSCYGRFMPRMVVIPPGVEFHHIVPHEGDMDGETEGNEDQPTSPDPPIWPEIMRFFTNPRKQMILALARPDPKNNLTTLVEAFGECRPLRELANLTLIMGNRDDVTEMSSTNSSVLLSILELIDKYDLYGQVAYLKHHKQSDVPDIYRLAAKTKGVFINPAFIEPFGLTLIEAAAYGLPIVATKNGGPVDIHWALDSGFLVDPHDRQSIADALLKLVVDKQLWAKCRQNGLKNIHLFSWREHCKTYLSRIAACKLRQPWWQRSDDGNENSESDSPSDSWRDIQDISLNLKFSLDGEMNEGTGNADSSFEFEDRKRKLEKAVLTWSVQKSTQKSGLTEKADQDSTAGKFPPLRRKNIIVIAVDFGAISDLSESIRKIFDAVAKERTEGSIGFVLATSFTLSEVQSFLISGGLSPSDFDAFICNSGSDIYYSSLNPEDNPFVVDLYYHSHIEYRWGGEGLRKTLIRWAGSITDKKGENEEQIVTEDEKISTNYCYAFKVRSAGKVPPVKEIRKLMRIQALRCHVIYCQNGNKINVIPVLASRSQALRYLYLRWGVDLSKMVVFVGETGDTDYEGLLGGIHKSVILKGVCSGPTHQLHANRTYPLSDVLPIDSPNIVQAAEKCSGADLRTSLGKLGFIKC

SEQ ID NO: 10185 - protein, 395 aa, Thermotoga maritima MSB8
MRAVRLHAKWDPRPEFKLGPKDIEGKLTWLGSKVWRYPEVRVEEVPEPRIEKPTEIIIKVKACGICGSDVHMAQTDEEGYILYPGLTGFPVTLGHEFSGVVVEAGPEAINRRTNKRFEIGEPVCAEEMLWCGHCRPCAEGFPNHCENLNELGFNVDGAFAEYVKVDAKYAWSLRELEGVYEGDRLFLAGSLVEPTSVAYNAVIVRGGGIRPGDNVVILGGGPIGLAAVAILKHAGASKVILSEPSEVRRNLAKELGADHVIDPTKENFVEAVLDYTNGLGAKLFLEATGVPQLVWPQIEEVIWRARGINATVAIVARADAKIPLTGEVFQVRRAQIVGSQGHSGHGTFPRVISLMASGMDMTKIISKTVSMEEIPEYIKRLQTDKSLVKVTMLNE

SEQ ID NO: 10186 - protein, 548 aa, Glycine max
  misc_feature (69)..(69): Xaa can be any naturally occurring amino acid
  unsure (1)..(548): unsure at all Xaa locations
MTTSFSDLLSSPTTNHHNLGVFERPHHESYSSDQTGSSGGVPKFKSTPPPSLPLSHHLPPIFSPSSYFXLNIPHGLSLAELLDSPVLLNSSNVLPSPTTGSFAGQGFNWKSSYGESQQHVKEEDKSFSSFSFQTQTHPPLPSSNGFQSSTGVVQTGWSFPEIAKQDGFASRISMSMVKTETTSAMQSLTPENNNHRNGFQSDHKNYQPQQVQTLSRRSDDGYNWRKYGQKQVKGSENPRSYYKCTYPNCPTKKKVEKSLDGQITEIVYKGTHNHPKPQAAKRNSLSASSSLAIPHSNHGSNELPHHQMDSVATPENSSISMDDDDFDHTKSGGDEFDNDEPDAKRWRIEGENEGISAVGSRTVREPRVVVQTTSDIDILDDGYRWRKYGQKVVKGNPNPRSYYKCTFPGCPVRKHVERASQDLRAVITTYEGKHNHDVPAARGSGNNSISRSLPIITNTTNNTTSVATSISTNNNSLQSLRPPAPPERPSLSHFNPNMQHSSGSFGFSGFGNPLMGSYMNQQSYNNVFTTTRDKEEPGDDSFLDSLLC

SEQ ID NO: 10187 - protein, 394 aa, Zea mays
MMDRHMEEDSSTFLQWAMNHLQHPAAATAVSAAYQQQDGGAGVGVRISGGAGDQEDSAAAFPSLQALRASQPQAVPGSVRVRNLTVQVADYGGLTNSSSSGDSPGAAMDHDAAAGWSPHTARSRTTGLGGGSNSRSVSWNFSAASAQPAYDRGAVTVALPDAPAAVARAQQRAASSAGRRGGGAGPSTAAAPASSPGPVQDHIIAERRRREKINQRFIELSTVIPGLKKMDKATILGDAVKYVRELQEKVKGLEEEGGAGGSGGIQSAVLVKKQLPPEDDAMASSHGGSGDHGGDGGGMPLPEIEARLSERSVLLLRIHCYSARGLLVRVISEVEQMQLSITHTNVMPFPASTAIITITAKVEDGFNATVDEIVRRINSALHQHYSSSSEETRG

SEQ ID NO: 10188 - protein, 521 aa, ASPERGILLUS NIDULANS FGSC A4
MVTLSRVSQESSSHRQRREIRDISVQTTEYAGVYGTKYAAEELPLYVMNDNGMPPDVAEQMIRDELSLDGNPLLNMASFVTTYMEPQVETLMAAAMRKNFIDFEQYPQSARMQTRCVNMIADLFNAPTNQESKEGTEHGESEGAEGAMGTSTVGSSEAIMLALLAMKKTWHKKRSDAGKDTSHPNIIMNSAVQVCWEKAARYFDVEERYCYCTDDRYVIDPVQAVELVDENTIGICAIMGTTYTGHYEDVKAINDLLVQRNIDCPIHVDAASGGFVAPFICPELVWDFRLEKVVSINVSGHKYGLVYPGVGWIFWRSPEYLPRELVFNINYLGSEQATFTLNFSKGASHIIGQYYQLIRLGRNGYKAIMQNLVQVSQNLARGLSDLGLLILSDNTGNGSGGVPLVAFRLPDDESRLFDEFAVSAVLRRRGWVVPAYTMAPRSNNLKLMRIVVREDFTAHRCGILIQDIKMAIEWLEEMDETTIQRYTTYLAQHGTRLPNAHSFYKDEHSLHGKTGKTHAVC

SEQ ID NO: 10189 - protein, 530 aa, Neurospora crassa
MALETQTKTVVGQFDYSDEDVNKGVVEFLRQMAEGLEKDGASMSQIPTYVTAVPNGTEKGLYMAVDLGGTNFRVCSIQLNGDTTFRLTYTKVAIPRELMVAKTAEELFAFLAKQVEIFLRTHHGEHFEAHIRRRMTMSSPEGFKDENVFRLGFTFSFPVQQLGINKGTLIRWTKGFDIPDAVGKDVCALLQTEIDKLHLPVKVAALVNDTVGTLMARSYSSPGKSGAILGAIFGTGTNGAYVEKLSNIKKPLAGEYDKSTGEMVINTEWGSFDNQLKVLPNTPWDVQLDLATPNPGIQMYEKRVSGMYLGEILRLTVIDLLKNPDVALFKDDNSSYNDWKSTTNIAEHSPIYKQWGLDTSVLSVAAADSTPELSILRQELEANLHIYAPSLEDAQAFKAIAGAIGRRAARLSAVAIAAIVLQTGKLNDPEQDEPIDIGVDGSLVEHYPYFRDMIYEALRVIKGIGEEGAKRIRIGIAKDGSGVGAALIALVAARMEKSTSTADFISDLRLNAKKTDLTAVPEDSELAAGE

SEQ ID NO: 10190 - protein, 188 aa, Brassica napus
  misc_feature (16)..(16): Xaa can be any naturally occurring amino acid
  misc_feature (21)..(22): Xaa can be any naturally occurring amino acid
  misc_feature (28)..(28): Xaa can be any naturally occurring amino acid
  misc_feature (31)..(31): Xaa can be any naturally occurring amino acid
  misc_feature (35)..(36): Xaa can be any naturally occurring amino acid
  misc_feature (40)..(40): Xaa can be any naturally occurring amino acid
  misc_feature (46)..(47): Xaa can be any naturally occurring amino acid
  misc_feature (54)..(55): Xaa can be any naturally occurring amino acid
  misc_feature (60)..(60): Xaa can be any naturally occurring amino acid
  misc_feature (62)..(62): Xaa can be any naturally occurring amino acid
  misc_feature (68)..(69): Xaa can be any naturally occurring amino acid
  misc_feature (72)..(72): Xaa can be any naturally occurring amino acid
  misc_feature (80)..(80): Xaa can be any naturally occurring amino acid
  misc_feature (87)..(87): Xaa can be any naturally occurring amino acid
  misc_feature (100)..(101): Xaa can be any naturally occurring amino acid
  misc_feature (103)..(103): Xaa can be any naturally occurring amino acid
  misc_feature (109)..(109): Xaa can be any naturally occurring amino acid
  misc_feature (111)..(111): Xaa can be any naturally occurring amino acid
  misc_feature (120)..(120): Xaa can be any naturally occurring amino acid
  misc_feature (135)..(135): Xaa can be any naturally occurring amino acid
  misc_feature (138)..(138): Xaa can be any naturally occurring amino acid
  misc_feature (157)..(157): Xaa can be any naturally occurring amino acid
  misc_feature (182)..(182): Xaa can be any naturally occurring amino acid
  unsure (1)..(188): unsure at all Xaa locations
IRVTWLGIKTGWIAPXTHYRXXRPPPCXCAXPAIXXHHFXPLHVWXXPTVNQSXXPHVFXKXLPPPSXXMAXPPFWVSDXPYWPRVXNGPAPYFPTVATXXRXPPVAGXPXGMPPHHTVXKPDHGYGGSRSLVDXHPXKESVDAAIGDVLTRPWLPXPLGLKPPAVDGVMTELHRHGVSEVXPTAPCA

SEQ ID NO: 10191 - protein, 469 aa, Bacillus halodurans C-125
MVVGDFAKEVDTLVIGSGPGGYVAAIRAAQLGQSVTIVEKGTLGGVCLNVGCIPSKALISAGHRYHNALHSDDLGIKAENVTLDFSKVQEWKASVVNKLTGGVEGLLKGNKVEIIKGEAYFASEDSVRIMDEKNATTYKFKNCIIATGSRPIELPNFKYSKRIINSTGALALEEVPKKLVVIGGGYIGIELTGAYSNLGSDVVVLEGGKQILPGFEKQMAKLVERKLKKNGVSFHTEAMAKGVEETEDGVKVTAEIKGKEEVFEADYVLVTVGRKPNTDELGLEQIGVELTERGLIKVDKQCRTNLSNIYAIGDVIEGPALAHKASYEGKIAAEAIAGEKSEIDYLAIPAVVFSDPELATVGYTETEAKEAGYDVTAAKFPFAANGRALSLNDADGFMKLITRKEDGLVIGAQIAGPNASDMIAELGLAIETGMTAEDIALTIHAHPSLGEITMEAAEVALGTPIHIVK

SEQ ID NO: 10192 - protein, 124 aa, Solanum tuberosum
GCITTKELGTVMRSLGQNPTEAELQDMINEVDADGNGTIDFPEFLNLMARKMKDTDSEEELKEAFRVFDKDQNGFISAAELRHVMTNLGEKLTDEEVDEMIREADVDGDGQINYDEFVKVMMAK

SEQ ID NO: 10193 - protein, 544 aa, Methanocaldococcus jannaschii DSM 2661
MRDMCSISGIIVKDNQISAKYSIDMMKILKHRGRDNSGLLLDDEVIYFNDFEDVEDLEEEMIGNLSLAHNRLAIVGRYGVQPIPNEDETIWLVCNGEIYNYIELREYLKQNHEFRTDSDNEVIIHLYEEEKLEELDGDYAFAIYDKSKNVVRLARDMFGVKPLFYVDRDKYFAFASERKALWHLLINIDGCERDLDELNSKIKTLKPNSQLIYYLDDNRFEIIEGFKKLELNYMKERSYEEAKEYLDRALKNSVLKRVRGLDKVGIICSGGVDSSLIAKLASLYCEVILYAVGTENSEDLIYAERLAKDLNLKLRKKIISEEEYEEYVFKVAKAIDEVDLMKIGVGIPIYVASEMANEDGLKVVLSGQGADELFGGYARHERIYRERGEEELKKELLKDVYNLYKVNLERDDHCTMANGVELRVPFLDEEVVEIALSIPIEYKMSELSNRPYAESNISLKSEPINGLKNTNLNIKCVRSVRKKILRDVASQYLPDYIAYRPKKAAQYGSGGEKMIYKVAKKYGFSKKRINEFLDMLKRKIVSEF

SEQ ID NO: 10194 - protein, 316 aa, Arabidopsis thaliana
MNAYSVSLDFTKPSLFTRITLSSQIPLTMATTVNKTVRVAAAQMTSVNDLMTNFATCSRLVQEAALAGAKLICFPENFSFVGDKEGESVKIAEPLDGPVMERYCSLARDSNIWLSLGGFQERFDDTHLCNTHVVIDDAGMIRDTYQKMHLFDVDVPGGSSYKESSFTVPGTKIVSVDSPVGRLGLTVCYDLRFPKIYQQLRFEQKAQVLLVPSAFTKVTGEAHWEILLRARAIETQCYVIAAAQAGKHNEKRESYGDTLIIDPWGTVVGRLPDRVSTGIVVADIDFSLIDSVRTKMPIDKVKIQTSQTCFSVGPNG

SEQ ID NO: 10195 - protein, 262 aa, Arabidopsis thaliana
MEEIADKTFFRYCLLTLIFAGPPTAVLLKFLQAPYGKHNRTGWGPTVSPPIAWFVMESPTLWLTLLLFPFGRHALNPKSLLLFSPYLIHYFHRTIIYPLRLFRSSFPAGKNGFPITIAALAFTFNLLNGYIQARWVSHYKDDYEDGNWFWWRFVIGMVVFITGMYINITSDRTLVRLKKENRGGYVIPRGGWFELVSCPNYFGEAIEWLGWAVMTWSWAGIGFFLYTCSNLFPRARASHKWYIAKFKEEYPKTRKAVIPFVY

SEQ ID NO: 10196 - protein, 228 aa, Agrobacterium tumefaciens str. C58
MHSKVPPQTQIFSQEFAAFLFDMDGTLVNSIAVVERVWREWAVANGIEPNAFLQRIHGMRASEVIRREAVPGLDVDAEADMILRAEMDDVEGIIPIPGAADFLASLPAGKWAIVTSAVRELAEKRLAAAGITPPPVMICADDVVNGKPDPEGYRKAAERLGVAPESCVVFEDAPAGIQAGERMGAAVVVINVTHSHPIETPHLAIGSYGELDVVIDGNGGLKLTSSKA

SEQ ID NO: 10197 - protein, 361 aa, Bacillus halodurans C-125
MSTKTLEKVEGQFETFQILNEEGEVVNEAAMPDLSDEQLQELMKRMVYTRIWDQRAISLNRQGRLGFYAPVAGQEASMLGSQFALDKEDWILPGYRDIPQIVFHGLPLYQAFLYSRGHFEGGQIPDGVNVLMPQIIIGAQIVQAAGVAMGLKRKGKQNVAITYTGDGGASQGDFYEGMNFAGAYNSPAIFVVQNNRFAISVPVEKQSAAKTIAQKAVAAGIEGIQVDGMDVLAVYAATKQARERALAGDGPTLIETLCYRYGPHTMAGDDPTRYRSSDLDDEWEKKDPLVRFRKFLEGKGLWSEEQENEVVEKAKEDIKAAIKKADAAPKQKVTDLIGFMFEEAPQHLREQLEEYTAKESK

SEQ ID NO: 10198 - protein, 229 aa, Zea mays
MLRSSFRLLYITRTNLLVRASPSSLSRLPSKFTSAKPLVSSHHQIPLSTTGAKLSRSEHSMAASSEPKSIYDFIVKDAKGNDVDLSTYKGKVLLIVNVASQCGLTNSNYTELAQLYQKYKDHGFEILAFPCNQFGNQEPGSNEEIVQFACTRFKAEYPIFDKVDVNGDSAAPIYKFLKSSKGGLFGDGIKWNFAKFLVDKDGNVVDRYAPTTSPLSIEKDLKKLLGVTA

SEQ ID NO: 10199 - protein, 458 aa, Candida glabrata CBS138
MGKDKQHVNVVVIGHVDSGKSTTTGHLIYKCGGIDKRTIEKFEKEAAELGKGSFKYAWVLDKLKAERERGITIDIALWKFETPKYHVTVIDAPGHRDFIKNMITGTSQADCAILIIAGGVGEFEAGISKDGQTREHALLAFTLGVRQLIVAVNKMDSVKWDESRFAEIVKETSNFIKKVGYNPKTVPFVPISGWNGDNMIEATTNASWYKGWEKETKAGVVKGKTLLEAIDAIEPPTRPTDKPLRLPLQDVYKIGGIGTVPVGRVETGVIKPGMVVTFAPAGVTTEVKSVEMHHEQLTEGLPGDNVGFNVKNVSVKEIRRGNVCGDSKNDPPKAAASFNATVIVLNHPGQISAGYSPVLDCHTAHIACKFEELLEKNDRRSGKKLEDSPKFLKSGDAALVKFVPSKPMCVEAFSDYPPLGRFAVRDMRQTVAVGVIKSVDKTDKAGKVTKAAQKAAKK

SEQ ID NO: 10200 - protein, 603 aa, Xylella fastidiosa Temecula1
MTVIEIKVPDIGDYSKVPVIEVLVTVGDHLVKNQGILTLESDKATLEVPSMNNGIVKELKVNVGDLLSQGDVILLLETEDTTAPPSPSNAATSDTTSPPPPSPQPAASKPTAPDQQHSDIKCRMVVLGAGPGGYTAAFRAADLGLDTVLVERYPNLGGVCLNVGCIPSKALLHAAAVIDEAAHASTFGIDFGKPKITLDTLREYKQNVVNKLTAGLAGMAKQRKVRTVTGIAHFVSPNTLDITAADGSTQRLHFQQCIIATGSHPVKLPNFPWDDPRIMDSTDALELAEVPKKLLVVGGGIIGLEMATVYNALGSHVTIVEFMDQIIPGTDKDLVKPLADRMKKQGIEIHLNTKASHVKADKKGITVSFEAPTQGTQPALKTSTYDRVLVAVGRTPTGNNIGAEKAGVNVTERGFIPVDRQMRSNVPHIFAIGDIVGNPMLAHKATHEGKLAAEVAAAETESGKHREWVARVIPSVAYTNPEIAWIGITETEAKAKGLNIGVAKFPWVASGRAIGIGRTEGFTKLIFDEDTHRIIGGAIVGVHAGDLLAEIGLAIEMGAEAEDISHTIHAHPTLSESIAMSAEVYDGTITDLYLPKKSATSAK

SEQ ID NO: 10201 - protein, 460 aa, Arabidopsis thaliana
  misc_feature (436)..(436): Xaa can be any naturally occurring amino acid
  unsure (1)..(460): unsure at all Xaa locations
MTSISDKFILVNGGNCLGFGCFSEPYTFLVREYFNHVLAKFPFEFGISQQDNFSMLQSNSAGGEDNPDFKWGAKRGVGRKDNKVRFYESFTLEGIEYRLFDCAYFYVHGQSETSIGKLVTFTRHQQRFLGEYEPQWDELFLACGDEKGVSNINDVETIMGKCNVVCTSDDRRNPRPGTKELRRAKYIFSRTFDTRLRIISEDFADAIAGIGVDKLFNMRRDKQPVKRLNSSAAAITRASPVKSFRPDLGSTKLGSSVNAKPSKKRKLILNTPETDDSDDQGPQSGEKKLIKNPPLVEKAPSQNIEKKSWYKKLPFEDELKPAIEKGRVLLIENLEPSYTSLEVEFLFRQAFKEGVDAKMIPSSPMSSPHSGRALVIFGTTKAADSAMSRLNEDCLMLSGQRALTGSKNVPVEIGRCRSFTGHFNMVDRSLMTAQKXVISLVMVTHRKPNSPCQITEYYKL

SEQ ID NO: 10202 - protein, 500 aa, Kluyveromyces lactis NRRL Y-1140
MSDSVDVKAIPKELLSASSEIVYDAIVVGCGVVGPCIATGLARKGKKVLIVERDWTMPDRIVGELMQPGGLRALRSLGMIQAINNIDAIPVTGYSVFYNGEKVSIPYPYKADTAPVEKISDLVFDGNDRVIEDKTVHVKDFEDDDRERGVGFVHGKFLQNLRDIVAKEPNVTRLQGNVIEILRSKENEVVGAKVEIPGRGKEDFKAHLTFVCDGIFSRFRKELSPDHIPSVGSSFVGMSLFHANIPSKNHGHVILGTSHMPVLVYQISSEETRILCAYNSARLPKDIKSWLTTDVKPYLPKSLLPSFDKAVEDGKFRSMPNSYLPAKQNTVTGLCVIGDALNMRHPLTGGGMAVGLNDVALLIKTVGDLDFSDRETVLDELLEYHFERKQYDSVINVLSIALYSLFAADNRNLQVLQRGCFKYFERGGDCIRLPVSFLAGVLPKPFLLTKVFFSVALYSIYVNFQERGILGSPLALLEAFAILFTAAKVFTPYLFKELIG

SEQ ID NO: 10203 - protein, 879 aa, Pasteurella multocida subsp. multocida str. Pm70
MIQQYSTMRNNISMLGRFLGETISDAQGSDILELIENIRVLSRNSRHGDDQARNALLNTLATISNENIIPVARAFSQFLNLTNIAEQYQTISRHHHDHVASERSISALFKRLKAQQVPKENVMETVQKLLIELVLTAHPTEVTRRSLVHKHVEINKCLSKLEHTDLTDAERKAIERRLLQLIAQAWHTNEIRTQRPTPFEEAKWGFAVIENSLWQAVPEFLRHLNTSAVEYFGFHLPVELNPIRFSSWMGGDRDGNPFVTAEVTRQVLRLARWKAADLFLTDIQALSDELSVVKCTPEFQAKYGSHVEPYRTVVKALRSKLTATLAYYDDLLANRTPRVAEEDIITQDAQLWEPLYDCYQSLQACGMRIIANGLLLDCLRRIRCFGVTLSRLDIRQESTRHAEAIAEITRYIGLGDYAQWSESDKQAFLIKELSSRRPLLPREWQPSAATQEVLDTCRVIAEQPEGVISCYIISMAKTASDVLAVHLLLKESGVPYHLPVVPLFETLDDLRASEQVMSELFNIGWYRGVINNKQMVMIGYSDSAKDAGMMAASWAQYCAQEALVNLCDKCNIELTLFHGRGGTIGRGGAPAHAALLSQPPRSLKNGLRVTEQGEMIRFKLGLPAVAVESLGLYASAILEANLLPPPEPKAQWRTVMDELSTISCQIYRDVVRGEKDFVPYFRAATPEQELSKLPLGSRPAKRNPNGGVESLRAIPWIFAWMQNRLMLPAWLGAGASLRQAIEKGQKTVIEDMCKTWPFFSTRIGMLEMVFSKTDTWLSEHYDQHLVDPALWYLGESLREQLKQDIQTVLSLSHEDQLMSDLPWIAESIALRNVYTDPLNLLQVELLRRLRRNPDNPNPDVEQALMITITGVAAGMRNTG

SEQ ID NO: 10204 - protein, 730 aa, Triticum aestivum
  misc_feature (535)..(535): Xaa can be any naturally occurring amino acid
  misc_feature (541)..(541): Xaa can be any naturally occurring amino acid
  unsure (1)..(730): unsure at all Xaa locations
MGRGGIGGAVAAADLENSDSTRGFVRDVKRIVVKVGTAVVTGQNGRLAMGRLGALCEQVKELNFQGYEVILVTSGAVGVGRQRLKYRKLINSSFADLQNPQLDLDGKACAAVGQSGLMAIYDTLFSQLDVTSSQLLVTDRDFRDPSFGHQLRETVVSLLDLKVIPVFNENDAISTRRAPYEDSSGIFWDNDSLATLLAKELDADLLIMLSDVEGLYSGPPSDPQSKIIHTYINEKHGKLINFGEKSRVGRGGMQAKVAAAVTAASKGVPAVIASGFVTDSIIKIMRGEKIGTLFHNEANVWDCSKEVTTREMAVAAKDCSRHLQNLSSEERKKILLDIAGALDANVDLIISENEADLAAAQDSGYEKSLVARMTLKAGKITSLAESIRAIADMEDPISHTLKKTEVAKDLVFEKMYCPLGVLLIIFESRPDALVQIAALAIRSGNGLLLKGGKEAMRSNTILHKVITSVIPDAVGKKLIGLVKSKDEIADLLKLDDVIDLVIPRGSNRLVSQIKAQTKIPVLGHADGICHVYIDXSADMDXAKRIVLDAKVDYPAACNAMETLLVHKDLNQTEGLDDLLIELAKEGVVIYGGPVAHDTLKVPKVDSFHHEYSSMACTLEFVDDVQSAIDHINRYGSAHTDCIITTDKKSADTFLQQVDSAAVFHNASTRFCDGTRFGLGAEVGISTGRIHARGPVGVDGLLTTRCILRGSGQVVNGDKGVVYTHKDLPLQ

SEQ ID NO: 10205 - protein, 119 aa, Brassica napus
TEDSTLESPGCTNKFQMVKILNWVDGVESDDFFTGLIAQFGATLPSDADNGVRSPVASVRPLDSCSNHSSTLDGSIALSIRGSCAFTEKAKYAEAAGASALPVINDIEDLDEMGCMEKD

SEQ ID NO: 10206 - protein, 394 aa, Rhodobacter sphaeroides 2.4.1
MLTALKPQPADKILQLIQMFREDARADKIDLGVGVYKDPTGLTPVMRAVKAAEKRLWEVETTKTYTGLADEPAYNAAMAKLILAGAVPADRVASVATPGGTGAVRQALELIRMASPEATVWISNPTWPNHLSIVKYLGIPMREYRYFDAETGAVDAEGMMEDLAQVKAGDVVLLHGCCHNPTGANPNPVQWLAICESLARTGAVPLIDLAYQGFGDGLEMDAAATRLLATRLPEVLIAASCSKNFGIYRERTGILIAIGEAAGRGTVQANLNFLNRQNYSFPPDHGARLVTMILEDETLSADWKAELEEVRLNMLTLRRQLADALQAETGSNRFGFVAEHRGMFSRLGITPAEVERLRTEHGVYMVGDSRLNIAGLNRTTVPVLARAVAKVLRG

SEQ ID NO: 10207 - protein, 196 aa, Zea mays
MHAPPLVAFAGGACPASAASSLSPWLASLRPAIVAAPARLLWFRRGALRLEAKAAWRATGGGRGPRVPAKGAVLASYMGAEEVVGPLSLLDEEELILHIRKERDNGKLPADVAINLEELYYNYRNAVLQNGDPNAYEIMLSNMTALFDRVLLDVQNPFTFPPYHKAVREPFDYYMFGQNYIRPLVDFRNSYVGNIS

SEQ ID NO: 10208 - protein, 268 aa, Pisum sativum
MAESSSTKTGLRLAGKVAIVTGGASGIGKETAHLFANQAARMVVIADIQDELGIQVAESIGTDRCTFIHCDIRIEDDVKNLVQSTVDTYGQIDIIHCNAGIISPSDQTLLELDVSQANGVFATNAIGTALCVKHAARAMVDGKVRGSIVCTASISASYGVTTGTDYSMSKHAVLGLMRSASVQLAKYGIRVNSVSPNGLATPLTEKLLDADAKTVEEIFSKFSMLKGVVLRTNHVADAVLFLASNESDFVTGLDLRVDGNYITSDAVI

SEQ ID NO: 10209 - protein, 467 aa, Desulfovibrio gigas
MLPPAIASRWAAPNGYRDVLRISLPMIASMGAHTVMLTTDRFFLSQHSLEAIAASWPAGMANFAFMALFMGTAQYVNVFIAQYVGSEAPARVGAAVWQGVWFCLAAGLLMACTALLARPIFSLAGHEPMVLQMEVEYFQILSVGAIFGLLQNTLSCFYSGQGLTRPVMYVNIAGALVNVPLDYCFIFGVGPFPAWGVAGAAVATVIGAMVSAGLFALLVFSRENERRFGTRSQWRLDRELMRRFLRYGLPGGTQFGVEILAFTVFLFLAGRLGTEALAATNMAISINTVGFLPMVGLHIALSTMVGQAIGGGSPAMARRAIRSGLHLALLWTSFAVAVYVLLPEPLIAIFLDPDSPGAPAVLALGVELMRFVSAYAFFDALILVFFAALKGAGDTVFIMRSIIVVALGAMIIPGVAVVEWLDGNIYFLWSLLTAYVAILGVGGVLRYRGGKWQGMRVVETAAQVVDT

SEQ ID NO: 10210 - protein, 379 aa, Streptococcus mutans UA159
MSNLFQNYTRADLEFIKAEGNYLFDTQGKKYLDFSTGIGVTNLGFHPQVQVALQKQAEQIWHTPNLYQNSLQEEVAAKLMAGKDYLAFFCNSGAEANEAAIKIARKATGKQEIITFQNSFHGRTFGSMSATGQDKIKVGFGDAVPHFHYAVFNDLNSVKALVTENTAAVMLELVQGESGVLPAEQDFVTALADYCQKNGLLLIIDEVQTGMGRTGKLYAFQHYGIEPDIFTLAKGLANGVPVGAMLAKKQFGSAFGPGSHGSTFGGNKLAMAASSAVLDIMTKAGFLEQAWENAHYLQEQLTSALQVADTVTQVRGLGYMIGIETTADLGQLVKATRDRGLIVLTAGTNVIRLLPPLTLTKDEIDQGIMILQEVFEQHN

SEQ ID NO: 10211 - protein, 449 aa, Pseudomonas syringae pv. syringae B728a
MTLSAGSPAPSTLDVQAFINAQPLSGYQWRVVALCFLIVFLDGLDTAAMGFIAPALSQDWGIDRASLGPVMSAALIGMVFGALGSGPLADRFGRKVVLVVAVLLFGLFSLASAYSSNIDQLLVLRLLTGLGLGAAMPNATTLLSEYTPERLKSLLVTSMFCGFNLGMACGGFVSAKLIPSMGWHSLLMLGGILPLLLGLVLMVWLPESARFLVVRNRGAERIRKVLAPIAPKALAGITDFSVPEQKTVSSRNVLKVIFSGTYSAGTLLLWLTYFMGLVIVYLLTSWLPTLMRDSGASMEQSAFIGALFQFGGVLSAVGVGWAMDRYNPHKVIGCAYALAGVFAWLVGQSLGNVALLATLVLLAGMCINGAQSAMPSLAARFYPTQGRATGVSWMLGIGRFGAILGAWAGATLLGLGWTFEQVLTALVIPAALAAIAVLIKGWVSHSDAT

SEQ ID NO: 10212 - protein, 398 aa, Pyrococcus horikoshii OT3
MVLMGKLDWIKEELEELKKKGLYVTIRVLQSAQGPWIVVNGKRVLNMCSNNYLGLAAHPKIKEAAIRAILDYGVGAGAVRTIAGTMELHVELEEKLAKFKKREAAILFQSGYNANLGAISALLRKGEDGVFLSEELNHASIIDGMRLSGAPKVIYKHLDVDDLKKKLEENKDKKKKIIVTDGVFSMDGDLAPLPEIVEVAEQYDAIVYVDDAHGEGVLGSHGRGIVDHFNLHDKVDFEMGTLSKAFGVIGGYVAGPEEAIEYLKQRARPFLFSSAMNPPDVAAAIAAVEILQKSDDLVKKLWDNTHFLQKGLRDLGYDLGNTKHPITPVMLYDEKLAQEFSRRLYEEYNIFAQAIVYPTVPLGTARIRLEPSAAHTKEDLKLVIDAFEDLGKKTGFLK

SEQ ID NO: 10213 - protein, 716 aa, Arabidopsis thaliana
MSGSVSGCGSGGCSIVWFRRDLRVEDNPALAAAVRAGPVIALFVWAPEEEGHYHPGRVSRWWLKNSLAQLDSSLRSLGTCLITKRSTDSVASLLDVVKSTGASQIFFNHLYDPLSLVRDHRAKDVLTAQGIAVRSFNADLLYEPWEVTDELGRPFSMFAAFWERCLSMPYDPESPLLPPKKIISGDVSKCVADPLVFEDDSEKGSNALLARAWSPGWSNGDKALTTFINGPLLEYSKNRRKADSATTSFLSPHLHFGEVSVRKVFHLVRIKQVAWANEGNEAGEESVNLFLKSIGLREYSRYISFNHPYSHERPLLGHLKFFPWAVDENYFKAWRQGRTGYPLVDAGMRELWATGWLHDRIRVVVSSFFVKVLQLPWRWGMKYFWDTLLDADLESDALGWQYITGTLPDSREFDRIDNPQFEGYKFDPNGEYVRRWLPELSRLPTDWIHHPWNAPESVLQAAGIELGSNYPLPIVGLDEAKARLHEALSQMWQLEAASRAAIENGSEEGLGDSAEVEEAPIEFPRDITMEETEPTRLNPNRRYEDQMVPSITSSLIRPEEDEESSLNLRNSVGDSRAEVPRNMVNTNQAQQRRAEPASNQVTAMIPEFNIRIVAESTEDSTAESSSSGRRERSGGIVPEWSPGYSEQFPSEENGIGGGSTTSSYLQNHHEILNWRRLSQTGYVKSAFGGAKGEEHHKGCNSGEIWLDCKPSTFGTV

SEQ ID NO: 10214 - protein, 371 aa, Bacillus halodurans C-125
MEPSLIDVRRALHRIPELGFEEYKTQTYLLDLIQSLPQDFLEVKTWKTGILVRVGGRKGEKTVAYRADMDGLPITEETGLPFVSQHEGRMHACGHDLHMTIAFGLLRHFAYHQPETHLLFIFQPAEEGPGGAKPMLDSEEFRMWWPDEIIALHIAPEYPVGTIATRKGLLFANTSELFIDLKGQGGHAAYPHLANDMVVAASHLVTQLQSVVSRNVDPLDSAVVTIGVIKGGTKQNIIAETARIEGTIRTLSIESMKKVKKRIEALVSGIEIGFSCQASIDYGSNYCQVWNDEERVARFIEYSQGREGVTFIECSEAMTGEDFGYFLEEIPGFMFWLGVDTNYGLHDARLNPNEDVLSFAVQHLIGYIETL

SEQ ID NO: 10215 - protein, 452 aa, Shewanella sp. MR-7
MRNLLDFDFDSAHIWHPYTSMTRALPVFGVHSAQGCELELVDGRKLIDGTSSWWACVHGYGHPAILTAMERQLHQLSHVMFGGITHEPAIELCKKLLAMTCDPLTKVFLCDSGSIAVEVAIKMALQYWQGQDLPFAQKSQKQRILTVKKGYHGDTFAAMSVCDPEGGMHTMFGEAVTKQCFVDAPQTPFGEPLGQDDLAPMQRILREQHQKIAAVIIEPIMQGAGGMRFYSSEYLRGLRALCDEYNVLLILDEIATGFGRTGKLFAYEHADITPDILCLGKALTGGYISLAATLCTDNVARGISQSPAGVFMHGPTFMGNPLACAAACASLDLINQQEWPAQVAAIEQQMQRELADAIDIPSVKEVRVLGAVGVLEMHQAVNTAALQQQFVDLGVWVRPFANLIYIMPPYVISPSQLTQLTQAMKQVAATITPPLAAQAEALASESITISHG

SEQ ID NO: 10216 - protein, 694 aa, Clostridium thermocellum ATCC 27405
MIQITTQTIQIVAILISLLSLGVAAWLYSWVKSQPSSNARIAEIGGYIRQGANTFLRREYLILARFTAIAAVLILIFLPHPIWSGNITQNIWMAVSYIFGTVLSALAGKIGIQIATIANIKSAEAAQKGVKPAFMTGFRGGAVMGMAVVGTSLLGVTLVLLIVGDASAVLGFSFGASSLALFAKAGGGIFTKTADISADLVGKVELGLEEDDPRNPAVIADNVGDNVGDVAGMGADLFDSNVASMAAALVMATALGGPDSKNVAMVFAYAAIGLLSSVIGVATARIGKNGDPGKALNSSTYVTTAIFAVLTALSTYIFNFEWRIWGATAIGLIVGTIIGLTSDYFTNDAKPPVRAVANASKSGPAFTILSGFSYGLLSALPSLIGIAVTALISYYICEPLGSGYGMFGISMSALGMLSIVGMIISNDAYGPIVDNARGLAEMGGFGEKVIAIADELDSAGNTVKAVTKGFSISAAGLTVISLLGAFMSEVNTAASELGVQGIANFDIMNPTVFFGLIVGVAIPAVFSAMLMLGVDKNAQRMVAEIHRQWDTIPGLKEGKENAKPDYDKCIDIATTGSLKELIPAGLVAIFSTILVGFIGGASAIGGFLTGNITSGLLLALLMSNAGGLWDNSKKYVEAGNCGGKGSTAHKAAVVGDTVGDPFKDTAGPSINTQITVVSLVSSLLASLFLMYSIF

SEQ ID NO: 10217 - protein, 250 aa, Saccharomyces cerevisiae
MGLTTKPLSLKVNAALFDVDGTIIISQPAIAAFWRDFGKDKPYFDAEHVIQVSHGWRTFDAIAKFAPDFANEEYVNKLEAEIPVKYGEKSIEVPGAVKLCNALNALPKEKWAVATSGTRDMAQKWFEHLGIRRPKYFITANDVKQGKPHPEPYLKGRNGLGYPINEQDPSKSKVVVFEDAPAGIAAGKAAGCKIIGIATTFDLDFLKEKGCDIIVKNHESIRVGGYNAETDEVEFIFDDYLYAKDDLLKW

SEQ ID NO: 10218 - protein, 187 aa, Brassica napus
MGDLASIAQISKLRVGQVYAASVMYGYFLKRVDQRFQLEKSMKILPGGLDDSKTSVEQPENVTFKAVSSHPEVGSFAGGVSAKGFGSEIKPSRLRTYVMSFDSETLQRYATIRSREGVGIIEKHTEALFGKPEIVITPEGTVDSSKDEQIKISFGGMKRLVLEAVTFGSFLWDVESHVDARYHFVLN

SEQ ID NO: 10219 - protein, 379 aa, Vibrio sp. Ex25
MTTNQQNAVVSQPQTVVVKLGTSVLTGGTLALDRAHMVELARQCAELKKQGHSVVMVSSGAIAAGREHLGYPALPNEMASKQLLAAVGQSRLIQTWESLFGIYGIKIGQMLLTRADLEDRERFLNARDTINALVANDIIPIVNENDAVATSEIKVGDNDNLSALVGILCGADKLLLLTDQKGLFTADPRKDPNAELIKEVKTIDDTLRKIAGGSGTTLGTGGMATKLQAADIARRAGIEVIIAAGSAPNVIFDSLSAEPQGTRFLPCAEALENRKRWILAGPAASGDIIIDDGAVNAVVGKGSSLLAKGVIKVSGDFARGEVARVTNSHGKLVARGISAYSSDDLTKITGKHSKDIISILGHDYGSEVIHRDDLVVIQE

SEQ ID NO: 10220 - protein, 411 aa, Vibrio sp. Ex25
MGKAAKDAAFELATASTAQKNQALAIIADELEANSVAILAANAKDIELGREAGLTDALLDRLLLNEERLTAIANDVRNVISLNDPVGSEIDSKVLENGMSLSRRRVPLGVVGVIYEARPNVTIDIAALCLKTGNASILRGGKETFFSNMELVKVIQSALAKANLPAASVQYIEKPDRELVSQLLKLDDYVDMIIPRGGAGLHKMCKENSTIPVIIGGFGISHIFVDESADLEKSLNVVENSKVQRPSACNSLDTLLVHEKIAAQFLPMIVERMNDKVTFVTEPKAKELMEQAKQVRDAIEGDFDTEWLSYTLGVKVVSDVKDAIDHMRVHNASHSDAIMTNSLENSELFINSVGSAAVYVNASTRFTDGAQFGLGAEVAVSTQKLHARGPMGLEELTSYKWVGKANYLARS

SEQ ID NO: 10221 - protein, 155 aa, Xylella fastidiosa Temecula1
MNVTFDLTPPSPSQREALIATLNAEERRILLQHGTEAPFCNRLLDNNQLGTYTCRLCGLPLFHSNAKFKSGTGWPSFFEPYTHTHIRKQHDTSHGMIRTEILCARCNSHLGHLFPDGPPPTYERYCLNSVSLTFIPTGTLLPDQLHRGDNTTYRT

SEQ ID NO: 10222 - protein, 340 aa, Glycine max
MGVPERDPLAQLSLPPGFRFYPTDEELLVQYLCRKVAGHHFSLPIIAEVDLYKFDPWVLPGKAAFGEKEWYFFSPRDRKYPNGSRPNRVAGSGYWKATGTDKIITTEGRKVGIKKALVFYVGKAPKGSKTNWIMHEYRLLDSSRKHNLGTAKLDDWVLCRIYKKNSSAQKVEANLLAMECSNGSSPSSSSHVDDMLESLPEIDDRCFTLPRVNSVRTMQQQDEKFGFQNMGSRFFPDWVTPTDLDSVSEFGSGCQTQGMVNYDCNDLFVPSVPPFGHSHVNYMVGAPPSEEEVQSGVRTQQADGAACFQQNPNARLLPGSGDPFGFGFIMGQQVEFGFRD

SEQ ID NO: 10223 - protein, 231 aa, Zea mays
SDHCHSARYYLKDAVLDGGIPFNKAYGMTAFEYHGTDARFNRVFNEGMKNHSVIITKKLLDFYTGFEGVSTLVDVGGGVGATLHAITSRHPHISGVNFDLPHVISEAPPFPGVRHVGGDMFASVPAGDAILMKWILHDWSDAHCATLLKNCYDALPENGKVIVVECVLPVNTEATPKAQGVFHVDMIMLAHNPGGKERYEREFRELAKGAGFSGFKATYIYANAWAIEFIK

SEQ ID NO: 10224 - protein, 186 aa, Nanoarchaeum equitans Kin4-M
MARLRRWHCYRKLEVPYTRVSRSKNKNYIPGAKPTMVRLFHMGELTRNPSEWQYEASLVAKENHQIRDNAIEAIRVMVNKYLESTLGKKRYLFIIRKYPHHIYREKPVVGGYAGADRISQGMRLSFGRPKGRAVQIYEGEKLLSIFFDDITKAKDIKYFLQVARSKLPWRYREEIVEVKSGKPLAL

SEQ ID NO: 10225 - protein, 373 aa, Zea mays
MLSSASSAAGAAMGMGGGGYAHQPPPQRAVFTAAQWAELEQQALIYKYLMAGVPVPPDLLLPVRPGPAAAFSFAGPAAASPFYHQHHPSLSYYAYYGKKLDPEPWRCRRTDGKKWRCSKEAHPDSKYCERHMHRGRNRSRKPVESKTASSSSPAHPSPPQLSTVTTTAPLEPLAAAGGKVHGLSLGGGAAGSSHLGVDASNAHYRYGSKYPLGAKPDGGELSFFSGASSGNNSRGGFTIDSPSDNNSWHSALASSVPPFTLSTKSGDSGLLPGAYASYSQSHSHMEPPRELGQVTIASLAQEQERQQPFSGGMLGNVKQENQNQPLRPFFDEWPGTRADSWPPEMDGAPRAGRTSFSSSTTQLSISIPMPRCD

SEQ ID NO: 10226 - protein, 195 aa, Zea mays
MTGKKRKAEAARLEETDQALYGAFRGAANSLSQLYTLAMGAQKASFNAGERHAMEKLYEWILRQHENGLRLTVADVASRIQLEIQYGGDNASASPRPQYPSQSTAPTVHIPNTSNQQPSPSLFAPGNPGLTQSKNSMVFSNALSSPIRRSLQPYHLEQDGDTGYFVNGASRDMDPTASNDSSMDMHSDSPVHDSY

SEQ ID NO: 10227 - protein, 178 aa, Solibacter usitatus Ellin6076
METITLGGGCFWCLEAVYVEMEGVQSVVSGYMGGHLADPDYRAVCTGSTGHIEVVQVTYDPAVTSTREILEVFFAIHDPTSLDRQGNDAGTQYRSAIFYHTQEQYEISQALIDELEREKIWSRPIVTEVRPAVKFYPAEDYHQNYFANNPQQPYCSFVVSPKVRKFREKFAAKMRKRA

SEQ ID NO: 10228 - protein, 160 aa, Pseudomonas aeruginosa PAO1
MSAFHDLTLQGLDGQDLPLSPFKGKVLLVVNVASKCGLTPQYAGLENLYQTYRERGFAVLGVPCNQFAGQEPGSEADIQSFCSLNYGVSFPMSAKVEVNGSARHPLYRLLAGEGAEFPGDITWNFEKFLLGPDGRVLARFSPRTAPDDPALVQAIEKALG

SEQ ID NO: 10229 - protein, 750 aa, Chlorobium tepidum TLS
MYGLVVCLFGMIFGLIQYQGINKLPVHAAMKEISDLIYETCKTYLITQGKFIIILWALVAAIIVAYFGGLNHLAPDKVVFILACSLLGIAGSYTVAWFGMRINTFANSRTAFASLGGKPFPTYAIPLRAGMSIGMLLISIELFAMLCILLFIPVDYAGPCFIGFAIGESLGASVLRIAGGIFTKIADIGSDLMKIVFKIKEDDARNPGVIADCTGDNAGDSVGPTADGFETYGVTGVALISFILLAIKDPSIQVSLLVWIFAMRLVMIVASAVSYWVNDALAKMKYGNADEMNFEKPLITLVWLTSIVSIVLTYIASYMLIAQLGDGTMWWKLASIITCGTIAGALIPELVDRFTSTECAFVRNVVQCSKEGGAALNILSGLVAGNFSAYWMGLAIIVLMGAAFGFSTLGLDVMMLAPSVFAFGLVAFGFLSMGPVTIAVDSYGPVTDNAQSVYELSLIETLPNISNSIESEFGFKPDFENAKRYLEANDGAGNTFKATAKPVLIGTAVVGSTTMIFSIIMILTGGLADTGAIAKLSILWPPFLLGLLMGGAVIYWFTGASMNAVTTGAYYAVAFIKKNIKLDGVTKASTEDSKKVVEICTRFAQKGMINLFLTIFFSTLAFACLESYLFIGYLISIALFGLYQAIFMANAGGAWDNAKKVVETELHAKGTELHDASVVGDTVGDPFKDTSSVALNPIIKFTTLFGLLAIELAIKLPTTISVSLAVVFFLLSLVFVHRSFFSMRIAVDKD

SEQ ID NO: 10230 - protein, 365 aa, Erwinia carotovora subsp. atroseptica SCRI1043
MLAKLLRSALFGALVAGIILAVLPFVGSGTSFLKSNDRNTDGSPVSYHQGVNRATPAVVNIYNRVANTEKPSEVAIHPLGSGVIMNEKGYILTNKHVINNVQQIQIELSDGRLYEARVIGSDSLTDLSVLQIDGVNLPVIPMNPDRLPHVGDVVMAIGNPYNLGQTVTQGVISATGRVSLSAYGQQRSQVGRQNLLQTDASINHGNSGGALVNTLGELVGINTLSFDKSSNGETPEGISFAIPVALATKVMGKLIRDGRVVRGYIGINGVQLENFENSTLTNNRDAQGRLTGILVQTIDPGGPADKAGIHIEDVIVSVNNKPARSIIETMEQVSEIRPGTVIPVTIERANKQITLQMTIQEFPTQ

SEQ ID NO: 10231 - protein, 372 aa, Streptococcus mutans UA159
MAETNGLKDMIACDTRISAIKDNKLSYAGYDIADLMDNKARFEEVIYLLWNLHLPTAIELKQFEEKLRKNYAISDAIEQCILIQSRQHLHPMSVLRSTVSLLGVYNLKAEERSVEATYDQSIQLMAKIPTIIATFARLRQGLSPIAPRKDLGFAANFLYMLNGRLPSELEILAMNRALVLHAEHELNASTFAARVCASTLSDIYSCVTTAIGTLKGPLHGGANERVFDMLREIREYGDVDSYLQEKLNSKEKIMGFGHRVYQTQDPREKYLREMARELTKGTEHDIWYQLSKKVEICMKQKKNLIPNVDFYSATVYHVLGIDSSIFTLIFAMSRVSGWIAHIQEQQKNNKLIRPRSHYTGMRKLRYIPIERR

SEQ ID NO: 10232 - protein, 456 aa, Erwinia carotovora subsp. atroseptica SCRI1043
MKKTSLLFSALAMSIGLTLSTLPAANAALPSVVQGQQTPSLAPMLEKVLPAVVSVHVEGTQVQRQRVPEEFKFFFGPNFPTDKQNSRPFEGLGSGVIIDAAKGYVLTNNHVINNADKIRVQLNDGREYDAKLIGRDEQTDIALLQLNDAKNLVSVKMADSDQLRVGDFAVAVGNPFGLGQTATSGIISALGRSGLNLEGLENFIQTDASINRGNSGGALVNLNGELIGINTAILAPGGGNIGIGFAIPSNMAQNLAQQLVEFGEVKRGLLGIKGSEMTSEMAKAFNVDAQRGAFVSEVLPKSAASKAGIKAGDVLTTLDGKPISSFAELRAKVGTTAPGKTVKIGLLRDGKPQEVSVVLDNSTSASTSAETLSPSLQGASLINGQLKDGSKGVQIDNVAKDTPAAQVGLQKGDIIIGVNRERIENITQLRKLLEAKPSVLALNIVRGEETIYLLLR

SEQ ID NO: 10233 - protein, 289 aa, Neurospora crassa
MSQPMRTHLVFGIGEFVGTFMFLFFAFAGTQVANTAPANAAKLPSTSNLLYIAFAFGFSLMVNVWAFFRVTGGAFNPAVTLALVLVGGFPAVRAVIVIVAQILGATAAAGLVQVIFPGPLAVETTLGGGATVAQGFFIELFLTCELVFVILMMAVEKHQGTFVAPVAIGLALFLSELVGVYFTGGSLNPVRSLGPAIVNRHFPGYHWIYWLGPVLGALLACGFFKLLQALRYDDINSGADDDGRGDLEGARHAHQDGLKHTPTNLTQPLANGEAAALHNQPAQVPREEL

SEQ ID NO: 10234 - protein, 167 aa, Brassica napus
  misc_feature (30)..(30): Xaa can be any naturally occurring amino acid
  unsure (1)..(167): unsure at all Xaa locations
MDLQLKQWRSQQVADRVRTDEPSAAKIPKXHAYDPIQSQTATSTVLPLFSPEPASSKLSSLSQDSSSRFPKMGSFFSWAQWQELELQALIYRYMLAGAAVPQELLLPIKKSLLHLSPSYFLQHLPHYQPAWYLGRGAMDPEPGRCRRTDGKKWRCSRDVFAGHKYCE

SEQ ID NO: 10235 - protein, 278 aa, Brodoa intestiniformis
VEHGDVKVVAVNDPFIEPHYAAYMLKYDSQHGQFKGTIEVKGSDLVVNGQTVKFYTEKDPANIPWKDTGAYYIVESTGVFTTTEKAKAHLKGGAKKVVISAPSADAAMFVMGVNEKEYKSDIEIISNASCTTNCLAPLAKVMHDNFTIIEGLMTTIHSYTATQKTVDGPSSKDWRGGRTAAQNIIPSSTGAAKAVGKVIPSLNGKLTGMSMRVPTSNVSVVDLTCRVEKSVTYDQIKETMKKASEGELKGIMAYSEDALVSTDLNGDNHSCIFDATAG

SEQ ID NO: 10236 - protein, 452 aa, Candida glabrata CBS138
MGQILSNPVIDKETESGSDKWTAYAVCAMQGWRMSMEDTHIAQLNLNADESSGHVALYSVFDGHGGSYVANFCGERMEKIVKSQKSYETGDLAQVLTDAYLAADEQLATQSSISDDHSGCTATSVLISKEKGVIICGNAGDSRTVLSSGGLAKALSFDHKPTLPGETARITAANGFVQMSRVNGNLALSRAIGDFEYKSNPKLLPHEQMVTCVPDVIEHKLDFENDEFVILACDGIWDCLSSQECVDMVHYGIQKTELSLLEITSRIVDICCAPSTEGSGIGCDNMSIIVVALLKDSETLEQWFERMRAKNYSYSTTFEQKRKEVFSFYNFAKNQETGDEDVFAITAPRSAPGSKLNGNQERGVTAKGPVDTSKNGKSPGVIDFTSLESLLEAGIKISQSPNNVQHFQGSALADMLASLSEAAAGETSPSEKNDDIEFTESTHANPEESIGH

SEQ ID NO: 10237 - protein, 278 aa, Almbornia azaniensis
VEHGEVKVVAVNDPFIEPHYAAYMLKYDSQHGQFKGTIEVKGSDLIVNGQTVKFYTEKDPANIPWKDTGAYYIVESTGVFTTTEKAKAHLKGGAKKVVISAPSADAAMFVMGVNEKEYKSDIEIISNASCTTNCLAPLAKVMNDNFTIIEGLMTTIHSYTATQKTVDGPSSKDWRGGRTAAQNIIPSSTGAAKAVGKVIPSLNGKLTGMSMRVPTSNVSVVDLTCRLEKSVSYDQIKETMKKASEGELKGIMAYSEDALVSTDLNGDNHSCIFDATAG

SEQ ID NO: 10238 - protein, 406 aa, Shewanella sp. MR-7
MSSPLTSKLGSKILARQQALAEQGLLRQRQALSSAAALSEDGPQFGLADRHYLNFSSNDYLGLSRAPELAEALHLGAKQYGVGSGASPLVTGYSEAHLALETKLCQMTGFEAALLFSSGFSANTTLCKTLFDKQDVVLADKLVHASIIDGLRDSGADFKRFLHNSTESAERLLAKNAVSALITESVFSMDGDIAPISALSALCRAHNAWLIVDDAHGFGVVDAVSAQVESTSASHLIDIQVVTFGKALGCQGAAILGSRQLIEFLVSNAREYIYSTALSPANAALALAAVEYTEAHPELKQKLQSNILLFKQLCQDADIPLLGSDTAIQPLIIGDAAQTLLVAEKLKALGIWVGAIRPPTVPVGSARLRITLSASHSEAAIRRCVNGMTQVLADVALPRVSERPER

SEQ ID NO: 10239 - protein, 225 aa, Almbornia cafferensis
VNGQTVKFYTEKDPANIPWKDTGAYYIVESTGVFTTTEKAKAHLKGGAKKVVISAPSADAAMFVMGVNEKEYKSDIEIISNASCTTNCLAPLAKVMHDNFTIIEGLMTTIHSYTATQKTVDGPSAKDWRGGRTAAQNIIPSSTGAAKAVGKVIPSLNGKLTGMSMRVPTSNVSVVDLTCRLEKSVTYDQIKETMKKASEGDLKGIMAYSEDALVSTDLNGDNHSC

SEQ ID NO: 10240 - protein, 118 aa, Lotus corniculatus
GRHVVWASVKAGNPTYALVRKNTVTIEKPKLITASNPETKEELIDNFKSLGVILLEGDISDHESLVKAMKQVDIVICTTGRLLILDQVKIIAAIKEAGNIKKFFPSEFGLDVDRHEAL

SEQ ID NO: 10241 - protein, 118 aa, Lotus corniculatus
GDGNVKGAYITEADVGTFTVLAANDPRTLNKAVHIRLPANYLTANEIMALWEKKIGKTLEKTYVPEEQVLKDIKESGFPHNYLLALYHSQQLKGDAVYEIDPAKDAEAHELYPDVKFT

SEQ ID NO: 10242 - protein, 411 aa, Rickettsia sp. A-167
DSEFAELKIRGKIFKLPILKASIGEDVIDISRVSAEADCFTYDPGFMSTASCQSTITYIDGDKGILRHRGYDIKDLAEKSDFLEVAYLLIYGELPSGEQYNNFTKQVAHHSLVNERLHYLFQTFCSSSHPMAIMLAAVGSLSAFYPDLLNFKEADYELTAIRMIAKIPTIAAMSYKYSIGQPFIYPDNPLDFTENFLHMMFATPCTKYTVNPIIKNALNKIFILHADHEQNASTSTVRIAGSSGANPFACISTGIASLWGPAHGGANEAVINMLKEIGSSEYIPKYIAKAKDKNDPFRLMGFGHRVYKNYDPRAAVLKETCKEVLKALGQLDNNPLLQIAIELEAIALKDEYFIERKLYPNVDFYSGIIYKAMGIPSQMFTVLFAIARTVGWMAQWKEMHEDPEQKISRPR

SEQ ID NO: 10243 - protein, 434 aa, Elaeis guineensis
GTRDKGGAFLSFSFFHSLPPLSLSPKGEKRKEERRRKEERAMASMVAFRPEAFLCFSPPKTTRSTRSPRISMASTVGPSTKVEIPKKPFMPPREVHVQVTHSMPPQKIEIFKSLEDWAENNILVHLKPVEKCWQPQDFLPDPSSEGFHEEVKELRERSKEIPDGYYVCLVGDMITEEALPTYQTMLNTLDGVRDETGASLTSWAVWTRAWTAEENRHGDLLNKYLYLSGRVDMKQIEKTIQYLIGSGMDPRTENSPYLGFIYTSFQERATFISHGNTARHAKEHGDVKLAQICGTIASDEKRHETAYTKIVEKLFEIDPDGTVLSFADMMKKKISMPAHLMYDGQDDNLFEHFSAVAQRLGVDTAKDYADILEFLINRWKVGELTGFSGEGKRAQDFVCTLAPRIRRIEERAQERAKQAPRIPCSWIYGREVQL

SEQ ID NO: 10244 - protein, 84 aa, Glycine max
MARSVPLVSTIFVLLLLLIATEMGPTMVAEARTCESQSHRFKGPCLSDTNCGSVCRTEGFSGGHCRGFSRRCFCTKECNKNNNN

SEQ ID NO: 10245 - protein, 411 aa, Israeli tick typhus rickettsia
DSEFAELKIRGKIFKLPILKASIGEDVIDISRVSAEADCFTYDPGFMSTASCQSTITYIDGDKGILRYRGYDIKDLAEKSDFLEVAYLLIYGELPSGEQYNNFTKQVAHHSLVNERLHYLFQTFCSSSHPMAIMLAAVGSLSAFYPDLLNFKEADYELTAIRMIAKIPTIAAMSYKYSIGQPFIYPDNSLDFTENFLHMMFATPCTKYTVNPIIKNALNKIFILHADHEQNASTSTVRIAGSSGANPFACISTGIASLWGPAHGGANEAVINMLKEIGSSEYIPKYIAKAKDKNDPFRLMGFGHRVYKNYDPRAAVLKETCKEVLKALGQLDNNPLLQIAIELEAIALKDEYFIERKLYPNVDFYSGIIYKAMGIPSQMFTVLFVIARIVGWMAQWKEMHEDPEQKISRPR

SEQ ID NO: 10246 - protein, 411 aa, Rickettsia akari
DSEFAELKIRGKIFQLPILKASIGEDVIDISRVSAEVNCFTYDPGFMSTASCKSTITYIDGDKGILRHRGYNIKDLAEKSDFLEVAYLLIYGELPSIEQYNNFTKQVAHHSLVNERLHYLFQTFCSSSHPMAIMLAAIGSLSAFYPDLLNFKEADYELTAIRMIAKIPTIAAMSYKYSIGQPFVYPDNSLDFTENFLHMMFATPCTKYKVNPIIKNALNKIFILHADHEQNASTSTVRIAGSSGANAFACISTGIASLWGPAHGGANEAVINMLKEIGSSENIPKYIAKAKDKSDPFRLMGFGHRVYKNYDPRASVLKETCKEVLKELGQLENNPLLQIAIELEAIALKDEYFIERKLYPNVDFYSGIIYKAMGIPSQMFTVLFAIARTVGWMAQWKEMHEDPGQKISRPR

SEQ ID NO: 10247 - protein, 631 aa, Magnaporthe grisea 70-15
MSWKLTKKLKETHLTTTLSNTFSRSPSTSTITDKDDKSGDSGISGAATPTNESNVGILVVTIHEGQGFSLPEQHRAAFGMGNQHSSSVSTGNGFGVAGSVRPGSSQKSPGVFNGRPQTSGGGFGTLPTNHGRFSGKYMPYALIDFDKVQVFVNSVEGSPDNPLWAGSNTQYKFDVSRVTELTIHLYIRNPNAPPGSGRSQDIFLGVCRIQPRFEERQPFVEDPKMSKKDKEKAQAEWAKRERALGFSGVEWADVQYGTGRLKIGVEFVANRTGKLKLDEDFELLKVVGKGSFGKVMQVRKKDTNRIYALKTIRKAHIISRSEVTHTLAERSVLAQINNPFIVPLKFAFQSPEKLYFVLAFVNGGELFHHLQKEQRFDVNRSRFYTAELICALECLHGFNVVYRDLKPENILLDYQGHIALCDFGLCKLDMKDEDHTNTFCGTPEYLAPELLEGKGYDKAVDWWTLGVLLYEMLTGLPPFYDENTNEMYKKILYQPLDFPGPEVVPPAAQDLLRKLLDRDPKTRLGSPERGRGAAEIKSHPFFHAIDWRKLLQRKYEPAFKPSVANALDTTNFDPEFTSEAPQDSYVEGPVLSQTMQDQFQGFSYNRPIAGLDDAGGSVKDPSFVGSLQGGR

SEQ ID NO: 10248 - protein, 162 aa, Boehmeria nivea
TSVYPREPESMKELREITAKHPWNLMTTSADEGQFLSMLLKLINAKNTMEIGVFTGYSLLATALALPEDGKILAMDINRENYELGLPVIEKAGLAHKIDFREGPALPALDQMIEDGKYHGSFDFIFVDADKDNYLNYHKRLIELVKVGGVIGYDNTLWNGSV

SEQ ID NO: 10249 - protein, 411 aa, Rickettsia australis
DSEFAELKIRGKIFKLPILKASIGEDVIDISRVSAEADCFTYDPGFMSTASCQSTITYIDGDKGILRHRGYNIKDLAEKSDFLEVAYLLIYGELPTIEQYNNFTTQVAHHSLVNERLHYLFQAFCSSSHPMAIMLAAVGSLSAFYPDLLNFKEADYELTAIRMIAKIPTIAAMSYKYSIGQPFIYPDNSLDFTENFLHMMFATPCTKYKVNPIIKNALNKIFILHADHEQNASTSTVRIAGSSGANAFACISTGIASLWGPAHGGANEAVINMLKEIGSSENIPKFIAKAKDKNDPFRLMGFGHRVYKNYDPRAAVLKETCKAVLKELGQLENNPLLQIAIELEAIALKDEYFIERKLYPNVDFYSGIIYKAMGIPSQMFTVLFAIARTVGWMAQWKEMHEDPEQKISRPR

SEQ ID NO: 10250 - protein, 513 aa, Methanococcus maripaludis S2
MCSISGIIAKDEEGSGSRSLLKNIQKHVINMMKILKHRGPDYSGMMFDDEVLYFENFDDITENTETISRMAMGHNRLAIVGTAVQPIPNTDESIWIICNGEIYNHVELRDELSVDHEFKTDTDSEAIIHTYEDELVDVLDGDYAYAIYDKEKNIIELRRDLMGVKPLYYIDTDEYFAFASEKKALYGLLMEINEMDYKSAFNYDISRLNPNSRLIYELDENSWYIEEDLEKVNPDYFEENDYELCKNELETTILDSVLKRVKGLERVGIIYSGGVDSTLVSKLASENCDVTLYSVGSANSEDLIYAERAAKDMGLKFRKKIILEDEFEEYVIKVAKAIDELDVMKLSVGIPIFAASEMAKEDGIKVVLSGQGADELFAGYNRYQRILNEKGEEGLKKSIISDVFDIHKVNLERDDHCTMANGVELRVPFLDKFVIDVGLSIPVEYKIEEPRKKILRDIASKYVPDYIAQRPKKAAQYGSGSEKMVYAVAKKHGYSKKEINKFFEEYLIEKIKF

SEQ ID NO: 10251 - protein, 506 aa, Hordeum vulgare subsp. vulgare
MPPRRPNTGGGGGTSSSAAPAPRKVPLRSLLRAASVACGVQFGWALQLSLLTPYVQELGIPHAFASLVWLCGPLSGLLVQPLVGHLSDRITPANSPLGRRRPFIAAGAASIAFAVLTVGFSADLGRLFGDNVVPGSTRIGAIIVYLVGFWLLDVGNNATQGPCRAFLADLTENDPRRTRIANAYFSLFMALGNILGYATGAYNGWYKIFPFTITGSCGVSCANLNSAFLLDIIILAITTYISVATVQDNPTFGSDEAAPPSSHEEEAFLFELFGSFKYFTMPVWMVLIVTSLTWVGWFLFILFDTDWMGREIYRGSPEIVADTQKYHDGVRMGSFGLMLNSVVLGITSIGMEKLCRKWGAGLVWGVSNIIMALCFVAMLIITYVAQNLDYGPSGAPPTGIVAASLIVFTILGAPLSITYSIPYAMAASRVENLGLGQGLAMGILNLSIVIPQIIVSLGSGPWDQLFGGGNAPSFWVAAAASFVGGLVAILGLPRARLGPKKKTTQR

SEQ ID NO: 10252 - protein, 176 aa, Hevea brasiliensis
MASQSEPKSVYDFTVKDARGNDVDLSTYKGKVLLIVNVASQCGLTNSNYTELTQLYQKYKDQGLEILAFPCNQFGSQEPGTNEQIVEFACTRFKAEYPIFDKVDVNGNNAAPLYKFLKSSKGGIFGDNIKWNFSKFLVDKDGNVVDRYAPTTVPSQHREGCEETAGDCMSAQGRPN

SEQ ID NO: 10253 - protein, 519 aa, Arabidopsis thaliana
MDSLRFLRILLLSSSILLLSLRSTVTAGDIVHQDNLAPKKPGCENDFVLVKVQTWIDGVENEEFVGVGARFGKRIVSKEKNANQTHLVFANPRDSCTPLKNKLSGDVVIVERGNCRFTAKANNAEAAGASALLIINNQKELYKMVCEPDETDLDIQIPAVMLPQDAGASLQKMLANSSKVSAQLYSPRRPAVDVAEVFLWLMAIGTILCASYWSAWSAREAAIEHDKLLKDAIDEIPNTNDGGSGVVEINSISAIFFVVLASGFLVILYKLMSYWFVELLVVVFCIGGVEGLQTCLVALLSRWFQRAADTYVKVPFLGPISYLTLAVSPFCIVFAVLWAVYRVHSFAWIGQDVLGIALIITVLQIVHVPNLKVGTVLLSCAFLYDIFWVFVSKKLFHESVMIVVARGDKSGEDGIPMLLKIPRMFDPWGGYSIIGFGDILLPGLLIAFALRYDWLANKTLRTGYFIWAMVAYGLGLLITYVALNLMDGHGQPALLYIVPFTLGKLENFATSLSFALSIK

SEQ ID NO: 10254 - protein, 523 aa, Hordeum vulgare subsp. vulgare
MARGGGNGEVELSVGVGGGGGGAAPRAAEPAVQISLGRLILAGMVAGGVQYGWALQLSLLTPYVQTLGLSHALTSFMWLCGPIAGLVVQPCVGLYSDKCTSRWGRRRPFILTGCVLICLAVIIVGFSADIGAALGDSKEECSLYHGPRWHAAIVYVLGFWLLDFSNNTVQGPARALMADLSAQHGPSAANSIFCSWMALGNILGYSSGSTNNWHKWFPFLRTRACCEACANLKGAFLVAVLFLSLALVITLIFAKEVPYKAIAPLPTKANGQVEVEPTGPLAVFKGFKNLPPGMPSVLLVTGLTWLSWFPFILYDTDWMGREIYHGDPKGTPAEANAFQEGVRAGAFGLLLNSVVLGFSSFLIEPMCKRLGPRVVWVSSNMLVCLSMAAICIISWWATQDLHGYIQHAITASKEIKAVSLALFAFLGIPLAILYSVPFAVTAQLAANKGGGQGLCTGVLNIAIVIPQVIIAVGAGPWDELFGKGNIPAFGMASVFALIGGVVGIFLLPKISRRQFRAVSGGGH

SEQ ID NO: 10255 - protein, 518 aa, Oryza sativa (japonica cultivar-group)
MGNRTSRHHRAAPEQPPPQPKPKPQPQQQQQQWPRPQQPTPPPAAAPDAAMGRVLGRPMEDVRATYTFGRELGRGQFGVTYLVTHKATGKRFACKSIATRKLAHRDDIEDVRREVQIMHHLTGHRNIVELRGAYEDRHSVNLIMELCEGGELFDRIIARGHYSERAAAALCREIVAVVHSCHSMGVFHRDLKPENFLFLSKSEDSPLKATDFGLSVFFKPGEHFKDLVGSAYYVAPEVLKRNYGAEADIWSAGVILYILLSGVPPFWAESEDGIFDAVLRGHIDFSSEPWPSISNGAKDLVKKMLRQDPKERLTSAEILNHPWIREDGEAPDKPLDITVISRMKQFRAMNKLKKVALKVVAENLSDEEITGLKEMFRSLDTDNSGTITLEELRSGLPKLGTKISESEIRQLMEAADVDGNGTIDYAEFISATMHMNRLEKEDHILKAFEYFDKDHSGYITVDELEEALKKYDMGDDKTIKEIIAEVDTDHDGRINYQEFVAMMRNNNPEIAPNRRRMF

SEQ ID NO: 10256 - protein, 302 aa, Pseudomonas aeruginosa
MFVAEQPGELDRVEQFGKRIAGADSNVAIGLARLGFAVAWLSRVGDDSLGRFVLDSLTREGLDCRFVEVDAQAPTGFQMKSREVDGADPRVEYFRRGSAASRLGLAHIREEMLGARHLHATGIPPALSASACELSHELMRRMRGKGASLSFDPNLRPSLWPSERRMIAEINALAAHAHWVLPGLEEGRLLSGWQEPADIAAFYLDMGVDAVAIKLGPSGAYYRDAHGEGLVPGVPVATVVDTVGAGDGFAVGVVSALLEGLPLPDAVARGNWIGSRAVQVRGDMEGLPKRSQLLDRERRRSA

SEQ ID NO: 10257 - protein, 303 aa, Chlorobium tepidum TLS
MAKHLKPYPAEKKGKYLQLSTIDELKDMARQVRRDVIRMLAKANSGHTGGSLGMADIFTALYFKILKHHPHQFKGEADQDMLFLSNGHIAPVWYSVLARSGYFSLNELNYLREINSYLQGHPTCESGLPGINIASGSLGQGLSAAVGAALGLRMDGKKGEVFCLMGDGECQEGQIWEAAMSAAHYQLGNLIGIVDYNNQQIDGEVSEVMDIEPFADKWRAFGWDVLSCDGNDIEHFIDTLEYLRKDTGRTKPVVVLAKTVMGKGVPFFEGTMPDKSNWHGKPPSKEDEAKALEILGVTIFGDF

SEQ ID NO: 10258 - protein, 135 aa, Brassica napus
MASAAAATQVGTYFLRNYYNLLQQTPDVVHQFYSEASTMVRVDDLTGTTAAANNMMDIHSLIMSLNFTQIEIKTANFVNSWGDGVLVMVSGLVQTKEYSHQRKFIQMFFLAPQEKGYFVLNDYFHFVDQGTCAAC

SEQ ID NO: 10259 - protein, 328 aa, Pseudomonas aeruginosa
MKKVVLYKRLSAPLMERLRERVEVLLVEEPGRDGLARLRDALPEAHGLLGASLRLDAGLLDLAPRLEAIASVSVGVDNYDIDYLDRRGILLSNTPDVLTETTADTGFALILATARRVVELAGWVRAGEWKKSVGAAQFGTDVHGKTLGIVGMGRIGEALARRGHHGFGMRVLYHSHSPKPHVEERYAASYRPLDALLEESDFVCLTLPLTAATEGLIGAAQFARMRPQAIFINISRGRVVDEAALIEALAQRRIRAAGLDVFEREPLSPDSPLLRLPNVVATPHIGSATEETREAMARCAVDNLLAALAGARPLNLVNPSAWARRRGA

SEQ ID NO: 10260 - protein, 288 aa, Streptococcus mutans UA159
MEYITLNTGVKMPMEGFGVFQVTDPEICKESVLNAIKTGYRLFDTAAVYGNEKALGEAIHEAIEQGLVTRNELFITSKLWVQDMNYEAAKKGIERSLEKLGLDYLDLYLLHQAMRDYFGAYRALEEAYQAGKLRAIGVSNFYPNILTNFCETVSVIPAVNQIELHPFFTQEEALETARYYGVVPEAWAPLGGGRYDAFNNAILQEVASAHQKTVGQIMLRWNVQRGVVVIPKSTHKERIEENFAIWDFSLTDDEMTKIASLDMGYGDTRTKHFDPNFVRSVLNVKIHD

SEQ ID NO: 10261 - protein, 444 aa, Neisseria gonorrhoeae FA 1090
MTDLNTLFANLKQRNPNQEPFHQAVEEVFMSLDPFLAKNPKYTQQSLLERIVEPERVVMFRVTWQDDKGQVQVNRGYRVQMSSAIGPYKGGLRFHPTVDLGVLKFLAFEQVFKNALTTLPMGGGKGGSDFDPKGKSDAEVMRFCQAFMTELYRHIGADTDVPAGDIGVGGREIGYLFGQYKKIRNEFTSVLTGKGLEWGGSLIRPEATGYGCVYFAQAMLQTRNDSFEGKRVLISGSGNVAQYAAEKAIQLGAKVLTVSDSDGFVLFPDIGMTEAQLAALIELKEVRRERVATYAKEQGLQYFENQKPWGVAAEIALPCATQNELDEEAAKTLLANGCYVVAEGANMPSTLGAVEQFIKAGILYAPGKASNAGGVATSGLEMSQNAIRLSWAREEVDSRLFGIMQSIHESCLKYGKVGDKVNYVNGANIAGFVKVADAMLAQGF

SEQ ID NO: 10262 - protein, 255 aa, Thermotoga maritima MSB8
MKEVFDLRGRVALVTGGSRGLGFGIAQGLAEAGCSVVVASRNLEEASEAAQKLTEKYGVETMAFRCDVSNYEEVKKLLEAVKEKFGKLDTVVNAAGINRRHPAEEFPLDEFRQVIEVNLFGTYYVCREAFSLLRESDNPSIINIGSLTVEEVTMPNISAYAASKGGVASLTKALAKEWGRYGIRVNVIAPGWYRTKMTEAVFSDPEKLDYMLKRIPLGRTGVPEDLKGVAVFLASEEAKYVTGQIIFVDGGWTAN

SEQ ID NO: 10263 - protein, 131 aa, Cicer arietinum
ERGVGLEHEDENIADLYLAVQDGIISGTTDYDILFGQLLENESGLKGSPPTAKSFVENLPLVELTEEELKGKDIVCAVCKDEVMLEEKVRKLPCSHCYHGDCILPWLSIRNTCPVCRFELPTDDADYERSK

SEQ ID NO: 10264 - protein, 426 aa, Schizosaccharomyces pombe
MKRVVITGLGAVTPLGNGVKTNWRNLIQGKSGIVSLKGFPEYEQIPSKVAGVIPRGKEKEEWNVLDYVDQGKLREVATFTQLALTSAAEALKDARWIDIDEQEKLATGVCFGTGIGNLDDALNENGVLNKAGIRKVSPRVISKILINMPAGYISQRYGFTALNHTTTTACAAGCHAIGDAFNFIKLGHADVIIAGGSESCINPLTVAGFSKARSLSTKFNDNPKAASRPFDANRDGFVIGEGSAALVLEELEHAKNRNAHIYAEIVGYGLASDSYHITAPNPNGDAAYYAMKRSLKQAGLSASQLDYINAHATSTKLGDVAESIAITRLLCDVNRNPEAFPVSSSKGSIGHLLGAAGAIESVYTVLTVQKGVLPPTLNFEYSDIPQQFQCDYVPNVAKESRINVALSNSFGFGGTNASLCFKKFLQ

SEQ ID NO: 10265 - protein, 334 aa, Klebsiella pneumoniae
MMAESRIIRAAAAQIAPDLHEASRTLARVLEAIDEAAEQGAEIIVFPETFVPYYPYFSFITPAISAGAAHLKLYEQAVVVPGPITCAVGERARLRGIVVVLGVNERDRGTLYNTQLVFDASGELVLKRRKITPTYHERMIWGQGDGAGLKVVDTAVGRVGALACWEHYNPLARYSLMTQHEEIHCSQFPGSLVGPIFAEQMEVTIRHHALESGCFVINATGWLSEEQIAELTPDPALQKGLRGGCHTAIISPEGRHLAPPLTQGEGILIADLDMALITKRKRMMDSVGHYARPELLSLRLDNTPARYVVTRETEPETGGGRDAEHTVHAPAADY

SEQ ID NO: 10266 - protein, 686 aa, Oryza sativa
MRHLAVVLLLLLLLAALAASQEFTYSGFRNGGGGGGAGNSPNLTLNGVTELRPDGILRLTNETSRLIGHAFYPSPLRLLAGGAAVSFSTEFAFAVVPEYPKLGGHGLAFVVAPDPRLPGALPSQYLGLLSAADVGNATNHVLAVEFDTVQDFEFGDINDNHVGVDLNSLVSNASASAAPVNLKSGDTIVAWVDYDGGAKLLNVSIAAASASKPASPLISFHVDLSPIFLDQMFVGFSASTGLLASSHYLMGWSFKLGGGAAPPLDVPSLPSLPRPAAGGKNRTSAILAAAFSAFVALVALAGAAAYAAHRYKNRDVVEPWELDYGPHRYSYAELRRATRGFRDRELLGAGGFGKVYRGVLPGKPPRTVVAVKRVSHESRQGLREFVAEIASIGRLRHRNLVQLQGWCRRRGDLLLVYDYMPNGSLDKHLFGDGLAAARLTWGARVKVLRDVAAALLYLHEGWERVVLHRDVKASNVLLDGDMSGRLGDFGLAKLHEHGANPSTTRVVGTLGYLAPELTRTGKATAAADVFAFGALALEVVAGRRPIEPRAPPEELVLAEWAWERYAAGEVGAVVDARLRGEFDAGEAEAAVKVALWCSHPAPAVRPTMREVARYLDAGGAAEVPEPPPPPPPPPVSSGEVGYYDFVHSYPTSSYERAAAAADGVTQTSVATFPYSPLSMRSSHVSV

SEQ ID NO: 10267 - protein, 220 aa, Pseudomonas aeruginosa UCBPP-PA14
MRDIIDGFLRFQRDAYPARSQLFKSLATRQAPKALFIACSDSRVVPELLTQREPGELFVIRNAGNIVPGYGPQPGGVSASVEYAVAVLGVGDIVVCGHSDCGAMGAIASCACLDQLPAVAGWLHHAEAARAMNSAHEHASEAARLDALVRHNVIAQLANLRTHPCVARALEQGRLNLHGWVYDIESGRIDALDGASRRFVSLAEHPEVRAVGGDPGQAVA

SEQ ID NO: 10268 - protein, 422 aa, Sinorhizobium meliloti 1021
MTSLTDRKNAAISRGVGMTTQVYADRAENAEIWDKEGNRYIDFAAGIAVVNTGHRHPKVIAAVKAQLDRFTHTCHQVVPYENYVHLAERLNAIVPGDFAKKTIFVTTGAEAVENAVKIARAATGRQAVVAFGGGFHGRTFMGMALTGKVVPYKVGFGAMPADVFHAPFPIELHGVTVEQSLSALKKLFAADVDPARVAAIIIEPVQGEGGFYPVPTAFMKALREVCDQHGILLIADEVQTGFARTGKLFAMEHHGVAPDLTTMAKSLAGGFPLAAVTGRAEIMDAPGPGGLGGTYGGNPLGIAAAHAVLDVIAEENLCERANQLGNRLKQRLAAIREKAPEIVDIRGPGFMNAVEFNDVRTNLPSAEFANKVRLLALEKGLILLTCGVHGNVIRFLAPITIQDEVFAEALDTIEASILEARG

SEQ ID NO: 10269 - protein, 251 aa, Pseudomonas putida
GTLIDSVPDLAAAVDRMLLELGRPPADLEAVRHWVGNGAQVLVRRALAGGIEHDAVDDVLAEQGLALFMEAYAQSHELTVVYPGVKDTLRWLQKQGVEMALITNKPERFVAPLLDQMKIGRYFRWMIGGDTLPQKKPDPAALLFVMQMAGVTPQQSLFVGDSRSDVLAAKAAGVQCVGLTYGYNHGRPIHDETPSLVIDDLRALLPGCEDPATGITLADLQASQDRESTVAVTGKFWMKVIKALARWRWRA

SEQ ID NO: 10270 - protein, 620 aa, Arabidopsis thaliana
MLTADIPPNQSIYIQNLNERIKKEELKRSLYCLFSQFGRILDVVALKTPKLRGQAWVTFSEVTAAGHAVRQMQNFPFYDKPMRLQYAKAKSDCLAKAEGTFVPKDKKRKQEEKVERKREDSQRPNTANGPSANGPSANNGVPAPSFQPSGQETMPPNNILFIQNLPHETTSMMLQLLFEQYPGFKEIRMIDAKPGIAFVEYEDDVQASIAMQPLQGFKITPQNPMTIMSSTSFTDLLGSSGVDCYEDDEDLRVSGSSFGGYYPERTGSGLPKFKTAQPPPLPISQSSHNFTFSDYLDSPLLLSSSHSLISPTTGTFPLQGFNGTTNNHSDFPWQLQSQPSNASSALQETYGVQDHEKKQEMIPNEIATQNNNQSFGTERQIKIPAYMVSRNSNDGYGWRKYGQKQVKKSENPRSYFKCTYPDCVSKKIVETASDGQITEIIYKGGHNHPKPEFTKRPSQSSLPSSVNGRRLFNPASVVSEPHDQSENSSISFDYSDLEQKSFKSEYGEIDEEEEQPEMKRMKREGEDEGMSIEVSKGVKEPRVVVQTISDIDVLIDGFRWRKYGQKVVKGNTNPRSYYKCTFQGCGVKKQVERSAADERAVLTTYEGRHNHDIPTALRRS

SEQ ID NO: 10271 - protein, 161 aa, Elaeis guineensis
AEENRHGDLLNKYLYLSGRVDMRQIEKTIQYLIGSGMDPRTENSPYLGFIYTSFQERATFISHGNTARHAKEHGDLKLAQICGIIASDEKRHETAYTKIVEKLFEIDPDGTVLAFADMMKKKISMPAHLMYDGQDDNLFEHFSAVAQAFGCVHGQGLCRHT

SEQ ID NO: 10272 - protein, 813 aa, Oryza sativa
MQFPFSGAGPGVFTSSPALSLALADAVAGRNSGGGGKMVTAAHGGVGGGGGGGRAKARDALEVENEMSRSGSDHLDVVSCGDAGGGGGDDDDDEDAEHGNPPKRKKRYHRHTPQQIQELEAMFKECPHPDEKQRAELSKRLGLEPRQVKFWFQNRRTQMKMQLERHENSLLKQENDKLRSENLSIREATSNAVCVGCGGPAMLGEVSLEEHHLRVENARPKDELSRVCALAAKFLGKSISVMAPPQMHQPHPVPGSSLELAVGGIGSMPSATMPISTITDFAGAMSSSMGTVITPMKSEAEPSAMAGIDKSLFLELAMSAMDELVKMAQMGDPLWIPGASVPSSPAKESLNFEEYLNTFPPCIGVKPEGYVSEASRESGIVIIDDGAALVETLMDERRWSDMFSCMIAKASTTEEISTGVAGSRNGALLLVSDEHSVMQAELQVLSPLVPIREVKFLRFSKQLADGVWAVVDVSADELMRDQGITSASSTANMNCRRLPSGCVLQDTPNGFVKVTWVEHTEYDEASVHPLYRPLLRSGLALGAGRWIATLQRQCECLALLMSSIALPENDSSAIHPEGKRSMLKLARRMTDNFCAGVSTSSTREWSKLVGLTGNIGEDVHVMARKSVDEPGTPPGVVLSAATSVWMPVMPERLFNFLHNKGLRAEWDILSNGGPMQEVTSIAKGQQNGNTVCLLKASPTKDKQNSMLILQETCADASGSMVVYAPVDIPAMHLVMSGGDSSCVALLPSGFAILPAGPSIGADHKMGGSLLTVAFQILANSQPSAKLTVESVETVSNLISCTIKKIKTALHCDV

SEQ ID NO: 10273 - protein, 606 aa, Pseudomonas aeruginosa UCBPP-PA14
MHRTSRRTFVKGLAATGLLGGLGLWRAPAWALAGPGQQNLLAGDSFDLFIGETPVNLSGSPATAMTINGSLPGPTLRWREGDNVTLRVRNRLAEDTSIHWHGIILPANMDGVPGLSFEGIAPGGLYEYRFKVRQNGTYWYHSHSGLQEQAGVYGALVIDAREPEPFSYDRDYVVLLSDWSDEKPQRILAKLKKQSDYYNFHKRTVGDFIDDVSANGWAATLADRKMWAEMKMSPTDLADVSGYTYTYLLNGQPPDGNWTGLFRPGEKLRLRFVNASAMSYFDVRIPGLKMTVVAADGQHVEPVSVDELRIAVAETYDVIVEPGGERAYTLFAQSMDRSGYARGTLALAEGLSAPVPTPDPRPLIGMDDMGMGGMDHGAMGHGAATRPASEMDHSKMSGMDMNGMDHSKMAGMDMSGMDHSRMGMGAMPMQSHPASEDGNPLVDMQTMTPTPKLADPGLGLRDNGRRVLTYADLRSRFADPDGREPGRTIELHLTGHMEKFAWSFDGIKFSDAEPLRLTYGERLRIVLVNDTMMTHPIHLHGMWSDLEDEQGNFLVRKHTIDMPPGTRRSYRVTADALGRWAYHCHLLFHMEMGMFREVRVDEGDNA

SEQ ID NO: 10274 - protein, 411 aa, Rickettsia africae
DSEFAELKIRGKIFKLPILKASIGEDVIDISRVSAEADCFTYDPGFMSTASCQSTITYIDGDKGILRHRGYDIKDLAEKSDFLEVAYLLIYGELPSGEQYNNFTKQVAHHSLVNERLHYLFQTFCSSSHPMAIMLAAVGSLSAFYPDLLNFKEADYELTAIRMIAKIPTIAAMSYKYSIGQPFIYPDNPLDFTENFLHMMFATPCTKYTVNPIIKNALNKIFILHADHEQNASTSTVRIAGSSGANPFACISTGIASLWGPAHGGANEAVINMLKEIGSSEYIPKYIAKAKDKNDPFRLMGFGHRVYKNYDPRAAVLKETCKEVLKELGQLDNNPLLQIAIELEAIALKDEYFIERKLYPNVDFYSGIIYKAMGIPSQMFTVLFVIARTVGWMAQWKEMHEDPEQKISRPR

SEQ ID NO: 10275 - protein, 412 aa, Rickettsia bellii
NTEFAELKIRDKIFKLPILKASIGQDVIDISKVYSEADCFTYDPGFMSTASCRSTITYIDGDQGILRHRGYDIKDLAEKSDFLEVAYLLIYGELPNNKQYNDFTKKVAHHALVNERLHYLFQTFCSSSHPMAIMLAAVGSLSAFYPDLLNFFKEADYELTAIRMIAKIPTIAAMSYKYSIGQPFVYPDNSLDFTENFLHMMFATPCEKYKVNPVIKNALNKIFILHADHEQNASTSTVRIAGSSGANPFACVSTGIASLWGPAHGGANEAVINMLKEIGSVENIPKYIAKAKDKNDNFRLMGFGHRVYKNYDPRAAVLKETCKEVLKELGQLDNNPLLQIAIELEAIALKDEYFIERKLYPNVDFYSGIIYKAMGIPPQMFTVLFATARTVGWMAQWKEMHEDPEQKISRPR

SEQ ID NO: 10276 - protein, 465 aa, Ipomoea batatas
MGASRTGCYLLAVVLAAVMNAAIAGITSSFIRKVEKTVDMPLDSDVFRVPPGYNAPQQVHITQGDHVGKAMIVSWVTVDEPGSSKVVYWSENSQHKKVAKGNIRTYTYFNYTSGYIHHCTIRNLEYNTKYYYEVGIGNTTRSFWFTTPPEVGPDVPYTFGLIGDLGQSFDSNRTLTHYERNPIKGQAVLFVGDLSYADNYPNHDNVRWDTWGRFVERSTAYQPWIWTAGNHEIDFAPEIGETKPFKPFTKRYHVPYKASGSTETFWYSIKRASAYIIVLSSYSAYGKYTPQYKWLEEELPKVNRTETPWLIVLMHSPWYNSYNYHYMEGETMRVMYEPWFVQHKVDLVFAGHVHAYERSERISNVAYNIVNGECTPVRDQSAPVYITIGDGGNLEGLATNMTDPQPEYSAFREASFGHATLDIKNRTHAYYSWHRNQDGYAVEADSMWVSNRFWHPVDDSTTTKL

SEQ ID NO: 10277 - protein, 183 aa, ASPERGILLUS NIDULANS FGSC A4
MSDGEETQSNPPVAAEEVEVPAESGAGGQMSVLDALKGVLRIALIHDGLARGLREAAKALDRRQAHMCVLNEGCEEEAYKKLVVALCSEHKIPLIKVPDGKMLGEWVGLCTYLEPPKNNYQRTLEELQKFTIGRMLTVIYLTGQLDREGNARKVVNCSCVVVKDWGEESQERSVLLNYFQTEQ

SEQ ID NO: 10278 - protein, 357 aa, Candida glabrata CBS138
MSATALRIAPIASRTFQRRLGYLLAGVATGAAATVAYKAQKNNNYYKYNNNNNNNSGFKAGALAAAAGVVHLAHEEDKKTADYQKVYNLIAERLRDDDEYDNYIGYGPVLVRLAWHSSGTWDKNDNTGGSYGGTYRYKKESQDPSNAGLENAAKFLEPVKKQFPWISYGDLYTLGGVVGIQELQGPKIPWRSGRTDLPEDMTPDNGRLPDGDKDANYVRNFYKRLDFNDREVVALLGAHALGKTHLKNSGFEGPWGAANNIFTNEFYLNLLNEDWKLEKNDAGNLQYNSPKGYMMLPTDYALIQDSNYLKIVKEYAADQDAFFRDFSKAFAALLERGIDFPKNQPVHIFKTLDEQGL

SEQ ID NO: 10279 - protein, 411 aa, Rickettsia canadensis
DSEFVELKIRGKIFKLPILKASIGEDVIDISRVSSEADCFTYDPGFMSTASCRSTITYIDGDKGILRYRGYDIKDLADKSDFLEVAYLLIYGELPSSEQYNNFTKKVAVHSLVNERLHYLFQTFCSSSHPMAIMLAAVGSLSAFYPDLLNFKEADYELTAIRMIAKIPTMAAMSYKYSIGQPFIYPDNSLDFTENFLHMMFATPCMKYEVNPVIKNALNKIFILHADHEQNASTSTVRIAGSSGANPFACISTGIASLWGPAHGGANEAVINMLKEIGSSENIPKYIAKAKDKDDPFRLMGFGHRVYKNYDPRAAVLKETCNEVLKELGQLENNPLLQIAIELEAIALKDEYFIERKLYPNVDFYSGIIYKAMGIPSQMFTVLFAIARTVGWMAQWKEMHEDPEQKISRPR

SEQ ID NO: 10280 - protein, 252 aa, Prunus emarginata
AHYKYEADVGNAIAEAIRSGLVKREELFITSKASNHGHVVEACKDSLKKLQLDYLDLYLVHYPLATKHSGVGTTASLLDKNKVLDIDVTVSLESTWHDMEKTVSLGLVRSIGLSNYELFLTRDCLSYAKIKPQVNQFETHPYFQRASLVKFCWKHGVCPMAHTPLGGATANVKSFGSISPLDDPVLQGLAKKYKKSVAQIALRWNIDRNTPVIPKSSKIQRLKENLEVLTFKLEKEDIELINSIDKKSRTTL

SEQ ID NO: 10281 - protein, 486 aa, Nocardioides sp. JS614
MADFTLAQIPDLPLDLCVGGKEVPASDGGRFDVLDPATGAVLTSVANGTVEDALACVDAADAAAAAWAATAPRERSEILRKAFELMRERADELAHLISLENGKALADARGEVAYAAEFFRWYAEEAVRAAGSVMTAPSGANRIVVLQQPVGICVLVTPWNFPAAMATRKIGPALAAGCTVVLKPASDTPLTALLMAKILADAGVPAGVVNVLPARRSGAVVSAMLHDPRVRKLSFTGSTEVGRVLLREAADQVVNCSMELGGNAPFIVLDDADLDAAVDGAMIAKMRNAGEACTAANRFYVHADVADEFSRRLAERMAALRVGPGTADDTEVGPLVNDESAAKVDELVRGAVSAGARVVVGGRRPEREGYYYEPTVLLDVPVDAEILGEEIFGPVAPVVTFTDEDDAIRMANETEYGLVSYVYTRDLARGMRVSERLDSGMVGLNRGLVSDPAAPFGGTKQSGVGREGGHEGMLDYLESKYVAVSW

SEQ ID NO: 10282 - protein, 280 aa, Streptococcus agalactiae A909
METYTLSNTLNIPKIGFGTWQLTEGEEAYKAVTHALKVGYTHIDTAQIYGNEHSVGRAIRDSGLARESIFLTTKIWNDKHDYHLAKASIDESLQKLGVDYIDLLLIHWPNPKALRENDAWKAGNAGTWKAMEEAYKEGKVKAIGVSNFMKHHLEALFETAEIKPMVNQIILAPGCAQEDLVRFCKGNDILLEAYSPFGTGAIFENESIKAIAEKYGKSVAQVALRWSLDNGFLPLPKSATPKNIEANLDIFDFQLNEDDIATLIQLDSGIKPKDPDNVSF

SEQ ID NO: 10283 - protein, 362 aa, Triticum aestivum
  misc_feature (95)..(95): Xaa can be any naturally occurring amino acid
  misc_feature (107)..(107): Xaa can be any naturally occurring amino acid
  misc_feature (215)..(224): Xaa can be any naturally occurring amino acid
  misc_feature (226)..(226): Xaa can be any naturally occurring amino acid
  misc_feature (229)..(230): Xaa can be any naturally occurring amino acid
  misc_feature (232)..(234): Xaa can be any naturally occurring amino acid
  misc_feature (237)..(238): Xaa can be any naturally occurring amino acid
  misc_feature (240)..(240): Xaa can be any naturally occurring amino acid
  misc_feature (243)..(243): Xaa can be any naturally occurring amino acid
  misc_feature (245)..(247): Xaa can be any naturally occurring amino acid
  misc_feature (288)..(288): Xaa can be any naturally occurring amino acid
  unsure (1)..(362): unsure at all Xaa locations
ITVHTAHGELSTVRRSTEQAVASVVTGWRQWRGGRTAHWSPRRRSPWPRWCAPGVAAAASKFDDVVQPSWANDHVLYEDDLLKLRLDSSSGGGFXSKNRFLYGKATXDLKLVPGDSAGVVTAFYLSSAGEKHNEFDFEFLGNVTGEPYLVQTNLYIDGVGNREQRIDLWFDPTADFHTYAVLWNPSQVVFLVDDTPIRVYDNKNASATKPKGRHXXXXXXXXXXQXASXXPXXXPMXXYXSIXNXXXWATRGGLVKTDWSHAPFVATVRDVRVEGCAWAANASTRTPXEVARCSGSSWGKEGPYWLKGKDMQEPSVPQSPQRVWAARHHLVYNTVVNRLVPRQPPMAPPVNPPFPRHPGGTY

SEQ ID NO: 10284 - protein, 411 aa, Rickettsia conorii
DSEFAELKIRGKIFKLPILKASIGEDVIDISRVSAEADCFTYDPGFMSTASCQSTITYIDGDKGILRHRGYDIKDLAEKSDFLEVAYLLIYGELPSGEQYNNFTKQVAHHSLVNERLHYLFQTFCSSSHPMAIMLAAVGSLSAFYPDLLNFKEADYELTAIRMIAKIPTIAAMSYKYSIGQPFIYPDNSLDFTENFLHMMFATPCTKYTVNPIIKNALNKIFILHADHEQNASTSTVRIAGSSGANPFACISTGIASLWGPAHGGANEAVINMIKEIGSSEYIPKYIAKAKDKNDPFRLMGFGHRVYKNYDPRAAVLKETCKEVLKELGQLDNNPFLQIAIELEAIALKDEYFIERKLYPNVDFYSGIIYKAMGIPSQMFTVLFAIARTVGWMAQWKEMHEDPEQKISRPR

SEQ ID NO: 10285 - protein, 423 aa, Streptomyces galilaeus
MTARRVVITGLGVIAPGGIGTKAFWERIVSGVSATRTITAFDASEFRSRMAAECDFDGVRSGLTVRDTARLDRATQFAVVAAREALADSGIEIDERNAHRTGVSLGSAVGCTQKLEEEYVARSDGGQRWLVDHAAGTPYLYDYFVPSSMAAEVAWEAGAEGPAALVSAGCTSGLDSLGHALDLIREGAVDIMIAGGSDAPIAPITVACFDAIKATSPRNDTPEHASRPFDRTRSGFVLGEGAAVLVLEERESALRRGAQIYAEIAGYAGRANAHHMTGLRPDGLEMSAAITGALDDARIDREAVGYVNAHGTATRQNDIHETAAIKHSLGEHARRVPVSSIKAVIGHSLGAVGSIEAVASALVIRHGVVPPTAGLHEPDPQLDLDYVPLIARDQATDTVLTVGSGFGGFQSAMVLTSAEGGRS

SEQ ID NO: 10286 - protein, 252 aa, Prunus emarginata
AHYKSEADVGNAIAEAIRSGLVKREELFITSKASNHGHVVEACKNSLEKLQLDYLDLYLVHYPLATKHSGVGTTASLLDENKVLDIDVTVSLESTWHDMEKTVSLGLVRSIGLSNYELFLTRDCLSYAKIKPQVSQFETHPYFQRESLVRFCKKHGVTPMAHTPLGGATANVKSFGSISPLEDPVLLGLAKKYKKSVAQIALRWNIERDTPVIPKSSKVERLKENLEVLNFKLEKEDIELINTIDKKSRTTL

SEQ ID NO: 10287 - protein, 334 aa, Pirellula sp. 1
MAATIYYENDADLSHLKGKKVAILGYGSQGHAQAQNLRDSGCEVIIGQRPGSANYDLAVSHGFEPMSIAEATKAADVINVLLPDEVQADIYRDSIRDNLSEGNVLMCSHGFNIHFGQIDPPKGIDTLLVAPKGPGHLVRSEYEKGGGVPALIALGEGASETTKQIGLAYAKGIGGTRGGVIETTFAEETETDLFGEQVVLCGGVSELVKAGFDTLVEAGYQPEMAYFECMHELKLIVDLLYEGGLSYMRYSISNTAEYGDYVTGPRIITDETKAEMKKVLEEIQQGEFARKWISENRAGAPFFKATRRRERLHGVEQIGLGLRRMMNWIDEKEV

SEQ ID NO: 10288 - protein, 407 aa, Streptomyces galilaeus
MSAATVVTGIGVLAPNGIGAEEFWAATLRAESGIGRITHFEPASYPSRLAGEVTGFSAREHLPSRLVPQTDRTTQFALTGSEWALRDSGLSADTLPAGERGVVTASASGGFEFGQRELGHLWGKDPRHVSAYMSFAWFYAVNSGQISIRHDLRGPTGVLVTDQAGGLDAVAQARRRIRKGTPVMLSGGMDASLCPYGLVAQISAGMLSESDDPTRAYRPFDPAADGHVPGEGGAILTLEDGDRARARGARSHGEISGYAATFDPRPGSGRPANLDRAIRGALADAGLSPRDIAFVLADGAGEPEPDRAEARALTDVFGPRGVPVTVPKSMTGRLYAGAAPLDLVTALFALRDGVVPPTVHVDEPDPAYDIDLVTGSARPVRGDAALVLARGRGGFNSAMVVRRPPAA

SEQ ID NO: 10289 - protein, 411 aa, Rickettsia helvetica
DSEFAELKIRGKIFKLPILKASIGEDVINISRVSAEADCFTYDPGFMSTASCQSTITYIDGDKGILRHRGYDIKDLAEKSDFLEVAYLLIYGELPSSEQYNNFTKQVAHHSLVNERLHYLFQTFCSSSHPMAIMLAAVGSLSAFYPDLLNCKEADYKLTAIRMIAKIPTIAAMSYKYSIGQPFIYPDNSLDFTENFLHMMFATPCTKYKVNPIIKNALNKIFILHADHEQNASTSTVRIAGSSGANPFACISTGIASLWGPAHGGANEAVINMLKEIGSSENIPKYIAKAKDKNDPFRLIGFGHRVYKNYDPRAAVLKETCKEVLKELGQLENNPLLQIAIELEAIALKDEYFIERKLYPNVDFYSGIIYKAMGIPSQMFTVLFAIARTIGWMAQWKEMHGDPEQKISRPR

SEQ ID NO: 10290 - protein, 229 aa, Pasteurella multocida subsp. multocida str. Pm70
MKKIEQLFANNYSWALRMKEENSSYFKELADHQTPSYLWIGCSDSRVPAEKLTNLGPGELFVHRNVANQVIHTDLNCLSVVQYAVEVLNIEHIIICGHTNCGGIKAAMADQDLGLINNWLLHLRDIWYKHSHLLGNLPPEKRADMLTKINVAEQVYNLGRSSIIKSAWKNGKKLSLHGWVYDVNDGFLIDQGVIATSRESLEISYRNAIARLLKLNEDEILKKDQDEEA

SEQ ID NO: 10291 - protein, 304 aa, Oryza sativa
MVCCCDDDDGSRVLEGGAGMADAGHDESGSPPRSGGVREQDRFLPIANISRIMKKAVPANGKIAKDAKETLQECVSEFISFVTSEASDKCQKEKRKTINGEDLLFAMGTLGFEEYVDPLKIYLHKYREMEGDSKLSSKAGDGSVKKDTIGPHSGASSSSAQGMVGAYTQGMGYMQPQSNFHILVVLQSFAFPYMYQVAQIYCNKYEVSREQIWDTPQIMELSPWIPYTINRIWKETHGSQDIRIQGRPREAANSALDWQWPSKHSSLASNFYGTRVVGGHHEYQRSTKKDTTHVNFASGLGDLG

SEQ ID NO: 10292 - protein, 509 aa, Zea mays
MAYPAAPHTSAAFLASFATPLPARCASPPTRRRAVSAAAIATTTTCVFADAPRGIKEEQADSGAQAAAAAAARRDVSPDTVASIILGGGAGTRLFPLTRTRAKPAVPVGGCYRLIDIPMSNCINSKINKIYVLTQFNSQSLNRHIARTYNFGEGVGFSGGSVEVLAATQTAGESGKKWFQGTADAVRQFLWLFEDARLKCIENILILSGDHLYRMDYMDFVQKHVDSGADISVACVPMDESRASDFGLMKADRNGHITDFLEKPKGADLESMQVDMGLFGLSPEFASTYKYMASMGIYVFKADVLRKLLRGHYPTANDFGLEVIPMAAKDYDVQAYLFDGYWEDIGTIKSFFEANLALTDQSPNFYFYDPVKPIFTSPRFLPPTKVLNSIVSHGCFLTECSVEHSVIGIRSRLEPGVQLKDTMMMGADYYQTEAERLSELSVGKVPVGVGENTKIRNCIIDKNARIGKNVVIMNSENVQEADRPAEGYYIRSGITVVLKNAVILNGTKI

SEQ ID NO: 10293 - protein, 758 aa, Yersinia pestis biovar Medievalis str. 91001
MTILNHTLGFPRVGLKRELKKAQESYWAGNSTQEELLNVGRELRARHWQQQQQAGVDLVPVGDFAWYDHVLTTSLLLGNVPERHQNADGSIDIDTLFRIGRGRAPTGKPAAAAEMTKWFNTNYHYMVPEFQQGQQFKLGWTQLLDEVDEALALGHKIKPVLLGPITYLWLGKVKGEQFDRLSLLNDILPVYQQVLAELAKRGIEWVQIDEPALVLELPQEWLDAYQPAYQALQGQVKLLLTTYFDSIGHNIDTIRALPVQGLHVDVVTGHDDLAVLNKNLPKEWLLSLGVINGRNVWRADLSSWFERLQPLVNSRPLWLGSSCSLLHSPIDLNEETRLDAEVKSWFAFALQKCAELALLTQALNAPNDAKLAELAAYSAPIRARRSSSRVHNAQVEQRLAAITSQDIERQLPYEARAETQRKRFNLPAWPTTTIGSFPQTTEIRGLRLDFKQGRLDGKNYRTGISEHIKHAIAEQERLGLDVLVHGEAERNDMVEYFGEHLDGFVFTQNGWVQSYGSRCVKPPVIIGDISRPEAITVEWAKYAQSLTEKPVKGMLTGPVTILCWSFPREDVSRETIAKQIALALRDEVEDLEKAGIGIIQIDEPALREGLPLRRADWQAYLQWAVDAFKLNAAVAQNDTQIHTHMCYCEFNDIMDSIAALDADVITIETSRSDMELLESFEDFAYPNEIGPGVYDIHSPNVPSVEWIEALLRKAAQRIPAERLWVNPDCGLKTRGWPETRQALANMVLAAQRLREEQV

SEQ ID NO: 10294 - protein, 242 aa, Crocosphaera watsonii WH 8501
MTQIQVLTDKPALITHALDLIVDKIHTTLEQQAQFTIALAGGSTPKPLYEALAQKSLPLEKIHIFWGDERYVAADHPDSNQLMARQAWLDQVKFPTVNIHPMPTGSNDPSVDAKTHNQELEEFFGVKAGEFPTFDLILLGMGDDGHTASLFPQTEALTVSDRLVTVGNKDGEPRLTFTYPLINNARCVMFLVAGDNKRPALRSIFSPNGDERLYPAKAVKPQGELLWLLDKGAGAELPKNWV

SEQ ID NO: 10295 - protein, 268 aa, Pasteurella multocida subsp. multocida str. Pm70
MRRFDTLFSQLQQKQQGAFVPFVTLCDPNLAQSFEIIQTLVENGADALELGFPFSDPMLDGPVIQAANQRALVAGCSTDASFQLLTQVRSTYPTLPISLLLCANLVYAQGIERFYQRCAEVGVDAVLIADLPLFAHREFTVMAEKYSIQQVFICPPNACEDTIKRVAQQTQGYTYLVSRSGVTGVENQQSADNLKTLVERLKAYQAPPILQGFGISQPQQVSDVLKIGVNGAISGSATVQIIEKYHHDPQACLAELAQFTQKMKQATT

SEQ ID NO: 10296 - protein, 416 aa, Triticum aestivum
MASAMELSLLNPAMHHHGIAAKTASHLPVLPARRGAVRFRVRAAAAAPPAPAAKPGSPKKRGKTEVNESLLTPRFYTTDFDEMEQLFNAEINKQLNQDEFDALLQEFKTDYNQTHFIRNPEFKEAADKMQGPLRQIFVEFLEHSCTGEFSGFLLYKELGRRLKKTNPVVAEIFSLMSRDEARHAGFGDKGLSDFNLALDLGFLTKARKYTFFKPKFIFYATYLSEKSGYWRYITICRHLKANPEYQVYPIFKYFENWCQDENRHGDFFSALLKAQPQFLNDWKAKLWSRFFCLSVYITMYLNDCQRSAFYEGIGIGLNTKEFDMHVIYETNRTTARIFPAVPDVENPEFKRKLDRMVDINLKIISIGESNDMPLVKNLKRVPLIAQLVSEIIAAYLMPPIESGSVDFAEFEPKLVY

SEQ ID NO: 10297 - protein, 368 aa, Prunus armeniaca
MATLVEPPDGIRQRGKHYYSMWQTLFEVDTKYVPIKPIGRGAYGIVCSSINRATNEKVAIKKINNVFENRIDALRTLRELKLLRHIRHENVIALKDVMMPIHRTSFKDVYFVYELMDTDLHQIIKSSQPLSSDHCKYFLFQLLRGLKYLHSANILHRDLKPGNLLINANCDLKICDFGLARTSGGTGQFMTEYVVTRWYRAPELLLCCDNYGTSIDVWSVGCIFAEILGRKPIFPGTECLNQLKLIINVLGSQHEPDLAFIDNPKARKYIKSLPYSRGTHFSRLYPQADPLAIDLLQRMLVFDPTKRISVTEALQHPYMSGLYDPRCNPPAQVPINLDIDENLAEPMIREMMWHEMLHYHPEAAFVNA

SEQ ID NO: 10298 - protein, 71 aa, Triticum aestivum
MAGTANCIDIILAIILPPLGVFLKFGCGHEFWICLLLTFLGYIPGIIYAIYAITKYTSKPSRVFRDTIFSG

SEQ ID NO: 10299 - protein, 572 aa, Schizosaccharomyces pombe
MKDNQQAVQLQQPTTIGHYLAVRLAQAGVKHHFVVPGDYNLGLLDKLQYNNYLEEVNCANELNCAFAAEGYARANGIAACVVTYSVGAFTAFDGIGGAYAEDLPVILISGSPNTNDIGSSHLLHHTLGTHDFSYQYEMAKKITCAAVSIQRPTEAPRLIDYAIKMALLKKKPVYIEVPTNVASQPCAAPGPASLITEPETSNQEYLQMAVDISAKIVNGKQKPVLLAGPKLRSFKAESAFLELANSLNCSVAVMPNAKSFFPESHPNYAGIYWGQASTLGAESIINWSDCIICAGTTFTDYSSNGWTSLPPKANVLHVDVDRVTVSDAEFGGVLLRDFLHELAKKVKANNASVVEYKRIRPESLEIPMENPKAALNRKEIIRQVQNLVNQETTLFVDTGDSWFGGMRITLPEKARFEIEMQWGHIGWSVPSAFGYAIGAPKRNVVVFVGDGSFQETVQEVSQMVRLNLPIIMFLINNRGYTIEVEIHDGPYNRIKNWDYAAIVEAFNAGEGHAKGFRVGNGHELAEAIRQAKENSQGPTLIECNIDQDDCSKELINWGHNVGAANGKPPAKE

SEQ ID NO: 10300 - protein, 534 aa, Cryptococcus neoformans var. neoformans JEC21
MSGERTPLLKQHAAEGPEHLSAARKRLIVATALLTGFLSTLDLTIVATCVATISSELNSSDQEAWIGTAYLWSNVTFTPLYGRLSDLLGRRAAYLQAIILFTVGTFFCGCATSFPMLVIARFVAGMGGGGMGTVSSVLMADIFSPAERGFYQGLGFAVFGAGTGLGGPIGGMLTQAFGWRAAFYAQVPIAAITIICALITVPSFKHEAFDLKHLKQIDFGGSFSLLVSIGALLQLLSRTGGSGSIAHDPFSIAMAVIFPVFFVIFVFVELKVASKPVLPLTLLTRRTPLCVGIIAGVIAIVNFNMIYHLPMVFEIVFQQPVSVAGAHLLPNSVAMTISAPIMGYIVKRTGRYKWLTVLNCAGPVVAMALLTNLKIGSSWANQWLSVLPMGAGFSGLLTLTLTAMLNSVEKHEIATSTGFVFVWRSLGQVFGVGLSGAVFQGTLSEQLNSRFDSPEIIDKLRHASQAIKTLPEEWQRVAARQAYSISLKYTFVFGLLGALGVFITSLFIPNDTIHDPSAPVQVAPIPDEEFDEEA

SEQ ID NO: 10301 - protein, 491 aa, Thalictrum flavum subsp. glaucum
MEVLSAAMVSLFFIFLFIFFILCDSRNKDLPPGPRPSPIVGNLLQLGEKPHAEFAKLAEKYGELFTLKLGSQTVVVASSPAAAAEILKTRDKILSGRYVFQSFRVYEHVLNSIVWSECNENWKLLRKVCRTELFSPKMIESQAYIREAKALDMVRFLRKKENQEVKIVEVVFNTLVNIFGNLIFSKDVFDLEDPTGGSAELKEHLWKLLDMGNSTNPADYFPIMGKFDLFGQRREVAKVLKQIYDVWGVMLKERRSITGHRENDFANVLLNAGLDDQKINALLMELFGAGTETTASTIEWAITELTNNLRVISKLRAELINVVGHKTVKESNIPHLPYLQAIVKETLRLHPPTPLLLPRRALETCKVMNYTIPKECQIMVNAWAIGRDPKTWDDPLTFKPERFMNSTVDYKGNDFELIPFGGGRRICPGLPLASQFLSLIVATLVQNFDWSFPQGMTPNEVPMDEKFGLPLQKDPPLLIVLKARTSMKLQD

SEQ ID NO: 10302 - protein, 219 aa, Actinidia deliciosa
ETGRHVRMLTHEIRSTLDRHTILKTTLVELGRTLDLEECALWMPSRRGLDLQLSHTLNNLIPIGSSVPSNLPIVNEVFNSAEAIRIPHTCPLARIKPRMGRYVPPEVVAVRVPLLHLSNFQINDWPDTSAKSYALMVLILPMDGIRKWRDHELELVEVVADQVAVALSHAAILEESMRARDQLLEQNVALDFARQEAEMAIRARNDFLAVMNHEMRTPM

SEQ ID NO: 10303 - protein, 161 aa, Chenopodium rubrum
MSLIPNNWFNTGRRSNIFDPFSLDEIWDPFFGLPSTLSTVPRSETAAETAAFANARIDWKETPEAHVFKADLPGVKKEEVKVEVEDGNVLRISGQRAREKEEKNDTWHRVERSSGQFMRKFRLPENAKVDQVKAGMENGVLTVTVPKNEAPKPQVKAINVY

SEQ ID NO: 10304 - protein, 169 aa, Paxillus involutus
  misc_feature (79)..(79): Xaa can be any naturally occurring amino acid
  unsure (1)..(169): unsure at all Xaa locations
DIPYELIVVDLTKGEHKKPDHTEKQPFGQIPYIDDNGFILYESRAIARYLIKNYPEKGTQGLIPSDPKAEALFEQAASXEVSNFNAFAAAVAVEKVFKPRRNLQADEAKVAENIATLKAKLDVYEVILGKQDYLAGDNVTLADLQHLPYGSLLFPAGYGDVFTSRKNVA

SEQ ID NO: 10305 - protein, 556 aa, Clostridium thermocellum ATCC 27405
MKKSIYKSMLVLALTTILLTSFLITGVMYRAFYLRMQQEIRNEAIFISSAYNLIGQEFFSSIADQESSSRITWVASDGTVLFDNMADAEKMENHLNRPEIADALKNGFGEAVHLSKTLGTQTFYWAVRLNDGTVLRVSATTNSVFKSVLGFFPYVALITLMVILLTMIIANLLTKKIFLPLNNLNLEDPLSNDVYDELSPLLIRMAKQNDQIKSQFKKLKEQKEEFNAITENIREGIIVLNNKGLILFINKSAADIFNVSTQDIINKHILTLDRSITLQKAIETAMGGHLFEDIFAIGENSFNLLASPVKDEVVVKGVILFILDVTEKQSAEKMRREFAANVSHELKTPLTSILGYAELMKSGMVKPEDISEFSDRIYNEARHLIDLIEDVIRISRLDEKNVQLPFEEIDLLELAKETVGRLSSLAQQKRIKLSVGGDNAIIFGVRQILEEMIYNLCDNAIKYNYENGKVDVNVKTFSDQVVLTVADNGFGIPREHQSRVFERFYRIDKSHSRETGGTGLGLSIVKHSAEFHNAKIRLMSKPGKGTTITVIFSREQ

SEQ ID NO: 10306 - protein, 277 aa, Staphylococcus aureus subsp. aureus COL
MEVKTFYNGNTMPQIGLGTFRVENDENCMESVKYAIEQGYRSIDTAKVYGNEEQVGAGIRAGLESTGIAREDLFITSKLYFEDFGRENVAAAYEASLSRLGLKYLDLYLVHWPGTNEAVMVDTWKGMEDLYKNNNVKNIGVSNFEPEHLEALLAQVSIKPVINQVEYHPYLTQHKLKLYLAAQRIVMESWSPLMNAQILNDETIKDIAQELGKSPAQVVLRWNVQHAVVTIPKSVTPNRISENFQIFDFELSDEQMTRIDGLNQDKRIGPDPKKFEG

SEQ ID NO: 10307 - protein, 969 aa, Arabidopsis thaliana
MEATAVNPSIVTASRTVQPYRRLSTLSLRFPTYRNKRVSPFTLTITRCSTTKSREAGQDSSISLKRGLVFDLGVSKDSWHSEEIGSPVVKRFLSDNEERWYMWYHGSSKQNPVSDSIGLAVSNNGIHWERGNGKVESSEDVGLVMSCGEDWWGFDTASVRPGEVVIMSSSKVRANSSVYWMYYTGYTKETVEFQSQDFTSVLGNPERFHLCDENAEKSRVYYRSLPGLAISQDGRHWARIEGEHHSGALFDVGSEKDWDFLYIASPHVVFHGDGDLRMYYHSFDEKTGEFCIGMARSRDGIKWLKLGKILGGRKSEKDGLGFFDELGGRYPCVTRNKRDESYVMAYEGVDRTGKTSIGFAVSKDGIKDWKRVQDEEAVIAVGEGGAWDNEGVGCPYLIEMDGDSDHQWRLYYRGVGNGGRTEIAMRGEQFELEEDRDGPLELLQSLRSKATELLLREEWEESIKVYTEFIDLSRRQVSSTGGSDPDPDSIAKLRKSLCLALCNRAEARARLRDFLEAMRDCDQALEIEKTHFKTLLCKGKVLLGLSKYSLALECFKTALLDPQASDNLETVTVYIEKCKKLEFQAKTGAFDLSDWILSEFRGKCPELAEFIGSIEIKKSELSGRGLFATKNIVAGTLVLVTKAVAIERGILGNGECGEKAQLIMWKNFVEEVTESVRKCGRTRRVVSALSTGQGEDSLEIPEIALFRPDEAFETCGDWKQSLDTEKLLSILDVNSLVEDAVSGKVMGKNKEYYGVGLWTLASFINHSCIPNARRLHVGDYVIVHASRDIKTGEEISFAYFDVLSPLEKRKEMAESWGFCCGCSRCKFESVLYATNQEVREFEMGLERGVDAGNAVYMVEEGMKRWKVKGKDKGLLRASYWGVYDEIYNSERLMKRWGRKIPTMEVVVDSVSDVVGSDERLMKMAVEGMMKKHGGFSNIVEMEKIMKLGKGVYGKVVSKKKAMKTLLGIE

SEQ ID NO: 10308 - protein, 429 aa, Staphylococcus aureus subsp. aureus COL
MNFSESERLQQLSNEYILGGVNSPSRSYKAVGGGAPVVMKEGHGAYLYDVDGNKFIDYLQAYGPIITGHAHPHITKAIQEQAAKGVLFGTPTELEIEFSKKLRDAIPSLEKIRFVNSGTEAVMTTIRVARAYTKRNKIIKFAGSYHGHSDLVLVAAGSGPSQLGSPDSAGVPESVAREVITVPFNDINAYKEAIEFWGDEIAAVLVEPIVGNFGMVMPQPGFLEEVNEISHNNGTLVIYDEVITAFRFHYGAAQDLLGVIPDLTAFGKIVGGGLPIGGYGGRQDIMEQVAPLGPAYQAGTMAGNPLSMKAGIALLEVLEQDGVYEKLDSLGQQLEEGLLKLIEKHNITATINRIYGSLTLYFTDEKVTHYDQVEHSDGEAFGKFFKLMLNQGINLAPSKFEAWFLTTEHTEEDIKQTLKAADYAFSQMK

SEQ ID NO: 10309 - protein, 90 aa, Artemisia vulgaris
MAVCGGVTECKNFENNVEIETIAKFAVEEHNKKENATLEFVKVVSAKEQVVSGKIYYITIETNDGKTYEAKLWVKPWENFQELQEFKPAA

SEQ ID NO: 10310 - protein, 519 aa, Neurospora crassa
MSRQRRLRAPKLGGGQASMMSSNINLLNTIIGAGTLAMPHAMSKFGVTLGVILIVWCGLTSAFGLYLQSRCTRYLDRGSSSFFALSQITYPNAAVVFDAAIAIKCFGVGVSYMIIIGDLMPAVAAAFGAGNTGWDFLADRRFWITVFFVVFLIPLSFPKKLDSLKYTSLVALFSIGYLIILVVYHYAVDDHSERGPIRLVTWEGPVAALSSLPVMIFAYTCHQNMFSIVNEIKDNSPASLVGVIGSSIGSAASVYVLVAITGYLTFGNEIQGNIVSMSSTIAKAAIVFLVTFSVPLQLHPCRASIDAVLRWRPGRSSRTQNVYSPPGSGNQPLLPSGGAPGAALDSHGAPVVAMSELRFALITSVILILSYFTAINVSSLDRVLAYVGSTGSTAISFILPGLFYYKISDPESIYHQRLTKEDDDAEYSSSSSSSSASDGDEEEGSPGPSGSGAGMMDSIASVRSNTSVGSRLARTLKRKWRWDLEHLETGLLRKMALGLSIYGVIVMVKDVRWGVGVGV

SEQ ID NO: 10311 - protein, 468 aa, Pseudomonas aeruginosa UCBPP-PA14
MNDPQGFEAISRREQGLQRRLSAAQMSMIAIGGAIGTGLFMGSAFAIGFAGPSVLLSYAIGALITLLLMGCLAEMTVAHATPGSFGAFAEHYVGPLAGFLVRYAYWAAIVLAVGTEVTAVAMYMKYWFAGIPEWVWIISFSTLLIGLNASSVKAFGNFEYCFSTLKIAAIVAFILLGAYLVFGSANPAYGVHNYSAHGGFFPHGLKGMWIAVVVSIFSYLSVEMIAVAAAEAEHPEQAVKSAFRSTIVRLVVFYLLTLALMLAIVPWDQAGQSQSPFVTVMQAIGLPGATGVMNFVVLVAALSAMNSQLYITTRMMFSLSRAGHAPKGLGELSRQGVPLNALLLSSVGIALATLLNLVYPEQSFTLMMAVSMFGALFTWLMIFFTHLCFRRHRARHGGAPLAFRMRLAPWSTLLGLALMAAILVTTFFTEAFRMTLVFGVPFLALLSALYLVFVRKPGRDCPIERATP

SEQ ID NO: 10312 - protein, 531 aa, Ashbya gossypii ATCC 10895
MVSRNREMSLVLYNRNNQNDTSIVVHDARTRSLVLFHEAAGRLSLAASDSASYEGGRCPHCGHLLGLQSYFIHDQYFQLLEDLPRPGTVEAPDTFIPQNLFTQGYYQNFFQELEVLGNGARGAVYKVEHTFLEHSLGVYALKKIAIGDDMAWLNKCIQEVKFMNSITQDCLHLVKYNHVWLERTSSVGHVTAQAGANKTTTATDDVPYMFILQQFCPGGNLEGVINTKVFQRLTGSESTEERKRLFRMRRRGLTGTRKGLSTRQVLSVASDLAHGLRELHSLDIIHRDLKPSNCLLLGEYDPSSTENFPKILIGDFGESQLRGQLRTATGATGTLEFTAPELVLFEDDVRVKAMTSSAPQFTFESDMYSLGMILYFVVFGELPFGPGGDMRLLKTQIKKYSCSASALQQRHSGYFLKPIDPRIFELISSLLSPSAADRPDADEAIAIINDILASCNSADAHVPAKGLVMHREAAMNLAVRSAQLAVSLAYMRWHYASPWNNLNLFLLGFSFNCSSSTRPYLLAITLALFLM

SEQ ID NO: 10313 - protein, 411 aa, Rickettsia japonica
DSEFAELKIRGKIFKLPILKASIGEDVIDISRVSAEADCFTYDPGFMSTASCQSTVTYIDGDKGILRHRGYDIKDLAEKSDFLEVAYLLIYGELPSGEQYNNFTKQVAHHSLVNDRLHYLFQTFCSSSHPMAIMLAAVGSLSAFYPDLLNFKEADYELTAIRMIAKIPTIAAMSYKYSIGQPFIYPDNSLDFTENFLHMMFATPYTKYTVNPIIKNALNKIFILHADHEQNASTSTVRIAGSSGANPFACISTGIASLWGPAHGGANEAVINMLKEIGSSEYIPKYIAKAKDKNDPFRLMGFGHRVYKNYDPRAAVLKETCKEVLKELGQLDNNPLLQIAIELEAIALKDEYFIERKLYPNVDFYSGIIYKAMGIPSQMFTVLFAIARTVGWMAQWKEMHEDPEQKISRPR

SEQ ID NO: 10314 - protein, 716 aa, Kluyveromyces lactis NRRL Y-1140
MYSWKLSSKFRFGRSKDKDEKHHKHMDEVDIDGNDNRSSVDRKATIVPGSATVVQSRASTDTRTTSDDTGHSVHSSGFKGTITEGSMSTDISGEDISMTNGRDRDSTEVQSKSNNNSSNFKQQQQQLLAQQQQIQYQQQQSQQQPVENENTHSSNGILTVKVYSGDSFKLPLPITYNEQVLSKLLSSGVDVTSTTQQDSLEELIQSMHGLSLLREEDKLLSGEDASHFIPASVILPGSKNLNSLLYFTIEFDNTIATIEPESGTLNRPIFNKISTFDVTRRLPFLKIDVFARIPSILLPSQNWQETQISNNDILGDYVKKIRNNSDIHLDSFHLPLNLKIDSASNIRLYNHHWIELESKMGKLNLSVDYKPSTHKHLSIDDFDLLKVIGKGSFGKVMQVRKRDTNKIYALKAIRKSYIVSKSEVTHTLAERTVLARVDNPFIVPLKFSFQSSEKLYLVLAFINGGELFYHLQREGRFDLSRSRFYTAELLCALEALHDFDIIYRDLKPENILLDYQGHIALCDFGLCKLNMKDQEKTTTFCGTPEYLAPELLLGQGYTKVVDWWTLGVLLYEMLTGLPPYYDEDVPKMYKKILQDPLRFPDDFDKDAKDLLIGLLCRDPKRRLGYHGSDEIKSHPFFNQLSWKRLKMKGYIPPYKPPVMGAMDTSNFDQEFTREQPVDSVVNDFLSESVQQQFGGWTYVGSEQLGQSMLPDRSFQT

SEQ ID NO: 10315 - protein, 190 aa, Arabidopsis thaliana
MQRAQWLRAALLGANDGLVTVASLMMGVGSIKEDVKAMLLVGFAGLVAGACSMAIGEFVSVCTQRDIETAQMKRAIEHKTSLSAIDEQEEEEKKERLPNPGQAAIASALAFSVGAAMPLLGAVFIENHKVRMVVVAVVATIALVVFGVTGAVLGKTSVVKSSVRVVIGGWMAMALTFGLTKFIGSAAMQI

SEQ ID NO: 10316 - protein, 544 aa, Emericella nidulans
MGIASLERDTKGGTRFTGCTSIREFEFLGKLGEGTFGEVYKARAKRDGSIVALKKILMHNERDGFPITALREIKLLKMLSHTNIMQLREMAVERSKGEGRKKPSMYMVFPYMEHDLSGLLENPEVHFSEAQIKCYMIQLLEGLKYLHGNCILHRDMKAANLLISNQGILQIADFGLARPFDEAPPQPGKGAGEAKRDYTTLVVTRWYRPPELLLQLRRYTSAIDMWGVGCVFGEMFKGKPILAGNSDLNQAQLIFSLVGTPTEENMPGWSSLPGCEGVKHFGNRPGNLAEVFKDQGPMAISLLTELLKLDWRKRVNAIDALKHPYFSTPPLPARPGDLPSFEDSHELDRRRFRGQRAAMPPAPAGGSVGMSRNGGWSTNSGSRTGAETRNPRISSAARSQGNQLRDAWSNEPQQAWQRRGNEELKDPNHSFSSRHRDGGLPPKPPAPIQHSWASGHSDKTGRDRGYGARYGGPEGSVDSYVPNYGGSDRNRDRDQGTAISDRRGSYYDKSHQTSKLDYSREIPSRRRSRSPNYRERVDRGPYRR

SEQ ID NO: 10317 - protein, 237 aa, Paenibacillus macerans
MKKKSCFTLVTTFAFSLIFSVSALAGSVFWEPLSYFNPSTWEKADGYSNGGVFNCTWRANNVNFTNDGKLKLGLTSSAYNKFDCAEYRSTNIYGYGLYEVSMKPAKNTGIVSSFFTYTGPAHGTQWDEIDIEFLGKDTTKVQFNYYTNGVGGHEKVISLGFDASKGFHTYAFDWQPGYIKWYVDGVLKHTATANIPSTPGKIMMNLWNGTGVDDWLGSYNGANPLYAEYDWVKYTSN

SEQ ID NO: 10318 - protein, 136 aa, Methanosarcina mazei
MVLKNIKYALKNIPKERVTRLCPEVESPLSERFRGLQTLDKSKCIGCGICANTCPNSAIKIVKAPIAPGSEKKRWFPQIDIGHCLFCGLCIDQCPKGALSSGKEYCKGMVKWAHKDLLMTPEKLAREVDIQEGDER

SEQ ID NO: 10319 - protein, 411 aa, Rickettsia prowazekii
NLEFAELKIRGKLFKLPILKASIGKDVIDISRVSAEADYFTYDPGFMSTASCQSTITYIDGDKGILWYRGYDIKDLAEKSDFLEVAYLMIYGELPSSDQYCNFTKKVAHHSLVNERLHYLFQTFCSSSHPMAIMLAAVGSLSAFYPDLLNFNETDYELTAIRMIAKIPTIAAMSYKYSIGQPFIYPDNSLDFTENFLHMMFATPCTKYKVNPIIKNALNKIFILHADHEQNASTSTVRIAGSSGANPFACISTGIASLWGPAHGGANEAVINMLKEIGSSENIPKYVAKAKDKNDPFRLMGFGHRVYKSYDPRAAVLKETCKEVLNELGQLDNNPLLQIAIELEALALKDEYFIERKLYPNVDFYSGIIYKAMGIPSQMFTVLFAIARTVGWMAQWKEMHEDPEQKISRPR

SEQ ID NO: 10320 - protein, 318 aa, Streptococcus agalactiae A909
MDKKKILVTGIVPKEGLRKLMDRFDVTYSEDRPFSRDYVLEHLSEYDGWLLMGQKGDKEMIDAGENLQIISLNAVGFDHVDTAYAKEKGIVVSNSPQAVRVPTAEMTFALILAASKRLAFYDSIVRSGEWIDPSEQRYQGLTLQGSTLGIYGMGRIGLTVANFAKAFGMTVVYNDVYRLPEDKEKELGVTYLEFDQLIETADVITIHAPALPSTIHKFNKDVFAKMKSRSYLINAARGPIVSEEALIEALKEGEIAGAGLDVFENEPQVSEGLRSLDNVIMSPHAGTGTIEGRRTLAEEAADNIIAFFDGKPQNIVNK

SEQ ID NO: 10321 - protein, 266 aa, Paenibacillus larvae
GSGVIMDQRGYIITNKHVINDADQIIVALQDGRVFEALLVGSDSLTDLAVLKINATGGLPTIPINARRVPHIGDVVLAIGNPYNLGQTITQGIISATGRIGLNPTGRQNFLQTDASINHGNSGGALVNSLGELMGINTLSFDKSNDGETPEGIGFAIPFQLATKIMDKLIRDGRVIRGYIGIGGREIAPLHAQSGGIDQLQGIVVNEVSPDGPAANAGIQVNDLIISVDNKPAISALETMDQVAEIRPGSVIPVVVMRDDKQLTLQ

SEQ ID NO: 10322 - protein, 160 aa, Oryza sativa; identical to SEQ ID NO: 1200

SEQ ID NO: 10323 - protein, 107 aa, Glycine max
DMMRKKISMPAHLMYDGEDNNLFEHFSSVAQRLGVYTAKDYADILEFLVQRWKVADLTGLSGEGRRSQDYVCTLATRFRRLDERAQARAKQGPVVPFSWVYDRKVQL

SEQ ID NO: 10324 - protein, 150 aa, Arabidopsis thaliana
MYMIESKGGAIACMLLALLFLGTWPAIMTLTERRGRLPQHTYLDYTLTNLLAAVIIALTLGEIGPSRPNFFTQLSQDNWQSVMFAMAGGIVLSLGNLATQYAWAYVGLSVTEVITASITVVIGTTLNYFLDDRINRAEVLFPGVACFLIA

SEQ ID NO: 10325 - protein, 411 aa, Rickettsia rhipicephali
DSEFAELKIRGKIFKLPILKASIGEDVIDISRVSAEADCFTYDPGFMSTASCQSTITYIDGDKGILRHRGYDIKDLAEKSDFLEVAYLLIYGELPSGEQYNNFTKQVAHHSLVNERLHYLFQTFCSSSHPMAIMLAAVGSLSAFYPDLLNFKEADYELTAIRMIAKIPTIAAMSYKYSIGQPFIYPDNSLDFTENFLHMMFATPCTKYKVNPIIKNALNKIFILHADHEQNASTSTVRIAGSSGANPFACISTGIASLWGPAHGGANEVVINMLKEIGSSEYIPKYIAKAKDKNDPFRLMGFGHRIYKNYDPRAAVLKETCKEVLKELGQLDNNPLLQIAIELEAIALKDEYFIERKLYPNVDFYSGIIYKAMGIPSQMFTVLFAIARTVGWMAQWKEMHEDPEQKISRPR

SEQ ID NO: 10326 - protein, 348 aa, Brassica rapa subsp. pekinensis
MDQWFYLFPAEDSHLHHRDNALTPPSSSLMPSFSREMEMSAIVSALTHVVSGNVPPHQFVGGGEGTSNSSSSSGQKRRREVEEGGGGGKSVKAANTLTVDQYFSGGNSSSRVREASSNMSGSGPTYEYTTTTTTNTETSSLNGDQQPRRRYRGVRQRPWGKWAAEIRDPFKAARVWLGTFDNAESAARAYDEAALRFRGNKAKLNFPENVKLVRPATTQSVQQTTAVQTPTQFRNSTSTSTLLPLRPAVDSQPLIQPYNLSYSEMARHQQQFQQHNQQTMDLYDQMSFPLRFGYTGDSMMQSTSSSSSHSRPLFSPAAVQPSETGYLQDIQWSPDKTSNHNYNNSSSS

SEQ ID NO: 10327 - protein, 354 aa, Nicotiana tabacum
MAADNIYDFVASNLLCTETKSLCFDDVDSLTISQQNIETKSKDLSFNNGIRSEPLIDLPSLSEECLSFMVQREMEFLPKDDYVERLRSGDLDLSVRKEALDWILKAHMHYGFGELSFCLSINYLDRFLSLYELPRSKTWTVQLLAVACLSLAAKMEEINVPLTVDLQVGDPKFVFEGKTIQRMELLVLSTLKWRMQAYTPYTFIDYFMRKMNGDQIPSRPLISGSMQLILSIIRSIDFLEFRSSEIAASVAMSVSGEIQAKDIDKAMPCFFIHLDKGRVQKCVELIQDLTTATITTAAAASLVPQSPIGVLEAAACLSYKSGDERTVGSCTTSSHTKRRKLDTSSLEHGTSEKL

SEQ ID NO: 10328 - protein, 169 aa, Paxillus involutus
DIPYELIVVDLTKGEHKKPDHTEKQPFGQIPYIDDNGFILYESRAIARYLIKNYPEKGTQGLIPSDPKAEALFEQAASVEVSNFNAFAAAVAVEKVFKPRRNLQADEAKVAENIASLKAKLDVYEVILGKHDYLAGDNVTLADLQHLPYGSLLFPAGYGDVFTSRKNVA

SEQ ID NO: 10329 - protein, 355 aa, Thalictrum flavum subsp. glaucum
MALQEGVNYLSGLGLSRLICLPMALRAAIELNVFEIIFQAGPEAQLSPAEIVAKIPTKNPNAAIALDRILRMLGASSILSVTTMKDGRVYGLTEESRCLVADKNGVSVVPMLLFTSDKAVVESFYNIKDVVLEEGVIPFDRTHGMDFFAYAGKEQSVNKSFNQAMGAGSTIAFDEVFKVYKGFHDLKELVNVGGGIGTSLSNIIFKYPHIKGINFELPHVIADAPNYPGVEHIAGNMFEGVPNAQNILLKWVLHDWDDERSIKILQNCWKALPEGGTVIVVEFVLPQILGNNAESFNALTPDLLMMTLNPGGKERTTTEFDGLAKAAGFAETKFFPISQGLHVMEFHKATAGVAS

SEQ ID NO: 10330 - protein, 462 aa, Silicibacter pomeroyi DSS-3
MTTTQHTPTPRDNFLRENNGRHQIHPMTHPLIIENRPPRIIVKGEGSYVTDIDGKTYVDGVGGLWNVNVGHNRPEVKAAITAQMEEISYYSSFAGTVTPPSIELSAKIMEMTADEDMARVLFSANGSDAVETALKLSRQYWKLEGEPERTGFISLKQGYHGIQFGGTSVNGSTLYRSAYGPLLPGCYQVDSPWTYRNPYSEDPEELAEAVITQIDRLIQHQGAHTIAAFIAEPVQGAGGIIVPPASFWPRLRQVLDKYGILLISDEVVTGFGRTGAMFGARGWGVKPDIMCFAKGITAGYIPLGATVINERVFAAWQKGIDPTGFIMHGYTATGHALGCAAANATLKIVEDEDLPGNAGRMGQRLMEGLKDIPNWSSLVGEVRGKGLMVGLDLVADKDTREPIDPGKGQGEMVATFARDEGVIVRPAGPVIIISPPLTLSEKETDKIVDALIKALRRYEEEK

SEQ ID NO: 10331 - protein, 344 aa, Silicibacter pomeroyi DSS-3
MLPLQDFPKFTAAAVQASPVFLDAHKTAQKAVDLIAEAAGNGAELVVFPEVFIPGYPYWNWITDPVTGGAWFEKLVRASVFADGPEIDVIRDAARAHGCHVVMGLNERSPVSLGALYNTLLFIGPDGEVIGKHRKLVPTWAEKLTWTGGDGSSLKVYDTAIGPLGGLACGENTNTLARFTLLAQGELVHTASYISLPVAPPDYDMAEAIKLRSMSHSFEGKVFTVTATSTVSEEIIEAMEQVRPNARELLQRKSSAYSGVIGPDGREVVTGLIDDEGIVYAEIDLGKCIQPKQMHDITGHYNRFDIFDLRVNQRRQTPVALSGAAVTFTNEHEQADGSTEPASE

SEQ ID NO: 10332 - protein, 472 aa, Pseudomonas aeruginosa PAO1
MDGQHPHSGELKRGLKNRHIQLIALGGAIGTGLFLGSAGVLKSAGPSMILGYAIAGFIAFMIMRQLGEMIVEEPVAGSFSHFAHKYWGGFAGFLSGWNCWVLYILVGMSELTAVGKYIHYWWPEVPTWATAALFFVVVNAINLTNVKAFGEAEFWFAIIKVVAIIGMILLGCYLLFSGSGGPQASVSNLWAHGGFFPNGVSGLVMAMAIIMFSFGGLEMLGFTAAEADKPRTVIPKAINQVIYRILIFYIGALVVLLSLTPWDSLLQTLNASGDAYSGSPFVQIFSMIGSGTAAHLLNFVVLTAALSVYNSGTYCNGRMLLGLAEQGDAPRALARVDKRGVPVRALVVSALVTFLAVVVNYVIPHQALELLMSLVVAALVINWAMISMAHLKFRAQMDRQGTRTHFRAFWYPYGNYLCMAFVVFILGVMLLIPGIQVSVYAIPVWLLVMWACYRLKGAPRPMPGLRVKPVTE

SEQ ID NO: 10333 - protein, 169 aa, Paxillus involutus
EIPYELIVVDLTKGEHKKPDYKEKQPFGQIPYIDDNGFILYESRAIARYLIKNYPEKGTQGLIPSDPKAEALFEQAASIEVSNFNAFAAAVAVEKVFKPRRGLQADEAKVTENIESLKAKLDAYEVILGKQDYLAGNDVTLADLQHLPYGSLLFAAGYGDVITSRENVA

SEQ ID NO: 10334 - protein, 545 aa, Castanea sativa
MESMEVSLNREGGGNSSKGGGGGDAFIDRSKVRILVCDNDAKSLEEVSTLLLKCSYQVTSVRSARQVIDALNAEGANIDIILAELDLPLAKGMKLLKYINRDNDLRRIPVIMMSAQDEVSVVVKCLRLGAADYLVKPLRTNELLNLWTHVWRRRRMLGLAEKNILNYDFDLVASDPSDANTNSTTLFSDDTDDRSCRSTNPEMGLSVHEEDESAGAAVEPPYIELDEYRPDVPKISDRRTGQFSSGPKKSELKIGESSSAFFTYVKTSTLQKSSPGVANVEENVAQVRMGENHQACVQQVVNDPQINDSGEVWESYSQGDEFPSSNSMPDSFSIERSSTPSASMELPQQRDLKDERFSQVLSHPRNEHQLDASGLPAQTAFPYCMSGVVNQVMMPSAAQLYHKNLHDLQNHSPKAMMSQYHHLPQCPPHVNGMAPFPYYPVNICLQPGQMSASHSWPFGSPSSSEVNLSKVDRREAALIKFRQKRKERCFDKKIRYVNRKRLAERRPRVRGQFVRKVNGVNVDLNGHPTSVDSDEDDEEDEEKHA

SEQ ID NO: 10335 - protein, 768 aa, Castanea sativa
MDTYSSGEELVIKARKPYTITKQRERWTEDEHNRFLEALKLYGRAWQRIEEHIGTKTAVQIRSHAQKFFSKLEKEALVKGVPIGQALDIDIPPPRPKRKPSNPYPRKTSIGVPTSQVGTKDGKLFTSASSSDCKQALDLEKEPLPEKPNGDEKPENAKDNQDDNCSEVFTLHQEVHCSSVSSANRSSVPTPVALRNLNTLREFVPSMKRSITQDETNESYVTIELKGNQKLEKADAKQTIQDTGTSNGSKLGNHNVLHEKPIQGDKTQDLNCALPMDEMQATQNYPRHVPVQVVDGSLGTCTQTPSSDMSFQDSIFHPMGEVHRHHNPFTNPAASATTEHQNNVPRSVNQSFPAFHPPFTPIRHNQDDYQSFLHMSSTFSSLIVSTLMQNPAAHAAASFAATVWPYANVEASADSPASTQGVFPPRQMGSTPSMAAIAAATVAAATAWWAAHGLVPLCAPLPTAFTCNPASTAAVPPTDSGQAPAAKTEGEVNTLQTPPLQQLDPEYSEAVQAQHSDSKLPIPSSSDSEESGGAKLNSGPKATDHENAVTATELHDSNKTKGRKQVDRSSCGSNTASSSDRETDALEKQEMGKEEPKEPDANHSAADTSNRRCCSSSSRSFSYMNDSWKSVSEEGRLAFQALFSREVLPQSFSPPHDLKNMGNQKDNTTDDKQNANENDGNASLLDLNSQKSGSCSVQQGILNFEPNNNGEGLLTIGLAYGKLKARRTGFKPYKRCSVEAKENRVANASGQGEEKGPKRIRLEGEASI

SEQ ID NO: 10336 - protein, 399 aa, Pseudomonas aeruginosa PAO1
MSHFAKVARVPGDPILGLLDAYRNDPRADKLDLGVGVYKDAQGLTPILRSVKLAEQRLVEQETTKSYVGGHGDALFAARLAELALGAASPLLLEQRADATQTPGGTGALRLAGDFIAHCLPGRGIWLSDPTWPIHETLFAAAGLKVSHYPYVSADNRLDVEAMLAGLERIPQGDVVLLHACCHNPTGFDLSHDDWRRVLDVVRRRELLPLIDFAYQGFGDGLEEDAWAVRLFAGELPEVLVTSSCSKNFGLYRDRVGALIVCAQNAEKLTDLRSQLAFLARNLWSTPPAHGAEVVAAILGDSELKGLWQEEVEGMRSRIASLRIGLVEALAPHGLAERFAHVGAQRGMFSYTGLSPQQVARLRDEHAVYLVSSGRANVAGLDARRLDRLAQAIAQVCAD

SEQ ID NO: 10337 - protein, 405 aa, Oryza sativa (japonica cultivar-group)
MGDSGNASHRDHTIDILRNDATFPSTSHQDNHNNLDELHQTRGPLNDVPHVPESSASATPASISRNASFARRDQGHRQPNPLNSGFWISIELIVSLSQIIAAITVLSVSRNEHPHAPLAQWLIGYTIGCVATLPHLYWRFLHRNRQNTEQESTNQVSSERDVYEPNSYVVVSSAHGSEVVDSGNNGGVARIASPRVYALVACFKLALDCFFAVWFVVGNVWIFGGRTSLHDAPNLYRLCIVFLAFGFIGYALPFILCTMICCCLPCIISMMGIHEDLDFNRGATAEAIDALVAYKFQSKKFQDGEAGEDNGGVLAAGTDKERTISAEDAVCCICLSKFSNNEDLRELPCNHVFHLECVDKWLKINALCPLCKADLGGSTNAPDSSSRSSHDSNNSRVRNDVESQQ

SEQ ID NO: 10338 - protein, 445 aa, Ralstonia solanacearum
MKPAPHPLETTDLSYFWMPFTANRQYKAAPRLLVSAQGMYYRDADGREVLDGTAGLWCVNAGHCRKAIVDAITAQAAAMDFAPTFQMGHPVAFRAAEKVAEIMPAGLNRIFFVNSGSEAVDTALKIALAYHRARGEGQRTRFIGRERGYHGVGFGGISVGGIAPNRKAFSANLMPGVDHLPHTHAPEHNAFSKGQPAWGAHLADELERIVTLHDPSTIAAVIVEPLAGSTGVLVPPKGYLERLRALCDKHGILLIFDEVITGFGRLGAATASAFFGVTPDLLTMAKGINNAAVPMGAVAVRQSLHDAVIEAGAPGAIELFHGYTYSAHPLAAAAAVAAIDLYRTEGLFERARALSPAFEAAAHSLKGAPHVKDIRNLGLVAGIELEPRPGAVGARAYEVFLKCLERGVLVRYTGDTLAFSPPLIISEAEIARIFDTVRTVLQEVA

SEQ ID NO: 10339 - protein, 236 aa, Neurospora crassa
MALKTLSAKAAAALDRELMSTGAFSIDQLMELAGLSVSQAVARVHPTKQGRRVLVAVGPGNNGGDGLVAARHLFHYGYQPAIYYPKRPKNDLYQRLVKQCEDLEIPFVDDFFAALESTDHVVDAIFGFSFSGEVREPFPAVINAMAETKVPVTSVDAPSSWDINEGPPKSGVGSNFHPNVLVSLTAPKPLVKYFKGRHFVGGRFVAPSIAKKYDFDVPKYEGIDQIVEITDNQVKI

SEQ ID NO: 10340 - protein, 424 aa, Arabidopsis thaliana
MTTMISNLPRVLIEEIFFRVPLKSLRAVRLTCKSWNTLSKSRSFRKLYISKRATREEESMMIAMMNFDLYSMRVVVDDDVDPSKAFKKKRNKKSIAFKRQPIFLDEQVKISQVFHCEGLLLCFLKEDDTRVVVWNPYCGQTRWIQLRYSHRPHKDRFIYALGYKDKESRGSFQLLRFVDYFLGAPKNQYFWYEIYDFNSDSWTTLDVTPHWCIYCCDRGVSLNGNTYWCAKERKAEDDIVDHIISFDFTNERFGPLLPLPSKVMEHEYEIVTLSYVKEEKLAALFQHYEADWNEFDIWITTKIDAEVVSWSMFLRMDTGPRIEVPHICEGFFIDEEKKVAMGFEEDFDRKTFIIIGEAGYVRKLDIKAHVDRKCRPTVCSYVPSLVQIKKPARGKRKRQSSLEKRLFDQNMLRLEAFKKLGGYF

SEQ ID NO: 10341 - protein, 118 aa, Candida glabrata CBS138
MKSSFKSEYPFEKRKAESERISEKFQNRIPVICEKAEKSDIPEVDKRKYLVPADLTVGQFVYVIRKRIMLPPEKAIFIFVNDTLPPTASLMSQVYQEHKDKDGFLYVTYSGENTFGYQ

SEQ ID NO: 10342 - protein, 541 aa, Oenococcus oeni
MTDPVSILNDPFINKGTAFTEAEREELGLNGLLPAKVQALQEQVDQTYAQFQSKVSNLEKRLFLMEIFNTNHVLFYKLFSQHVVEFMPIVYDPTIADTIENYSELFVEPQGAAFLDINHPENIQSTLKNAANGRDIKLLVVSDAEGILGIGDWGVQGVDIAVGKLMVYTVAAGIDPSTVLAVVIDAGTNNEKLLKDPMYLGNKFNRVRGDKYYDFIDKFVNHAESLFPNLYLHWEDFGRSNASNILNSYKDKIATFNDDIQGTGIVVLAGVLGALKISGQKLTDQTYMSFGAGTAGMGIVKQLHEEMVEQGLSDEEAKKHFFLVDKQGLLFDDDPDLTPEQKPFAAKRSDFKNANQLTNLQAAVEAVHPTILVGTSTHPNSFTEEIVKDMSGYTERPIIFPISNPTKLAEAKAEDVLKWSNGKALIGTGVPVDDIEYEGNAYQIGQANNALIYPGLGFGAIAAQSKLLTPEMISAAAHSLGGIVDTTKVGAAVLPPVSKLADFSRTVAVAVAKKAVEQGLNRQPIDDVEKAVDDLKWEPKY

SEQ ID NO: 10343 - protein, 549 aa, Mesorhizobium loti MAFF303099
MAAKDVKFSRDARERMLRGVNILADAVKVTLGPKGRNVVIDKSFGAPRITKDGVTVAKEIELEDKFENMGAQMVREVASKTNDIAGDGTTTATVLAQSIVQEGHKAVAAGMNPMDLKRGIDLAVADVVATLIKNAKKIKTSEEVAQVGTIAGNGDSSVGSMIAEAMQKVGNEGVITVEEAKTAETELEVVEGMQFDRGYLSPYFVTNADKMVADLEDAYILLHEKKLSNLQAMLPILEAVVQTSKPLVIISEDVEGEALATLVVNKLRGGLKIAAVKAPGFGDRRKAMLEDIAILTGGQVISEDLGIKLENVGLNMLGRAKKVSISKENTTIVDGAGKKAEIQGRVAQIKQQIEETTSDYDKEKLQERLAKLAGGVAVIRVGGATEVEVKEKKDRVDDALNATRAAVEEGIVPGGGVALLRASLSINAVGANSDQTAGISIVRRALQAPARQIAANAGAEASIVAGKILENKGATYGYNAQTGEYGDMIAMGIVDPVKVVRTALQDAASVAGLLVTAEAMIAEAPKKESAGGGMPGGMPGGGMGGMGGF

SEQ ID NO: 10344 - protein, 574 aa, Oryza sativa (japonica cultivar-group)
MYRAAASLASKARQAGSSARQVGSRLALSRNYAAKDIKFGVEARALMLRGVEELADAVKVTMGPKGRNVVIEQSYGSPKVTKDGVTVAKSIEFKDRVKNVGASLVKQVANATNDTAGDGTTCATVLTKAIFTEGCKSVAAGMNAMDLRRGISMAVDAVVTNLKGMARMISTSEEIAQVGTISANGEREIGELIAKAMEKVGKEGVITIADGNTLYNELEVVEGMKLDRGYISPYFVTNPKTQKCELDDPLILIHDKKVSNLHAVVKVLELALKKQRPLLIVAEDVESEALGTLIINKLRAGIKVCAVKAPGFGENRKANLQDLAILTGGEVITEELGMNLEKFEPQMLGTCKKVTVSKDDTVILDGAGDKKSIEERAEQIRSAIELSTSDYDKEKLQERLAKLSGGVAVLKIGGASEAEVGEKKDRVTDALNATKAAVEEGIVPGGGVALLYASKELDKLPTANFDQKIGVQIIQNALKTPVHTIASNAGVEGAVVVGKLLEQDNTDLGYDAAKGEYVDMVKAGIIDPLKVIRTALVDAASVSSLMTTTESIIVEIPKEEKEAPAMGGMGGMDY

SEQ ID NO: 10345 - protein, 816 aa, Clostridium thermocellum ATCC 27405
MKAIIMAGGEGSRLRPLTCDLPKPMVPIMNIPIMEHIINLLKKHGITEIGVTLMYLPQKIKDYFGNGSNFGVNITYFTEDTPLGTAGSVKNAEDFLDETFIVISGDSLTNMNITKAIEFHRMKNSKATLVLTRVDVPLEYGVVITDKSGAITGFLEKPSWGEVFSDTVNTGAYILEPEILKYLEKGKKVDFSQDLFPYLLLKKEPMYGYVMDDYWCDIGDLQAYLQAHYDVLEGKIQLDINGTEIQKGVWVGSGAIIEPGAILNPPCVIGDNCRIESGAVIDSLSVIGNNNVIERDSSVKRSVIWDGNYIEYGSKIRGAILCSKTNLKRYVHIFENAIVGDNCLINERVVIKPNIKIWPQKTVEPFAIVDRNIIWGSKHSKSIFGENGLSGIINVDISPEFATRLGAAYGSIFKKGSKVVVSSTTANSARMFKHAFISGILSVGVEVFNLSSLLTPLARHAINFLSVEGGIHIKLSEDNPNKLKVDFMDSKGASISRVTERKIENSFAREDFKRCSGDEVSRLNNITDFKNYYVRSILNEVNVEAIKNNPPKLCIVSPSDFVISIVVPMLTDLGCKVASFSSTNVSEVDTIVDEIKDNNASFAAFIDSNGETLVLIDKNGNVVKDDLFLCLTSLITFKSVPNSKVVVPITAPSIIETLAERYNGKVVRTKTSPQAVMEQMLNHNLFKNRENMYQFLLNFDAIAGLVKIIEFLCLQNTTLTETIKEIPDFYVSKKKIFCPWELKGRVMRTLITEKDQEKVELLDGVKFILENGWALVLPDADMPLCRVYSEGVTPEVAETISDKYIDKIKAIINDKK

SEQ ID NO: 10346 - protein, 726 aa, Nocardioides sp. JS614
MPEHHPLAPASPWVEVVATEADWDAADPQLLRTIYAQLVWIRTFEQYVLDLAASGLIHGPAHSSIGQEGGAVGSVLALTSADSVNGSHRGHHQFLAKALHHVEPKGMDPLEAPSEQVRDVLLRTLAEICGLDRGWSHGRGGSMHLQWKEAGAMGTNAIVGGGVPQAAGFAWSHRQAGTDAVSVTYFGDGAVNIGSTLETMNLAGAWSLPVCFFIENNRYAVSTSVDEATAEPRLSARGLGFNLASWKVDGMDPLAVHLAMSEAVEHMRRGRGATVVEVDTYRFFHQNGGFAGSAFGYRDKEEERAWRARDPLTQTAAHLERRGIMTAEETAEAITRAKAVMEEIGRELVEPLPDGKPGQRRIRPAEWPDPDWVDVGVRGDLSELDGARIVAADGFAVPVQETKFIDAVAAVMGRRMETDQGIVVMGEDVHRLNGGTNGATRGLTELFPGRILGTPISENAFTGLAGGIALDGRYTPVVEFMYADFMWVAADQLFNQIGKARHMYGGASGVPLVLRSKVAMGTGYGSQHSMDPAGIFATNPGWRIVAPSTPYDYVGLMNTALRCADPVVVLEHVDLYGSTGPGPVDDYDYCLPVGKAAIRRPGKDVTILTYLGMVPFVLGAVEEFGQVDAEVIDLRWLDRASIDWDTIEESLTKTNQVLIAEQGAVGTSYGGWLADEIHRRFFDLLDAPVRRVTGAEASPSISKVLERAAIAQQDEVIAELAEIARY

SEQ ID NO: 10347 - protein, 198 aa, Brassica rapa subsp. pekinensis
MNPSQSPSPNFTFLSDENSIYSVMDNYDFSNLMFSVGEGGSNGLIQEETSSPTTIVTGESGGSGSAFTTLRKKESTSLDCKNRGSKDGETKEMGHRVAIRTRSKIDVMDDGYKWRKYGKKSVKNNTNKRNYYKCSSEGCMVKKRVERDGENAAYVITTYEGVHNHESPSHVYYSDMVFDHDNWKQHSLLQSIQTFPPC

SEQ ID NO: 10348 - protein, 261 aa, Neisseria meningitidis MC58
MSRIRQAFAALDGGKALIAYITVGDPDIRTTLALMHGMVANGADILELGVPFSDPMADGPVIQRAAERALANGISLRDVLDVVRKFRETDTQTPVVLMGYLNPVHKMGYREFAQEAAKAGVDGVLTVDSPVETIDPLYRELKDNGVDCIFLIAPTTTEDRIKTIAELAGGFVYYVSLKGVTGAASLDTDEVSRKIEYLHQYIDIPIGVGFGISNAESARKIGRVADAVIVGSRIVKEIENNTGNEAAAVGALVKELKDAVR

SEQ ID NO: 10349 - protein, 159 aa, Prochlorococcus marinus str. MIT 9312
MQVDVQNTTVFSADGSSIKLGQYSGEVILVVNVASYCGNTAQYEDLQKLHDLYSSKGLRILAFPCNDFGKQEPGSLSEIKDFCTTKYGVKFEIYEKVHAKGDTTEPYTTLNKVEPEGDVEWNFEKFLIGKDCKVIARFKPSVKPFDENLIAAIEVALDS

SEQ ID NO: 10350 - protein, 294 aa, Nocardioides sp. JS614
MANRLMDGASARCHDDAVNEVNQVSSFYSGPRGLVAAIGSALDAAGMERASLRPADLAPVDEFHIRGRAASLEILEALGLDADSHVLDLGSGLGGPARTLAELSGCTVTGVDLTSEFCEVATALSQWTGLSDRTRFQAGDATATGLPDAAVDAALTVHVGMNIPDKAALYAEAFRVLRPGGRFVVYDVLQGEGGEVRYPVPWADDPSTSFLATPQDMRGLLPEAGFELISEADSSDESLTWFQEMRARIERDGPPPVTFAAFLGDRFGQMAANQVANLAERRIRTVMYTCSRPT

SEQ ID NO: 10351 - protein, 1286 aa, Oryza sativa
  misc_feature (817)..(817): Xaa can be any naturally occurring amino acid
  unsure (1)..(1286): unsure at all Xaa locations
MATPTPTPSTSAPAAPPSSAFPLTAAARFPRARAASASTSSTRASALAERRRTRRRRLPEGSGGGGDRSAAAGAVEKGLRLAFLEQLAERARAADAAGVADAIYDMVAAGLSPGPRSFHGLVAAHVLAGDAEGAMQSLRRELSSGVRPLHETFVALVRVFAKKGLATRGMEILAAMERYKYDIRKAWLILVEELVNNNYLEDANTVFLKGTEGGLQGTDEIYDLLIEEDCKAGDHSNALTVAYKMEASGRMATTFHFNCLLSVQATCGIPEIAFATFENMEYGGEGYMKPDTESYNWVIQAFTRATSYDRAGDVAELLGMMVEDHKRRADELLEALEAMSNDGQTIAPRAMILNRKYRTLVSTWIEPLQEEADVGFEIDYVARYIEEGGLTGPKKNVVKPKAASKMVVSELKTELEAQGLPTDGTRQVLYQRVQKARRINRSRGIPLWVPPVEDEEEVDEELDELISRIKLEDGNTEFWKRRFLGETRNYLCEEVNDEEDADLDDDELDDDDDEDDDDDDTTKGEEDEIDEEDAVEQTENQAGDETKDKPSKGPKQHLQMIGVQLLKDLEKTSVSSKKSKRVPEIDDDEDWFPEDPIEAFKVIDLGGTPTIGDCAIILRAAMRVPLPSAFMTILQTTHSLGYKFGSPLYDEAILLCLDLEEIDAAIAVVAEMETNGIKVPDETLDKVLAAKQSGGNSALQPPPAEESLLGSAMYRAAASLASKARQAGSSARQVGSRLALSRNYAAKDIKFGVEARALMLRGVEELADAVKVTMGPKGRNVVIEQSYGSPKVTKDGVTVAKSIEFKDRVKNVGASLXKQVANATNDTAGDGTTCATVLTKAIFTEGCKSVAAGMNAMDLRRGISMAVDAVVTNLKGMARMISTSEEIAQVGTISANGEREIGELIAKAMEKVGKEGVITIADGNTLYNELEVVEGMKLDRGYISPYFVTNPKTQKCELDDPLILIHDKKVSNLHAVVKVLELALKKQRPLLIVAEDVESEALGTLIINKLRAGIKVCAVKAPGFGENRKANLQDLAILTGGEVITEELGMNLEKFEPQMLGTCKKVTVSKDDTVILDGAGDKKSIEERAEQIRSAIELSTSDYDKEKLQERLAKLSGGVAVLKIGGASEAEVGEKKDRVTDALNATKAAVEEGIVPGGGVALLYASKELDKLPTANFDQKIGVQIIQNALKTPVHTIASNAGVEGAVVVGKLLEQDNTDLGYDAAKGEYVDMVKAGIIDPLKVIRTALVDAASVSSLMTTTESIIVEIPKEEKEAPAMGGMGGMDY

SEQ ID NO: 10352 - protein, 373 aa, Arabidopsis thaliana
MGYLFEETLSSNPKTPIVVDDDNELGLMAVRLANAAAFPMVLKASLELGVFDTLYAEASRTDSFLSPSEIASKLPTTPRNPGAPVLLDRMLRLLASYSMVKCEKVSVGKGERVYRAEPICRFFLKNNIQDIGSLASQVIVNFDSVFLNTWAQLKDVVLEGGDAFGRAHGGMKLFDYMGTDERFSKLFNQTGFTIAVVKKALEVYQGFKGVNVLVDVGGGVGNTLGVVTSKYPNIKGINFDLTCALAQAPSYPGVEHVAGDMFVDVPTGDAMILKRILHDWTDEDCVKILKNCWKSLPENGKVVVIELVTPDEAENGDINANIAFDMDMLMFTQCSGGKERSRAEFEALAAASCFTHCKFVCQAYHCWIIEFCK

SEQ ID NO: 10353 - protein, 299 aa, Arabidopsis thaliana
MVKKSKGRQKIEMVKMKNESNLQVTFSKRRSGLFKKASELCTLCGAEVAIVVFSPGRKVFSFGHPNVDSVIDRFINNNPLPPHQHNNMQLRETRRNSIVQDLNNHLTQVLSQLETEKKKYDELKKIREKTKALGNWWEDPVEELALSQLEGFKGNLENLKKVVTVEASRFFQANVPNFYVGSSSNNAAFGIDDGSHINPDMDLFSQRRMMDINAFNYNQNQIHPNHALPPFGNNAYGINEGFVPEYNVNFRPEYNPNQNQIQNQNQVQIQIQNQSFKRENISEYEHHHGYPPQSRSDYY

SEQ ID NO: 10354 - protein, 876 aa, Pseudomonas fluorescens PfO-1
MTDIDARLREDVHLLGELLGNTIRDQYGEAFLDKIEQIRKGAKADRRGSMDAELSASLNQLSEDELLPVARAFNQFLNLANIAEQYQLIHRREETQAAPFESRVLPELLARLRNEGHSAESLARQLARLEIELVLTAHPTEVARRTLIQKYDAIAAQLAAQDHRDLTTAEREQIHNTLQRLIAEAWHTEEIRRTRPTPVDEAKWGFAVIEHSLWQAIPHHMRKADQALFAATGLRLPLEAAPIRFASWMGGDRDGNPNVTAAVTREVLLLARWMAADLYLRDVDHLAAELSMQQASDALKARAGDSAEPYRAVLKQLRERLRATRNWAHASLTATTPAPADVLHNNRDLLDPLELCFNSLHECGMGVIADGPLLDCLRRAVTFGLFLVRLDVRQDSSRHSAAMTEITDYLGLGKYEEWDEEQRISFLTRELQNRRPLLPAHFKPSADTAEVLATCKEIAAAPGASLGSYVISMAGAASDVLAVQLLLKESGVLRPMRVVPLFETLADLDNAGPVIERLLLLPGYRARLQGPQEVMIGYSDSAKDAGTTAAAWAQYRAQERLVEICREQQVELLLFHGRGGTVGRGGGPAHAAILSQPPGSVAGRFRTTEQGEMIRFKFGLPDIAEQNLNLYLAAVLEATLLPPPPPTPEWRHLMDELAADGVAAYRAVVRENPQFVEYFRQSTPEQELGRLPLGSRPAKRRAGGIESLRAIPWIFGWTQTRLMLPAWLGWETALSKALERGEGELLGQMREQWPFFRTRIDMLEMVLAKADADIALSYDERLVEPDLLPLGAHLRDLLSQACSVVLGLTGQSQLLAHSPDTLEFIRLRNTYLDPLHLLQAELLARSRRQNVEQGSPVEQALLVSVAGIAAGLRNTG

SEQ ID NO: 10355 - protein, 380 aa, 'Chlorella' ellipsoidea
DGQMPSDKTIGGGDDVFNTFFSETGAGKHVPRCVFLDLEPTVIDEVRTGTYRQLFHPEQLTSGKEDAANNFARGHYTIGKEIVDLCLDRIRKLADNCTGLQGFLVFNAVGGGTGSGLGSLLLERLSVDYGKKSKLGFTVYPSPQVSTAVVEPYNSVLSTHSLLEHTDVAVMLDNEAVYDICRRSLDIERPTYTNLNRLIAQVISSLTASLRFDGALNVDVTEFQTNLVPYPRIHFMLSSYSPVISAEKAYHEQLSVAEITNSAFEPASMMAKCDPRHGKYMACCLMYRGDVVPKDVNAAVATIKTKRTIQFVDWCPTGFKCGINYQPPTVVPGGDLAKVQRAVCMISNSTAIAEVFSRLDHKFDLMYAKRAFVHWYVGEG

SEQ ID NO: 10356 - protein, 191 aa, Fragaria x ananassa
MASSTTNNPALDLDSDTPENPGHELAQFASGCFWGSELRFQRVVGVIKTEVGYSQGHVHDPNYRLVCSGTTNHSEVVRVQFDPQVCPYSDLLSVFWSRHDPTTLNRQGGDVGTQYRSGIYYYNEEQDCLAKKSKEAKQKEFKDKRVVTEILPAKRFYRAEEYHQQYLEKGGGNGNKQSAQKGCNDPIKCYG

SEQ ID NO: 10357 - protein, 907 aa, Streptococcus mutans UA159
MTINKLESRNDKEAIAEEITILTKLLDDATKTMVGSASFDKITLFKKLSIEEKHQELEREIEQLTNEEMVVVSRYFSILPLLINISEDVNLAYEINYQNNNDIDYLGKLSATIELVSSQKNAQEILENVNVVPVLTAHPTQVQRKTMLDLTNHIHELLRKYRDVKAGSINKQKWYDDMRRYVELIMQTDIIREKKLKVTNEITNVMEYYNSSLIKGVTKLITEYKHLSHQKGFDLGNAKPITMGMWIGGDRDGNPFVTAETLKISALVQNEVILNYYIDKVSDLYRTFSLSTSLSTISNAVKEMADRSTDVSIYREKEPYRKAFHYIQSRLQETLIYLKNNHLEELESEDSAQILPYQSAQEFRNDLQLIKDSLLENNGSAFITGDLTELLQAVDVFGFFLASIDMRQDSSVHETCVAELLASANIVANYSDLPEEEKIAILLKELTEDPRILSATHVEKSEILQKELAIFKTARKLKDALGEDVIKQHIISHTESISDMFELAIMLKEVGLVDTDKARVQIVPLFETIEDLDNSREIMRQYLNYDIVKKWIAANHNYQEIMLGYSDSNKDGGYLSSGWALYKAQNELTEIGYDNGVKITFFHGRGGTVGRGGGPSYEAITSQPFGSIKDRIRLTEQGEVIGNKYGNKDVAYYNLEMLVSATLDRMVTRRIVNSDNLVNYRLIMDEIVADSNLIYRDLVFGNEHFYDYFFAASPIREVSSLNIGSRPAARKTITEISGLRAIPWVFSWSQNRIMFPGWYGVGSAFKHFIDKDEKNLTKLQEMYQSWPFFHSLLSNVDMVLSKSNMNIAFEYAKLCQDEETKEVFATILDEWQLTKNVILAIESHKQLLEDNSYLKASLDYRLPYFNVLNYIQIELIKRQRRGELGENLENLIHITINGVATGLRNSG

SEQ ID NO: 10358 - protein, 213 aa, Zea mays
MPHLAAAAAVPAARPTEAGRVAFRRHWSTPLPEPPRLRLRLRTRARGVRREDGGGVRTEEQEQSQTQTAPRTFYELLGISSRGSPDDVRAAYRRMALMYHPDVSPPGAAAENTRRFIEVQEAYETLSDPSRRASYDRALARGVCRIGFSGRRSQSHRAYCHHQEQEDKSCWRRSWEDQVAELQRRSMAEDSEENLSWGARMRRRRAEASSAAE

SEQ ID NO: 10359 - protein, 49 aa, Brassica napus
MDKKKVAVPLVCHGHSRPVVDLFYSPITPDGFFLISASKDSHPMLRNGE

SEQ ID NO: 10360 - protein, 547 aa, Bordetella pertussis Tohama I
MAAKQVLFADEARVRIVRGVNVLANAVKTTLGPKGRNVVLERSFGAPTVTKDGVSVAKEIELKDKFENIGAQLVKDVASKTSDNAGDGTTTATVLAQAVVQEGLKYVAAGFNPIDLKRGIDKAVAAAVEELKKLSKPVTTSKEIAQVGSISANSDASIGQIIADAMDKVGKEGVITVEDGKSLENELDVVEGMQFDRGYLSPYFINSPEKQVAALDDPYVLIYDKKVSNIRDLLPVLEQVAKSSRPLLIIAEDVEGEALATLVVNNIRGILKTTAVKAPGFGDRRKAMLEDIAILTGGTVISEETGMSLEKATLQDLGQAKRIEVAKENTTIIDGAGDGKSIEARVKQIRAQIEEATSDYDREKLQERVAKLAGGVAVIRVGAATEVEMKEKKARVEDALHATRAAVEEGVVPGGGVALLRAKQAITGLKGDTADQNAGIKLILRAVEEPLRTIVTNAGDEASVVVNTVLNGKGNYGYNAATGEYGDLVEQGVLDPTKVTRTALQNAASVASLLLTAEAAVVELMENKPAAAPAMPGGMGGMGGMDF

SEQ ID NO: 10361 - protein, 327 aa, Escherichia coli CFT073
MATRIEFHKHGGPEVLQAVEFTPADPAENEIQVENKAIGINFIDTYIRSGLYPPPSLPSGLGTEAAGIVSKVGSGVKHIKAGDRVVYAQSALGAYSSVHNINADKAAILPAAISFEQAAASFLKGLTVYYLLRKTYEIKPDEQFLFHAAAGGVGLIACQWAKALGAKLIGTVGTAQKAQSALKAGAWQVINYREENLVERLKEITGGKKVRVVYDSVGRDTWERSLDCLQRRGLMVSFGNSSGAVTGVNLGILNQKGSLYVTRPSLQGYITTREELTEASNELFSLIASGVIKVDVAEQQKYPLKDARRAHEILESRATQGSSLLIP

SEQ ID NO: 10362 - protein, 372 aa, Glycine max
FGSRQNPAAHAAASFAATFWPYANAETSADSPVCTPDFPSRQIGSPPSVTAIAAATVAAATAWWAAHGLLPLCGPLHTAFACPPASATTVPSMIIDESPQKTERGEIKPQNPPLQDQIPDPEHSEAQHSAPKSPAVSSSKSEDRGDANLDTSPKATNHEMNQAISENPDSNKMKGRKPVDRSSCGSNTTSSSEETELLEKDEKEKEEPKTPDANVLDTELSNRRSRSISNLTDSWKEVSEEGRLAFQALFSREVLPQSFSPTHHLINKDNQIDSIKDNELNTDYKDEDLESKKCSSICDGVQKNLLFVKDNNEEEGLLTIGLGPGKLKTRRTGFKPYKRCSVEANENRIGTACIQGEEKGPKRLRLNGEAST

SEQ ID NO: 10363 - protein, 725 aa, Zea mays
SLVLPSSDPKQGMSFGDLDGGGSKRKKPYNRHAPRQIEQLEAMFKEFHHPDEKQRAQLSRQLGLDPRQVKFWFQNRRTHLKNQLERQENARLKQENDKLRVENLSIREAIRDLVCSCCGGPAVLGELSPEEHQLRLENARLRDELARVCTVTSKFIGKPMSHMELLLAKEPHPITGSSLELAVAVGVGSGVPSSKMPVSTISELAGSTSSSTGTVTTPMVTASLPMVSIVIDKSKFAQLAVSAMNELVKMARMNEPLWIPTIPSPGSPIMETLNFKEYLKAFSPCVGVKPTGFVSEASRESGIVTIDSSAALMEVFMDERRWSDIFYCIVAKASIVEEILPGVAGSRNGALLLMQAELQMLSPRVPIREVTFLRFCKQLAEGAWAVVDVSIDGLQTDQCLDTNTKCRRLPSGCVLQDTPNGCKVTWVEHAEYPEASVHQLYQPLMRSGLALGAGRWLATLQRQCECLAILMSSLAAPEHDSAAVSLEGKWSLLKLARRMMENFCAGMGASSSREWSMLDGLTGSTGKDVRVMVQNSVDEPGVPPGVVLSVATAVWLPVTTERLLNFLRDEELRAEWDILSNGGPMQQVLRVTKGQLDGNSVALLRSDHTDSHLNSILILQETCTDRSGAMVVYAPVDFPAMQLVLGGGDSKNVALLPSGFVILPAGSSAGGVGHKARGSLLTVAFQILVNSQPTAKLTVESVDTVYSLISCTIEKIKAALHCDVC

SEQ ID NO: 10364 - protein, 109 aa, Pyrococcus horikoshii OT3
MKWEMGLQEEYIELIKAGKKKIEGRLYDEKRRQIKPGDIIIFEGGKLKVKVKGIRVYSSFKEMLEKEGIENVLPGVKSIEEGVKVYRQFYDEEREKKYGVVAIEIEPIE

SEQ ID NO: 10365 - protein, 523 aa, Arabidopsis thaliana
  misc_feature (237)..(237): Xaa can be any naturally occurring amino acid
  misc_feature (292)..(292): Xaa can be any naturally occurring amino acid
  misc_feature (417)..(417): Xaa can be any naturally occurring amino acid
  unsure (1)..(523): unsure at all Xaa locations
MNAAVFSPSALSLPISFSKTRSSFLSRKKGVKGEFRVFAVFGDESGLVEKKSQWRPLFDVEDPRSKAPPYKGKFLDVNQAIEVARFDIQYLDWRARQDLLTIMILHDKVVDVLNPLAREYKSIGTVKKELAGLQEELSKAHQQVHISEARVSTALDKLAHMEELVNDRLLPGRVVTELDKPSSSTTASAVELDREKTNTGAKSLNVSGPVPPYSPHLKNFWYPVAFTADLKHDTMGXEDGKPGCVRNTCAHRACPLDLGTVNEGRIQCPYHGWEYSTDGECKKMPSTKLLKXKIKSLPCLEQEGMIWIWPGDEPPAPILPSLEPPSGFLIHAELVMDLPVEHGLLLDNLLDLAHAPLTHTSTFEKGWSVPSLVKFLTPTSGLQGYWDPYPIDMEFKPPCIVLSTIGISKPGKLEGKXTQQCATHLHQLHVCLPSSKNKTRLLYRMSLDFAPILKNLPFMEHLWRHFAEQVLNEDLRLVLGQQERMLNGANIWNLPVAYDKLGVRYRLWRNAVDRGDDKLPFSS

SEQ ID NO: 10366 - protein, 290 aa, Medicago sativa
MEAKEQDVSLGANKFPERQPIGIAAQSHDDGKDYKEPPPAPLFEPSELTSWSFYRAGIAEFVATFLFLYITLLTVMGVNRSESKCKTVGIQGIAWSFGGMIFALVYCTAGISGGHINPAVTFGLFLARKLSLTRALFYMVMQTLGAICGAGVVKGFEGKTFYTNKNGGANFVAPGYTKGDGLGAEIVGTFVLVYTVFSATDAKRSARDSHVPILAPLPIGFAVFLVHLATIPITGTGINPARSLGAAIIFNKDLGWNDHWIFWVGPFIGAALAALYHTVVIRAIPFKSSN

SEQ ID NO: 10367 - protein, 138 aa, Ashbya gossypii ATCC 10895
MAKELAQTRDASQVFGVARIYASFNDTFVHVTDLSGRETIARVTGGMKVKADRDESSPYAAMLAAQDVAAKCKEVGITAVHVKIRATGGTKTKTPGPGGQAALRALARSGLRIGRIEDVTPIPSDSTRKKGGRRGRRL

SEQ ID NO: 10368 - protein, 991 aa, Tuber magnatum
EFKLSVEKQYKEGIEKMIKLYQMEGDRKSRQDAESKHTDSGQKIQLLKQALKRYEDLHVDMDFGDEADDDSINSPNIRRPLTGRLAIRVLAVKDVDHATTSRFARGPETFVIIKVEDVARVRTKSTRNDKWLDEAHDIDVDKANEIEMTVYDKPGDNHMPIGLLWIRISDIAEELRRKKIEQDISSSGWVSADKMAHGGAGRPSEGTYNYNQGFGGPAAAGGGGTGMYVNNSGQTQASGGSAGIDAWFALEPVGQIHLNLNFVKYNRNKRPLDLGLGRKGAVRARKEEVHEMYGHKFVQQQFYNIMRCALCSDFLKYSAGMQCSDCKYTCHKKCYPKVVTKCISKSNAETDPEEEKLNHRIPHRFEPMTNMGANWCCHCGYMLPVGKKNARKCTECGLTCHSQCAHLVPDFCGMEVANQILGEIKKTKRRGPGMADRNLRTSGPPAPSSPLSGRPTSDPYVSHLDPRNSVQGEPTQLSQRTHPYSPSSPTAVNAANVAYGTASSPARPQQPAPYSPEQRPNRVPDPTAVAAAAHAGQRPPSVVQSQIGYPPRQSAELYRGAPASPTQTKHPTELPSSPSPYQQGQGYDNPYQQHRTSIPQQPPAAPPKAPPAPSGYGQPQAAQYDQKRSYGQPPPAPVKVAPPAHAYTAEKKPPPPPALEPQHAVSRPTKIGLDHFNFLAVLGKGNFGKVMLAETKACKKLYAIKVLKKEFIIENDEVESTRSEKRVFLIANKERHPFLLNLHACFQTETRVYFVMEYISGGDLMLHIQRGAFGSRRAQFYAAEVCLALKYFHENGVIYRDLKLDNILLTLDGHIKIADYGLCKEEMWYGSTTSTFCGTPEFMAPEILMDKRYGRAVDWWAFGVLIYQMLLQQSPFRGEDEDEIYDAILADEALYPIHMPRDSVSILQKVLTKEPELRLGSGPTDAQEIMSHPFFANINWGDIYHKRYPPPFKPSIQSATDTSNFDQEFTSVTPVLTPVQSVLTQAMQEEF

SEQ ID NO: 10369 - protein, 540 aa, Methanocaldococcus jannaschii DSM 2661
MKIMKFIFITGGVISSLGKGITAASLGRLLKARGFKVNMIKIDPYLQIDAGTMSPYEHGEVFVTEDGGESDLDLGHYERFIDENLTKNNNITTGKIYWSVLTKERKGEYLGKTVQVIPHITNEIKDWIKNLGEGYDITIVEIGGTVGDIESLPFLEAIRQFKKDVGKENVLYIHVSLLPYIRAAGELKTKPTQHSVKELRSIGIQPDILICRTEMPISDKIREKLALFCDVDKEAVIEARDARTIYEVPLNLEKEGLGKLVTKKLNLPDREPDLDEWRKFVDRVINPLNEVTIGIVGKYVELKDAYLSITEALIHAGAKNDTKVNINWIHSERLESEEFEELLDRYREDNQLDGILVPGGFGDRGVEGKINAIKYARENDIPFLGICMGMQCAVIEFARNVCGLEGANSTEFDENTKYPVVDLLPEQKEIDAKGGTMRLGAYPAILMEGTLAYKLYGRKEVYERHRHRYEVNPEYHEILENHGLTISGKSPDGRLAEFIEISKNRYFIATQAHPEFKSRPNKPHPLFDGLVRASLGEKIK

SEQ ID NO: 10370 - protein, 440 aa, Staphylococcus aureus subsp. aureus MSSA476
MKTYDLIVIGFGEAGKTLAKYAASTGQHVAVIEQSPKMYGGTCINIGCIASKTLVHDGLEGKSFEASYNRKNDVVNALNNKNYHLLADDNNIDVLDFKAQFKSNTEVNLLDQHDDIADSITAPHIIINTGATSVIPNIKGLDQAKHVFDSTGLLNINYQPKHLVIVGGGYIALEFASMFANLGSKVTVLERGESFMPREDQDVVAHAITDLENKGITLHTNVETTELSSDNHHTTVHTNVGNFEADAVLLAIGRKPNTDLALENTDIELGDRGEIKVNAHLQTTVPHIYAAGDVKGGLQFTYISLDDYRIIKSALYGNQSRTTDNRGGVPYTVFIDPPLSRVGLTSKEAAAQHYDYTEHQLLVSAIPRHKINNDPRGLFKVVINNENNMILGATLYGKQSEELINIIKLAIDQNIPYTVLRDNIYTHPTMAESFNDLFNF

SEQ ID NO: 10371 - protein, 51 aa, Ashbya gossypii ATCC 10895
MAAKKSFKIKQKLAKAKNQNRPLPQWFRLKTNNTIRYNAKRRHWRRTKMGI

SEQ ID NO: 10372 - protein, 650 aa, Dechloromonas aromatica RCB
MCGVIGFIRTDFSRTYAADSRRQLELMADAVVHRGPDDAGYWGDESHGIWLGHRRLSILDLSPAGHQPMSSACGRYIVVFNGEVYNWASIRTELEQSGRAPVWRGHSDTEVLLAGLVAWGLEATLKRARGMFAIAVWDRQQRVLSLARDRIGEKPLYYGRVGDTFVFASELKSLRAIPGADFQTDPGSLALMLRYGYVPAPLCIYRNIFKLPPGTLLRVNARGEFGEPEAWWSFAETAQQRVAGRSPMSDAAALDALDEVLGAAIGEQMVADVPLGALLSGGLDSSMVVALMQARSTKPVRTFTIGFAEGAYDEAAHAKVVAAHLGTEHTELYVSPDQARAIIPSLPDMYDEPFADSSQIPTALVCALTRQHVTVCLSGDAGDELFGGYNRYFWATSLWRRFGKMPLGLRKGAAGIFSSVSAGTWNSAFGALSWAMPGRLRVSNPGDKLHKLAEVMAAESEEALYRELVSQWRGPLPMRSPNEPRTLVPDPARWPRMPSYAERMMAVDTLTYLPDDILVKVDRAAMAASLETRVPFLDERVISFAWGLPFEQKVRNGQGKWLLRQLLYRYVPQAMVDRPKQGFGVPIEHWLRGPLRDWAEDLLSPDQLASDGLLDPTPIRAMWEKHLSGRNVQYALWNVLMYQAWRRRWA

SEQ ID NO: 10373 - protein, 526 aa, Glycine max
MEDPYVLGWILCSVLSLLALYSLAFGGAGRRRASPEKRNELSETVTTSAGECRSEKRNGDADVIIVGAGVAGAALAHTLGKDGRRVHVIERDLSEPDRIVGELLQPGGYLKLIELGLEDCVDKIDAQQVFGYALFKDGKHTRLSYPLEKFHSDVSGRSFHNGRFIQRMREKAASLSNVRLEQGTVTSLLEEKGVIKGVHYKTKDSQELSACAPLTIVCDGCFSNLRRSLCNPKVDVPSHFVGLILENCELPCANHGHVILGDPSPVLFYRISSSEIRCLVDVPGQKVPSISNGEMTNYLKTVVAPQIPPELHDAFIAAVDKGNIRTMPNRSMPAAPYPTPGALLMGDAFNMRHPLTGGGMTVALSDIVVLRNLLRPLSDLNDAPTLCKYLESFYTLRKPVASTINTLAGALYKVFCASPDQARKEMRQACFDYLSLGGLFSEGPVSLLSGLNPRPLSLVLHFFAVAIYGVGRLLLPFPSPKRVWIGARLISGASAIILPIIKAEGIRQMFFPATVPAYYRTPPVAQ

SEQ ID NO: 10374 - protein, 486 aa, Candida glabrata CBS138
MVHLGPKKPPTRKGSMVDMPQQLLDQIKVFEEMYTVDGETLRKVTKHFITELDKGLSKKGGNIPMIPGWVMEYPSGKEKGDYLAIDLGGTNLRVVLVKLGGDRTFDTTQSKYKLPEAMRTTKNHEELWSFIADSLQAFLEDQFPEGVKGKLPLGFTFSYPASQDRINQGVLQRWTKGFDIPNVEGHDVVPMLQKQIEKRNLPIDIVALINDTTGTLVASLYTDGETKMGVIFGTGVNGAYYDVVSDIPKLEGKLADDIPNDSPMAINCEYGSFDNEHVVLPRNKYDLIIDEESPRPGQQAFEKMSSGYYLGEMLRLALLDLYDQGLILKGQDISKLKKPYVMDTSYPSKIEDDPFENLEDTDELLQKNLGIQTTVQERKLIRRLCELIGTRSARLSVCGIAAICQKRGYETAHIAADGSVFKMYPGFKEKAAQGLADIYGWEHKDPKDCPIVIVDAEDGSGAGAAIIAALAEKRIAEGKSLGVLGA

SEQ ID NO: 10375 - protein, 518 aa, Brassica rapa subsp. pekinensis
MAAAACGQLNLEEPTPIRGSRSVDCFEKLEQIGEGTYGQVYMAKDIKTGEIVALKKIRMDNEREGFPITAIREIKILKKLHHENVIHLKEIVTSPGRDRDDQGKPDNNKYKGGIYMVFEYMDHDLTGLADRPGLRFTVPQIKCYMKQLLTGLHYCHVNQVLHRDIKGSNLLIDNEGNLKLADFGLARSYSHDHSGNLTNRVITLWYRPPELLLGATKYGPAIDMWSVGCIFAELLNGKPILPGKTESEQLNKIYELCGSPDENNWPGVTKMPWYNQMKSSRPLKRRVREVYRHFDRHALELLEKMLVLDPSQRISAKDALDAEYFWTDPLPCDPKSLPTYESSHEFQTKKKRQQMRHNEEAAKKQKLQHPQQQQHSRLPPQQHGVGQSHAAPHWPVGPNHPINNGPPPQLPAGGPSGHNYYQKARVGGAPGPNRYPPGGNQTGGYNNNQSRGGYSSGSYPPQGRGAAPYGGAGPRGPSGGYGAGPPNYSQGGGGQYGGSGRGQNPMGGARNQQYGWQP

SEQ ID NO: 10376 - protein, 149 aa, Oryza sativa (japonica cultivar-group)
NPFGQIPAFQDGDLYLFESRAIGKYILRKYKTREADLLREGNLREAAMVDVWTEVETHQYNSAISPIVYECIINPAMRGIPTNQKVVDESAEKLKKVLEVYEARLSQSTYLAGDFVSFADLNHFPYTFYFMGTPYASLFDSYPQVKAWW

SEQ ID NO: 10377 - protein, 679 aa, Brassica rapa subsp. pekinensis
MASLKVPTNVPLPEEDAEQLHKAFAGWGTNEKLIISILAHRTSAQRSLIRSAYAAAYNEDLLKALDKELSSDFERVVMLWTLDPAERDAFLAKESTKMFTKNNWVLVEIACTRCPLDLFKVKQAYQARYKKSLEEDVAQHTSGDLRKLLLPLVSTFRYEGDEVNMRLARSEAKLLHEKVSEKAFSDDDFIRILTTRSKAQLGATLNHYNNEYGNAINKHLKEDSDDEYLKLLRAAITCLTYPEKHFEKVLRLAINKMGTDEWALTRVVTTRTEVDMERIKEEYQRRNSIPLHHAVAKDTSGDYEDMLVSLLGHGDEGTLDGSFAGDKRLGFSSSSQSSRRLALSGGSSLQQRIERTLLPLLLSGYRRQAPVNSPLTAPDMSRFCRSEEPSGSLGLSSFGGSFLTRAGSSVNSPAPLSSIYVNPATDVGGTPLRRPDLFLKSLRRQASSSDIPLPRSILSILHVWPPPPFRLCKLGLKRLHEDPYHQPLQTYLLSQRFANLASDVGGNSLRHTVLSHMFMNMTSDVSGNPLRPPALSHQKLVRPICRRIILTSFSVVEITLLPCLPSMNGENFSDSFPSFSCSLLTGLLLYGAVRTGPEGAIETTSVFLVGEDCLSTSLVTISQLSNFAVEALLTHSNLILNSLSTSYEDLLCLFLIAIIVHELSTRGCLVLFWLCSPCI

SEQ ID NO: 10378 - protein, 693 aa, Polaromonas sp. JS666
MTASSLSLMANAIRALAIDAVERANSGHPGAPMGMADMAAALWTRHLKHNPSNPNWFNRDRFVLSNGHASALLYAVLHLTGYELSIEDIKNFRQIHSKTPGHPELGITPGIETTTGPLGQGLGNAVGMALSEKLLANEFNRPGYTVIDHNTYVFLGDGCLMEGISHEVAALAGAWKLNKLVALYDDNGISIDGKVEPWFPEDTAARFAAYGWNVLGPIDGHDGELVAETIRCARRSNTQPTLIICKTQIGKYSPNRANTPKVHGEPLGAEEIQLTRDAMEWTDKPFHIPADVYAAWNARDKGHTAESLWDAQFASYEAIYPDLGAELYRRMRGDLPNAFGKLAHEAIEKSCNRADSVASRRASQLALEEFTAKLPEMLGGSADLTSSNLTNTKSTSSLRFKTDGQVEACSNGKGVEVPGRHINYGVREFGMASIMNGIALHGGHIPYGGTFLTFSDYSRNALRMAALMKLRVIHVFTHDSIGLGEDGPTHQPVEHAASLRLIPNLDVWRPADTVEATVAWAVALQNKSQPTALLLSRQSLKFQPKTETDDVCKGGYVLKDPPETGVGRPLEAVLIATGSEVQLALRAQVLLADAGILTRVVSMPSTTTFDKQSSHYKSLVLPSRLPRIAVEMGVSHGWWKYGCSAVVAIDTYGESAPAEVLFNHFGFTPQGVASVVREVISKPQLSQLAPLTS

SEQ ID NO: 10379 - protein, 518 aa, Pycnoporus sanguineus
MGSGLFSLFVAIAAISGSLAAIGPKADLVISDAVVNPDGTPRAAVVVNGDFPGPLISGKKGDHFQLNVINKLTNHTMLKTTSIHWHGLFQEHTNWADGPAFVNQCPIASGHSFLYDFHVPDQAGTYWYHSHLSTQYCDGLRGPLVVYDPHDPQAHLYDVDNDDTVITLADWYHVAAKLGPQFPRGANSTLINGLGRAATDSTSDLTVITVEHGKRYRFRLVSISCDPNHTFSIDGHNMTIIEVDGVNSKPLTVDSIQIFAAQRYSFVLNANQPVDNYWIRANPSGGTLGFEGGINSVILRYKGAPDAEPTNTTAPTSVIPLVETNLHPLKPMQVPGRSGVGNVDYAKTLNFNFNGTNFFINNATFTPPTVPVLLQILSGAHNAQDLLPAGSVYTLPPHSAIEITMPATTMAPGSPHPFHLHGHVFAVVRSAGSSEYNYHDPIFRDVVSTGQPGDSVTIRFMTDNPGPWFLHCHIDFHLEAGFAIVFAEDVNDIKYANPVPPSWEELCPIYDKLPESDH

SEQ ID NO: 10380 - protein, 458 aa, Zea mays
GYNVSSDELYHVVEASGLHNSLGGYLNDTRTLLELHKASTVSISEDESILDSIGSRSRTLLREQLESGGALRKPSLFKEVEHALDGPFYTTLDRLHHRWNIENFNIIEQHMLETPYLSNQHTSRDILALSIRDFSSSQFTYQQELQHLESWVKECRLDQLQFARQKLAYFYLSAAGTMFSPELSDARTLWAKNGVLTTIVDDFFDVAGSKEELENLVMLVEMWDEHHKVEFYSEQVEIIFSSIYDSVNQLGEKASLVQDRSITKHLVEIWLDLLKSMMTEVEWRLSKYVPTEKEYMINASLTFGLGPIVLPALYFVGPKISESIVKDPEYDELFKLMSTCGRLLNDVQTFEREYNEGKLNSVSLLVLHGGSMSISDAKRKLQKPIDTCRRDLLSLVLREESVVPRPCKELFWKMCKVCYFFYSTTDGFSSQVERAKEVDAVINEPLKLQGSHTLVSDV

SEQ ID NO: 10381 - protein, 386 aa, Rickettsia aeschlimannii
DSEFAELKIRGKIFKLPILKASIGEDVIDISRVSAEADCFTYDPGFMSTASCQSTITYIDGDKGILRHRGYDIKDLAEKSDFLEVAYLLIYGELPNGEQYNNFTKQVAHHSLVNERLHYLFQTFCSSSHPMAIMLAAVGSLSAFYPDLLNFKEADYELTAIRMIAKIPTIAAMSYKYSIGQPFIYPDNSLDFTENFLHMMFATPCTKYKVNPIIKNALNKIFILHADHEQNASTSTVRIAGSSGANPFACISTGIASLWGPAHGGANEVVINMLKEIGSSEYIPKYIAKAKDKNDPFRLMGFGHRVYKNYDPRAAVLKETCKEVLKELGQLDNNPLLQIAIELEAIALKDEYFIERKLYPNVDFYSGIIYKAMGIPSQMFTVLFAI

SEQ ID NO: 10382 - protein, 320 aa, Polaromonas sp. JS666
MNQLESLRQFTTVVVDTGDFNEISRFRPTDATTNPSLILKAVQQQEYRSLLDSTVSAEKKQPLDLVMDQLLVRFGCEILKLVPGRVSTEIDPRLSFDANATVARAERIIALYEANGIAPERVLIKIASTWEGIQAAAQLESRGIHTNLTLLFSLTQAVACSQAKVKLISPFVGRIYDWHRKQAGAAWNEGEGLGVTDPGVQVVRQIFHYYKKFAIPTEVMGASFRNLHQIRSLAGCDLLTISPQLLAQLESHDEPCSIHLAASDADDVALAPLACDEASFRFAMNEDAMVTEKLAEGIRLFCRDLQALEQIIAGTTSVPA

SEQ ID NO: 10383 - protein, 309 aa, Oryza sativa (japonica cultivar-group)
MEARRISASPRPCSGRRVVARKRPRHEAAVNSVRKLQRREISSCRDRAFSMSAAQERFRNIQLQEEFDTHDPKENSLLLPYLRKRSKIIEIVAARDIVFALSQSGVCAAFSRETNRRICFLNGSPDEVIRSLFYNKNNESLITVSVYGSENFSALRCRTTRIEYIRRAKPDAGFPLFESESLKWPGFVEFDDVNGKVLTYSAQDSTYKVFDLKNYTLLYSISDKNVQEIKISPGIMLLIYTRTSSSVPLKILSIEDGTVLKSFNHLLHRNKKVDFIEQFNEKLLVKQEGENLQILDVRNFQLTEVRPSS

SEQ ID NO: 10384 - protein, 745 aa, Streptococcus agalactiae A909
MVKVSNLGYPRLGEQREWKQAIEAFWAGNLEQKDLEKQLKQLRINHLKKQKEAGIDLIPVGDFSCYDHVLDLSFQFNIIPKRFDEYERNLDLYFAIARGDKDNVASSMKKWFNTNYHYIVPEWEVETKPHLQNNYLLDLYLEAREVVGDKAKPVITGPITYVSLSSGIVDFEATVQRLLPLYKQVFQDLIDAGATYIQIDEPIFVTDEGELLVDIAKSVYDFFAREVPQAHFIFQTYFESAVCLDKLSKLPVTGFGLDFIHGRAENLAAVKQGLFREKELFAGIVNGRNIWAVNLEETLALLEEIGPFVKRLTLQPSSSLLHVPVTTKYETHLDPVLKNGLSFADEKLKELELLASAFDGNKTKGYHEALSRFSALQAADFRHVALESLAEVKLERSPYKLRQALQAEKLQLPILPTTTIGSFPQSPEIRKKRLAWKRGNLSDSDYKDFIKTEIRRWIAIQEDLDLDVLVHGEFERVDMVEFFGQKLAGFTTTKLGWVQSYGSRAVKPPIIYGDVKHIQPLSLEETVYAQSLTKKPVKGMLTGPITITNWSFERDDISRSDLFNQIALAIKDEIQLLEQSGIAIIQVDEAALREGLPLRQQKQQAYLDDAVAAFKIATSSVKDETQIHTHMCYSKFDEIIDSIRALDADVISIETSRSHGDIIESFETAVYPLGIGLGVYDIHSPRIPTKEEIIVNIQRSLKCLSKEQFWVNPDCGLKTRREAETIAALEVLVSATKEVRQQLDN

SEQ ID NO: 10385 - protein, 430 aa, Glycine max
GLASEGGSKLKMLLTFVDNLPNGTERGTYYALHLGGTNFRVLRVQLNGQPSSDFEHEVERQPFPQHVMTSTSEDLFDFIASSLKEFIAKEGDGSNISQDRRELGFTFSFPVKQMSVSSGILIKWTKGFSIGNMVGRDVATCLQEALARKGLDVRVAALVNDTVGTLAVGHYHDPDTVAAIIIGTGTNACYLERVDAIIKCQGLLMTSGRMVVNMEWGNFWSSHLPRTSYDIDLDAESPNPNDQGFEKMISGMYLGDIVRRVILKMSLESDMFGPISPKLSMPFILWTPLMAAMHEDNSPDLREVARILNDIFEIPDVPLKARKIVVKVCDVVTRRAARLAAAGIVGILKKIGRDGSGGITGGRSRSDMKMRRTVVAIEGGLYSKYTLFREYLREALNEILGQDIAKHVILKVTEDGSGIGAALLAASYSS

SEQ ID NO: 10386 - protein, 575 aa, Cryptococcus neoformans var. neoformans B-3501A
MVNITYGALLSSSDGAVHFEPLGTDIISTLAGQPTAFDPGDIAWVLTCSALIVFMLPGLGYLYSGLARRKNALSMLFLSLVSLGIVSFQWFFIGYSLVFSETGGSFWGDGRNIGFRQVLERPIPEANGKLPEIVFATFQLMFACLVPAVLLGAAAERSRILPAMIFMFCWTTLVYDPLAHWIWSANGWANKWGVLDYAGGVPVEIASGTAGLAYSYFIGKRRGYGTDRVLFKPSNVGNVVLGTVFLWVGWLGFNGGSCYCASLKAALAIFNTNLAGSVGGVVWLIMDFRLERKWSMVGYCTGAIAGLVAITPAAGYVGAPAAALIGLVSAAVSNLATRLKVTMRVDDPMDIFAVHALAGIVGVLMTGLFAQSSVAANDGFSDIDGGWLDRHYVQLGKQIAWACVGMAWTFVVTYAIMFFINLIPGCHFRATDEAEIVGMDEVELGEYVADYAFHQRDLEGEYEAHTLSQCPSATKLHLQEFRHNKDGESSSSSQPKELPPTMPRGGAVVGDLDGDTAVESQHSRSRSRGRSQHRVRIEKEGDNEAMEMSDVRHTKTSDQRQEGSNLEGSYMGHRE

SEQ ID NO: 10387 - protein, 447 aa, Cryptococcus neoformans var. neoformans B-3501A
MTQLDDRLDDFLRGRKQKGRFRSLKEYDTSPHSGLTDFSSNDYLSLTSSESLRSAYLERLANSPQILGSTGSRLLSGCSPAHSALENRLSTLFNSPSALLFNSGWDANVSFFATVPQASDWVICDELVHASVHSGLRSSRVPPEKRLIFPHNSPEGLEKVLQQIARNPSSGHDSTVFLALESLYSMDGDMAPLPLLLDIFEQYVPRTRQCVVVDEAHSTGVYGEHGKGLVYALGEEGGWAPGDGNKRGKSRVDVRLMTFGKAVGCSGAVLLCSPTVRTFLINFARPFIFSTAMPHSTVIALQCVWDLLLGLEGDKRRESLMAIAAYIYSLLNDLLRNTPAEILRLPPNSGAQFTFHIPPHDTESVSSSPLSPILGLLTPTPHALSAFLLEKGFIVRPVVPPTVPPGAERVRICLRASMDKKVIDQLMAALREWVESKMNVGVMRAKL

SEQ ID NO: 10388 - protein, 333 aa, Oryza sativa (japonica cultivar-group)
MGEQQQQVERQPDLPPGFRFHPTDEEIITFYLAPKVVDSRGFCVAAIGEVDLNKCEPWDLPGKAKMNGEKEWYFYCQKDRKYPTGMRTNRATEAGYWKATGKDKEIFRNHHMLIGMKKTLVFYKGRAPKGDKTNWVMHEYRLADASPPQPPPPPSSAEPPRQDDWAVCRIFHKSSGIKKPVQVPMQMPMQMQMPVAHQVPAANYQQQMAMASASIIQVPMQMQMPSMSDQLQMLDDFSTGSLMAPPPPPPSYSTLPGFPLQINGGAQQFVGNPSMYYQQQQQQQQQQMDMAAGGFVVSEPSSLVVSPQDAADQNNAADISSVACNMDATIWKY

SEQ ID NO: 10389 - protein, 234 aa, Clostridium tetani E88
MSAFMGELLGTMILILLGNGVVANNVLKHSKGEGSGWIVITTGWAIAVAIPVYIFGPISGAHFNPAVTIAFASIGQFSWADVPGYIIAQLVGAIIGATLVWLTYLPHWEATEDQATKLAAFSTAPAIKNTTANLITEIIGTFFLVFGILGVANTSMADGLAPLVVGLIILAAGVSLGGPTGYAINPARDLGPRIAHAILPIKGKGDSDWGYAWIPIVGPIIGGLIGAIFFNIMF

SEQ ID NO: 10390 - protein, 145 aa, Oryza sativa
MGFSETQEELVLRSWQSMKKDSESIALKFFLRIFEIAPAAKQMFSFLRDSGDDVPLENHPKACESATQLRKTGDVKVREATLRRLGATHVKAGVADAYFEVVKTALLDTIKDAVPEMWSPEMKGAWEEAYDQLAAAIKEEMKKAA

SEQ ID NO: 10391 - protein, 174 aa, Pasteurella multocida subsp. multocida str. Pm70
MTQQAIFAGGCFWCVEAVFNQIKGVEKATSGYINGTTENPTYKEVCTGETGHAEAVKVEFDATVISYEKLLDIFFSIHNPTQLNHQGEDVGTQYRTGIYYLNDEQEQLANKKIAELQPHFAEKIVTEVLPAQTFYPAEDYHQGYLLQNPQNSYCNLVATPKFLKAKVKFEEIWK

SEQ ID NO: 10392 - protein, 228 aa, Glycine max
TFIYSREGKTRLNAHIYLSDNRDDLYWDSGPPPSLPFQALFAKLQQLATVAGDVLLGKEKIQKMLLARLTETVVMWLSDEQEFWGVLEDKSAPLKPLGLQQLILDMHFTVEIARFAGYPSRHIHQIASAITARAIRTFSARGIDPQSALPEDEWFVETAKSAINKLLLGASGSEASDTDEDHIIVHHDEVVSDSDTVSSLSSMESTESFASASMAELDSPSNLSDPDN

SEQ ID NO: 10393 - protein, 384 aa, Peridinium foliaceum
LFCLEHGIQPDGQMPSDKTIGGGDDAFNTFFSETGAGKHVPRCVFVDLEPTVVDEVRTGTYRQLFHPEQLISGKEDAANNFARGHYTIGKEIVDLVLDRIRKLADNCTGLQGFMVYNACGGGTGSGLGCLMLERLSVDYGKKSKLSFTVWACPQVATAVVEPYNTVLCVHSLLEHTDVTIMYDNEALYDICRRNLDIERPTYTNLNRLLAQIISSLTASLRFDGALNVDITEFQTNLVPYPRIHFMLSSYAPVISAEKAYHEQLSVAEITMSVFEPASMYVKCDPRHGKYMACCMMYRGDVVPKDVNAAVATIKTKRTIQFVDWCPTGFKCGINYQPPTVVPGGDLAKVMRACCMISNSTAIAEVFSRIDHKFDLMYSKRAFVH

SEQ ID NO: 10394 - protein, 128 aa, Chlamydomonas reinhardtii
MQIFVKTLTGKTITLEVESSDTIENVKAKIQDKEGIPPDQQRLIFAGKQLEDGRTLADYNIQKESTLHLVLRLRGGIIEPSLQALARKYNQEKMICRKCYARLHPRAKNCRKKSCGHTNQLRPKKKLK

SEQ ID NO: 10395 - protein, 314 aa, Pyrobaculum aerophilum str. IM2
MLDIESLTPREALGKALADLGDLRSDVVVLVADTGETTRAKLFAERHPERFFNVGIAEQSLVGIAAGLALAGFMPYALTFAAFMTRGWEQARNSVDRLALPVRLVGTHAGFADAYDGPSHQALEDIALFRVLPNFTVMAPADSCEVYKAVTASATLKGPAYIRVGRDFHIPVTCGLYDKFEIGKAYVVLDGSDVAIFTTGVVLPFAIEAAQFLKDRGISAAVVHFPTIKPLDYAAVEKYASVTGAVLTVEEHMVYGGFGSAIAEYLSQTRPTKMAIMGLKSYGRTAKSPQELYQYFGLTPENIAARAEELVKLK

SEQ ID NO: 10396 - protein, 267 aa, Pyrobaculum aerophilum str. IM2
MGRGVSELEALTCKARRYVVLMAGYDPGIHLGSSLSVIEIVAALYGTGRVKFNVANGAHNRNYFVLSKGHAIHAVYALAAAMGYLSLDELRETGSLGSRLQNHPEVDTPFVDVPNSGSLGQGISLAVGLALGMKIKGEKGRVYLVVGDGELDEGQSWESFAVAAHYNLTNLVTIVDFNGVQLDGHSEEVLRKGDLAGRFKSLGFEVIEADGHNIGEIIAALEKAERGERPAVIIAKTIRGRGIAQIEDTAKQRLPRDEALKYARDIC

SEQ ID NO: 10397 - protein, 411 aa, Escherichia coli CFT073
MCFNHQPVNLENHRVFQKVDAYAGDPILTLMERFKEDPRSDKVNLSIGLYYNEDGIIPQLKAVADAEARLNAQPHGASLYLPMEGLNSYRHAIAPLLFGADHPVLQQQRVATIQTLGGSGALKVGADFLKRYFPESGVWVSDPTWENHVAIFAGAGFEVSTYPWYDEATNGVRFNDLLATLKTLPARSIVLLHPCCHNPTGADLTNDQWDSVIEILKARELIPFLDIAYQGFGAGMEEDAYAIRAIASAGLPALVSNSFSKIFSLYGERVGGLSVLCEDAEAAGRVLGQLKATVRRNYSSPPNFGAKVVAAVLNDEALKASWLAEVEEMRTRILAMRQELVKVLSTEMPERNFDYLLNQRGMFSYTGLRTAQVDRLREEFGVYLIASGRMCVAGLNAQNVHRVAKAFAAVM

SEQ ID NO: 10398 - protein, 174 aa, Zea mays
  misc_feature (152)..(152): Xaa can be any naturally occurring amino acid
  unsure (1)..(174): unsure at all Xaa locations
MRPILMKGHERPLTFLRYNRDGDLLFSCAKDHTPTVWYADNGDRLGTYRGHNGAVWTCDVSRDSARLITGSADQTAKLWDVSTGKELFSFRFDAPARSVEFAIGDALAVVTTDNFMDHVPTVQVKRIAEDIDDQTEESALVITGIKGRINRXAVWGPLNRTIITEGEDATVRIC

SEQ ID NO: 10399 - protein, 272 aa, Listeria monocytogenes str. 4b H7858
MMDTSLATQFLGEVIGTAILIILGAGVVAGVSLKRSKAENGGWVVITLAWGLGVTMGVYVSGYMSMAHLNPAVTIGMALAGAFPWNYVLPYILAQFIGAFIGATLIWLHYYPHWKQTEDKPTKLGVFATAPAIRHFTSNFFGEALGTFILVFGLLSLGANSFSDGLNPLVVGALIVAIGMSLGGTTGYAINPARDLGPRIAHFVWPISGKGGSDWGYSWVPVIGPIMGGALGALGYNAIINGELGMWFWVFAVLFVLILILTMQLDKKKDLA

SEQ ID NO: 10400 - protein, 472 aa, Escherichia coli CFT073
MSTIFDVAVMGGGPGGYVAALRAAQNGLSVVCIDDGVNAQGEPSPGGTCLNVGCIPSKSLLQSSELYAQVQHEASIHGVNVDGVSFNAAAMIQRKDAIVSRLTMGIGLLFKKNKVKYLCGLATLEHARDEIWQLRVNDQQIRARNVVIATGSQPRQLPGVTIDNQQILDNRGALALTAVPPRLGVIGAGVIGLELGSVWNRVGSDVTLLEMAPTFLPALEARLSNEVRKAMIASGMKMQLAVEIEAIEQRDDGVHVRWRQGEKREESRFDKLILAIGRVPRLSGVDLVQLGLEADNRGGIAVDNLCRTGKAGLWAIGDVVRGPMLAHKAMAEGVVVADQIAGLAVEPINFALIPSVIYTQPEVAWVGENEASLKAAGRVFNKGNSLFAGNGRALALGQEGGRCTLYSDKHTDRVLGGAIVGPQASELINEIALAMTFSASGEDIACAIHAHPTLSEVIHEAAMALNNKALHG

SEQ ID NO: 10401 - protein, 743 aa, Magnaporthe grisea 70-15
MASLKDIGDTLSKGKSYVMHSQGDKISDLARNTVTPDEKGRQTTDAGVRITNPDDWLRVTSNDQIGPSLLEDQIAREKIHRFDHERIPERVVHARGTAAHGKFTLHKSIEHLTTAGVLTDTSRETPVFLRFSTVLGSRGSADTVRDVRGFAVKFYTPEGNWDIVGNNIPVFFIQDSMKFPDVIHAGKPEPDNEVPQAQSAHNNFWDFMYQHSEATHMFMWAMSDRTIPRSYRMMQGFGVNTYTLINAKGERHFVKFHFTPELGVHSLVWDEALKLAGQDPDFHRKDLMEAIANGAFPRWKFGVQVLPESREHEFDFDILDATKVWPEDLIPVDYIGTLELNRNIDEFFPETEQVAYCTSHVVPGIGFSDDPLLQGRNFSYFDTQISRLGINWEELPINRPVCPVLSFNRDGQSRHTITKGKVNYWPNRFGVNAPADGVKEGGYVEHATKVQGIKARTKSAKFLDHISQAQLFFNSMSDVEKRHMLAAFSFELDHCEEEVVYNNLVSRLTQIDIGLAQQVAEMVGAQIPDKATKENKGIKAKGLSQFDFLPENPTIASRKVAILIADGYDSVQFRAVKAALSAAQAIPLVIAPRRSPIYAAGETKGSSGAGLKPDHHLEGFRSTMVDAVYVPGGAESIKTLSKNGRALHYVREAFGHLKAIGASGEGVELVKLAVTLPEVTVSSADVMESYGVVTVRNVQADSLKEVVDLAKGGKDFLDQFFHSIAMHRNWAREADGLNSQVAY

SEQ ID NO: 10402 - protein, 89 aa, Oryza sativa
MASSRWVRPEVYPLFAAMGVAVGICGFQLFRNITGNPEVRVNKVGRAAGVLENHEEGRRYAEHGLRNYVRDKTPEIMPAINKFFTEPTK

SEQ ID NO: 10403 - protein, 534 aa, Pseudomonas aeruginosa UCBPP-PA14
MPRRDGVRPTNAKDNVRPEDDMGHSVAGACLEEPAVLTAFPSLLHPQDPPQQRDRILFVTAELSDFVKVGGLGDFSAALPRVLKREHSVRVLLPGYRQVLERCRDLRIIGSLPGRAAIPPCEIGLVTLDDGLEVMLVLCPLLYEREGTPYMDDQGNDWPDNHLRFARLCLAAAEIAGGRGAQGWQPGLVHANDWPSALTPAYMAWNGVRTPSLFTIHNLAYQGLCDLQCSAELGLPDEALSHESMEFHGRLSFLKAGIAHAHHITTVSETYAQEITTPEYGCGLHGILKCKVEKRQLSGIVNGIDDSWQPHCDPHLVAGFSARQWAGKRANTRYVEERFGLEPGKGPLFAVVSRLVQQKGIDLTLEISDALLQAGGRLVSIGRGEPNLEKAMLELARRHPGQVGVHIGFDETEARRIYAGSDFLLMPSRYEPCGLSQLYAQCFGSLPIARCTGGLADTIVDGVTGFLFREETAQSYLDAVMRAINVYHCPSLLNAMRCKAMAAPMFWSDSVEPYNRLYRRLLRNTAPALRGVRQ

SEQ ID NO: 10404 - protein, 225 aa, Zea mays
MDGGFPALLDPTALSLALPVTQGPQGLNKLSKDDYLAICLAALAGTRGSGLVVKAAAGFGRKETGGINKQSWCPPQPAPAAHEEALRLRFRCAVCGKAFPSYQALGGHKSSHRKPPTAEQQAVVSAADSEDETTTSSGGGPHRCTICRRGFATGQALGGHKRCHYWDGASASVSLSASGTGSSGVTLRNFDLNLMPVAENAGMKRWVEEEEVQSPLPIKKRRILD

SEQ ID NO: 10405 - protein, 1006 aa, Ralstonia eutropha JMP134
MTQHAARPGRRSANREAPSQASGQSDANGASTRKTASKTPGIKPISKANLMVVPANGALNASPARRSATDKDVPLREDIRFLGRLLGECLREQEGDATFEVVETIRQTAVRFRRENDRAAGTELDRLLKRLSRDQTNQVVRAFSYFSHLANIAEDQHHNRRRRIHALAGSPPQDGSLQHALEKIDAAGVTGKQLRKFLDEALIVPVLTAHPTEVQRKSILDAEREIARLLAERDLPMTARERDRNTAQLRAKVTTLWQTRMLRDSRLTVADEIDNALSYYRTTFLHGIPQLMSELEEDIAAIFPASRKTKGAAAEAAPLAPFMQMGSWIGGDRDGNPNVTAETLDHAATQQSRMILGWYLDEVHALGAELSMSTLMVDASPELLALAEASPDHSAHRADEPYRRALIGIYARLAATSKMLTGQGAPRHPVADAEPYSSAEAFAADVQIVIDSLRAHHGRALTSTRIDALVRAIAVFGFHLASVDMRQVSDVHEAVVAELFAAAGVEKDYAALPESRKLELLLAELRQPRLLTLPYHEYSEQTRNELAILATARELRARYGQRVARNYIISHTETLSDLVEVMLLQKEAGMLKGTLGSKTDPARMELMVIPLFETIEDLQNAAGIMQSLLDLPGFDSVIEHHGVEQEVMLGYSDSNKDGGFLTSNWELYKAELALVQLFEQRKVKLRLFHGRGGTVGRGGGPTYQAILSQPPGTVNGQIRLTEQGEIINSKFANAEIGRRNLETVIAATLEASLLPQQNAPKELSTFEGIMQQLSDRAFGAYRNLVYETPGFKDYFFATTPITEIADLNLGSRPASRKLMDKKNRRIEDLRAIPWGFSWGQCRLLLPGWYGFGSAVKSLLDTAPDEKARKAAVATLRKMVKTWPFFSTLLSNMDMVLAKTDLAVASRYAQLCDDAALRKNVFARISKEWHLTCEMLALVTGHQERLADNPLLARSIKNRFAYLDPLNHLQVELLKRYRSGKDGDDIRVRRGIHLTINGVAAGLRNTG

SEQ ID NO: 10406 - protein, 146 aa, Oryza sativa (japonica cultivar-group)
NPFGQVPALQDGDLFLWESRAICKYVCRKNKPELLKDGDLKESAMVDVWLEVESNQYTPALNPILFQCLIRPMMFGAPPDEKVVEENLEKLKKVLEVYEARLTKCKYLAGDYISVADLSHVAGTVCLGATPHASVLDAYPQVKAWW

SEQ ID NO: 10407 - protein, 601 aa, Flavobacterium sp.
  misc_feature (1)..(1): Xaa can be any naturally occurring amino acid
  misc_feature (9)..(9): Xaa can be any naturally occurring amino acid
  misc_feature (18)..(18): Xaa can be any naturally occurring amino acid
  misc_feature (26)..(26): Xaa can be any naturally occurring amino acid
  misc_feature (35)..(35): Xaa can be any naturally occurring amino acid
  misc_feature (113)..(113): Xaa can be any naturally occurring amino acid
  misc_feature (130)..(130): Xaa can be any naturally occurring amino acid
  misc_feature (213)..(213): Xaa can be any naturally occurring amino acid
  misc_feature (231)..(231): Xaa can be any naturally occurring amino acid
  misc_feature (278)..(278): Xaa can be any naturally occurring amino acid
  misc_feature (329)..(329): Xaa can be any naturally occurring amino acid
  misc_feature (337)..(337): Xaa can be any naturally occurring amino acid
  misc_feature (370)..(370): Xaa can be any naturally occurring amino acid
  misc_feature (378)..(378): Xaa can be any naturally occurring amino acid
  misc_feature (419)..(419): Xaa can be any naturally occurring amino acid
  misc_feature (422)..(422): Xaa can be any naturally occurring amino acid
  misc_feature (435)..(435): Xaa can be any naturally occurring amino acid
  misc_feature (441)..(441): Xaa can be any naturally occurring amino acid
  misc_feature (443)..(443): Xaa can be any naturally occurring amino acid
  misc_feature (457)..(457): Xaa can be any naturally occurring amino acid
  misc_feature (520)..(520): Xaa can be any naturally occurring amino acid
  misc_feature (541)..(541): Xaa can be any naturally occurring amino acid
  misc_feature (544)..(544): Xaa can be any naturally occurring amino acid
  misc_feature (551)..(551): Xaa can be any naturally occurring amino acid
  misc_feature (561)..(561): Xaa can be any naturally occurring amino acid
  unsure (1)..(601): unsure at all Xaa locations
XAPTAIEHXEPPFWWAGXQHKGLQLXVHGRDIGRXEAALDYPGVRLVSTTRVPNANYLFVDLEIGPEAQPGSFDIVFKGDGRSERYRYRLLAREQGSAQRQGFGPGDAIYQIXPDRFANGDPSNDNVAGXREQADRRHGGGRHGGDIRGTIDHLDYIAGLGFTQLWPTPLVENDAAAYSYHGYAATDHYRIDPRYGSNEDFVRLSTEARKRGXGLIQDVVLSHIGKHHWWXKDLPTPDWINYGGKFVPTQHHRVAVQDPYAAQADSENFTKGWFVEGXPDLNQTNPLVANYLIQNNIWWIEYAGLSGLRIDTYGYSDGAFLTEYTRRLXAEYPRLNXVGEEWSTRVPVVARWQRGKANFDGYTSHLPSLXDFPLVDAXRNALSKTGEENGLNEVYETLSLDYLYPEPQNLVLFGGNHDXARXFSAAGEDFDRWRXNLVFLXTXPRIPQFYSGDEILXTSTVKGRDDASYRRDFPGGWAGDKANAFSGAGLTSQQRAAQDLVRKLANWRKNQPVIHNGRLXHFGPEENTWVYFRYNKDKRIXVAXNNNDKPXTLPTARFQEXLKGAPSGVDFLSGKTVGLGRELRLAPKSVVVIELPGLPEA

SEQ ID NO: 10408 - protein, 218 aa, Glycine max
FVQQLLRPESKKIKNACLRLACIFWQLLILPWRFLFAFVPPCQIAHGWISFICSLLFISGIAYVVTKITDVISCVTGINAYVIAFTALASGTSWPDLVASKIAAERQKTADSAIANITCSNSVNIYVGIGVPWLIDTLYNFIAYREPLRIQNAGGLSFSLIVFFSTSVGCISVLVLRRIIFGAELGGPRLWAWITCAFFMLLWIIFVVLSSLKVSGFI

SEQ ID NO: 10409 - protein, 689 aa, Arabidopsis thaliana
MAFGRNNRVRFRDWISEGTEYGYGRNKARPSLNTVLKNVRRGLKKPLSFGSHNKKRDSNSSTTTQKNIINPQGSFLQNWNKIFLFASVIALAIDPLFFYIPIVDGERHCLNLHRNLEIAASVLRTFIDAFYIIHIVFQFRTAYISPSSRVFGRGELVDDPKAIAIKYLSSYFIIDLLSILPLPQLVVLAVIPNVNKPVSLITKDYLITVIFTQYIPRILRIYPLYTEVTRTSGIVTETAWAGAAWNLSLYMLASHVFGALWYLISVEREDRCWREACEKIPEVCNFRFLYCDGNSSVRNDFLTTSCPFINPDDITNSTVFNFGIFTDALKSGIVESDDFWKKFFYCFCALGQNLNTSKFVGEIIFAVSICISGLVLFALLIGNMQKYLESTTVREEEMRVRKRDAEQWMSHRMLPDDLRKRIRRYEQYKWQETRGVEEENLLRNLPKDLRRDIKRHFCLDLLKKVPLFEIMDEQLLDAVCDKLKPVLYTENSYAIREGDPVEEMLFVMRGKLMSATTNGGRTGFFNAVYLKPSDFCGEDLLTWALDPQSSSHFPISTRTVQALTEVEAFALAADDLKLVASQFRRLHSKQLQHTFRFYSVQWRTWGASFIQAAWRRHCRRKLARSLTEEEDRFRNAITKRERNAASSSSLVATLYASRFASNALRNLRTNNLPLLPPKPSEPDFSLRNP

SEQ ID NO: 10410 - protein, 525 aa, Ralstonia eutropha JMP134
MLGYRPANLHQGTMQGADTPAHARPPYRIDHQFDRGLVWFRRDLRSTDHAALHYALKHCREVWCVFVFDRDILDPLLARGLKGDRRVDFIRASLIELDATLRAAGGGLIVMNDSAASAIPALARELGVQAVFANHDYEPDAVARDAAVRDSLAGDARVLFTFKDQVIFERDEILTSQGKPFAVFTPYKNAWLKTIQPFDLRPYPIEPYLHALAPLPSKRLVPLPSLEDLGFAPSNLAEVAMPTGSSGGQALFEEFTSRMGDYGRRRDYPALRGPSYLSVHLRFGTVSIRTLARAAHGAVLRGGADSAGAATWLSELVWRDFYFMILHHHPRVAAGEAFHPAYDIIRWRDGETGDRYFESWRDAATGYPLVDAAMLQIRQSGYMHNRLRMVTASFLVKDLGVDWRRGEHYFADQLNDFDFAANNGGWQWAASTGCDAQPWFRIFNPVTQSEKFDPQGRFIRKYLPQLAALPDKYVHAPWTAPQDVLLAAGVRLGENYPRPLVQHDVARKETLERYAVVKEWRRPEG

SEQ ID NO: 10411 - protein, 308 aa, Populus trichocarpa
MADKSKILIIGGTGYIGKFIVEASAKAGHPTFALVRESTVSDPVKRELVEKFKNLGVTLIHGDVDGHDNLVKAIKRVDVVISAIGSMQIADQTKIIAAIKEAGNVKRFFPSEFGMDVDHVNAVEPAKTAFAMKAQIRRAIEAAGIPYTYVPSNFFAAYYLPTLAQFGLTAPPRDKITILGDGNAKLVFNKEDDIGTYTIKAVDDARTLNKTVLIKPPKNTYSFNELIDLWEKKIGKTLEKTFVPEEKLLKDIQESPIPINIVLSINHSALVNGDMTNFEIDPSWGLEASELYPDVKYTTVEEYLDQFV

SEQ ID NO: 10412 - protein, 167 aa, Triticum aestivum
ARGLSDIDKLKTEVIGLKGRIDKKSAYLQELQDQYAGLQNLVERNEQLYGSGDAPSGGVALPFILVQTRPHATVEVEISEDMQLVHFDFNSTPFELHDDSFVLKAMGFSGKEETDGTVALVANAVECSSASNVYGRRSPQPARPNGIRLRTSPPIPGILKGRVKHEH

SEQ ID NO: 10413 - protein, 517 aa, Triticum aestivum
  misc_feature (330)..(330): Xaa can be any naturally occurring amino acid
  unsure (1)..(517): unsure at all Xaa locations
MDKAYIAILSFAFLFLIHYILGKVTNGRHSKGAVQLPPSPRAIPFLGHLHLLEKPFHAALCGLAKRLGPVFSLRLGSRRAVVVSSPECARECFTEHDVIFADRPQFPSQLLVSFDGIALSTSSYGPHWRNLRRVAAVQLLSAHRVACMSGVIGGEVRAMARRLFRAAAASPDGAARVELKRRLFELSLSVLMETIAQTKGTRPEADADTDMSLEAQEFKKVVDEIIPHIGAANLWDYLPVLRWFDVFGVRNKILAAVSRRDAFMLHLIDNERRRLDDGGAEGDKKSMIAVLLTLQKTEPEVYTDTMIMALCANLFGAGTETTSTTTEWAXMSLLLNHPAALKEAQAEIDAAVGTSRLVTADDVPRLAYLQCIVSETLRLYPAAPMLLPHQSSADCKVGGYNVPSGTMLMVNAYAIHRDPAAWERPLEFVPERFEDGKAEGRFMIPFGMGRRRCPGETLALRTIGMVLATLVQCFDWERVDGAEVDMTEGGGLTIPKAVPLEAVCRPRPAMRDVLESL

SEQ ID NO: 10414 - protein, 449 aa, Prochlorococcus marinus str. MIT 9312
MSITDKIPVTILTGFLGSGKTTLLNRILSEEHGKRIAVIENEYGEVGIDQGLVINADEEVFEMSNGCICCTVRGDLIRVLGNLMKRRDKFDYVLVETTGLADPGPVAQTFFMDEEISSEFTLDGIVTLVDAAHIDQQLGRSDESSEQVAFADVLVLNKTDLVSDDALDTLESRLRDMNRMTRIIRAENAKVPIETVLNLSAFDLDQILKRRPTFLEPEYPFEWTGVYDLDAGKYELMLEEGPDPEMSLVALVNQGENEEELKDGAESSVRLYAEKANTLEPGNTIPYGEHINLKLEDKGNKSFILNIEKPTKVGLFTQHTAEEFNMKVIKSDENKEIPFNTERFWQAEHEHDDEVGSIAIERFGDVDPEKLNTWMGRLLSEKGVDIFRTKGYISYSGNPRRIVFQGVHMLFTAQPDKEWGNEPRRNQLVFIGRNLNEKEMQEGFDKCLI

SEQ ID NO: 10415 - protein, 366 aa, Clostridium tetani E88
MIHSKVEGGKIMKDKNAKMKVLKNLIDKGKKSGSLTYKEIMDELEEIELTPEQIEKVYEALESMNIDVLGADEIKKEEEEEEIDISVPEGISIDDPVRMYLKEIGKVPLLTSEEEVDLAQRIEAGELKARKKLAEANLRLVVSIAKRYVGRGMLFLDLIQEGNLGLIKAVEKFDYRKGYKFSTYATWWIRQAITRAIADQARTIRIPVHMVETINKLIRVSRQLLQELGREPTPEEIAKEMEISVDRVREIMKIAQEPVSLETPIGEEEDSHLGDFIPDDDALAPAEAAAFTMLKEQLINVLDTLTPREEKVLRLRFGLDDGRARTLEEVGKEFNVTRERIRQIEAKALRKLRHPSRSKKLKDYLD

SEQ ID NO: 10416 - protein, 367 aa, Streptococcus pneumoniae TIGR4
MVKYGVVGTGYFGAELARYMQKNDGAEITLLYDPDNAEAIAEELGAKVASSLDELVSSDEVDCVIVATPNNLHKEPVIKAAQHGKNVFCEKPIALSYQDCREMVDACKENNVTFMAGHIMNFFNGVHHAKELINQGVIGDVLYCHTARNGWEEQQPSVSWKKIREKSGGHLYHHIHELDCVQFLMGGMPETVTMTGGNVAHEGEHFGDEDDMIFVNMEFSNKRFALLEWGSAYRWGEHYVLIQGSKGAIRLDLFNCKGTLKLDGQESYFLIHESQEEDDDRTRIYHSTEMDGAIAYGKPGKRTPLWLSSVIDKEMRYLHEIMEGAPVSEEFAKLLTGEAALEAIATADACTQSMFEDRKVKLSEIVK

SEQ ID NO: 10417 - protein, 250 aa, Solanum tuberosum
MGRGRVQLKRIENKINRQVTFSKRRSGLLKKAHEISVLCDAEVGLIVFSTKGKLFEYANDSCMERLLERYERYSFAERQLVPTDHTSPGSWTLEHAKLKARLEVLQRNQKHYVGEDLESLNMKELQNLEHQLDSALKHIRSRKNQLMHESISVLQKQDRALQEQNNQLSKKVKEREKEVAQQNQWDQQNHEINSSTFVLPQQLDSPHLGEAYQNTNVVDNGEVEGGNSSQQQGAANNTVMPQWMLRHLNG

SEQ ID NO: 10418 - protein, 78 aa, Petunia integrifolia
MGRSIRLFATFFLIAMLFLSTEMGPMTSAEARTCESQSHRFHGTCVRESNCASVCQTEGFIGGNCRAFRRRCFCTRNC

SEQ ID NO: 10419 - protein, 567 aa, Oryza sativa
RLRAGDFEVNIFLGRLPILRGVEGRDFGMLEVSTLRSPKADQRAGVGGHHVVGFVPAPPSPADVADEVDAFIVDDSCLLEYIDFSCCDVPFFHADDGDILPDLEVDPTELLAEFASSPDDEPPPTTSAPGPGEPAAAAGAKEDVKEDGAAAAAAAAAADYDGSPPPPRGKKKKDDEERSSSLPEEKDAKNGGGDEVLSAVTTEDSSAGAAKSCSPSAEGHSKRKPSSSSSSAAAGKNSHGKRKVKVDWTPELHRRFVQAVEQLGIDKAVPSRILELMGIECLTRHNIASHLQKYRSHRKHLMAREAEAASWTQKRQMYTAAAAAAAVAAGGGPRKDAAAATAAVAPWVMPTIGFPPPHAAAMVPPPPHPPPFCRPPLHVWGHPTAGVEPTTAAAPPPPSPHAQPPLLPVWPRHLAPPPPPLPAAWAHGHQPAPVDPAAYWQQQYNAARKWGPQAVTPGTPCMPPPLPPAAMLQRFPVPPVPGMVPHPMYRPIPPPSPPQGNKLAALQLQLDAHPSKESIDAAIGDVLVKPWLPLPLGLKPPSLDSVMSELHKQGIPKVPPAASGAAG

SEQ ID NO: 10420 - protein, 244 aa, Zea mays
MEADADADADEEMMACGGGGEKKRRLSSEQVRALERSFEVENKLEPERKARLARDLGLQPRQVAVWFQNRRARWKTKQLERDYSALRQSYDALRHDHDALRRDKDALLAEIKELKAKLGDDEDAAASFTSVKAEPAASDGPAPAGVGSSEISDSSAVLNDADPPVAEAPAPAPEVQGTLLVAPAGPVAGAAAANHGGVFFHGSFLKVEEDETGLLDDDGPCGGFFAVEQPPAMAWWNEPAEHWN

SEQ ID NO: 10421 - protein, 511 aa, Arabidopsis thaliana
  misc_feature (450)..(450): Xaa can be any naturally occurring amino acid
  unsure (1)..(511): unsure at all Xaa locations
MYIKAIMNRHRLLSAATDECNKKLGQACSSSLSPVHNFLNVQPEHRKTPFIRSQSPDSPGQLWPKNSSQSTFSRSSTFCTNLYLSSSSTSETQKHLGNSLPFLPDPSSYTHSASGVESARSPSIFTEDLGNQCDGGNSGSLLKDFLNLSGDACSDGDFHDFGCSNDSYCLSDQMELQFLSDELELAITDRAETPRLDEIYETPLASNPVTRLSPSQSCVPGAMSVDVVSSHPSPGSAANQKSRMRWTPELHESFVKAVIKLEGPEKATPKAVKKLMNVEGLTIYHVKSHLQKYRLAKYMPEKKEEKRTDNSEEKKLALSKSEADEKKKGAIQLTEALRMQMEVQKQLHEQLEVQRVLQLRIEEHAKYLEKMLEEQRKTGRWISSSSQTVLSPSDDSIPDSQNMSKTKASSPQPPLPAENKASETEDDKCESPQKRRRLENIAESEDPKRXSLSETCKLITDIEDVTAFTVRKESLILCLCVYRSLVSEKTEEFTFKKKKKNLLISNVEVTF

SEQ ID NO: 10422 - protein, 396 aa, Silicibacter pomeroyi DSS-3
MSFQNPVFIPGPTNIPESLRKACDMPTIDHRSPLFGQILHPARAGVRAVLKSETAEIFIFPSTGTGGWETALTNTLSAGDGVLAARNGMFSHRWIDMCQRHGLAVEVVETPWGEGLPADRYEEILAADTHHRIKAVLATHNETATGVRSDIAAVRRALDKAGHPALLFVDGVSSIGSMDFRFDEWRVDVAVTGSQKGFMLPAGLAIVGFSAKAMEATATGTLPRTFFDVHDMARGYANNAYPYTPAVGLMNGLNQACRMLLDEGLENVFARHHRIAEGVRAAVHAWGLELCAASPDLYSDTVSAIRTPEGFNATDIVTHAASKYGVAFGVGLGEVAGKVFRIGHLGSLTDVMTLSGIATAEMCMADLGLDIGLGSGVAAAQEYFRSHSATSLLAAA

SEQ ID NO: 10423 - protein, 1081 aa, Candida albicans
MNPTKKPRLSPMQPSVFEILNDPELYSQHCHSLRETLLDHFNHQATLIDTYEHELEKSKNANKAFQQALSEIGTVVISVAMGDLSKKVEIHTVENDPEILKVKITINTMMDQLQTFANEVTKVATEVANGELGGQAKNDGSVGIWRSLTDNVNIMALNLTNQVREIADVTRAVAKGDLSRKINVHAQGEILQLQRTINTMVDQLRTFAFEVSKVARDVGVLGILGGQALIENVEGIWEELTDNVNAMALNLTTQVRNIANVTTAVAKGDLSKKVTADCKGEILDLKLTINQMVDRLQNFALAVTTLSREVGTLGILGGQANVQDVEGAWKQVTENVNLMATNLTNQVRSIATVTTAVAHGDLSQKIDVHAQGEILQLKNTINKMVDSLQLFASEVSKVAQDVGINGKLGIQAQVSDVDGLWKEITSNVNTMASNLTSQVRAFAQITAAATDGDFTRFITVEASGEMDALKTKINQMVFNLRESLQRNTAAREAAELANSAKSEFLANMSHEIRTPLNGIIGMTQLSLDTELTQYQREMLSIVHNLANSLLTIIDDILDISKIEANRMTVEQIDFSLRGTVFGALKTLAVKAIEKNLDLTYQCDSSFPDNLIGDSFRLRQVILNLAGNAIKFTKEGKVSVSVKKSDKMVLDSKLLLEVCVSDTGIGIEKDKLGLIFDTFCQADGSTTRKFGGTGLGLSISKQLIHLMGGEIWVTSEYGSGSNFYFTVCVSPSNIRYTRQTEQLLPFSSHYVLFVSTEHTQEELDVLRDGIIELGLIPIIVRNIEDATLTEPVKYDIIMIDSIEIAKKLRLLSEVKYIPLVLVHHSIPQLNMRVCIDLGISSYANTPCSITDLASAIIPALESRSISQNSDESVRYKILLAEDNLVNQKLAVRILEKQGHSVEVVENGLEAYEAIKRNKYDVVLMDVQMPVMGGFEATEKIRQWEKKSNPIDSLTFRTPIIALTAHAMLGDREKSLAKGMDDYVSKPLKPKLLMQTINKCIHNINQLKELSRNSRGSDFAKKMTRNTPGSTTRQGSDEGSVEDMIGDTPRQGSVEGGGTSSRPVQRRSATEGSITTISEQIDR

SEQ ID NO: 10424 - protein, 579 aa, Cucurbita cv. Ebisu Nankin
MLQMGKAREPNFLILFFFGLILAFGISSEGSQIRHYKWEVEYMFWAPDCNENIVMGINGQFPGPTIRANAGDTVVVELINKLHTEGVVIHWHGILQRGTPWADGTASISQCAINPGETFFYNFTVDNPGTFFYHGHLGMQRSAGLYGSLIVDPPQGKKEPFHYDGEINLLLSDWCHQSIHKQEVGLSSKPIRWIGEPQTILLNGRGQFDCSIAAKYDSNLEPCKLKGSEPCAPYIFHVMPKKTYRIRIASTTALAALNFAIGNHPLLVVEADGNYVQPFYTSDIDIYSGESYSVLITTDQNPSENYWVSVGTRGRHPNTPPGLTLLNYLPNSVSKLPTSPPPETPAWDDFDRSKNFTYRITAAMGSPKPPVKSNRRIFLLNTQNVINGYVKWAINDVSLALPPTPYLGAMKFNLLHAFDQNPPPEVFPEDYDIDTPPTNEKTKIGNGVYQFKIGEIVDVILQNANMMKENLSEIHPWHLHGHDFWVLGYGDGKFTAEEESSLNLKNPPLRNTVVIFPYGWTAIRFVADNPGVWAFHCHIEPHLHMGMGVVFAEGVEKVGRIPTKALACGGTAKSLINNP

SEQ ID NO: 10425 - protein, 179 aa, Streptomyces coelicolor
MSVPLDKQTAAPSLAHKAVGYGMPGRLVDGNDAAAVHEVLSDAVRHARAGGGPTLVEAVTYRVDAHTNADDATRYRGDAEVETWRRHDPVELLERELTERGLLDEDGIRAAREDAETMAADLRARMNQDPELDPLELFAHVYAEPTPQLREQRDQLRAELAAEAETAARQAGALEGGRR

SEQ ID NO: 10426 - protein, 577 aa, Treponema pallidum subsp. pallidum str. Nichols
MDPAFIFITGGVVSSLGKGIAAGAIGLLLKSRGISVVNQKFDPYLNGDPGTMNPYQHGEVFVTQDGGETDLDLGHYERFTDVPSSRFNSTTAGSVYRAILDRERAGGYGGATVQVIPHVTDEIQARIRAAAATTGARVVITEIGGTVGDIESLPFIEAIRQIRRVLGKERCLFIHLGLVPYLPSCGEMKTKPLQHSVKELLGLGVQPDVILCRSERHITDAVREKLSLFCNVERRAIVENVTARSIYEVPLLLEAEGLGALLCERLRLFDTCCGGQVARNLGAGGAQSAVLGAGGTVRTDGGLHPAAGQGAEPDLTAWRAMVRALYYPRRELTVALVGKYVSLADAYLSVSEALTAAGICHRARVDMRWIDAEEICSVQDAGHALADADALVIPGGFGVRGIEGMICAVSHARVQNLPYLGICLGMQIAVIEFARNVLLLASAHSREFAVDTPHPVVDLLPGCVDTPTGGSLRLGQYRCLLAEGSRARALYGRGEVWERHRHRYGLNAAYRARFEASALRPVGVDSDCGAVEVVEHGEHPWFFGVQFHPEFCSRPNRAHPLFRALVAAGLERKDSRS

SEQ ID NO: 10427 - protein, 279 aa, Physcomitrella patens
MAKDAGTESGVPSKDYSDPPPAPLIDAAEFGRWSFYRAIIAEFVATLLFLYITISTVIGASRNAGCAGVGLLGIAWAFGGMIFVLVYCTAGVSGGHINPAVTFGLLMARKISLPRALTYMIAQCLGAICGAGLAKGFQTAFYMRYGGGANSVALGYSTGTGLAAEIIGTFVLVYTVFSATDPKRNARDSHVPVLAPLPIGFAVFMVHLATIPITGTGINPARSFGAAVIYNRSKPWDDHWIFWVGPFLGAALAASYHQYILRAAPFKSLGSFRSAPSHV

SEQ ID NO: 10428 - protein, 279 aa, Physcomitrella patens
MAKDVGVEPGFPSKDYTDPPPAPLIDASEFGQWSFYRAVIAEFVATLLFLYITIATVIGAVRNAGCDGVGLLGIAWAFGGMIFVLVYCTAGISGGHINPAVTFGLLLARKISLPRALAYMIAQCLGAICGAGLVKGFQTAFYMRYGGGANSVAAGYSIGTGLAAEIIGTFVLVYTVFSATDPKRNARDSHVPVLAPLPIGFAVFMVHLATIPITGTGINPARSFGAAVIYNRSKPWNDHWIYWVGPFLGAALAAAYHQYVLRAGPFKSLGSFRSAPSHI

SEQ ID NO: 10429 - protein, 515 aa, Trametes hirsuta
MSRFQSLLTFITISLVAVAHAAVGPVADLTITDAAVSPDGFSRQAVVVNGVTPGPLVAGNIGDRFQLNVIDNLTNHTMLKSTSIHWHGFFQHGTNWADGPAFINQCPISPGHSFLYDFQVPDQAGTFWYHSHLSTQYCDGLRGPFVVYDPNDPHASRYDVDNDDTVITLADWYHTAAKLGPRFPGAADAVNINGKGRAPVTLPASCSVIKVTKGKRYRFRLVSLSCNPNHTFSIDGHNLTIIEVDSVNSQPLEVDSIQIFAAQRYSFVLDANQAVDNYWIRANPNFGNVGFDGGINSAILRYDGAPAVEPTTNQTTSVKPLNEVDLHPLVSTPVPGASDKAINMAFNFNGSNFFINGASFVPPTVPVLLQILSGAQTAQDLLPSGSVYVLPSNASIEISFPATAAAPGAPHPFHLHGHTFAVVRSAGSTVYNYDNPIFRGVVSPGTPAARDNVTIRFDTNQPGPWFLHCHIDFHLEGGFAVVMAEDTPDVQAVNPVPQAWSDLCPTYDALDPNDQ

SEQ ID NO: 10430 - protein, 334 aa, Zea mays
PRARRLPCPPTPTGKGETLGRLASGVQGTLMTELWMEVLPPPYFAGQAAGGWFLPDRRAGPGAWTLEENKMFERALARVDWDAPDRWERVAAMLPGRTASDVAAHYDDLECDVGCIEAGFVPFPCYGSGGGGGASQSAGFTFDWDAGGLGFKRSCYVVGGGKRERGPDQERKKGVPWTEEEHKQFLMGLKKYGRGDWRNISRNFVTSRTPTQVASHAQKYFIRLNSGGKDKRRSSIHDITTVNLPDDDAGGTASASPPSVLTSASAPSSTGGGGPVVSEQFGVLVDSKPPAPHHHFVPHPYGNVKLEPVSSHHGGFLDDSVLMQMHCGQLQPLG

SEQ ID NO: 10431 - protein, 423 aa, Streptomyces ambofaciens
MKRVVITGIGVVAPGGVGTKSLWDLLTIGRTATRPITLFDASAYRSRIAAEVDFDPAAHGFASADTERLDRITQFALVAAREAIADSGIGESVERAPLRCAVSLGSAIGCTTALATQYAILSDCGNTWDLDHTEAADFLYDYFVPSSLAAALARDCGAQGPVALVSSGCTSGLDAIGHGADLIREGSADMAVVGGAEAPIAPITMASFDRLRLTSSRNDDPATASRPFDRTRDGFVLGEGAAVLVLEEQEHARRRGAQPYAELSGLAAHSSAHHMTGLRPGAQEMAAAIRAALDQARLNPADIDYISAHGAGTRHNDRHETHAFKAGLGHHAHQVPVSSIKSMIGHALGAAGALDLTAGALAIRHGIVPPTANLHQPDPTCDLDYTPLFAREQRTSTVLSVASGFGGFHTAAVLTRPRLQEAA

SEQ ID NO: 10432 - protein, 452 aa, Frankia sp. CcI3
MVVPSAAPASEELFRRAERVVPGGVNSPVRAFRAVGGTPRFMVAGNGPYLTDADGRTYIDLVCSWGPMILGHAHPAVVEAVSRAVSVGTSFGTPTPGEVELAELIVDRVGPVEKVRLVNSGTEATMSAVRLARGFTGRSTIIKFAGCYHGHVDALLASAGSGVATLGLPDTPGVTGAATADTIVLPYNDLALVEAVFVERGETIAAVITEAAAANMGVVPPLPGFNAGLRRLCDIHGALLILDEVMTGFRISRAGWWGNEGAIEDWSPDLFTFGKVMGGGLPAAAFGGRADVMARLAPAGPVYQAGTLSGNPIAVAAGLATLRACTDEVYATVDTRAADVAGIVSTALTEEGVAHLPSSAGSLFSFFFTDAATVVDYAGAQAQNTARYAAFFHSMLDAGIYLPPSAFEAWFVSAAHDDETVERIAAAAPAAARAAAAVPEPVTVSASPEGRA

SEQ ID NO: 10433 - protein, 248 aa, Lotus corniculatus var. japonicus
GRGKMEIKRIENTTNRQVTFCKRRNGLLKKAYELSVLCDAEVALIVFSSRGRLYEYANNSVKATIDRYKKACSDSSGAGSASEANAQFYQQEADKLRVQISNLQNNNRQMMSESLGSMNAKELKNLETKLEKGISRIRSKKNELLFAEIEYMQKREIDLHNNNQLLRAKIAESERNHPNLSILAGSTSNYESMQSQQQQQQQQFDSRGYFQVTGLQPTTHTQYSRQDQISLQPSSQYARQDHMSLQLV

SEQ ID NO: 10434 - protein, 640 aa, Vibrio sp. Ex25
MRIELEKATKLDRIRADYNVHYWSQGFYGIDDQGEVYVSPRSDRAHQIPFSAIVNELEAKQLNLPVLVRFPQIVHQRVHGICHAFNQAIEEYQYPNKYLLVYPIKVNQQREVVDEILASQAQLETKQLGLEAGSKPELLAVLALAQQGSSVIVCNGYKDREYVRLALIGEKLGHKVFIVLEKLSELDLVLEEAKSLGVKPRLGLRIRLASQGAGKWQASGGEKSKFGLSASQVLSVIERLKREGSLDAMQLVHFHLGSQMANIRDVRNGVNESARFYCELRALGANIEYFDVGGGLAVDYDGTRSQSSNSMNYGLAEYARNIVNTVGDVCQQYEQPMPVIISESGRSLTAHHAVLISNVIGTETYQPEEVYELGADAPLLLQNMWRNWENLQDGTDARALIEIYNDTQSDLAEVHSQFATGVLNLEQRAWAEQLSLRIYFELSRKMSTKNRFHRPILDELSERLADKFFVNFSLFQSLPDAWGIDQVFPVLPLSGLGDAEERRAVMLDITCDSDGAIDHYVDGQGIESTLPVPAWSKDKPYLMGFFLVGAYQEILGDMHNLFGDTHSAVVNVDEHGQFEISYINEGDSVEDMMRYVHIDVDAIRDNYKQLVSQRVEANEQAQILAELEQGLAGYTYLEDF

SEQ ID NO: 10435 - protein, 460 aa, Xanthomonas campestris pv. campestris str. ATCC 33913
MTATRYDAIVVGAGQAGPSLAVRLAERGQRVAVIERHLVGGTCVNTGCMPTKTLVASARVAHLARRAGDYGVRIAGPVEVDLPQVMARAHAISDAARTGVEQWLAQTPGVQLIRGHARFVAPDRLRVGAQELGAPRIFLNVGGRARTPELPGLDQISPLNNTSILQLRTLPQHLVVIGGSYIGLEFAQIFRRLGAQVTVVEQHAHLIGREDADISEAIAQMLQDEGIAVRTDARCIAFAAHADGAAVQLECAQGAPQIVASHVLLALGRQPNTDDLGLEAAGIATDAQGYVQVDMQLATNVPGVWAMGDCNGRGAFTHTAYNDYEILAANLLDGAERRLSQRVPAYALFTDPPLGRVGMSETQARASGRPLLVAQRPMQQVGRARENGETIGMMKLVADAQTRRVLGAAILGLHGDEAIHGIIDLINADQPIDTLEWAVPIHPTVSELWPTLARALAPAQ

SEQ ID NO: 10436 - protein, 229 aa, Lotus corniculatus var. japonicus
GRGKMEIKRIENTTNRQVTFCKRRNGLLKKAYELSVLCDAEVALIVFSNRGRLYEYANNSVKASIERYKKACSDSSGGGSTSGANAQFYQQEAAKLRVQISNLQNHNRQMLGEALSNMNARDLKNLETKLEKGISRIRSKKNEMLFAEIEYMQKREIDLHNSNQLLRAKIAESDERKNHNFNMLPGTTNFESLQQSQQPFDSRGSFQVTGLQPNNNQCARQDQISLQFV

SEQ ID NO: 10437 - protein, 470 aa, Shewanella sp. ANA-3
MTVSSVSRALSTSSVATSFVPYVSSLGVSPSRFTKSLIASALTLSLLGAGLSSANAAQPDAAKLAAGVEQKVIDWRRDLHQHPELSNREFRTSKIIEKHLKSLGLEVQTGIAHTGVVAILKGGKLKGGKPGPLIAIRADMDALPVTEVVDVPFASKATDTYRGKTVGVMHACGHDTHVAMLMGVAENLVKVKDSLAGDVMFIFQPAEEGAPDGEEGGAELMLKQGLFAKRKPDQVFGMHVTSSMPSGMIGVRSGPAMASGDSFTIKVKGRQTHGSRPWNGVDPIVAAAQIITNVQTIVSRQVDITKAPAVVSFGAVNGGIRSNIIPDEVELIGTIRTFDQPMRADIKVRLAEIAELSAKTLGATATTEIHQGYPVVVNNPELVASMRPVLASVVGDKMLIEPGLITGAEDFSFYALESPGMFFFLGVTPKGTDPETAASNHSPAFYVDESALKVGVEAMTKVALTALKAQ

SEQ ID NO: 10438 - protein, 327 aa, Pyrococcus horikoshii OT3
MKVLIMAGGYATRLWPITKDNPKALLPLGNKTILEYILEKVRELDVDVYISTNRFFAEKFRKYDVELIVEDTVHEEEKLGTIAAMRNALNILGEDDYLIVAGDNVFSFSLKDFVDNFSGKTLIAVYDVGDFELAKRYGVVVLEKDRVIDFEEKPANPKSTLISTGVYLFPRDVMKLLNEYLEDGNKDSPGYFLQWLLKRGEEIRAYRFDGYWYDIGSADSYLEAMKTLLKESYIEEIQISPYAKIIPPVVIKKGTKIMGRSIIGPYAYIGEECIIENSDISDSIIFPRTVIRNSTIWRSIIDEKCEIRNLELRKSLVGGHAKIQRGD

SEQ ID NO: 10439 - protein, 472 aa, Candida albicans SC5314
MSLSPKLEEIVSSIEKSFEIKDDFLVKATEYFVESMNVGLESPKPSKDVMPMIPTYVTSIPTGKEVGLYLAADLGGTNFRVCSIDLKGDHTFSMKQSKYRIPVDLMKAEKSNDLFGFLAKKVQSFLLENHSEACTAKNTEPLKLGFTFSFPVNQTALNRGTLIRWTKGFDIPDTVDRDVVELLQANLTILEVNVKVVAIANDTVGTLLTAAYSNDSAKTNRNTIIGCIFGTGTNGVYFESKIPKLSSLTGKSQGMVINTEWGSFDNGLKILPSTEFDEIVDSETANPGYHLFEKRISGMFLGEILRVALIHLFKNGLIFQELYKARGGSLPHRIEEPWLLDAEVLSYLQIDDSTDLKTSGLILQNVLRLETNKEEREVIQRLTRAISQRAAHLSAIPIAAIAKKVKDQYKDDDRDFEVGCDGSVIEFYPGFRQAVLESIEKINPLKGTNKKIHLKIAKDGSGVGAALCASTA

SEQ ID NO: 10440 - protein, 228 aa, Lotus corniculatus var. japonicus
GRGKMEIKRIENTTNRQVTFCKRRNGLLKKAYELSVLCDAEVALIVSSSRGRLYEYANNSVRGTIDRYKKACAASSNTESVSEANTQFYQQEASKLRRQIRDIQNLNRHILGEALGNLSLKELKNLEGRLEKGLSRVRSRKHETLFADVEFMKKREIELQNHNNYLRAKIAEHERAQQQQQQQQQQQQNLMLSESLPSQSYDRNLFPANLLGSDNQYSRQDQTALQLV

SEQ ID NO: 10441 - protein, 223 aa, Lotus corniculatus var. japonicus
MGRGKIEIKRIENTTNRQVTFCKRRNGLLKKAYELSVLCDAEVALIVFSSRGRLYEYSNNNIRSTIERYKKACSDHSSTSTTTEINAQYYQQESAKLRQQIQMLQNSNRHLMGDALSTLTVKELKQLENRLERGITRIRSKKHEMLLAEIEYFQKREIELENENLCLRTKITDVERIQQVNMVSGQELNAIQALASRNFFNPPMIEDGTSYPQQPDKKILHLG

SEQ ID NO: 10442 - protein, 359 aa, Zea mays
MVKSFITSHKTNNTYTNGVAKNHNDIVDELQARFPCKEKQQRNNQQVMASNALMNDNFGVPMEDIDMNNMDMFHGYILDDVEVMKMVEEPLHKQNIVPKKKRQHPVIVWTQDKHKNFLRGLEVYGRGNWKNISKYFVPTRTPIQICSHAQKYFHRKEGTTRKQRFSINDIDLYDTDPRVQKNSSSLEALTFGHTAYNNKYYDFERQNVVLNKLTHTSQTSSGHVATWTRGQHIIASSSIDPTMVQSNSLGWEALTFTSDANNTNNYDFDWQHDSINNLRCANQASNNQVATWTRGQQTTSSSAAPTMVQNTSHSWDVLSFTGNAYNTNYYGFDEQQVALSNITRGNHGEQQPGSYLDKR

SEQ ID NO: 10443 - protein, 327 aa, Methylobacillus sp. 12S
MKVLVVGGAGYIGSHMVKMLLGEGHDVITFDNLSSGYRDAVVGGTFVQADLADKAALDEVFVKHTPDAVMHFASYIQVGESVRHPDKYYLNNFTNTMNLLDAMVKHGVNYFIFSSTAAVFGEPEYVPIDEAHAKNPLNPYGRSKLMVEQALGDYERAYGIKSVCLRYFNAAGADPEGQLGERHEPETHLIPLVLQAISGRRDNITVFGRDYDTPDGTCIRDYIHIVDLCSAHSLALRKLMETNISRRYNLGNGAGFSVQEVIAAAQKVTGKPIKVAEGERREGDPARLVADASLARSELGWKPVYADLDTIIQHAWQWESKTVGKPV

SEQ ID NO: 10444 - protein, 407 aa, Haemophilus influenzae R2866
MTDKVNSYGWKALIGSAVGYAMDGFDLLILGFMLSAISADLNLTPAQGGSLVTWTLIGAVFGGILFGALSDKYGRVRVLTWTILLFAVFTGLCALAQGYWDLLIYRTIAGIGLGGEFGIGMALAAEAWPARHRAKAASYVALGWQVGVLGAALLTPLLLPHIGWRGMFLVGIFPAFVAWFLRSHLHEPEIFTQKQTALSTQSSFTDKLRSFQLLIKDKATSKISLGIVVLTSVQNFGYYGIMIWLPNFLSKQLGFSLTKSGLWTAVTVCGMMAGIWIFGQLADRIGRKPSFLLFQLGAVISIVVYSQLTDPDIMLLAGAFLGMFVNGMLGGYGALMAEAYPTEARATAQNVLFNIGRAVGGFGPVVVGAVVLAYSFQTAIALLAIIYVIDMLATIFLIPELKGKALD

SEQ ID NO: 10445 - protein, 396 aa, Pasteurella multocida subsp. multocida str. Pm70
MFENITAAPADPILGLGESFKAETRDNKINLGIGVYKDAKGNTPIMRAVKEAEKRLFDLEMSKNYLAIDGVAEFNACTKELLFGADSEIVKQGRAKTVQSLGGTGALRIAAEFIKRQTKSQNVWISTPTWPNHNAIFNAVGMTIREYRYYDAENKCLDWDNLIADLSNAGEGDVVLLHGCCHNPTGIDPTPAQWQQLAKMSEEKGWLPLFDFAYQGFANGLEEDAFGLRTFAKNHKELLVASSYSKNFGLYSERVGAFTLVAETEQIAATALTQVKTIIRTLYSNPASHGATTVSMVLKDSQLRAEWENELTEMRERIKQMRSQFVELLKAFASEQDFSFIIDQNGMFSFCGLNPAQMDRLKEEFAIYAVRSGRINVAGITEQNIRYLCESIAKVL

SEQ ID NO: 10446 - protein, 243 aa, Nostoc punctiforme PCC 73102
MKEATMSSNLAIKLRSGTQQAHTSAENVGFMKCFLQGVVDRDCFAKFLSNLYYVYSELEAALDSHAKHPVISAVYFPELNRQSSLEKDMVFYYGDNWRGQITPSPAAQKYIDRIREISASEPALLLGHAYTRYMGDLSGGQMLQKVAQSALKLSGYEGTSFYNFEQIPDKKAFKDKYRQVLNALPIDDATAERIVAEANNAFGFNLQMAQELERSLIKALGQVLFNSLTRSQNSGSNEIGAAN

SEQ ID NO: 10447 - protein, 190 aa, Cryptococcus neoformans var. neoformans B-3501A
MPNGLPEHNGAPPPPMNNSSIINGNSEWKLCIRDQKEARLIFPRFPEEFKYMTLDISDHPDQNLITIFPTCRDFVEEALSTGGTVLAHCNGGIALSPAIVVGYLMWKFNWTAEHALAHVQNKRYCVSTMSFQNQFKEYEPIYMAQKMVETAAKRETTTSKRQVEEEDEEGDGYRRKQRYVQGEASDMMLD

SEQ ID NO: 10448 - protein, 305 aa, Glycine max
  misc_feature (107)..(107): Xaa can be any naturally occurring amino acid
  unsure (1)..(305): unsure at all Xaa locations
MFSRLIHPHEGQEDMQGGSNHAHLGDPCLVLTSDPKPRLRWTADLHERFVDAVTQLGGASKATPKAIMRTMNVKGLTLYHLKSHLQKYRLGKQSGKDSDEGCKDGMXASYLQESPGTDNSSPKLPDANEGHEVKEALRAQMEVQSKLHLLVEAEKHLQIRQDAERRYMGMLERACKMLADQFIGDVTIDMDGQKFQGLESKTSRSSLVDHVGFYPQACTEVGGMHASVVSPILQPQGADCFTESCLTSLESLGGLTLEGSPGGSKKRMLNLDSMVAPLIWSEANTRTQGIHLAKVNPSGMTRYGM

SEQ ID NO: 10449 - protein, 107 aa, Zea mays
GNSLNTCFAKTWIEVSGSSAKDVAKQLKEQQMVMPGHRESNLQKELNRYIPTAAAFGGVCIGALTVLADFMGAIGSGTGILLAVTIIYQYFETFEKERATELGFFGF

SEQ ID NO: 10450 - protein, 396 aa, Escherichia coli
MFENITAAPADPILGLADLFRADERPGKINLGIGVYKDETGKTPVLTSVKKAEQYLLENETTKNYLGIDGIPEFGRCTQELLFGKGSALINDKRARTAQTPGGTGALRVAADFLAKNTSVKRVWVSNPSWPNHKSVFNSAGLEVREYAYYDAENHTLDFDALINSLNEAQAGDVVLFHGCCHNPTGIDPTLEQWQTLAQLSVEKGWLPLFAFAYQGFARGLEEDAEGLRAFAAMHKELIVASSYSKNFGLYNERVGACTLVAADSETVDRAFSQMKAAIRANYSNPPAHGASVVATILSNDALRAIWEQELTDMRQRIQRMRQLFVNTLQEKGANRDFSFIIKQNGMFSFSGLTKEQVLRLREEFGVYAVASGRVNVAGMTPDNMAPLCEAIVAVL

SEQ ID NO: 10451 - protein, 382 aa, Cucumis sativus
MAKPVQIEVWNPNGKYRVVSTKPMPGTRWINLLIEQDCRVEICTEKKTILSVEDILALIGDKCDGVIGQLTEDWGEVLFSALSRAGGKAFSNMAVGYNNVDVNAANKYGVAVGNTPGVLTETTAELAASLSLAAARRIVEADEFMRAGRYDGWLPNLFVGNLLKGQTVGVIGAGRIGSAYARMMVEGFKMNLIYFDLYQSTRLEKFVTAYGEFLKANGEAPVTWRRASSMDEVLREADVISLHPVLDKTTFHLVNKESLKAMKKDAILINCSRGPVIDEAALVDHLRDNPMFRVGLDVFEDEPYMKPGLADMKNAIIVPHIASASKWTREGMATLAALNVLGKIKGYPVWSDPNRVEPFLDENVSPPAASPSIVNAKALGNA

SEQ ID NO: 10452 - protein, 215 aa, Pseudomonas fluorescens Pf-5
MVLRSEILVNKNVLPTKEQALPGRETPMALPAEHYVNGNPLLGPFPGNVDFAIFGLGCFWGAERRFWQREGVFSTCVGYAGGFTPNPTYEEVCSGLTGHTEVVLVVYEPEKVSYKELLAMFWELHNPTQGMRQGNDIGTQYRSVIYATNPTQLEQALHSRDVFQAELTKAGLGTITTEIEEAPTVYFAEAYHQQYLAKNPEGYCGIGGTGVTCPI

SEQ ID NO: 10453 - protein, 482 aa, Listeria monocytogenes str. 4b H7858
MKKETHGEIRRDLKTRHLSMIAIGGSIGTGLFLASGNAIHTAGPGGALVAYIAIGIMVYFLMTSLGEMATYMPVSGSFSTYASRFVDPAFGFALGWNYWFNWAITLAVDISTAAIIVQFWLPNTPAWLWSAIFLILIFGLNALSVKAYGESEYWFSIIKVATVIIFLIVGVLTIVGILGGEVIGFSNFTAGDAPFKGGFFAILGTFLIAGFSFQGTEMVGIAAGESATPETSVPKAIKQVFWRILLFYIFAIFIIGMIIPYTNPNLLSAEATDVAISPFTLVFEKAGLAFAASVMNAVILTSVLSAGNSGLYASTRMLWAMARDKKAPKFLGKVNRRGIPMAALIVTTIVGAMTFITTLTENGTVIYTWLLSASGLTGFIAWVGIAISHYRFRKAFIKQGHDLSELKYKAKFFPFGPILALILCILVIVGQDYAAFLKPEFTNPAWWQKIGISYIGLPIFLVFWLSFKFTNKTKVIPLEDCK

SEQ ID NO: 10454 - protein, 503 aa, Neisseria gonorrhoeae FA 1090
MKWLKRLTVIVGTFYRYRLAGLCVSLMGSGWICALLKMMPQSSKLKNEPPAVRLRLALESLGPIFIKFGQVLSTRPDLIPHDYAVELAKLQDKVPPFDARLSREQIEKSLGQPIEKLYAEFETEPVASASIAQVHKARLHSGERVAVKVLRPNLLPLIEQDLSLMRFGAAWVERLFSDGKRLKPREVVAEFDKYLHDELDLMREAANAGQLGRNFQNSNMLIVPKVFYDYCTSDVLTIEWMDGTPVSDIAKLKADGIDLHKLADYGVEIFFTQVFRDGFFHADMHPGNILVAADNRYIALDFGIVGTLTDYDKRYLAINFLAFFNRDYRRVATAHIESGWVPADTRAEELEAAVRAVCEPVFNKPISQISFGLVLMRLFEVSRRFNVEIQPQLVLLQKTLLNIEGLGRQLDPDLDLWKTAKPFLVKWMNGQVGPKALWRNLKNEAPDWAQIIPSLPRKINALVDEARRQEMRDAYIHLVKVQQRQSLWLAAIAVVLLLILLLK

SEQ ID NO: 10455 - protein, 120 aa, Brassica napus
  misc_feature (18)..(19): Xaa can be any naturally occurring amino acid
  misc_feature (81)..(81): Xaa can be any naturally occurring amino acid
  misc_feature (100)..(101): Xaa can be any naturally occurring amino acid
  misc_feature (107)..(107): Xaa can be any naturally occurring amino acid
  unsure (1)..(120): unsure at all Xaa locations
MAISQISRIFLAILLLAXXFAAAPAALADGDDVVALTESTFEKEVGKDRGALVEFYAPWCGHCKKLAPEYERLGASFKKAXSVLIAKVDCDEHKSLCSKXXVSGYPXIQWFPKGSLEPKK

SEQ ID NO: 10456 - protein, 427 aa, Haemophilus somnus 129PT
MSKLTAKLTLSDGREFDLNVQQGTLGYDAVDVQPLVKNKLFTFDPGFMSTASCVSEITYIDGDNGILLHRGYPIADLAKNADYLEVAHLLLFGERPNKEEYANFIKLVKNHTLVHEQISRFFHGFRRDSHPMAIMCGVSGALAAFYHDSLDINDIEHRELTAIRLLAKMPTLAAMCYKYSIGQPFMFPLNKLSYAGNFLYMMFATPCEPYEVNPVLEKAMDRIFILHADHEQNASTSTVRTAASSGANPFACIAAGIASLWGPAHGGANEACINMLEEIGSVDRIPEYIARAKDKNDPFRLMGFGHRVYKNYDPRAKVMRQTCHEVLKELNIQTPLFDVAMELERIALNDPYFIDHKLYPNVDFYSGIILKAIGIPTSMFTVIFALARTVGWIAHWKEMFKPGNMKIVRPRQLYKGHTERNFDAIEK

SEQ ID NO: 10457 - protein, 312 aa, Nicotiana benthamiana
MGEEVKITGGEAFAGDDNRILEWEDGLPSLDDITPLSQALIPPELASAFKISPEPAKTMTDVNRASENTFSSLRGSGPLQQLQILSSPETEHGSDPRKTRRIDPEMLEADSALPRNENCGGGDDSNNKSASKTLNKRPRLVWTPQLHKRFVDVVAHLGIKNAVPKTIMQLMNVEGLTRENVASHLQKYRLYLKRMQGLSNEGPTSSDHLFAFTPVPQSLQQSGGNGQNGNGHNSSGYNSNGHNSNGHAQMPMQMPMPMPMIYPPQMVPMPMMGISGHGHGHGFHHQYNMGAQQRDWSGNKFGSYHHVAPSDE

SEQ ID NO: 10458 - protein, 614 aa, Triticum aestivum
MADSPNPSSGDLPSAAGSSPEKPYPADRRVAALAGAGARYKAMSPARLPISREPCLTIPAGFSPSALLDSPVLLTNFKVEPSPTTGSLSMAAIMHKSAHPDILPSPRDKSIRAHEDGGSRDFEFKPHLNSSSQSLAPAMSDLKKHEHSMQNQSMNPSSSSSNMVNENRPPCSRESSLTVNVSAPNQPVGMVGLTDNMPAEVGTSEPQQMNSSDNAMQEPQSENVADKSADDGYNWRKYGQKHVKGSENPRSYYKCTHPNCEVKKLLERAVDGLITEVVYKGRHNHPKPQPNRRLAGGAVPSNQGEERYDGAAAADDKSSNALSNLANPVNSPGMVEPVPVSVSDDDIDAGGGRPYPGDDATEEEDLELKRRKMESAGIDAALMGKPNREPRVVVQTVSEVDILDDGYRWRKYGQKVVKGNPNPRSYYKCTSTGCPVRKHVERASHDPKSVITTYEGKHNHEVPAARNATHEMSAPPMKNVVHQINSSMPSSIGGMMRACEARNFSNQYSQAAETDNVSLDLGVGISPNHSDATNQMQSSGPDQMQYQMQSMASMYGNMRHPSSMAVPTVQGNSAGRMYGSREEKGNEGFTFRATPMDHSANLCYSGAGNLVMGP

SEQ ID NO: 10459 - protein, 700 aa, Lycopersicon esculentum
MERIPEVRESTRQFPIGAKVAHTFSTSKKEVGIRGFRDFDLAIPIQTWKGKTSYQEEEDLMVDAGTIKRSDDSLEDSGSTSFHGASHPPEPVDTDLMRPVYVPIGQNKADGKCLVKNVSLKGPFLDDLSIRMPNVKPSPSLLSPAESLVEEPNDLGVISSPFTVPRPSQNTETSLPPDSEEKECIWDASLPPSGNVSPLSSIDSTGVVRSMSIVNSCTSTYRSDVLMSDGMLSVDRNYESTKGSIRGDSLESGKTSLSRASDSSGLSDDSNWSNITGSANKPHKGNDPRWKAILAIRARDGILGMSHFKLLKRLGCGDIGSVYLSELSGTRCYFAMKVMDKASLASRKKLTRAQTEREILQLLDHPFLPTLYTHFETDRFSCLVMEYCPGGDLHTLRQRQPGKHFSEYAARFYAAEVLLALEYLHMLGVVYRDLKPENVLVRDDGHIMLSDFDLSLRCAVSPTLIRISSDDPSKRGAAFCVQPACIEPTTVCMQPACFLPRLFPQKSKKKTPKPRADSGFQANSMPELVAEPTSARSMSFVGTHEYLAPEIIKGEGHGSAVDWWTFGIFLHELLYGKTPFKGSGNRATLFNVVGQQLKFPDSPATSYASRDLIRGLLVKEPQNRLGVKRGATEIKQHPFFEGVNWALIRCSTPPEVPRPVEPDYPAKYGQVNPVGVGNTSKRVVGADAKSGGKYLDFEFF

SEQ ID NO: 10460 - protein, 478 aa, Xanthomonas campestris pv. campestris str. ATCC 33913
MRPLPTLLSLSLAAAFGGFAASGINAWLDNRAEAAPTAGAAFTLPTAATLPAAVAGQPVPSLAPMLQQAMPAVVSVNTKQVVRVRNPFFNDPILRRLFPEIPQDRINESLGSGVIIDAQKGYVLTNHHVIENADDVQVTLGDGRTVKADFIGSDADTDIALIRIKADNLTDIKLADSNALRVGDFVVAIGNPFGFTQTVTSGIVSAVGRSGIRGLGYQNFIQTDASINPGNSGGALVNLQGQLVGINTASFNPQGSMAGNIGLGLAIPSNLARNVVEQLVTKGVVVRGTLGLETQNLTQQMLQGLGVDSLRGALVTRVLPGSAAAAAGVQPGDVIVAANDQRVDSAQALHNYEGLQAVGSAVTLDIRRDGKPLKLKATLKEQDRTVTGDMLDPRLGGATFVDLPESLRQSGVTGVMVSEVKRGGRAAANGLVSGDVIVASSVGEFADLASWRANFQRKPQQLVLRILRGNAQYDALMR

SEQ ID NO: 10461 - protein, 494 aa, Lycopersicon esculentum
MLALVGGEGDMEQEFDAKLKIQNNSANTQRSKSFAFRAPQENFTIQDFELGKIYGVGSYSKVVRAKKKDTANVYALKIMDKKFITKENKTAYVKLERIVLDQLDHPGVVRLFFTFQDTFSLYMALESCEGGELFDQITRKGRLSEDEARFYAAEVVDALEYIHSMGLIHRDIKPENLLLTSDGHIKIADFGSVKPMQDSRITVLPNAASDDKACTFVGTAAYVPPEVLNSSPATFGNDLWALGCTLYQMLSGTSPFKDASEWLIFQRIIARDIRFPNYFSNEARDIIDQLLDVDPSRRPGAGPDGYASLKNHPFFSGIDWENLRLQTPPRLAMEPKAPSTHSSGDEQDPSWNPSHIGDGSVRPNDGNGAAASVSEAGNSITRLASIDSFDSKWKQFLDPGESVLMISMVKKLQKLTSKKVQLILTNKPKLIYVDPSKLVIKGNIIWSDNPNDLSIQVTSPSQFKICTPKKVMSFEDAKNRAQQWKKAIEALQNR

SEQ ID NO: 10462 - protein, 696 aa, Synechocystis sp. PCC 6803
MDSGHGAQSRIKLGQTGYKLSTYFCKSGPNWENQPQIHWNSLFSTVKIQLSLFPSSFHLIMVTPINYHSIHCLADIWAITGENFADIVALNDRHSHPPVTLTYAQLREEITAFAAGLQSLGVTPHQHLAIFADNSPRWFIADQGSMLAGAVNAVRSAQAERQELLYILEDSNSRTLIAENRQTLSKLALDGETIDLKLIILLTDEEVAEDSAIPQYNFAQVMALGAGKIPTPVPRQEEDLATLIYTSGTTGQPKGVMLSHGNLLHQVRELDSVIIPRPGDQVLSILPCWHSLERSAEYFLLSRGCTMNYTSIRHFKGDVKDIKPHHIVGVPRLWESLYEGVQKTFREKSPGQQKLINFFFGISQKYILAKRIANNLSLNHLHASAIARLVARCQALVLSPLHYLGDKIVYHKVRQAAGGRLETLISGGGALARHLDDFYEITSIPVLVGYGLTETAPVTNARVHKHNLRYSSGRPIPFTEIRIVDMETKEDLPPETQGLVLIRGPQVMQGYYNKPEATAKVLDQEGWFDSGDLGWVTPQNDLILTGRAKDTIVLSNGENVEPQPIEDACLRSAYIDQIMLVGQDQKSLGALIVPNFDALQKWAETKNLQITVPEPSASSEGMQASGLYDPQVVGLMRSELHREVRDRPGYRADDQIKDFRFIPAPFSLENGMMTQTLKLKRPVVTQTYQHLIDEMF

SEQ ID NO: 10463 - protein, 277 aa, Zea mays
AAVDKTLDSKVFKGWVETDNPWTSDDETDNNEMTYVNLQLNPERYTGYTGDSARRIWDAIYKENCPKYPSEELCHEKKALYKLISGLHSSISVHIGYGRITFLMNLLTQTAADYLEQAEYNTGNPEDDLKTESLVKQLLYNSKLRSACPLPFDEAKLWQGENGPELKQEIQKQFRNISAIMDCVGCEKCRLWGKLQVLGLGTALKILFSVDGDSHLNQPLQLQRNEVIALFNLLNRLSESVKFVHEKGSSVEEVINEQSPSTVQKGASKTNLKLDFL

SEQ ID NO: 10464 - protein, 401 aa, Ralstonia metallidurans CH34
MLRLNSHPSGRHFLQIPGPTNVPDRVLRAMDYPTIDHRGPEFQQLGKKVLADIRKIFQTTQPVVIYPASGTGAWEAALVNTLSPGDKVLMYETGHFASLWKKMADKLGVHAEFIVGDWRHGVDAAAIGARLAEDRNHEIKAVCVVHNETSTGVTSDIAAVRRAIDAAGHPALLLVDTISSLGSVDYRHDEWGVDVTVSGSQKGLMLPPGISFNAVSAKAIAASAKARLPRAFWGWDEIIEANKNGFWPYTPATNLLYGLSEACDMLLEEGLQNVFARHRRHAEATRACVNAWGLEILCQNPSEYSPALTAVVMPEGHSADTFRKIVLEHFNMSLGQGLSKLSGKVFRIGHLGDFNDLTLMGTLAGVEMGFALAGVPHHAGGVLAAMDSLRAAASQPSLRAA

SEQ ID NO: 10465 - protein, 243 aa, Xanthomonas campestris pv. campestris str. ATCC 33913
MSFQISAITIDLDDTLWPFAPIGARIDQVLYDWMREHSPVTAARFPVEAMRELRERSFADNPHLHHDLSALRRLTLEMALRDSGGDLALLEPAYEVFYAARNQVECYPDALDALARIAAHVPVAALSNGNADLERIGLMHHFAFQLGSREHGSAKPDPSIFLAACARLQAPPAQVLHVGDHVRMDVLGALDAGLRACWINREQAQWSHPTQQPDLEFDSLTGLADWLDVHHTPAAHAGVCVPG

SEQ ID NO: 10466 - protein, 217 aa, GIBBERELLA ZEAE PH-1
MTLKLYGYGPSTCTLRVCTVLEEKGLKYELITVDVFGGEHKTDEYAAKFHPFNKIPVLIDEEAGVRVFESRAIAHYLAAKYRGQGIELSPPETDLKAYAAFQQALSLESSYFDPNVSSIAVQEVFNPRKGLGPANKEIVNGNLKDLDAALIGYERILSKQKYLAGDNVTLADLFHLPYGQISESLGFSELLPKYPAVEKWWNGLKERESWKKINVEI

SEQ ID NO: 10467 - protein, 753 aa, Escherichia coli O157:H7
MSQQNEKNPHQHQSPLHDSSEAKPGMDSLAPEDGSHRPAAEPTPPGAQPTASGSLKAPDTRNEKLNSLEDVRKGSENYALTTNQGVRIADDQNSLRAGSRGPTLLEDFILREKITHFDHERIPERIVHARGSAAHGYFQPYKSLSDITKADFLSDPNKITPVFVRFSTVQGGAGSADTVRDIRGFATKFYTEEGIFDLVGNNTPIFFIQDAHKFPDFVHAVKPEPHWAIPQGQSAHDTFWDYVSLQPETLHNVMWAMSDRGIPRSYRTMEGFGIHTFRLINAEGKATFVRFHWKPLAGKASLVWDEAQKLTGRDPDFHRRELWEAIEAGDFPEYELGFQLIPEEDEFKFDFDLLDPTKLIPEELVPVQRVGKMVLNRNPDNFFAENEQAAFHPGHIVPGLDFTNDPLLQGRLFSYTDTQISRLGGPNFHEIPINRPTCPYHNFQRDGMHRMGIDTNPANYEPNSINDNWPRETPPGPKRGGFESYQERVEGNKVRERSPSFGEYYSHPRLFWLSQTPFEQRHIVDGFSFELSKVVRPYIRERVVDQLAHIDLTLAQAVAKNLGIELTDDQLNITPPPDVNGLKKDPSLSLYAIPDGDVKGRVVAILLNDEVRSADLLAILKALKAKGVHAKLLYSRMGEVTADDGTVLPIAATFAGAPSLTVDAVIVPCGNIADIADNGDANYYLMEAYKHLKPIALAGDARKFKATIKVADQGEEGIVEADSADGSFMDELLTLMAAHRVWSRIPKIDKIPA

SEQ ID NO: 10468 - protein, 411 aa, RICKETTSIA HEILONGJIANGENSIS
DSEFAELKIRGKIFKLPILKASIGEDVIDISRVSAEADCFTYDPGFMSTASCQSTITYIDGDKGILRHRGYDIKDLAEKSDFLEVAYLLIYGELPSGEQYNNFTKQVAHHSLVNERLHYLFQTFCSSSHPMAIMLAAVGSLSAFYPDLLNFKEADYELTAIRMIAKIPTIAAMSYKYSIGQPFIYPDNSLDFTENFLHMMFATPYTKYTVNPIIKNALNKIFILHADHEQNASTSTVRIAGSSGANPFACISTGIASLWGPAHGGANEAVINMLKEIGSSEYIPKYIAKAKDKNDPFRLMGFGHRVYKNYDPRAAVLKETCKEVLKELGQLDNNPLLQIAIELEAIALKDEYFIERKLYPNVDFYSGIIYKAMGIPSQMFTVLFAIARTVGWMAQWKEMHEDPEQKISRPR

SEQ ID NO: 10469 - protein, 531 aa, Mycoplasma mobile 163K
MKNVNSKKIVYQIYPSSFKDSKGTGRGDIKGIIEKLDYIKDLGVDYLWLSPIFKSPLKDNGYDVSDYLSINTLFGDLEDLKSLIKKAKEKNLKVMLDMVFNHTSTEHEWFKKWINNDPEYKDFYISKKSVGKPPTNWVSKFGGSAWKEYKKNNWYLHLFDETQADLNWENEKVKEKIKEVIRFYINLGVKGFRFDVINLISKSNFNEDETDGRKFYTDGKKVEDYLQELRNEFPKEGDFLTVGELSSTTMQKASIYSNLDKKRLDSAFTFHHLKIDYDEKGKFIYKKPDIKKLNEIFDTSFTETQKLNGYLAVFLNNHDQPRAVSRFIDEEFHNVGAKMLGMLTLSLPGDTYIYQGEEIGMKNPNFENKEDYKDVETLNYFKELKLEKANDGIKQKSRDNSRTPMQWNSEKNSGFSMVKPWINVAPSYKEINVEKQENDPNSILSFYRKMVKVSKSDKVFANGNITFLPYKENLIQFTRTYKNKTYYFIFSFSNKKISLDSKSNIIILYSNYEYEKNIIKPYQFIVGEISE

SEQ ID NO: 10470 - protein, 398 aa, Arabidopsis thaliana
MTMMMSDLPNDLVEEILSRVPITSLGAVRSTCKRWNGLSKDRIVCKGDANQQFTGFTRYVNESTVCSMRLDLNEIQNEDVELVELSINKINKFIELELFQVYYSDGLLLLVTDEVDSKIVVWNPYLGQTRLIQCRDTEHFKYRYALGYDNNRNHKILMYNRKNCEIYDFKSDSWKVLDIIPDLHTNIYVRDMSIKGNTYFFYRGEKIGEGLAGCLLSFDFTRERFVSCLPLPFQIAKFDDNVALSSVREEHLVVLFNNWEESEMEIWVTTKIEPNAVSWSNFLTFTHFRIKFLVTSFFIDQEKKLAVVFGRSLSKQMRCNIAYVIGDNGYLRILDFGVTFIPSNLPVSYAPSLVKITQGQELSVIEEKKRSRLLASLVYSTLFVSFIIFFSFISSVFI

SEQ ID NO: 10471 - protein, 805 aa, Solanum tuberosum
MAERVLTRVHSLRERVDATLAAHRNEILLFLSRIESHGKGILKPHELLAEFDAIRQDDKNKLNEHAFEELLKSTQEAIVLPPWVALAIRLRPGVWEYIRVNVNALVVEELSVPEYLQFKEELVDGASNGNFVLELDFEPFTASFPKPTLTKSIGNGVEFLNRHLSAKMFHDKESMTPLLEFLRAHHYKGKTMMLNDRIQNSNTLQNVLRKAEEYLIMLSPDTPYFEFEHKFQEIGLEKGWGDTAERVLEMVCMLLDLLEAPDSCTLEKFLGRIPMVFNVVILSPHGYFAQENVLGYPDTGGQVVYILDQVPALEREMLKRIKEQGLDIIPRILIVTRLLPDAVGTTCGQRIEKVYGAEHSHILRVPFRTEKGIVRKWISRFEVWPYMETFIEDVAKEISAELQAKPDLIIGNYSEGNLAASLLAHKLGVTQCTIAHALEKTKYPDSDIYWKKFDEKYHFSSQFTADLIAMNHTDFIITSTFQEIAGSKDTVGQYESHMAFTMPGLYRVVHGINVFDPKFNIVSPGADINLYFSYSETEKRLTAFHPEIDELLYSDVENDEHLCVLKDRTKPILFTMARLDRVKNLTGLVEWYAKNPRLRGLVNLVVVGGDRRKESKDLEEQAEMKKMYELIETHNLNGQFRWISSQMNRVRNGELYRYIADTKGAFVQPAFYEAFGLTVVEAMTCGLPTFATNHGGPAEIIVHGKSGFHIDPYHGEQAADLLADFFEKCKKEPSHWETISTGGLKRIQEKYTWQIYSERLLTLAAVYGFWKHVSKLDRLEIRRYLEMFYALKYRKMAEAVPLAAE

SEQ ID NO: 10472 - protein, 470 aa, Anaplasma marginale str. St. Maries
MESCDLIVVGSGPGGYIAAIRAAQLGYRVTVVEKEESLGGVCLNWGCIPTKSLLKSAEIYSKLRKADSFGVEVSGNISVNIAKVVARSREAVSRLGHGVAGLMKKHGVKVHQGFAQVLGGGKVAIQQKGKPLTLAAKHIILATGASARLVPGLDEKMLWTARDAMLPKALPKSLLIIGSGAIGIEFASFYSHMGSKVTVVEMQDRILPLEDKAVSAFMQKVLQAQGIEILTGGSVPSLKKAGPAMQAQIKLGTQKVITLECDKAIAAIGVIPNTHGLGLENTKAALDERGFIVTDDCCRTAEPNLYAIGDVAGPPCLAHKASHEAVMCVEGIAASDGILKDKPHPLGVHNIPSCIYSIPQVASIGLTEEQARAQGLDIKVGVSHANCSGKAIVSGAVDGFVKVIIDSTSGELLGAHMVGEEVTEMINGYVIGKKLEATDLDLLSTIFPHPTLSEMMHEAVLAALGRPLNG

SEQ ID NO: 10473 - protein, 517 aa, Nicotiana tabacum
MLSPIEAIVGLVTFTFLFFFLWTKKSQKPSKPLPPKIPGGWPVIGHLFHFNDDGDDRPLARKLGDLADKYGPVFTFRLGLPLVLVVSSYEAVKDCFSTNDAIFSNRPAFLYGDYLGYNNAMLFLANYGPYWRKNRKLVIQEVLSASRLEKFKHVRFARIQASIKNLYTRIDGNSSTINLTDWLEELNFGLIVKMIAGKNYESGKGDEQVERFKKAFKDFMILSMEFVLWDAFPIPLFKWVDFQGHVKAMKRTFKDIDSVFQNWLEEHINKREKMEVNAEGNEQDFIDVVLSKMSNEYLGEGYSRDTVIKATVFSLVLDAADTVALHINWGMALLINNQKALTKAQEEIDTKVGKDRWVEESDIKDLVYLQAIVKEVLRLYPPGPLLVPHENVEDCVVSGYHIPKGTRLFANVMKLQRDPKLWSDPDTFDPERFIATDIDFRGQYYKYIPFGSGRRSCPGMTYALQVEHLTMAHLIQGFNYRTPNDEPLDMKEGAGITIRKVNPVELIIAPRLAPELY

SEQ ID NO: 10474 - protein, 225 aa, Brassica napus
  misc_feature (9)..(9): Xaa can be any naturally occurring amino acid
  misc_feature (27)..(27): Xaa can be any naturally occurring amino acid
  misc_feature (56)..(56): Xaa can be any naturally occurring amino acid
  misc_feature (75)..(75): Xaa can be any naturally occurring amino acid
  misc_feature (122)..(122): Xaa can be any naturally occurring amino acid
  misc_feature (173)..(173): Xaa can be any naturally occurring amino acid
  misc_feature (184)..(184): Xaa can be any naturally occurring amino acid
  misc_feature (187)..(187): Xaa can be any naturally occurring amino acid
  misc_feature (189)..(191): Xaa can be any naturally occurring amino acid
  misc_feature (204)..(204): Xaa can be any naturally occurring amino acid
  unsure (1)..(225): unsure at all Xaa locations
MQIFVKTLXGETITLEEESSDTIDNVXAKIQDKEGIPPDQQRLIFAGKQLEDGRTXLADYNIQKESTLHLVLRLXRGGMQIFVKTLTGKTITLEVESSDTIDNVKTKIQDKEGIPPDQQRLXFAGWLLEDGRTLAASCIQKESTLHLVLRLRGGMQIFVKTLTGKTITLEVEXSDTIDNVKAQXQDXEXXXPDQQRLIFAGKQXEDGRTLADYNIQKESTLHLVL

SEQ ID NO: 10475 - protein, 517 aa, Nicotiana tabacum
MVFPIEAIVGLVTFTFLFFFLWTKKSQKPSKPLPPKIPGGWPVIGHLFHFNDDGDDRPLARKLGDLADKYGPVFTFRLGLPLVLVVSSYEAVKDCFSTNDAIFSNRPAFLYGDYLGYNNAMLFLANYGPYWRKNRKLVIQEVLSASRLEKFKHVRFARIQASIKNLYTRIDGNSSTINLTDWLEELNFGLIVKMIAGKNYESGKGDEQVERFKKAFKDFMILSMEFVLWDAFPIPLFKWVDFQGHVKAMKRTFKDIDSVFQNWLEEHINKREKMEVNAEGNEQDFIDVVLSKMSNEYLGEGYSRDTVIKATVFSLVLDAADTVALHINWGMALLINNQKALTKAQEEIDTKVGKDRWVEESDIKDLVYLQAIVKEVLRLYPPGPLLVPHENVEDCVVSGYHIPKGTRLFANVMKLQRDPKLWSDPDTFDPERFIATDIDFRGQYYKYIPFGSGRRSCPGMTYALQVEHLTMAHLIQGFNYRTPNDEPLDMKEGAGITIRKVNPVELIIAPRLAPELY

SEQ ID NO: 10476 - protein, 392 aa, Staphylococcus aureus subsp. aureus MW2
MNQQLIETLKSKEGKMIEIRRYLHQHPELSFHEDETAKYIAEFYKGKDVEVETNIGPREIKVTIDSGKPGKTLAIRADFDALPITEDTGLSFASQNKGVMHACGHDAHTAYMLVLAETLAEMKDSFTGKVVVIHQPAEEVPPGGAKAMIENGVLDGVDHVLGVHVMSTMKTGNVYYRPGYVQTGRAFFKLKVQGKGGHGSSPHMANDAIVAGSYFVTALQTVVSRRLSPFETGVVTIGSFDGKGQFNVIKDVVEIEGDVRGLTDATKATIETEIKRLSKGLEALYGVTCTLEYNDDYPALYNDPEFTEYVAKTLKEANLDFGVEICEPQPPSEDFAYYAKERPSAFIYTGAAVEDGEIYPHHHPKFNISEKSLLISAEAVGTVVLDYLKGDN

SEQ ID NO: 10477 - protein, 437 aa, Treponema denticola ATCC 35405
MKEIDDFFKRNNFDYKIDIEYAASILLEDMKKGLESEAESVSSMDMIPLWKNLPTDIPKDKKVIIIDAGGTNFRAGIVYFDKKGVPEILSFFKHPMPALDREMTNEEFFDSIAEYLEPLKDESDMISFCFSYAIKIFPDGGGQAIKLSKEIKLPYIGDCKINEGLFQALSRKGWKKIKKIIMVNDTAAVLQSGIFSETDDQGFDSHIGFVLGTGLNSAYIEYGKIEKLKTTEFYDKPQIIVCESGKSNKIPQSKFDKILSENSNLKNEYFLERMCSGRYLGELCSIALRAGSAEGIFSPRVNKMLLNSCDFSTEEISLFLKEQNHDKNIFSGIIEAHSVSEDYVKIYSICKCFFERAGRLSAAVIAAACIKTGKGKSPDKPICISADGSMFLKGFLIKERIFKSLHTCLTEKRGIYFVLKTNDEAVTLGTALAAFLN

SEQ ID NO: 10478 - protein, 523 aa, Chlorella sorokiniana
CRPPSSPSLSWPPGLRSPALPRAVACARGRSAKRDVAAKRLRSRSPRMDATTGDFTALQKAVKQMATKAGTEGLVHGIKNPELRQLLTEIFMKDPEQQEFMQAVREVAVSLQPVFEKRPELLPIFKQIVEPERVITFRVSWLDDAGNLQVNRGFRVQYSSAIGPYKGGLRFHPSVNLSIMKFLAFEQIFKNSLTTLPMGGGKGGSDFDPKGKSDAEVMRFCQSFMTELQRHISYVQDVPAGDIGVGAREIGYLFGQYKRITKNYTGVLTGKGQEYGGSEIRPEATGYGAVLFVENVLKDKGESLKGKRCLVSGAGNVAQYCAELLLEKGAIVLSLSDSQGYVYEPNGFTREQLQAVQDMKKKNNSARISEYKSDTAVYVGDRRKPWELDCQVDIAFPCATQNEIDEHDAELLIKHGCQYVVEGANMPSTNEAIHKYNKAGIIYCPGKAANAGGVAVSGLEMTQNRMSLNWTREEVRDKLERIMKDIYDSAMGPSREYNVDLAAGANIAGFTKVADAVKAQGAV

SEQ ID NO: 10479 - protein, 119 aa, Triticum aestivum
RPTRPGTMFLQNDSGSRANIGRSSALQNSENNLKASTGRLSVSQNSDSAPKEIKPTAPSGLVPSTPQRVGTGSSTRTAGNSTYASGGTTLKRSSLKSNSTSNLHNFSKTDVVPAAVIIP

SEQ ID NO: 10480 - protein, 341 aa, Ralstonia solanacearum
MNETILLTGATGYIASHTWVELLDAGYQVIGLDNLCNSSAAVLARIEQITAKTPKFVQGDVRDRRLLDDLFASTRISAVIHFAALKSVGESVQKPLAYYDNNMGGLVTLCAAMAHANVRQLVFSSSATVYGNPHTVPITESFPLSATNPYGQTKLMGEQVLRDLEVSNGAWRIAYLRYFNPVGAHHSGLIGEDPRGIPNNLMPYVAQVAAGRREQLSVFGGDWPTPDGTGVRDYIHVVDLARGHLSALDVLRRDGRGFTVNLGTGRGYSVLEVVAAYQRASGRPIPYEIVARRPGDIAACYADPSLAASQLGWRAQYGIERMCEDSWRWQSMNPDGFQTRG

SEQ ID NO: 10481 - protein, 1306 aa, Arabidopsis thaliana
MEVCNCIEPQWPADELLMKYQYISDFFIAIAYFSIPLELIYFVKKSAVFPYRWVLVQFGAFIVLCGATHLINLWTFTTHSRTVALVMTTAKVLTAVVSCATALMLVHIIPDLLSVKTRELFLKNKAAELDREMGLIRTQEETGRHVRMLTHEIRSTLDRHTILKTTLVELGRTLALEECALWMPTRTGLELQLSYTLRHQHPVEYTVPIQLPVINQVFGTSRAVKISPNSPVARLRPVSGKYMLGEVVAVRVPLLHLSNFQINDWPELSTKRYALMVLMLPSDSARQWHVHELELVEVVADQVAVALSHAAILEESMRARDLLMEQNVALDLARREAETAIRARNDFLAVMNHEMRTPMHAIIALSSLLQETELTPEQRLMVETILKSSNLLATLMNDVLDLSRLEDGSLQLELGTFNLHTLFREVLNLIKPIAVVKKLPITLNLAPDLPEFVVGDEKRLMQIILNIVGNAVKFSKQGSISVTALVTKSDTRAADFFVVPTGSHFYLRVKVKDSGAGINPQDIPKIFTKFAQTQSLATRSSGGSGLGLAISKRFVNLMEGNIWIESDGLGKGCTAIFDVKLGISERSNESKQSGIPKVPAIPRHSNFTGLKVLVMDENGVSRMVTKGLLVHLGCEVTTVSSNEECLRVVSHEHKVVFMDVCMPGVENYQIALRIHEKFTKQRHQRPLLVALSGNTDKSTKEKCMSFGLDGVLLKPVSLDNIRDVLSDLLEPRVLYEGIDCRSVLDDILKQKGNNKIETLNRIMASALRRLVEQQQWRYLVSQSTRSPKLIHGFFSFSSKTNPNPNKQQQILIDYISKSLQSNDTWETLSTKFSSIDLSDSLIETILLRFKNPETAKQALSFFHWSSHTRNLRHGIKSYALTIHILVKARLLIDARALIESSLLNSPPDSDLVDSLLDTYEISSSTPLVFDLLVQCYAKIRYLELGFDVFKRLCDCGFTLSVITLNTLIHYSSKSKIDDLVWRIYECAIDKRIYPNEITIRIMIQVLCKEGRLKEVVDLLDRICGKRCLPSVIVNTSLVFRVLEEMRIEESMSLLKRLLMKNMVVDTIGYSIVVYAKAKEGDLVSARKVFDEMLQRGFSANSFVYTVFVRVCCEKGDVKEAERLLSEMEESGVSPYDETFNCLIGGFARFGWEEKGLEYCEVMVTRGLMPSCSAFNEMVKSVSKIENVNRANEILTKSIDKGFVPDEHTYSHLIRGFIEGNDIDQALKLFYEMEYRKMSPGFEVFRSLIVGLCTCGKVEAGEKYLKIMKKRLIEPNADIYDALIKAFQKIGDKTNADRVYNEMISVR

SEQ ID NO: 10482 - protein, 281 aa, Oryza sativa
  misc_feature (61)..(61): Xaa can be any naturally occurring amino acid
  misc_feature (66)..(66): Xaa can be any naturally occurring amino acid
  misc_feature (223)..(223): Xaa can be any naturally occurring amino acid
  unsure (1)..(281): unsure at all Xaa locations
GLQESARGLVPNSARGEILYALVVQKFVEAGVSLVPALSHSISSSGRVVRWADPGEGELDXMHSQXEAYEMIENHLALILGQRQADATVAAISKLRVGQVYAASVMYGYFLKRVDQRFQLEKSMKPLPWGSEEEDLLNQVMTTDSRPSPQTSTSHPEMASWTSPNFSAGGPSQSVKPCRLRSYVMSFDSETLQSYATIRSKEAFGIIEKHTEALFGTPEIVIXTPEGTVDSSQDEHVRISFARMRTAILKRVTYENLLWNLNLCGSTDHFGAHILPKSLSK

SEQ ID NO: 10483 - protein, 262 aa, Ralstonia solanacearum
MSRIASPASSARAAPLPPIDPARTAFLLDFDGTLVDIAPQPEAVHVAPDLRATLAALQRASGGALAVISGRTVADLETRLDLPGLVIAGVHGAERRHADGSFHRLQTDSEALAALERELRAQLPSVPGVVLESKGIAFALHYRHLPQAADAVCALARRLADRYADHVRLQAGKMVVELKPRGASKGAVVGHLMRAAPFAGRIALFAGDDLTDESAFEAVNTLGGWSIKVGMGPSQAHWRVPDPAALRDWLAALARRAGGRAA

SEQ ID NO: 10484 - protein, 465 aa, Ralstonia solanacearum
MSRLIVVSNRVAPIAEGQASAGGLAVGVYDALRDTGGVWFGWSGEIAPGASGEPSIAAKGAITFATVGLSRRDYDQYYRGFANATLWPVFHYRVDLARYERQEYHGYRRVNTQFAHQLKALVQPDDILWVHDYHLIPFAAECRALGLRNRIGFFLHIPFPSPEILTTIPPHEELMRALCAYDLLGFQTETDRVAFYDYIEREARGYIENKEHNGPVHAYGNTLRAEVYPIGVHPDEIARQAVSSLARRNPFAREADASGGRPLKLIMSVDRLDYSKGLPERFRAFEQLLDDFPDHRRHVTFVQIAPTSRQDVQSYQQIRQRLEAESGRINGKHSELDWTPIRYINKQYDRRMLMALFRASHIGYVTPLRDGMNLVAKEYVAAQDPEAPGVLVLSRFAGAARELDAALIVNPYDTRGMAEALNRALTMPLEERKARHAHMMDRLRAADLTAWRERFLADLRGASAR

SEQ ID NO: 10485 - protein, 82 aa, Triticum aestivum
MALSRRMAASTLLLLVLLVATEMGATTTKTAEARDCLSQSHKFNGACLSSSNCAGVCRTENFPDGECHTQHFERKCFCKRVC

SEQ ID NO: 10486 - protein, 429 aa, Bacillus cereus ATCC 14579
MKKFDKSIAAFEEAQDLMPGGVNSPVRAFKSVGMNPLFMERGKGSKVYDIDGNEYIDYVLSWGPLIHGHANDRVVEALKSVAERGTSFGAPTEIENKLAKLVIERVPSIEIVRMVNSGTEATMSALRLARGYTGRNKILKFIGCYHGHGDSLLIKAGSGVATLGLPDSPGVPEGVAKNTITVAYNDLESVKYAFEQFGDDIACVIVEPVAGNMGVVPPQPGFLEGLREVTEQNGALLIFDEVMTGFRVAYNCGQGYYGVTPDLTCLGKVIGGGLPVGAYGGKAEIMRQVAPSGPIYQAGTLSGNPLAMAAGYETLVQLTPESYVEFERKAEMLEAGLRKAAEKHGIPHHINRAGSMIGIFFTDEPVINYDAAKSSNLEFFAAYYREMVEQGVFLPPSQFEGLFLSTAHSDADIEATIAAAEIAMSKLKA

SEQ ID NO: 10487 - protein, 200 aa, Sorghum bicolor
MGEEAMDDYELHMVCYGGDDDGRVMEWESGLPGADELTPLSQPLVPPGLAAAFRIPPEPGRTLLDVHRASAATVSRLRRAPSSSSSGSGGSGSSSFAPFHPHPQAAAAAGHARGDEDADSSAAALGGGNAATTTTNTGTNSKRPRLVWTPQLHKRFVDVVAHLGIKNAVPKTIMQLMNVEGLTRENVASHLQKYRLYVKR

SEQ ID NO: 10488 - protein, 646 aa, Schizosaccharomyces pombe
MMNKWAKNWFGLSKKSVSTNSAKGSLPRSPLASIQTNQPVEEGEGGSLPSVSNLGPSSIDHPMEEFASDQSTVGNRNSNDILPEVDHEPSGYLKLQIGSLVLGGPHTDAALAMECSRLNQLFVVVQFGTTEFVSPPLKWESPGRDIGTSSRDSANVSRSSSMMSSHPIPTPAIQRTSSIPNPLTPSYVVFDVAKPVPIDVNIYDHGNNNEFVGRTYIHPSYNYGQFEQFCNSVEVSPAYNRMVDLRLSLNTVFQPLSQHSYGPDDFVPLKLIGKGTFGQVYLVRKKDTERVYAMKVLSKKVIVRRKEVAHTVGERDILVQTSAADSPFIVALRFSFQTPKDLYLVTDYMAGGELFWHLQKSVRFPEERAKFYIAELLLALQALHKRGIVYRDLKPENILLDVQGHIALCDFGLSKANLSVGTTTRTFCGTTDYLAPEVILDEAGYDMMVDFWSLGVLLYEMTCGWSPFYADNTQQLYKNIVFGKVRFPRGLLSVEARDLIKLLLNRNPKHRLGAHGDVEEVMKHPFFDGIDWKKLAAKEISPPFKPIVEGEIDVSNFDVEFTNKAIDRDFSSTDEMSTSAPLSSTVQNGFKGFTYIDASAMDEAFGYHNSNDSASSISSQDDYSKDNSDMDLNRANDEVFMGQIDP

SEQ ID NO: 10489 - protein, 223 aa, Thermoplasma acidophilum DSM 1728
MKIFLDTANIDEIRTGVNWGIVDGVTTNPTLISKEAVNGKKYGDIIREILKIVDGPVSVEVVSTKYEGMVEEARKIHGLGDNAVVKIPMTEDGLRAIKTLSSEHINTNCTLVFNPIQALLAAKAGATYVSPFVGRLDDIGEDGMQIIDMIRTIFNNYIIKTQILVASIRNPIHVLRSAVIGADVVTVPFNVLKSLMKHPKTDEGLAKFLEDWKKVSPDGKLIL

SEQ ID NO: 10490 - protein, 316 aa, Thermoplasma acidophilum DSM 1728
MKSESLRDVYGKELVKLGSFDRDIVVLDADLSSSTKTGYFANAFPDRFFNMGISEQSMVTTAAGLALSGKKPFVSTFAIFLTRTYEQIRQSVCYNNAPVRFVVTHGGITVGEDGATHQIVEDVGIMAGLPNMNVIVPADSVETRSVVDYLAGVDKPHYVRLSREKFPVINDEDYEFKIGKSKTIRDGADLTIIADGVMVSKSLEAAESLKKNGVDARVINMSSIKPTDRDAIIKAAKETGHIVTAEEHSIYNGLGSRVAEITSESYPVPVRRIGMRDTFGKSGKAWELFSYFHMDVKDIINEAMTCLEEKNYENIP

SEQ ID NO: 10491 - protein, 273 aa, Thermoplasma acidophilum DSM 1728
METYQVDLSEIALRIRREIVRMVYNAQSGHPGGSLSVADILTVLYFKEMNIDPKNPNDPKRDRLILSKGHASPALYATLALRGFFPVSDLAGFRKIDSHLEGHVSREIPGVEVSTGSLGQGLGVGVGMALASRLNGFNYHVYVILGDGEMEEGNVWESLMAGYKYKLNNLVAILDRNGIQLDGYTRDIMPLHDIHAMVESFGWNVIEIDGHSFSEIEDAIEKSKRSERPTFIIANTVKGKGVDFMENNPKYHGSPPESEDLYRRAMRQLGEEI

SEQ ID NO: 10492 - protein, 517 aa, Nicotiana tabacum
MVFPIEAFVGLVTFTFLLYFLWTKKSQKLPKPLPPKIPGGWPVIGHLFHFNNDGDDRPLARKLGDLADKYGPVFTFRLGLPLVLVVSSYEAIKDCFSTNDAIFSNRPAFLYGEYLGYNNTMLFLANYGPYWRKNRKLVIQEVLSASRLEKFKQVRFTRIQTSIKNLYTRINGNSSTINLTDWLEELNFGLIVKMIAGKNYESGKGDEQVERFKNAFKDFMVLSMEFVLWDAFPIPLFKWVDFQGHIKAMKRTFKDIDSVFQNWLEEHINKREKMEVGAEGNEQDFIDVVLSKLSKEYLDEGYSRDTVIKATVFSLVLDAADTVALHINWGMTLLINNQNALMKAQEEIDTKVGKDRWVEESDIKDLVYLQAIVKKVLRLYPPGPLLVPHENVKDCVVSGYHIPKETRLFANVMKLQRDPKLLSNPDKFDPERFIAGDIDFRGHHYEFIPFGSGRRSCPGMTYALQVEHLTMAHLIQGFNYKTPNDEALDMKEGAGITIRKVNPVELIITPRLAPELY

SEQ ID NO: 10493 - protein, 310 aa, Oryza sativa
MVSLKLQKRLAASVMKCGQKKIWLDPNEVSEISMANSRQAVRKLVKDGYIIRKPPVMHSRARVRKNLLAKRKGRHMGVGKRRGTRNARMPEKVIWIRRMRVLRRLLRKYREAKKIDKHSYHELYMKVKGNVFKNKRVLMEYIWKAKAQKIKDKAEQEQGELRRQKNRQMRERRAKRLDERRKVLLGEDKKAVKKEEAAKKVAAAPAAASAPKVSKNQKKKEAAKAAAGSAPKAAAPAKAAAPKKEETKAAAPVKAAAPVKAAAPKKEETKAAAPKAAAAKPAAKAAAPKKEAAKPAAAKPAAKGGKKGGK

SEQ ID NO: 10494 - protein, 281 aa, Euglena gracilis
MDLDYEGQAPTTSLLLLFPPHLVPEYIGTISNNLRSAEVNHRPSKTFLEEVQVDITRLMRAILVDWMNEVTEEFRLKMETLCLAVNYVDRYLSRVPVPRHQLQLVGVASLLIASKMEEIMHPQIDEFVYITDSTYNREQVLRMELSILNALRYDMTVVTPRDFVGIYLKVAQASPEVCMLADYLLELILQEYAFLHWEPSMIAASAVVLALFGFRLPCWSDDLRRITQYQPNELNACLKEMHRVFQNAPHNNLQAVREKYSHGRFMHISMVAQLPPSPPVF

SEQ ID NO: 10495 - protein, 518 aa, Nicotiana tabacum
MVFPVEAIVGLVTFTFLFYFLWTKKSQKPSKPLPPKIPGGWPVIGHLFYFDDDGDDRPLARKLGDLADKYGPVFTFRLGLPLVLVVSSYEAIKDCFSTNDAIFSNRPAFLYGEYLGYKNAMLFLANYGSYWRKNRKLIIQEVLSASRLEKFKHVRFARIQTSIKNLYTRIDGNSSTINLTDWLEELNFGLIVKMIAGKNYESGKGDEQVERFKKAFKDFMILSMEFVLWDAFPIPLFKWVDFQGHVKAMKRTFKDIDSVFQNWLEEHIKKREKIMEVGTEGNEQDFIDVVLSKMSNEYLGEGYSRDTVIKATVFSLVLDAADTVALHINCGMALLINNQNALKKAQEEIDTKVGKDRWVEESDIKDLVYLQAIVKEVLRLYPPGPLLVPHENVEDCVVSGYHIPKGTRLFANVMKLQRDPKLWSNPDKFNPERFIARDIDFHGQHYEYIPFGSGRRSCPGMTYALQVEHLTMAHLIQGFNYRTPTDEPLDMKEGAGITIRKVNPVKVIITPRLAPELY

SEQ ID NO: 10496 - protein, 318 aa, Streptococcus agalactiae A909
MGLLVDGKWVDQWYDTASTGGKFVRTVTQFRHWVTKDGSAGPSGDAGFKAESGRYHLYVSLACPWASRVLIMRKLKNLESHISISIVNPLMLENGWTFQEYKGVIPDMINQSQYLYQIYQASQSDYTGRVTVPVLWDKKFHTIVNNESSEIMRMLNTAFNHITGNTDDYYPDSLQGQIDEMNNFIYPKINNGVYKAGFATSQNVYQKEVETLFTALDQLEKHLSDNHYLVGEQFTEADIRLFTTLVRFDTVYYGHFKCNLKALHDYPHLWHYTKRIYNLPGIAETVNFDHIKKHYYGSHKTINPTGIIPAGPNLDWTI

SEQ ID NO: 10497 - protein, 226 aa, Nicotiana tabacum
ISDFWSSSSSSSSIAGKSDSVQSLTHSYNKPQKSDSGKLNQLEKGTISVKVEKESSGPRARKNKYRGIRQRPWGKWAAEIRDPQKGVRVWLGTFNTAEEAARAYDEAAKRIRGDKAKLNFPEPPSPPAKRHCTSTIPDQPTRSDLMSQKPASIMLNYGYENQTPYYPMEMPAAEDPQHHDYELKEQISNLESFLDLEPDSGIVDSDPLNIFLMDDFAATQQQQLFY

SEQ ID NO: 10498 - protein, 317 aa, Haemophilus influenzae R2866
MTTQLDSLRNMTVVVADTGDIDAIKKYQPQDATTNPSLILSASALPQYAPLIDEAVAYAKAQSNDKAQQLIDAEDKLAVNIGLEILKIVPGRISTEVDARLSYDTQATVEKARKLIALYNAAGISNDRILIKIASTWQGIRAAEILEKEGINCNLTLLFSEAQARACAEAGVYLISPFVGRILDWYKANSDKKEYAPAEDPGVISVTKIYNYYKEYGYNTVVMGASFRNVGEITELAGCDRLTIAPALLKELQENSTALVRKLEYKGEVKAKPQPLTEAEFYWQHNGDAMAVEKLAEGIRKFAIDQEKLETMLSAKL

SEQ ID NO: 10499 - protein, 589 aa, Clostridium tetani E88
MNFKKTIAILIIRIAMVFKICKKRGVYMIKEIKLEKLFPGSKEGKVGKIHKSIGDGIKSGEVLVEVEGKKGNIPIKAKEEGKIHSIEIEEGTTVKIGDVLLKIEIEEVTLDEFVIDKDEFAKKSELKSLECDVAILGAGPGGYVAAIQAAKLGAKVVIVEKDKVGGTCLNRGCIPTKAFVRSSEVYSNVKNSEKYGISLENPSIDIKKVVARKDNIVDKLVGGIQYLIQKHNIELISGNGKLIDRNTIETKDALIKAKNIVIASGSKASVLPIKGSNLKQVITSEEALDLKEVPEKIAIIGGGVIGMEFAFIYANMGVEVSVIEYFDNILSMLDEDVIKEITDIGKEKGIKFYTSSKVEEILEDENEGCIVKFTNKGEEKFIFCDKVLMSVGRQPYMENMGVEELGIELNQNKRGIKVNTKMETSVSNIYAIGDVTNVIQLAHVASHQGIVAVKNIMGKDIQIDYSAVPSVIFTEPEIAVVGVCEKIAKENNLDVEVGKFPFSANGKALTLGEDRGFIKVIKEKATGKVVGASIIGAHASDLIAELTLAVKNGLTSEQIAETIHAHPTTAEVVHEASLAVEGGALHFAE

SEQ ID NO: 10500 - protein, 274 aa, Burkholderia fungorum LB400
MSNEKAGGKLENKVAIVTGAGAGLGAACARALAQHGARVAVVDINGEAAAAVAADIGERAMSVRTDVSSEAQVKAMVSAVLEHFGRIDILHNNAAVLDDAQRAGDRDVINMSVEVWDRAMAVNLRGAMLCCKHAIPAMLRGGGGSIIHSSSGFGAQGDFTMSAYAASKAGLAMLSKSVAAQYGKERIRSNTIQIGLVVADHPLPEDIKGVILDGHLTPYLGDPKHVADVVCFLASDEAAFITGDTLAVDGGFSSHAPTLAPLRALFAARGKAAY

SEQ ID NO: 10501 - protein, 533 aa, Pleurotus ostreatus
MFPGARILATLTLALHLLHGTHAAIGPTGNMYIVNEDVSPDGFARSAVVARSVPATDPTPATVSIPGVLVQGNKGDNFQLNVVNQLSDTTMLKTTSIHWHGFFQAGSSWADGPAFVTQCPVASGDSFLYNFNVPDQAGTFWYHSHLSTQYCDGLRGPFVVYDSSDPHLSLYDIDNADTVITLEDWYHIVAPQNAAIPTPDSTLINGKGRYAGGPTSPLSVINVESNKRYRFRLVSMSCDPNFTFSIDGHSLLVIEADAVNIVPITVDSIQIFAGQRYSFVLTADQTVGNYWIRANPNLGSTGFDGGINSAILRYAGATEDDPTTTSSTSTPLLETNLVPLENPGAPGPTVPGGADININLAMAFDFTTFELTINGVPFIPPTAPVLLQILSGASSAASLLPSGSIYALEPNKVVEISMPALAVGGPHPFHLHGHTFDVIRSAGSTTYNFDTPARRDVVNTGTGANDNVTIRFVTDNPGPWFLHCHIDWHLEIGLAVVFAEDVTSISAPPAAWDDLCPIYDALSDNDKGGIVPS

SEQ ID NO: 10502 - protein, 250 aa, Bacillus cereus ATCC 14579
MNALAGKTVLITRAQHQAKQMSVAVKEKSGIPLEIPLLRMEGMSHRQIQHIEEQLHSYDWVIFTSRNGVAFFLDSLKKKLPLTIRIAAVGVKTKLELEKRGYQVHFVPTSFVAEAFAEEFLKELSGNERILFPKGNLAREVIPVALREIGVSLDELIVYGTKVNIEKKQELIAALKLGKVDIITFTSPSTVTSFVRLLEGTNWREWTKKCTIACIGPITEKEASLYFPSVIVPKEYTVEALLQYVCESIK

SEQ ID NO: 10503 - protein, 848 aa, Pseudomonas synxantha
  misc_feature (233)..(233): Xaa can be any naturally occurring amino acid
  misc_feature (240)..(240): Xaa can be any naturally occurring amino acid
  unsure (1)..(848): unsure at all Xaa locations
MLNPPPTGNSSRLLQRTGNDATRYLLPVFGRHRNFAGDVIPDEADRLLGWVEVELSHNGMLLRGYRSMFASLLLIAIGLMFTAALALRISRTINSPIGQIKQAVAQLKDGNLETRLPPLGSQELDQLASGINRMAETLQNAQEEMQHSIDQATEEVRQNLETIEIQNIELDLARKEALEASRIKSEFLANMSHEIRTPLNGILGFTHLLQKSELSPRQLDYLGTIEKSADNLXGIINEIXDFSKIEAGKLVLDSVPFNLRDLLQDTLTIFAPAAHAKQLELVSLVYRDTPLALVGDPLRLKQILTNLISNAIKFTREGTSSPGDGRDEQEDSVQLRISVQDTGIGLSNQDVRALFQAFSQADNSLSRQPGGTGLGLVISKRLIEQMGGEIGVDSTPGEGSEFWISLNLPKTRDDVEDLPAPPLLGRRVAVLENHELARQALQHQLEDCGLEVTPFNTLESLTNGITSAHQTEQAISLAVLGVTANDIPPERLNQHLWDLEHLGCKVLVLCPTTEQMLFNQSVPNPNSQLQAKPACTRKLRRSLADLISPRPSRSEPGEPLSSRAPRVLCVDDNPANLLLVQTLLEDMGAKVQAVESGYAAIDAVKQETFDLVLMDVQMPGMDGRQSTEAIRQWESERHGTPLPVVALTAHAMANEKRALLQSGMDDYLTKPISERQLAQVVLKWTGLALRNQGPERVNDGLAQGVQLLVLDHEEGLRLAANKADLAADMLAMLLASLEADRLAITVAREANDNHALIERVHRLHGATRYCGVPQLRAACQRAETLLKQDDAKAMAALDELDMAIARLASVSQSQRLTQFYGQHQSKCGGKPPPTFSQHFHRVNCREPS

SEQ ID NO: 10504 - protein, 146 aa, Bacillus anthracis
AATEEQIAEFKEAFSLFDKDGDGTITTKELGTVMRSLGQNPTEAELQDMINEVDADGNGTIDFPEFLTMMARKMKDTDSEEEIREAFRVFDKDGNGYISAAELRHVMTNLGEKLTDEEVDEMIREADIDGDGQVNYEEFVQMMTAK

SEQ ID NO: 10505 - protein, 160 aa, Oryza sativa (japonica cultivar-group)
MSLIRRSNVFDPFSLDLWDPFDGFPFGSGSRSSGTIFPSFPRGTSSETAAFAGARIDWKETPEHVFKADVPGLKKEEVKVEVEDGNVSRSAGEASKEQEEKTDKWHRVEASSGKFLRRFRLPENTKPEQIKASMENGVLTVTVPKEEPKKPDVKSIQVTG

SEQ ID NO: 10506 - protein, 854 aa, Oryza sativa
MHQSPKRSVIKHPHDFHGAQVMPRSADALAEATSRPPMPPSVAHADPSSSTTPNYLKGVEGIGNPDATFSGLGSSFDFGDLNLVPKRSAPAPPNHPNSTAASGSVFASRQAGPSSTSASPTSTSASTFANGTSSAAWSTGASAAPAAVGPYRPNPTINTSVQSMQGPRSGLPAQSSLPFGVGNHPPAASPISGPVSASPYSSNAPGASTSNAAFPPRPVRSNTSGPDTFHTVSSVTASQHVAPVMAQRSHSSIGPQQHQMIGSPTLNQSSPTLEHGAPGESTPSLTTQSQFVHGTRDRERSRDGSATPGGRNTFKSVFGGFVNSMSDVFSAQKKIEISTPYDPVHLTHVGFNSDTGEFTGLPKEWQQLLQESGISRQDQEANPQAVMDIVAFYQDATKSDGDTDVWKKMGYAKGNNQAPGTPRTDTSSSDDGFKSGPQPVLYEKPRAAPVPPGALHGKRPGDIGSPDLRAPHATGDVALKPTRPAPAPGAGQATKAGSPPMGSRQPGASGASVSKAGTTNGASTTSAAAKSAKAAPAAGPAQGPGAVPRRRETKKNTVKDSDVIAKLQAICTDADPTKLYRSLSKIGQGASGGVFTAYQVGTNHSVAIKQMNLEQQPKKDLIINEILVMKESRHRNIVNFIDSFLFKGDLWVVMEYMEGGSLTDVVTCNIMTEGQIAAVSREVLEGLRHLHEHGVIHRDIKSDNVLLSLQGDIKLTDFGFCAQIGESQAKRTTMVGTPYWMAPEVVTRKEYGPKVDIWSLGIMCIEMVEGEPPYLNENPLRALYLIATNGTPKINNPENLSNTFKDFLKTCLDVDADRRPDAVGMLAHPFLKRSESLRTLAPLIKAAREQTRKS

SEQ ID NO: 10507 - protein, 601 aa, Pseudomonas fluorescens Pf-5
MTDSSPDASPSSLKIYFRLLGYVRPYIGLFLISIVGFLIFASTQPMLGYILKYFVDGLSNPQAVLFPGVPYLRDMQLLQAVPLLIVLIAAWQGLGSYLGNYFLAKVSLGLVHDLRVQLFNNLLTLPNRYFDKHNSGHLISRITFNVTMVTGAATDAIKVVIREGMTVIFLFGSLLWMNWRLTLVMIAILPLIAVMVRTASKKFRKQSKKIQVAMGDVTHVASETIQGYRVVRSFGGETYEQQRFLAASQGNTDKQLRMTRTGAIYTPLLQLVIYSAMAVLMFLVLYLRGDASAGEMVAYITMAGLLPKPIRQLSEVSSTIQKGVAGAESIFEQLDVEPEVDRGTVERASINGHLEVRNLSFTYPGTERQVLDDISFSIEPGKMVALVGRSGSGKSTLANLIPRFYHHDKGQILLDGTEVEDFRLLNLRRHIAQVTQHVTLFSDTVANNIAYGDLAGAPREDIEKAAADAYAMDFIAQLPEGLDTQVGENGVLLSGGQRQRLAIARALLKNAPLLILDEATSALDTESERHIQAALDKVMKGRTTLVIAHRLSTIEKADLILVMDQGRIVERGSHAQLLAQNGYYSRLHAMGLEEPAPSGIA

SEQ ID NO: 10508 - protein, 181 aa, Pyrococcus abyssi GE5
MALRPAKIDRYVDKPAYTRREYIRGAPGPKITIFDMGNPAGDFEFEVALHVSQPVQIRQNALEAARQQVNRYLQKNVGRSNYHFKIRVYPFQVLRENPMATGRKADRYGNGMRRPFGKPIGLAARLKKDQKVLSIRVNRQHLKFAIEGARRAAMKFPVKCYYRIYDKEGNDVTTKILSQGL

SEQ ID NO: 10509 - protein, 203 aa, Pseudomonas fluorescens Pf-5
MNKLACVPLERPQIRPYSLSLSTEARAALKQQQPCCLWLTGLSGAGKSTLANLLELRLNELGMHTFVLDGDNVRSGLCSDLGMGAEARKENIRRMAEVARLMVDAGLLVIVSAISPFRAERDAARALFGPGEFIEVYVSTPFDTCARRDPKGLYQAALEGRIKDFTGLDSPYEAPLQADCEIDTATVALPEAIRRLLQLLPRK

SEQ ID NO: 10510 - protein, 321 aa, Vibrio parahaemolyticus
MSISNTVSKVEEFEYDNASETTIDNELEKSSSTTEGKTAVREEFDASSKSLDATQLYLGEIGFSPLLTAEEEVLYARRALRGDEAARKRMIESNLRLVVKISRRYSNRGLALLDLIEEGNLGLIRAVEKFDPERGFRFSTYATWWIRQTIERALMNQTRTIRLPIHVVKELNIYLRTARELSQKLDHEPTAEEIAAQLDIPVEDVSKMLRLNERISSVDTPIGGDGEKALLDIIPDANNSDPEVSTQDDDIKSSLIHWLEELNPKQKEVLARRFGLLGYEPSTLEEVGREIGLTRERVRRLREILIKQGLNMENLFNVEDD

SEQ ID NO: 10511 - protein, 221 aa, Campylobacter coli RM2228
MKNYYLIDEKRKTPTSTWQKISQALKRSVKLELFVGLWVVMREMLKRNNSATIKYPFEKVKLDNRYRAVHRLMRFIESENERCIGCGLCEKICISNCIRMETSLDENARKKVGNYSINLGRCIYCGFCAEVCPELAIVHGTEYENAAEQRSYFGYKQDFLTPIDKLKNQVEFEGAGSLRKDADLLVKKTPNYYEVLQEREKNLCTDEECTLPNLAPQGEVK

SEQ ID NO: 10512 - protein, 89 aa, Zea mays
VKRFQKTLHVEAVVPSVIEPSFGLGRIMYTILEHTFHVREGDESRTFFIFPAVVAPFKCSVLPLCQNQEFMPFVKELSEALTRNGVSHK

SEQ ID NO: 10513 - protein, 442 aa, Frankia sp. CcI3
MPDVRRPGCARAHRGVRCPNGRDRAVQPKGGGGGRGRGRGRGRGRGRGTDPSRRRVDPAAGIGCSGPVWSTGDELFQLITEEVDNRAMTSTSRAETVLVTGATGFIGSHTWVDLLAAGHRVVGVDNFVNSSPRVLDRLRKVVDGDIDFVRLDVRDRAALGDVFRRWKIDSVIHFAALKAVGESVDIPLEYYDTNVNATLGLVRVMAEHGVRRLVFSSSCAIYGAADKVPIAEDTPARPTNPYARTKWMCEQILADLCARDPSWHVTSLRYFNPAGAHESGLLGEDPRGVPNNVMPYLAQVAVARRPELSIFGDDYPTPDGTGVRDYIHVVDLAEGHRLALDHLDDQAGHRVINLGTGAGTSVRELLAAFSAACARDLPSRVVARRPGDVAALVADAALARTALGWSARRDVADMCRDAWEFQRLNPGGYDDEEEPDELVGQP

SEQ ID NO: 10514 - protein, 207 aa, Ralstonia eutropha JMP134
MTHPHRAIWGSGNATDFRDSWQARPLTIWLTGLSGAGKTTLAKETQHWLNATGIRALLIDGDQLRAGLCKDLRFSPEDRRENVRRAAHCSRLLNDQGFFVLASMISPTAADREHAREIIGHHRFLEVYVRADLEACKIRDPKGLYARVASGEISQFTGISAPYEPPQEPALTIDTTTSNISQSVRVLTELIQRRMQSWEKGQKPLSH

SEQ ID NO: 10515 - protein, 430 aa, Triticum aestivum
  misc_feature (282)..(282): Xaa can be any naturally occurring amino acid
  unsure (1)..(430): unsure at all Xaa locations
MTDDQKANTDNVNQQEVIEQKDPKIDETNEKSDQKKDDNETKDKDQKMDSKKKSPIDTKEKKKSDEPPKHPGFILQAKKSKGYKLRSTSLSLDGLLDYTANDTEESVFELSLFAESFSEMLQYRMGCVILSFLEKLYRQYVVRRNQRKRQREEDLKKEDTISLEKRLKTTDENVTGSTSGNPGKNDETIKEGGEKIIGDNSSASHEQLVKEDDEKMSTDHAAQDEMMKEGEEKIDADQSAAAHDEPKADEKMEEEDPEYEEDPDEVEYEGDEDMDDATAEEXAEAQNEDNSNERETKPEEVTAEDDGKRTTENLKLEKTEEDKQSVAEKGDLKEVEEKSVGKEGKISGSQKGDSAKHDVVDKDLLQAFRYFDQNRVGYIKVDDLRCILHNLGKFLSNRDVKDMVQIALAESNSSRDGRIIYTKLVKKADL

SEQ ID NO: 10516 - protein, 575 aa, Staphylococcus aureus subsp. aureus MSSA476
MKRENPLFFLFKKLSWPVGLIVAAITISSLGSLSGLLVPLFTGRIVDKFSVSHINWNLIALFGGIFVINALLSGLGLYLLSKIGEKIIYAIRSVLWEHIIQLKMPFFDKNESGQLMSRLTDDTKVINEFISQKLPNLLPSIVTLVGSLIMLFILDWKMTLLTFITIPIFVLIMIPLGRIMQKISTSTQSEIANFSGLLGRVLTEMRLVKISNTERLELDNAHKNLNEIYKLGLKQAKIAAVVQPISGIVMLLTIAIILGFGALEIATGAITAGTLIAMIFYVIQLSMPLINLSTLVTDYKKAVGASSRIYEIMQEPIEPTEALEDSENVLIDDGVLSFEHVDFKYDVKKILDDVSFQIPQGQVSAFVGPSGSGKSTIFNLIERMYEIESGDIKYGLESVYNIPLSKWRRKIGYVMQSNSMMSGTIRDNILYGINRHVSDEELINYAKLANCHDFIMQFDEGYDTLVGERGLKLSGGQRQRIDIARSFVKNPDILLLDEATANLDSESELKIQEALETLMEGRTTIVIAHRLSTIKKAGQIIFLDKGQVTGKGTHSELMASHAKYKNFVVSQKLTD

SEQ ID NO: 10517 - protein, 98 aa, Mesorhizobium loti MAFF303099
MAKSKFRPLHDRVVVRRVESESKTAGGIIIPDTAKEKPQEGEIIAVGSGARDEAGKLVPLDVKAGDRILFGKWSGTEVKLNGEDLLIMKESDIMGIIG

SEQ ID NO: 10518 - protein, 183 aa, Brassica napus
  misc_feature (37)..(37): Xaa can be any naturally occurring amino acid
  misc_feature (47)..(47): Xaa can be any naturally occurring amino acid
  misc_feature (158)..(158): Xaa can be any naturally occurring amino acid
  unsure (1)..(183): unsure at all Xaa locations
SVDLLFYRKYAIPQPQGYHTITFFCEVLFLCSHTALXLDRDETHALXFSADSYLRVHWKILDQIPGKATGAYSHSQGIKGLRDAIAAGIEARDGFPADPNDIFMTDGASPGVHMMMQLLISSEKDGILCPIPQYPLYSASIALHGGSLVPYYLDEASXGWGLEISELKKQLEDAKSKGITVRA

SEQ ID NO: 10519 - protein, 968 aa, Magnetospirillum magnetotacticum MS-1
MPIAWRIPLVVALNVCVALAVGGLGWHAASVMDSDLDELRTVQHRTSALAEIDIRASRLQGMIRQYLANPTDDLLKDAMRRSEELFVAMGDATAHEKPLSEDASAMHQAARRFVSGFQTLKAINADILRLYESDVLQSTSEMSGLYAILNSTARSRGNDPLSPALVKSHENFVEALISINAFYFNGVGAGAINAHASLQRVTDTVPALTQLASSDLQRDALAVIGTRARTLSAAIDAIARGFDERSRILTDEVDASQAVMSAAIDRLTIQGRDREEKLQRRSRHQLLRLAVAGAGAALVLLLVGAWVSWMIGQSIRSPLQRLRETMEAGAGGDWSREVEGRELQDELAAMARTVEVFKRNSMEKQRLEAERAEAGRRAEEANRSTLQDLLAQMEAHEHSSSFAQPVAAAPETEAAEIAAAFNRVLAKFHEANRGRDSAIQALTIAKESAEAANVAKSAFLAAMSHEIRTPMNGVIGMIELLDHTELDSDQRDLVSTTRDSGLALLRILDDVLDFSKIEAGRLELEQEPVRLDRMVDSVVQTISPAAAAKSLSISTFVDPGLPPLVLADPVRLRQILFNLAGNAVKFTAQGLVAIHVGRCGTDEQGRVMVSIRVVDTGIGIEDALRDRLFQPFTQAESSTTRRFGGTGLGLSITRRLVDLMDGTAGFESEPNVGSSFWCRLPLPTAEDAAPDNLAEQTEAAFMGLRILIVDPDTEERTLAALVTEQGGAAVVRVPGPREAEAASAKATATQAPFDLALIAADSLSPGQLAPMGTTPLLFIGGRDGAERFQLERLPNCLGFLGRPLSRAQIVAAVTRVVGPSAQPRPASPPQPPPAPRPTSWTGAPILVAEDHPVNQQVIRRQLHLLGFAAEVFPDGSAALAAWRARPYSLVLTDCHMPIMDGFQLTAAIRAEEEGKGRHTPILALTANALAGEAERCLEAGMDSYLSKPVELPQLQEALTNLLSDYAKG

SEQ ID NO: 10520 - protein, 176 aa, Chromobacterium violaceum ATCC 12472
MEKAILGGGCFWCLEAAFSQLKGVERVVSGYCGGHTDSPDYRQVCSGDSGHVEVVEISYDPALIDYATLLQVFFAVHDPTTLNRQGHDVGTQYASAIFYLDETQRECARRVIAQLDAEQIFDAPIVTRVESAPRFHPAEDYHQNYYAQNQQQNYCQLVISPKLAKIRRRFSHLLQN

SEQ ID NO: 10521 - protein, 436 aa, Thermoplasma acidophilum DSM 1728
MSGKADPLEIAKEAKPSQANNEVEEDPFEIALKQLRKAAKVLNLDEQALEILSSPQKILQVSLPVKMDDGKVKVFTGFRVRHNIARGPAKGGIRFHPQETLSTVKALSMWMTWKCAIADIPYGGAKGGIICDPSTMSQGELERLSRAYIRAIADFIGPDVDVPAPDVNTNPQIMAWMLDEYENIVRHNAPNVITGKPLEVGGSLGRFDSTGKGGMFVLREGAKKIGLDLSKARVAVQGFGNVGQFAVKFVEEMFGAKVVAVSDIKGGIYSENGFKFDDLLAWSKKIGSVVGFPGSKPITNEELLESDVDVLIPAAIEEQITARNADKIKAKIILELANGPTTPEADEILYKKGKLVLPDVLSNSGGVIVSYFEWVQNNYGEYWSTEEVTNKLDVKITKAARQVLETMDKYHVDPRTAAYVIAVKKVADAMKVRGWY

SEQ ID NO: 10522 - protein, 211 aa, Zea mays
  misc_feature (176)..(176): Xaa can be any naturally occurring amino acid
  misc_feature (180)..(180): Xaa can be any naturally occurring amino acid
  misc_feature (186)..(186): Xaa can be any naturally occurring amino acid
  misc_feature (193)..(193): Xaa can be any naturally occurring amino acid
  unsure (1)..(211): unsure at all Xaa locations
MSLLSKLRLVTVDVTGTLLAYKGRLGDYYCMAAKSAGKPCPDYDRMHEGFKLAYTEMARKYPCFGFAAKMPTIEWWRICVKDSFVKAGYDYDDETFDKVFKRIYSAFGSSAPYSVFPDAQPFMRGLREKGITVGIVSNAEYRYKEVILPALGLNQGSEWDFGVFSGIVGVEKPDPXIYRXALEMAXNVAPEEXLHIGDSYRRTTSRTEHRD

SEQ ID NO: 10523 - protein, 332 aa, Nicotiana tabacum
MAKDPVRVLVTGAAGQIGYALVPMIARGVMLGADQPVILHMLDIPPAAEALNGVKMELVDAAFPLLKGVVATTDAVEACTGVNVAVMVGGFPRKEGMERKDVMSKNVSIYKSQASALEKHAAPNCKVLVVANPANTNALILKEYAPSIPEKNISCLTRLDHNRALGQISERLNVQVSDVKNVIIWGNHSSSQYPDVNHATVATPAGEKPVRELVADDAWLNGEFISTVQQRGAAIIKARKLSSALSAASSACDHIRDWVLGTPEGTWVSMGVYSDGSYNVPAGLIYSFPVACKNGEWSIVQGLPIDEFSRKKLDATAEELSEEKALAYSCLT

SEQ ID NO: 10524 - protein, 298 aa, Schizosaccharomyces pombe
MGNVQSQEGETRAHAVPSQDATTTPDNANNVPKEPRAQSMISIAADDLNQEGEMSDDNQQEGGNNRTSQNGTSGSSGHTKRRSQTSGKKTHQPYSGPCVPTIIRWRGGGEVVYVTGSFSRWKKKIQLLKSEDYTVLLQLRPGTQRFKFLVDGIWCCSSDFPTATDAEGNLYNYLEVEANEKLGASIDERLSQVHTDLPMEEKSESEQYSTEIPAFLTSNTLQELKLPKPPSLPPHLEKCILNSNTAYKEDQSVLPNPNHVLLNHLAAANTQLGVLALSATTRYHRKYVTTAMFKNFDV

SEQ ID NO: 10525 - protein, 467 aa, Vibrio vulnificus YJ016
MTTPNPMRKTDLIYQLNDRPPLPQTLFAALQHLLAMFVAVITPSLIICQALGVSAEQTNTIISMSLFASGISSFIQIRTFGPIGSGLLSVQGTSFNFLGPIIGAGLALKAGGASVESMMAAIFGTILVASFAEILLSRVLEYARRIITPLVSGIVVTLIGLTLIQVGLVSMGGGYAALGDGTFGSLDKLALAGTVLGLIVLLNRAKNPYVRVASIVIAMLVGYVMAYFMGMVDTRQASSSALIALPIPMQFGLSFDWSLFIPLVLIFLITALEAIGDITATSEVSGEPVKGPVYMKRIKGGVLADGLNSALAAVFNSFPNSTFSQNNGVILLTGVASRYVGYFIAGMLVLLGLFPGVAGFVQLIPEPVLGGATIVMFGTIAAAGVRIISRVDLDRRAILIMALSFSMGLGIAQKPEILQFMPEFIKSIFSSGVAAGGITAIVLNLLLPEKLQGEEEEKAHEPATVKR

SEQ ID NO: 10526 - protein, 478 aa, Pyrococcus abyssi GE5
MIAMRLPDHKTKIVATIGPATSSRNMIKKLIENGVSVVRLNFSHGSFEEHAKVIEKVRDISQKLDRRVAILADLPGLKIRVGEIKGGYVELKRGEKVVLTTRDVVGDETTIPVEYKDFPRLVSKGDVIYLSDGYIVLRVEEVRGQDVEAVVVSGGKLFSRKGINIPKAYLPVEAVTPRDMEIIKFAIEQGVDAIGLSFVGSVYDVLKVKSFLEKNDAEDVFVISKIERPDAVRNFDEILKASDGIMIARGDLGVEMPIERLPILQKELIRKANTEGKPVITATQMLVSMTAEKVPTRAEVTDVANAILDGTDAVMLSEETAIGKFPIDAVKMMAKIAKVTEEYRESFGMSRLRELVEDGTRGTIKEAIARSIIDALCTLNIKYILTPTRTGRTARLISRFKPKQWIFGFSTNERVCNNLMFSYGVYAFCLEEGFDERDIIRLIKGLGLVESDDIVLMTEGKPIEKTMGTNSIKIFQIA

SEQ ID NO: 10527 - protein, 101 aa, Triticum aestivum
MPRRAIEVRADGAAPKWCMSLLENTFTAFLKSPGADADAKAVFAEGSLFSPYLFGKFFDPADAFPMWEFESDVLLAALRRGARTTVDWAENDCEYCLKSPT

SEQ ID NO: 10528 - protein, 670 aa, Arabidopsis thaliana
MINVMNPMKGGTEKGLDPQLWHACAGGMVRMPPMNSKVFYFPQGHAENAYDCVDFGNLPIPPMVLCRVLAIKYMADAESDEVFAKLRLIPLKDDEYVDHEYGDGEDSNGFESNSEKTPSFAKTLTQSDANNGGGFSVPRYCAETIFPRLDYNAEPPVQTILAKDVHGDVWKFRHIYRGTPRRHLLTTGWSNFVNQKKLVAGDSIVFMRAENGDLCVGIRRAKRGGIGNGPEYSAGWNPIGGSCGYSSLLREDESNSLRRSNCSLADRKGKVTAESVIEAATLAISGRPFEVVYYPRASTSEFCVKALDARAAMRIPWCSGMRFKMAFETEDSSRISWFMGTVSAVNVSDPIRWPNSPWRLLQVAWDEPDLLQNVKRVNPWLVELVSNVHPIPLTSFSPPRKKMRLPQHPDYNNLINSIPVPSFPSNPLIRSSPLSSVLDNVPVGLQGARHNAHQYYGLSSSDLHHYYLNRPPPPPPPSSLQLSPSLGLRNIDTKNEKGFCFLTMGTTPCNDTKSKKSHIVLFGKLILPEEQLSEKGSTDTANIEKTQISSGGSNQNGVAGREFSSSDEGSPCSKKVHDASGLETGHCKVFMESDDVGRTLDLSVLGSYEELSRKLSDMFGIKKSEMLSSVLYRDASGAIKYAGNEPFSEFLKTARRLTILTEQGSESVVV

SEQ ID NO: 10529 - protein, 396 aa, Neisseria gonorrhoeae FA 1090
MFFKHIEAAPADPILGLGEAFKAETRPEKVNLGIGVYKDASGATPIVKAVKEAEKRLLESETTKNYLTIDGVADYNEQTQILLFGKDHEIIASRRAKTAQSLGGTGALRIAAEFAKRQLNAQTIWISNPTWPNHNAIAKAVGIQDKPYRYYDAAKHCLDWDGMIEDLNQAQKGDIVLLHGCCHNPTGIDPTPEQWETLAKLSAEKGWLPLFDFAYQGFGNGLEEDAYGLRVFLKHNTELLIASSYSKNFGMYNERVGAFTLVAEDEETAARAHSQIKTIIRTLYSNPASHGANTIALVLKNDDLKAQWIAELDEMRGRIKAMRQKFVELLKAKGSTQDFDFIIEQNGMFSFSGLTPEQVDRLKNEFAIYAVRSGRINVAGITDDNIDYLCESIVKV

SEQ ID NO: 10530 - protein, 583 aa, Auricularia auricula-judae
MRLPVLLGALCAAGMASAALVEYDLVISQGNIKNDGQTKRSWLINGQSPGPAIVATKGDTVNVRVLNLGSENITIHWHGFFQPGPTVFPDSRSTLVCPLAPITFHLRVTQTGAYWYHSHHHMQMVDGLQGPVFLKPDAQTVSSLTTLGLPEADQKKALHAELHPRFLSVFDNQHKSGAGRLPGPRRDCVDIPPAVGKVTKRGCALPDNANLQPYGGKPSEVDPDLWFNCVPTSTPLEVFQVSASEKFVAFNIVNSGTTWELRVSIDSHSFWVFTADGAYISPVKVNVISIPVGERFQILVPLDQSPGDYTIRVAAKAMPQLLSGYAVLSYKKSLLNIKLGGVTSAPPAKHPFIDYGGNVISGSGGVLFNAMAIQPFPAQAPPSGPADVTIRISLQRSHALTWTMNGVPLPTLPEQFTPLLIDPKGISNLDPALYTSFKNGSIVDIILETTVLGKGSHPAHPIHKHNTKAFFLGTGTGRFPAATVWEAFQRNTTGLNLVNPPLRDDFNTPPTKENTNWAALRFQSVNPMVTIMHCHIDPHLAGGMSFIMWRASRRYSPFRLTTRTFTEPTHTHSLFLSNRTSSD

SEQ ID NO: 10531 - protein, 466 aa, Arthrobacter sp.
MNQEGKLQKGLKIRHLTMIAFGGSIGAGLFVGSGAIIQMTGPAAVFTALMAGILVILIMRMLGEMVVAKPSLGSFSDYAREALGNWAGFTVSWLYWYFWVIVIAVEAIAGAAILKDWLFPNVSLWVLNLILLIALTITNIFSVKAYGEFEYWFSLIKIVAITLFLTLGGAYIFGLFPGIPMHLSNLTAHGGFIPNGAGIVFIAVATIIFSFVGSEIVTIAAAESAESEKAVVRAVNSVIVRIMTFYVGSVFIIVAVVPWNDAKALTNPYVSALKLMGMPGADMIMNLVVVTAVLSCLNSGIYTASRMLFALGDKGDAPKWMMHVTKTGVPLKAILTCTIFGFISVIMAFVSPETVFQFLLNSSGAIALFVYLLIAVSQLKLRKTIERETPERLKLRMWAYPYLTIATIIAMLMIITTMAFNASTRSQFILSLLSSAIVVAIYFIKTNLSKKQSLDTSIVNPENIKS

SEQ ID NO: 10532 - protein, 334 aa, Colwellia psychrerythraea 34H
MKIKVGINGFGRIGRFVFRAAVERDDIEVVGINDLMDIEYMAYMLKYDSTHGRFKGTVDVVDGKLIVNGNPVRVTAERNPENLQWNDIDVDVVVEATGLFLTDETARKHITAGAKQVVLSAPSKDDTPMFVCGVNLNEYKGQEIVSNASCTTNCLAPIAKVLNDNWGIQDGLMTTVHATTATQKTVDSPSTKDWRGGRGAGQNIIPSTTGAAKAVGKVIPALNGKLTGMAFRVPTPDVSVVDLTVNLIKPATYAEICQAMSAAAEGELNGILGYTEDAVVSNDFIGETCTSVFDAKAGIALTDTFVKVVSWYDNEIGYSNKVLDLVAFISQYEK

SEQ ID NO: 10533 - protein, 413 aa, Silicibacter pomeroyi DSS-3
MLNAPDYSSHFEDALQDLRDTGNYRVFQEHNRLVGRFPLSQVMGEDGPRTITVWCSNDYLGMGQHPVVRGAMKSAIDTYGAGSGGTRNISGNHGPIVALEQELATLHGKEAGLVFGCGYLANLATLATLGRLLPDCVMISDELNHASMIQGVLASKAEKRIFRHNDVAHLEEILSELAADRCKVVAFESVYSMDGDIAPIAEIIRVSKKYGALTYIDEVHAVGMYGATGAGVAEREGLAGQIDIIQGTLAKAYGVIGGYVTANAEIIDAIRSHANGFIFTSAPPPTVVAGALASVRHLRDSTSERESLHRKAVLLRALLKDARIPFMDAPSHIVPVMVGDPFKCKQLSDLLLERHAIYVQPINHPTVPKGTERLRITASPLHSDGMIHGLVSALVDCWRDLQIGWATPLGSGR

SEQ ID NO: 10534 - protein, 228 aa, Ralstonia metallidurans CH34
MLEPSNDDGGVGVKDLIQGILKFQREEFPKRSALFKHLATQQNPKTLFIACSDSRVVPALLTQCEPGELFVIRNAGNIVPAYAVQPGGVSASVEYAVAGLKVRDIVICGHSDCGAMTAVATCQCLDHMPAVEEWLEHASGARRISLTRPHASDRARVDDMVRENVIEQLDHLRTHPSVAQALAEGRVDLHGWVYDIETGEIDALEGRTGKFVPLREQPDVTATLERVA

SEQ ID NO: 10535 - protein, 198 aa, Oryza sativa
  misc_feature (158)..(158): Xaa can be any naturally occurring amino acid
  misc_feature (176)..(176): Xaa can be any naturally occurring amino acid
  unsure (1)..(198): unsure at all Xaa locations
MDSEHWISRLAAAKRFYAAQLGHADRAGMEEVDMDEEVRPEFACPYCYEDHDVVSLCAHLEEEHPFEPHAAPCPICSDKIAKDMLNHITVQHGYLFKVLLGGGGHRSNNSSNTTNISADPLLSSFGLSFPTSDTEETSKPPISIPDDASVIKETPGSXPWDSSIDSSLTREEREQXRKQASVRATFVQDLLLTTLFGD

SEQ ID NO: 10536 - protein, 928 aa, Pectobacterium carotovorum subsp. carotovorum
MTKYSLRARMLILILAPTLMIGLLLSSFFVIHRYNQLQTQLADSGTRIIEPLATISAYAITHRQMDTIPTLINTLHRRHSAIIRTISVFDARNQLLATTNVRNNVTLQPLSSDALSYNKLHLHHTNDALILHMPIVNDSEFMPGGVQPGTATPLGYLVIELDTSTIRLQQYQEIFIAALLLLLSLGAAVIFAYRLMRDVTTPIRNMVDTVDRIRRGQLDSRVEGYMLGELDMLKNGINSMAMSLTAYHEEMQQNIDQATYDLRETLEQMEIQNVELDLAKKRAQEAARIKSEFLANMSHELRTPLNGVIGFTRQTLKTSLNTTQTDYLLTIERSANNLLNIINDVLDFSKLEAGKLVLEDIPFSLHSTLDDVVMLLAHTAHEKGLELTLSIQNDVPEQYVGDPLRIQQIITNLLGNAIKFTEQGNIDIRVEKRRQEHHQVQLEVQICDTGIGIAELQQSQLFQAFRQADTSISRRHGGTGLGLVITQRLVKEMGGDISFQSQLNKGSTFWFHITLPLNPHTVPIEPVYTMLQGKHLAYVEYHPIAAQATLDILSQTPLMVSYSPTFEQLPEGEFDILLLAIPAQYRNTLLDYTPRLRDICRRAPCVILALPSLAQMDAEQLKAFGVHACLSKPLAASRLLPLLQNSTLFQLSFLPSDTTSHQGTVRHPARLPLSVMAVDDNPANLKLIGTLLEEQVDTIILCESGTEAIAQAKMHQIDIILMDIQMPGMDGICASELIRQIPHHATTPIIAVTAQTMTGEREHLLSSGMDDYLAKPIDEQMLKSVLTRHARKDPLKRDRADMVGLLSEHDDSQLSLDWALAQQQAANKPELARDLLQMLLDFLPEVQRKIENVLNGQTDDDIIELVHKLHGSCSYSGVPRLKRICRYLEQQLRKGVHANDLEPEWLELLDEIDNVNNAAQPHINPRLP

SEQ ID NO: 10537 - protein, 233 aa, Oryza sativa (japonica cultivar-group)
MHIYKEQEAEPSTGLMMPEPAPVASPGSGGSGGSGSVGAEKIGSRGKIEIKRIENTTNRQVTFCKRRSGLLKKAYELSVLCDAEVALVVFSSRGRLYEYSNNSVKETIERYKKANSDTSNASTVAEINAQHYQQEAAKLKQQITNLQNSNRTLVGDNITTMNHRELKQLEGRLDKGLGKIRARKNELLCAEIEYMQRRETELQNDNMYLKSKVAESERGLQTVNMMGSASTSE

SEQ ID NO: 10538 - protein, 561 aa, Magnaporthe grisea 70-15
MFGGSSKADSPTLTSPTSSLPATATPAPGSKSPSPDASESTLSSSPTKAAEQATSREKRSGNGSPPDSAGAAEQKKRRSSGVSSKASSLLASAKNTLNFGQGSSRSNTDNGSSTQTALQKLGKQDPALVVPQGQQNNSAGESLPGPKSTFRVGVWEDRNKKCRRTMEDTHAFLYNFLHTPAATPASSSNATDGETKTTATPGDEIVESDNGYFAIFDGHAGTFAADWCGKKLHLILEETIRKKPNVPIPELLDETFTTVDAQLEKLPVKNSGCTAAIAVLRWEDRVPSSQSATGSQPVAAAKASDEGLKPEDGKSNDGASLRASDAAPPRPKPAVTKQRVLYTANVGDARIILCRSGKALRLSYDHKGSDENEGRRITNAGGLILNNRVNGVLAVTRALGDTYMKELVTGHPYTTETVIQPELDEFLIIACDGLWDVCDDQEAVDQVRNIEDPAAAAKLLVNHALARFSTDNLSCMIVRFDKQAVLDGHSRKDAATKGDPASKPSEADRNVQLATNAAGRSNDPIPSISEEPAAAAAAAAGDSSGGTKGQDDETSQPATSS

SEQ ID NO: 10539 - protein, 1462 aa, Synechocystis sp. PCC 6803
MVISATVISMKSPLRRLLLSPVLPILIGAGLSVMTVHTWLFLYNQVQERLKQVLTNRLTNIHEQIENQLNIHVRQLEQMAGRWERSPTGTEQTDWRLDARAQAEGFDGYQTIQWVDPKFVVRWVEPLPDDEHDIDYANQYPHQIQSLELAARQKNTILSGVVDLDQGEKGFLVYVPLFIGDRFDGFVVGVFQLDQFIGSVRPLSGNKPDQDSGLRSFGLRIFEGNQLIYNDVPDDWEQDIVVTQELAWANSLPQAEAMTSRWQLQLVPGPILLDQYGSSQWILFSGLLMAWAVAIAVYYLQKSSKHSEQLSESIKQQQKVEEFLKSTLQELAVQKTALDEAAIVAITDTEGVITYVNDKFVEVSGYSREELIGNTHRLVSSGYHSPEFFQQFWQTIRAGKVWHGQINNRAKAGNTYWVDSTVVPFLDDNGNPYQYLAIRFEITSSKQAEKSLRESEARFRMMADTSPIMLWVADQDKKMTFVNQSWLEFRGATLAEESGNGYLEGIHPDDKGHYLGVYSQAFGDRRRFELEYRYRRVDQQYRWIVNVGVPRYLEDGKFMGYVGSCLDITDRKQAQDILQKKLNQILLMRKISQEIRRSLQPTLIFQTAARQVGNVFAVSRCLIHNYSEATTLQVPVVAEYLGGQFTSLLAGEIAVEQAYDPTIIQGDRAMAVVDLDQDLNSTHTKAFYQRFQVKSFLAVRTSYQGKANGIIALHQCDRQRVWTADEIELLEAIAEQMGIALAQAALLEKERERRRELAQKNLELEKATWAAEAANRAKGEFLAMMSHEIRTPMNGVIGMTELLIMTDLNLQQLDYVQTIRQSGETLLTIINDILDFSKIEADKLVLETQAFELRPLIETVLEMFGPIARAKHLELTYGIDPQTPARILGDQVRLRQILSNLIGNALKFTEKGEVVLTVKGEPFDPAESYHTILNLPHPSHRICFNLRDTGIGIPLDRQDRLFKSFSQVDSSTTRKYGGTGLGLVISQRLTQMMGGVLTVTSEPGVGSNFRFCILTTAQAPALAEADSVQQMKGKQVLIVDDNETNRRILQDQCQAWGLVCHCFTSGESALDWFARCPDLDAAILDLQMPNMDGITLAHHLRQFAQGKDLPIILLSSGLVAGADELSVFQTVLNKPVRQSLIFDSLVNIFQGSIGLADYAPQFDQLDLPEFVPDGDGLPTEDNATSLQPALQILLAEDNLVNQKVAHQMLNNLGYPVAIANNGQEVIDALEKKFYDLVLMDMQMPVMDGITACRHIRQTLPLERQPRIVAMTANAMPGDRQECLDAGMDGYISKPISINQLRKVLQDTSALITSPQAREDIVTLGDKITVVEEQTMVKPTDVTESPLDPTAIAFLRDDLCGGDLTLFGEMVACYCQESQKLIEELVQGLEVDDFAVIRRTAHSLKSSSASLGAQQLSTFCQQLEKNAGSGNLGLGSPPQLVDRCRQLHIAVVEALAPFTIPSP

SEQ ID NO: 10540 - protein, 209 aa, Zea mays
MAARCSTAASVVRTGSRDLSPSFSFTAAALPSARLRPVGAWVRGGGYTCRLRAVCAMGSAPSSSQSPSPHTPSGQTQGKADYKSLSEEEWKKRLTEEQYYVTRQKGTERAFTGEYWNTKTPGIYQCVCCDTPLFQSSTKFDSGTGWPSYYKPIGENVKSKLDMSIIFMPRTEVLCATCDAHLGHVFDDGPPPTGKRYCINSASLKLKPQ

SEQ ID NO: 10541 - protein, 481 aa, Ralstonia metallidurans CH34
MNKLTTAFGAPVVDNQNVQTAGPRGPALLQDVWFLEKLAHFDREVIPERRMHAKGAGAYGTFTVTHDITKYTRANLFSQVGKKTDLFLRFSSVAGERGAADAERDIRGFAIKFYTEEGNWDLVGNNTPVFFLRDPLKFPDLNHAVKRDPRTGMRSAESNWDFWTGLPEALHQVTIVMSDRGIPRTWRHMHGFGSHTYSFINANMERFWVKFHFVTQQGIQNLTDEEAAEITGQDREYHQRDLFESIERGDFPRWKLCVQIMPEAEASKVPYHPFDLTKIWPKKDYPLIEVGVLELNRNPDNFFAEVEQASFAPSTIVPGVGFSPDKMLQGRLFSYGDAARYRVGVNHHQIPVNSPKAAKYVNSYHRDGTMRVDGNRGAAIGYEPNTKGEWAEQPDFREPPLTLEGTADHWNHREDGDYFSQVGALFRLMSPTQQQALFDNTARSIKGVSKHIQQTHIKHCTAADPAYGAGVAAAIEMIEAK

SEQ ID NO: 10542 - protein, 231 aa, Colwellia psychrerythraea 34H
MNELTEFNARNDLDNELASTVSDILAKAIKEKGKASIAVSGGSTPKGFFSVLSQSDIDWSKVTITLADERWVPIDSEASNTRLVHENLLQNKAEKAKFFHLKQGDELTDETLEDLNVAASKILLPLDVLILGMGEDGHTASLFPCSDQITSGLDETNDAALLKVQPKTAPHQRISFTFASLMTSKNIFLHSCGEGKKTVLTQVLNGDDPFEMPIRAFLQHPSLNTQIFWAP

SEQ ID NO: 10543 - protein, 290 aa, Zea mays
MASITSELLFFLPFILLALLALYTTTVAKCHGTHPWRRQKKKRPNLPPGARGWPLVGETFGYLRAHPATSVGRFMERHVARYGKIYRSSLFGERTVVSADAGLNRYILQNEGRLFECSYPRSIGGILGKWSMLVLVGDAHREMRAISLNFLSSVRLRAVLLPEVERHTLLVLRSWPPSDGTFSAQHEAKKNIMSMDPGEEETERLRLEYITFMKGVVSAPLNFPGTAYWKALKSSARGTRIFVASKNRRQPTFSSDDRCSAQQPHYGHASIYISEYMMHTSGELAKGTSF

SEQ ID NO: 10544 - protein, 498 aa, Vibrio sp. Ex25
LHIDLSAAPQQLDDVVAKLPEGWVLSAGVVNGRNVWRSDLSAQLERLQPVKEKLGDNLWVASSCSLLHSPVDLELETELSEEVKSWFAFAKQKVTEVALLGRALDGDQDAILACDTYSQPIKARKTATHVNKPQVQARLNSITASLAERSAPYAERAAHQSEVLGLPLLPTTTIGSFPQTGEIRVQRSAYRTGQLSESDYIQALKGHIADAVKRQEALDLDVLVHGEAERNDMVEYFAENLAGFQTTKFGWVQSYGSRCVKPAIVVADIEREKPITVEWSTYAQSLTSKQMKGMLTGPVTILCWTFPREDITRQEIAQQLALALRDEVSDLQDAGINIIQIDEPAIREGLPLKKRDHKAYLEWAVDAFKISAAGAKPETQIHTHMCYSEFNEIIDSVAALDADVITIETSRSNMELLKAFEEFNYPNEIGPGVYDIHSPNIPAEEWIEGLIKKAAEKIPVQRLWVNPDCGLKTRNWAETEAALANLVSATKKLRAELA

SEQ ID NO: 10545 - protein, 448 aa, Solanum tuberosum
MGKEKIHISIVVIGHVDSGKSTTTGHLIYKLGGIDKRVIERFEKEAAEMNKRSFKYAWVLDKLKAERERGITIDIALWKFETTKYYCTVIDAPGHRDFIKNMITGTSQADCAVLIIDSTTGGFEAGISKDGQTREHALLAFTLGVKQMICCCNKMDATTPKYSKARYDEIVKEVSSYLKKVGYNPDKIPFVPISGFEGDNMIERSTNLDWYKGPTLLDALDQINEPKRPTDKPLRLPLQDVYKIGGIGTVPVGRVETGVIKPGMVVTFGPTGLTTEVKSVEMHHEALLEALPGDNVGFNVKNVAVKDLKRGFVASNSKDDPAKGAASFTAQVIIMNHPGQIGNGYAPVLDCHTSHIAVKFAEILTKIDRRSGKELEKEPKFLKNGDAGMVKMIPTKPMVVETFAEYPPLGRFAVRDMRQTVAVGVVKNVDKKDPTGAKVTKAAQKKGK

SEQ ID NO: 10546 - protein, 542 aa, Colwellia psychrerythraea 34H
MTTRYIFVTGGVVSSLGKGIAAASLAAILEARGLKVTMLKLDPYINVDPGTMSPIQHGEVFVTEDGAETDLDLGHYERFIRTKMTKRNNFTSGRIYQDVLARERKGEFLGATIQVIPHITNDIKRRVIEGAEGYDIAMVEIGGTVGDMESQPFLEAIRQLALEVGRDRAMFMHLTLVPYLAAAGEIKTKPTQHSVKDLRSIGIFPDILVCRSDRAIPNAERAKISLFTNVEEKAVVSMRDVDSIYKIPALLKAQGTDEIVVKRFGLDVPEADLTEWEEVLYHEANPIGEVTIGMVGKYTELPDAYKSVNEALKHAGLKNQVTVNIKYIDSQDVEVKGVEILANLDAILVPGGFGERGVEGKILTAQYARENKVPYLGICLGMQVALIEFARNVAGLTDAHSTEFNSETPHPVVGLISEWLDEEGQVEYRNEQSDLGGTMRLGSQLCHLVKGTKACDVYGSETINERHRHRFEVNNNYREQLSKAGLIFSGLSSDKSLVEVIEIADHPWFIAGQFHPEFNSTPRDGHPLFESFVAASFKLQKS

SEQ ID NO: 10547 - protein, 437 aa, Nostoc punctiforme PCC 73102
MKTNQIPPGSFGLPVLGETLSFVFDRDFAKKRYHQYGPIFKTHLLGRPTVVMAGPEALEFVLSSHIENFSWREGWPDNFKTLLGESLFLQDGEEHRRNRRLMMPALHGPALASYFSTMEDITRSYLQKWEKKQEFTWFQEFKQLTFDIASQLFLGTRPGPECVRLSQLFTTLTNGLLAINPLPLPFTTFGKAIAARNEILEHLTQVVRERQQNPTQDTISLLIKAKDEDGNSLSEKEIIAQAVLLLFAGHETTTSMLTWLCTELACHPEVLEKARVEQLQLASQGDLDLEQLGKMPYLEQVLWEVERLHQPVGGGFRGVIKDFELNGYHVPTGWQLYYSIGVTHQIEEIYSEPELFDPDRFSPQRQEHKKYPFSLVGFGGGPRICIGIAFAKMEMKIVAAHLLRSYHWEILPNQSLEVVAVPTNRPKDGLRVRFQPR

SEQ ID NO: 10548 - protein, 223 aa, Arabidopsis thaliana
  misc_feature (178)..(178): Xaa can be any naturally occurring amino acid
  misc_feature (186)..(186): Xaa can be any naturally occurring amino acid
  misc_feature (203)..(203): Xaa can be any naturally occurring amino acid
  misc_feature (209)..(209): Xaa can be any naturally occurring amino acid
  misc_feature (211)..(211): Xaa can be any naturally occurring amino acid
  misc_feature (217)..(219): Xaa can be any naturally occurring amino acid
  unsure (1)..(223): unsure at all Xaa locations
MQLKVPEHQVAGHIAKDGKPGPLVDDKGRFFKPLQGDSRGEIEVKFYESFSSNTEVPEHIHRYFPVYHGTQAVEGSDGAAMMVLENLLAEYTKPSVMDVKMGSRTWYPDASEEYIQKCWKKDTGTTTRSSGFRISGFEVYDHKESSFWKPERKLLRGLDVDGARLTLRKFVSSNSLSXDTGSKPDXSAFASSVYGGSHGILNXVLGLKXWXENQTVXXXNSCP

SEQ ID NO: 10549 - protein, 402 aa, Triticum aestivum
MPALGTLSAGGAAAGVAGLLRLRRGPALASPLPAAARAGAVHDGAQLVWGRQLRPALVLPAGLLPLQASKRLTLRPPAASAEPAGEAKSPGLLEKYPAITTGFFFFMWYFLNVIFNILNKKIYNYFPYPYFVSVIHLLVGVVYCLLSWAVGLPKRAPINATLLKLLFPVALCHALGHVTSNVSFATVAVSFAHTIKALEPFFNAAATQFVLGQTVPLSLWLSLAPVVLGVSMASLTELSFSWKGFINAMISNISFTYRSIYSKKAMTDMDSTNVYAYISIIALVVCIPPALIIEGPQLMQYGLNDAIAKVGMTKFVSDLFLVGLFYHLYNQIATNTLERVAPLTHAVGNVLKRVFVIGFSIIIFGNKITTQTGIGTCVAIAGVALYSYIKAKIEEEKRAKAA

SEQ ID NO: 10550 - protein, 507 aa, Schizosaccharomyces pombe
MSRFAPKFTARREKVSDQKEVVHEEKNQPLTGNEVETSAQLSRDTANADISSPVVQTVVHKEATENPTASSYRKDDSVKQNEKLLHSNPTFKISKPTVLEQPLNAIEHLSPETDLSSSAEQQFMKELDLFFDENIPLSQLSAVSDGKADSPATKKSRRSYRESSLKRKSQLILENVGTDEKIINISETKMSALCDDPGIGRKSQRFIELEKMLFEEKRAKRIKKQGASTASSSREASLDSTIKQPLSASLLESSEPKEKEEIVGSLEEEGTDESASLEDSLSHPTKSILDQLADKMEVDGLNNNSNYSATPRTRVVNGQIVLDETSLEVDRHERDFVPAEEREYVEENSLSRRVTSATWGNRQKPEKWNAMDTEKFYKALSQWGTDFALIANMFPTRNRRQIKLKFKQEERRNPARVNQALKIKKPIDMEEYSKVSGKVFRPVEEMEKELQKIRENFEEERRRAIEVAEQRQLIVNHELEQEKNAPSPTDDKSYVFEDGVEVVGQVV

SEQ ID NO: 10551 - protein, 686 aa, Bacillus circulans
APDTSVSNKQNFSTDVIYQIFTDRFSDGNPANNPTGAAFDGTCTNLRLYCGGDWQGIINKINDGYLTGMGVTAIWISQPVENIYSIINYSGVNNTAYHGYWARDFKKTNPAYGTIADFQNLIAAAHAKNIKVIIDFAPNHTSPASSDQPSFAENGRLYDNGTLLGGYTNDTQNLFHHNGGTDFSTTENGIYKNLGDLADLNHNNSTVDVYLKDAIKMWLDLGIDGIRMDAVKHMPFGWQKSFMAAVNNYKPVFTFGEWFLGVNEVSPENHKFANESGMSLLDFRFAQKVRQVFRDNTDNMYGLKAMLEGSAADYAQVDDQVTFIDNHDMERFHASNANRRKLEQALAFTLTSRGVPAIYYGTEQYMSGGTDPDNRARIPSFSTSTTAYQVIQKLAPLRKCNPAIAYGSTQERWINNDVLIYERKFGSNVAVVAVNRNLNAPASISGLVTSLPQGSYNDVLGGLLNGNTLSVGSGGAASNFTLAAGGTAVWQYTAATATPTIGHVGPMMAKPGVTITIDGRGFGSSKGTVYFGTTAVSGADITSWEDTQIKVKIPAVAGGNYNIKVANAAGTASNVYDNFEVLSGDQVSVRFVVNNATTALGQNVYLTGSVSELGNWDPAKAIGPMYNQVVYQYPNWYYDVSVPAGKTIEFKFLKKQGSTVTWEGGSNHTFTAPSSGTATINVNWQP

SEQ ID NO: 10552 - protein, 399 aa, Azoarcus sp. EbN1
MTRQVQDAYIVAATRTPVGRRNGMFAHVRPDDLLAHVLSAVVGKVRGLDAHEIADVIVGCAMPEAEQGMNVARIGLLLAGLPDNVPGITINRFCASGLQAVADAAARIRLGEADVIIAAGTESMSVMPQIMGNKVSLNPAIFANRDNVGIAFGMGLTAEKVAQQWKVSREDQDLFALHSNQRASAAIAGGHFRAEITPYTVRTHLPGDGGAVRVVERVCDTDEGPRPDASLDALAKLKPVFAARGSVTAGNSSQMSDGAGAVLLMSDAALKRYGATPIARFVSYSVAGVPPQIMGIGPVEAIPRALAAGGVSLADVGWIELNEAFAAQSLAVIRELGLDPARVNPFGGAIALGHPLGATGAIRTATVMSAMQRDPKLRYAMVTMCVGTGMGAAGVFERV

SEQ ID NO: 10553 - protein, 166 aa, Mycoplasma pulmonis
MQKEIFIAGGCFWGVERYFQKVKGVLDTKACYINGGFEGVKYKEVCEGSSHVEAVRVIYDNSKITEEDLWKLYLRIINPYSLNKQGNDRGVQYRIGLYSYDKDLLKKFSDLNEAFMKSEGKKNYIEIQKVEDVTLAEEYHQNYLLKNVNGYCHINLDDIPEEYQKQ

SEQ ID NO: 10554 - protein, 413 aa, Oryza sativa
MGNCGTREENAVVAAHAQVQQLHLLQHPVKNAVAERKHTRISSDMSDPSTPRKIEDAKNISIYNDVIDFTLFELETITKSFRADYVLGEGGFGTVYKGYIDENVRVGLKSLPVAVKVLNKDGHQGHREWLTEVRFLGQLRHPNLVKLIGYCCEDDHRLLVYEFMFRGSLENHLFRRTATPLSWATRMSIALGAAKGLACLHNAERPIIYRDFKTSNILLDSDYTAKLSDFGLAKAGPEGDQTHVSTRVMGTYGYAAPEYVMTGHLTARSDVYSFGVVLLELLTGRKSIDKSRPSREHSLVDWALPKLNDKRRLLQIIDPKLEGQYSVRAAHKACSLAYYCLSQNPKARPLMSDVVETLEPLQGSGGSDGAVQSVLGSGLPSYRVNRRLTTNSVHCRAIPNPKCSPAVPACRVR

SEQ ID NO: 10555 - protein, 419 aa, Thermococcus waiotapuensis
MVELDPFEMAVQQLERAAQFMDISEEALEWLKRPMRIVEVSVPVEMDDGSVKVFTGFRVQHNWARGPTKGGIRWHPAETLSTVKALATWMTWKVAVVDLPYGGGKGGIIVDPKKLSEREQERLARSYIRAVYDVIGPWSDIPAPDVYTNPKIMGWMMDEYETIMRRTGPAFGVITGKPLSIGGSLGRGTATAQGAIFTIREAAKALGIDLKGKTIAVQGYGNAGYYTAKLAKEQLGMKVVAVSDSQGGIYNPNGLDPDEVLKWKNETGSVKDFPGATNISNEELLELEVEVLAPAAIEGVITEKNADGVKAKIVAEVANGPVTPEADEILREKGILQIPDFLCNAGGATVSYFEWVQNINGYYWTEEEVREKLDKKMTKAFWDVYNTAKEKNIHMRDGAYVVAVSKVYQAMKDRGWVKH

SEQ ID NO: 10556 - protein, 457 aa, Debaryomyces hansenii CBS767
YKAYVGNMTGLFSFDEEKLAKDFNDTIIEDELDPNELDAKPFDGNILQVHTETTFPRRKSSVYRRLSIKSAASVTSQDFIIPANYQYSDEGNPESNVSKRRKVLSDFTPIKVLGKGAYGKVHLVQDRHNKRLFAQKQLRKPTINIHEEQGDIHTKHVKRTISERKILTNITHHPNIVKLFYALQDSDKFYLILEYIPGGELFHHLTSNNSLGNVFKEEDVAFYAAQMALGLKHLHELGIVYRDLKPENCLLNSAGHLVLTDFGLSKSIGEDPENSCKSIIGTPEYMAPEILKGDEYDYLVDWWSLGCVIYDMMTGKPPFTGNSHKVIQDKIIKNKLKMPFYFSMDAKDLLNKLLNKNPAKRFPVDEKWSIFESHRFFRKLNWKSLKAQDDSCNPPIIPVITDPILAENFSEEFTSMAISDFGGDQGINIPHNSDYNINYSFKGFSYTASNSFVDRFC

SEQ ID NO: 10557 - protein, 686 aa, Bacillus circulans
APDTSVSNKQNFSTDVIYQIFTDRFSDGNPANNPTGAAFDGTCTNLRLYCGGDWQGIINKINDGYLTGMGVTAIWISQPVENIYSIINYSGVNNTAYHGYWARDFKKTNPAYGTIADFQNLIAAAHAKNIKVIIDFAPNHTSPASSDQPSFAENGRLYDNGTLLGGYTNDTQNLFHHNGGTDFSTTENGIYKNLLDLADLNHNNSTVDVYLKDAIKMWLDLGIDGIRMDAVKHMPFGWQKSFMAAVNNYKPVFTFGEWFLGVNEVSPENHKFANESGMSLLDFRFAQKVRQVFRDNTDNMYGLKAMLEGSAADYAQVDDQVTFIDNHDMERFHASNANRRKLEQALAFTLTSRGVPAIYYGTEQYMSGGTDPDNRARIPSFSTSTTAYQVIQKLAPLRKCNPAIAYGSTQERWINNDVLIYERKFGSNVAVVAVNRNLNAPASISGLVTSLPQGSYNDVLGGLLNGNTLSVGSGGAASNFTLAAGGTAVWQYTAATATPTIGHVGPMMAKPGVTITIDGRGFGSSKGTVYFGTTAVSGADITSWEDTQIKVKIPAVAGGNYNIKVANAAGTASNVYDNFEVLSGDQVSVRFVVNNATTALGQNVYLTGSVSELGNWDPAKAIGPMYNQVVYQYPNWYYDVSVPAGKTIEFKFLKKQGSTVTWEGGSNHTFTAPSSGTATINVNWQP

SEQ ID NO: 10558 - protein, 204 aa, Triticum aestivum
  misc_feature (183)..(183): Xaa can be any naturally occurring amino acid
  unsure (1)..(204): unsure at all Xaa locations
MADPAEETVAAPPPTPAAPAEGAPPLSAEPPASTDASPEKAAPPAPAPDTTVRSRGFRLLGEDTSVHKVLGGGKTADVLLWKDKKTTAVVIGGTTVIWVLFEVLDYHLLTLLSHVMIGVLAILFVWSKAMTFIKKSPPDIPVVEIPEDLAVNVSRALRSDVNRSLHLLREIAMGHDLKKFLGXIAGLWGLSKVGSCCDFLTLKY

SEQ ID NO: 10559 - protein, 533 aa, Nostoc punctiforme PCC 73102
MQRQEKISQVIVTAGQMRDIEDRIFAAGMPVVALMEKVAGLVARRIQEIPQIPCKKAGYVASNSLLKKGLPQAVGSRVGILVGPGHNGGDALVVARELHFRGYEVWIYSPFSKFKELTSQHLQYAQSLGIPIYQTIEQLPDSDLLVDGLFGFGLEKNLTDPIASAINQLNELSVPIYSIDLPSGLHTDTGVVLGTAIRATHTFCLGLWKLAFFQDPALEYVGKAELIDFDIPLADVEAVLKDAPSIKRITPTTALATLPLPRPPVTHKYKEGHLLLICGSRRYAGGAILTGLGARASGVGMLSIAVPESLKSLLVSHLPEALIIGCPETESGAIAQLQLPEKTDLTSFNAIACGPGLTRDATPIVQEVIESERPLILDADGLNILAQMGAIATLKKRLAVTVLTPHAGEFQRLFPDIADAKHDRVKAAQEAALQSGAVVLLKGARTAIANPQGAIWMITESTPALARGGSGDVLTGLLGGLLAQAATKQISVEDIVATAAWWHSQAGILAAQERTELGVDAFTLTQYLLKVLS

SEQ ID NO: 10560 - protein, 686 aa, Bacillus circulans
APDTSVSNKQNFSTDVIYQIFTDRFSDGNPANNPTGAAFDGTCTNLRLYCGGDWQGIINKINDGYLTGMGVTAIWISQPVENIYSIINYSGVNNTAYHGYWARDFKKTNPAYGTIADFQNLIAAAHAKNIKVIIDFAPNHTSPASSDQPSFAENGRLYDNGTLLGGYTNDTQNLFHHNGGTDFSTTENGIYKNLWDLADLNHNNSTVDVYLKDAIKMWLDLGIDGIRMDAVKHMPFGWQKSFMAAVNNYKPVFTFGEWFLGVNEVSPENHKFANESGMSLLDFRFAQKVRQVFRDNTDNMYGLKAMLEGSAADYAQVDDQVTFIDNHDMERFHASNANRRKLEQALAFTLTSRGVPAIYYGTEQYMSGGTDPDNRARIPSFSTSTTAYQVIQKLAPLRKCNPAIAYGSTQERWINNDVLIYERKFGSNVAVVAVNRNLNAPASISGLVTSLPQGSYNDVLGGLLNGNTLSVGSGGAASNFTLAAGGTAVWQYTAATATPTIGHVGPMMAKPGVTITIDGRGFGSSKGTVYFGTTAVSGADITSWEDTQIKVKIPAVAGGNYNIKVANAAGTASNVYDNFEVLSGDQVSVRFVVNNATTALGQNVYLTGSVSELGNWDPAKAIGPMYNQVVYQYPNWYYDVSVPAGKTIEFKFLKKQGSTVTWEGGSNHTFTAPSSGTATINVNWQP

SEQ ID NO: 10561 - protein, 73 aa, SINNINGIA ARANEOSA
ISGTNGEVMPGQWEFQVGPSVGIEAGDHIWCARYLLERITEQAGVVLSLDPKPIEGDWNGAGCHTNYSTKSMK

SEQ ID NO: 10562 - protein, 466 aa, Zea mays
  misc_feature (278)..(278): Xaa can be any naturally occurring amino acid
  unsure (1)..(466): unsure at all Xaa locations
SPPPPPVLPKVTRRADPSSDSRKESNDVEPVIPRASSTMEIASDSAPISTSKSGRRLEAAPDSKKESADTAPAVPNPRANARMEMASDSAPALLKANKKLDSGTDSKKKSADAVPVILISDSRREPSAGRVSPFRIQSRYAELRKLAHAKIDRGSKTTGTDDFNCQIFLPRKNGVFQTISSEETRKDVKCGPVDRTEFSNSSEPNASVRSENYVSRMRKPRDNCYIEVSRKGRARSSVCNWEGRDQSPSHEEPMTASSSLAPTGRPNSSIYMKPFLFXQRGSSQASETPIIANDEDVISLFMEQHELFLSSTKSRLTKLQIIHQMWERNDIRDVLSAMERMGDHAVCADMASVLMEKSDVITLDLCTSILPAATDLLESKIDRHLGVALELLVKLVRTFGPMIHSTVSSGPCVGVDLEAEQRRERCNLCFIELENAKNKLPSLTRRKGAVANAAQELALVFQEIMS

SEQ ID NO: 10563 - protein, 630 aa, Glycine max
MVPENLKKQLALAVRSIHWSYAIFWTDSTTQPGVLSWGEGYYNGDIKTRKTSQGVELNSDQIGLQRSEQLRELFKSLKTVEVTPQTKRPSAAALSPEDLTDAEWYYLVCMSFIFNIGQGLPGRTLAKGQPIWLNNAHSSDCKIFSRSLLAKSASIETVVCFPFREGVIELGTTEQVPEDLSVIELIKTSFLNSLHANVPNKSVATLKSRNQEGLSYAAFDHNDYNVKSIPEVGYEIANTTSPDGSSNAFQANQPLDETFMIESITNGTSQVQNWQVIDDELSNCVHNSMNSSDCISQTFACPENIASAPKSNNPSDPCARNFQKCNNPKMTLVDPRSDDLHYQRVLSTLIKSSDQLLMGMHLQKFPQESSFVSWRKEQPMDCKWPRAGTSQKLLKKVLFEVPQMHLDGLHESQEENDYKEGMRVEADENGMNHVMSERRRRAKLNERFLTLRSMVPSISKDDKVSILDDAIDYLKKLERRVKELEAHRVVTDIETGTRRSPQDTVERTSDHYFRKNNNGKKPGMKKRKACGVDETEKEINSDALKGSYANDVTVSTSDNEIVIELKCPSKAGRLLEIMEAINSFNIDFSSVQSTEADGNLYLTIKSVLTGPSVATTKRIKQALQKLASKC

SEQ ID NO: 10564 - protein, 169 aa, Streptococcus pyogenes SSI-1
MERAIFAGGCFWCMVQPFEEQAGILSVRSGYTGGHLPNPSYEQVCAKTTGHTEAVEIIFDPEEISYKELVELYWVQTDPTDAFGQFEDRGDNYRPVIYYTTERQKEIAEQSKANLQASGRFDQPIVTTIEPAEPFYLAEDYHQGFYKKNPKRYAQSSAIRHQFLEENWS

SEQ ID NO: 10565 - protein, 143 aa, Triticum aestivum
  misc_feature (41)..(41): Xaa can be any naturally occurring amino acid
  unsure (1)..(143): unsure at all Xaa locations
RDILWKTTEKVGKGCFPGYGSMEFFGNTRSPINRSQREFAXLKYLPEDPLFQLVSKLYEVVPPILTELGKVKNPWPNVDAHSGVLLNHFGLTEARYYTVLFGVSRSIGIGSQLIWDRALGLPLERPKSVTMEWLENHCKKVAA

SEQ ID NO: 10566 - protein, 247 aa, Magnaporthe grisea 70-15
MSSTDATKPVEAGKPDETKPVTSDAVFSMFGGGAKKEKKEDEDRGDVSGSAKAQREAAAAAAAAAGDDDDQAPESEDVHFEPVIRLTEKVEVKTNEESEEQLFKMRAKLFKFVKDTSEWKERGTGDVRLLKHRENGKTRLVMRRDKTLKVCANHYIIPEMKLSPNVGSDRSWVWNAAADVSEGEPEGVTLAIRFANSENANSFKDAFLQAQKDNAALFGKSEAETAAPAAEEKKEEAKTEDKPAEAS

SEQ ID NO: 10567 - protein, 467 aa, Synechocystis sp. PCC 6803; identical to SEQ ID NO: 1310

SEQ ID NO: 10568 - protein, 289 aa, Brassica napus
MDYDASRIGEIVEDEEQIDLPPGFRFHPTDEELITHYLKQKVFNTFFSATAIGEVDLNKIEPWELPRKAKIGEKEWYFFCVRDRKYPTGLRTNRATEAGYWKATGKDKEIFKGKSLVGMKKTLVFYKGRAPKGVRTNWVMHEYRLEGIYSIQHLSQTAKNDWVICRVFHKRADGTKVDMSHLMLLDSHVNRIEPVGLPSLMDSSQRDSFPGSSTHVTCFSDQETEDKRLIHLESKDGSGPLFYPDPLFLTDNDSLMKLLLNSHETQFPGTGTDPSALAGMGESGCFWNF

SEQ ID NO: 10569 - protein, 807 aa, Arabidopsis thaliana
MGGCTSKPSTSSGRPNPFAPGNDYPQIDDFAPDHPGKSPIPTPSAAKASPFFPFYTPSPARHRRNKSRDVGGGGESKSLTSTPLRQLRRAFHPPSPAKHIRAALRRRKGKKEAALSGVTQLTTEVPQREEEEEVGLDKRFGFSKEFHSRVELGEEIGRGHFGYTCSAKFKKGELKGQVVAVKIIPKSKMTTAIAIEDVRREVKILQALSGHKNLVQFYDAFEDNANVYIAMELCEGGELLDRILARGGKYSENDAKPVIIQILNVVAFCHFQGVVHRDLKPENFLYTSKEENSQLKAIDFGLSDFVRPDERLNDIVGSAYYVAPEVLHRSYTTEADVWSIGVIAYILLCGSRPFWARTESGIFRAVLKADPSFDEPPWPFLSSDAKDFVKRLLFKDPRRRMSASQALMHPWIRAYNTDMNIPFDILIFRQMKAYLRSSSLRKAALRALSKTLIKDEILYLKTQFSLLAPNKDGLITMDTIRMALASNATEAMKESRIPEFLALLNGLQYRGMDFEEFCAAAINVHQHESLDCWEQSIRHAYELFDKNGNRAIVIEELASELGVGPSIPYWVSQGNKWCEFCKIWIQNNPTSIRNHDLGKRHRECVDKKLTDMRERSAAKDKELKKNEKLLQQIEAKATRSYQKDIATAQQVAKANGAPEDGTSDWMLDSASGYYYNQTNGLHYDSQSGFYYSDSIGHWVTQDEAYAAVKTSSGTKVPLVKKPVSSSGAGPSVGKPPGRLVTASLNPKRAVKGAASSVDLGNNKRKRQDEKPKKVSAEEKAALKAREAARKRVEDREKPLLGLYNRPF

SEQ ID NO: 10570 - protein, 510 aa, Oryza sativa (japonica cultivar-group); identical to SEQ ID NO: 791

SEQ ID NO: 10571 - protein, 156 aa, Triticum aestivum
MAMPPAEKVIMVDANPSKNGHGDKLDDLPVADETSHQIGVDPWYQVAFVLTTGVNSAYVLGYSGSLMVPLGWVGGTVGLLLAAAVSMYANALLGRLHLLGGKRHIRYRDLAGHIYGPNMYKITWAMQYVNLFMINTGFIIIAGQALKALYLLVSAD

SEQ ID NO: 10572 - protein, 475 aa, Methanosarcina mazei Go1
MEGERFLNHRTPEELEKWKNTGKTEGSEDSMKELETEFNSFEQEVGLLDTVGPKAREIIGQDCNMVSACVSRPYPLVVDRAKGSVVRDIDGKEYIDFVAGIAVMNAGYSNPEVQAAISAQLEKMVHCGYGDFFAEPPLKLAKKLRDLSGYSKVFYCNSGAESIEAAMKLSLWKTKRQNFISFYNAFHGRTLGALSLTCSKVRHKEHFPTIRTVHTDYAYCYRCPLNLDYPSCGIECAKQIENLVFRRELSPEDTAAVFVEPIQGEGGYIVPPVEFHKEVRRICTDNDVLLVADEVQTGCFRTGPFLAMENFEVRADITCLAKALGSGLPIGAMLADNELMDWPPGVHSNTFGGNLLSSAAALASLEFLEKENTENHVREMGAHIRHRLRELQENFPCIGDVRGLGLMTGVEIVKPDKSIDPVRRDKIIREAFKDGVLLLPCGDSVIRFSPPLVMTDEEADLGLDKFEKALKKAVR

SEQ ID NO: 10573 - protein, 509 aa, Cucumis sativus
MAKKDDSATRPPLQRPTITLPPRPSMEAFFTGVPTGVSPGPMTLLSSYLADFADGAVDSPSFSQLLAGAMASPMAMGFFGTGSTPNYYAKDGPASELEFGMKQSKPVNLVVARSPLFSVPPGLSPSGLLNSPGFYPPQSPFGMSHQQALAQVTAQAALANSHMHMQQAEYQHSSVPAPTEPLVRDPSFSLDDASQLAIIPSTSDTKSLIAESTEVSHSDRKYQPPPPPHGSDKPADDGYNWRKYGQKLVKGSEFPRSYYKCTHLNCPRKKKIEGLPDGEITEIIYKGQHNHEPPPANKRARDNIEPAGCTNSLIKPECGLQNQAGILNKSSENVQLGSSDSEGRADTEITDDRDEDEPNPKRQNIDAGTSGVALSHKTLTEPKIIVQTRSEVDLLDDGYRWRKYGQKVVKGNPNPRSYYKCTSAGCNVRKHVERSSTDSKAVVTTYEGKHNHDVPAARNSSHHTVNNTVHHIKPLKVVAQKHPLLKEMEFGTNDQRPAVLQLKEEQITV

SEQ ID NO: 10574 - protein, 279 aa, Bacillus thuringiensis serovar konkukian str. 97-27
MKNLQSKAVLNNGVEMPWFGLGVFKVEEGPELVEAIKTAIKAGYRSIDTAAIYGNEKAVGEGIRAGIEATGISREDLFITSKVWNADQGYETTIAAYEESLKKLGLDYLDLYLVHWPSEGKYKDTWRALETLYKEKRVRAIGVSNFQIHHLQDVMKDAEIKPMINQVEYHPRLTQKELQAFCKEQGIQMEAWSPLMQGQLLDNETLQEIAEKHGKTTAQVILRWDLQNGVITIPKSTKEHRIIANADVFNFELTKEDMEKIDALNQNHRVGPDPDNFDF

SEQ ID NO: 10575 - protein, 394 aa, Cryptococcus neoformans var. neoformans B-3501A
MEPKPLTAYQQTYHWRNKNCAPFAYDWIKQSLPGLKVDDGQQSAEISSVTSVSGDCDLGQRKGKLLTIYDLEVQASWIGKTKDGNEVKGTLKIPEVSHEAIDGVSDYVYEFSITGGGSSASEELLFYIRKSFPPLLSDKFNSFRPALLAAHGSATADAASAPDSGASTPAAYTPAPPTKGADEPINEEQKKEKKSVGATVTVEVKADLQASADDLWGLLTDENKIPMWSRSAAKLSLKAGSPYELFGGNVRGKVITADPPKKLVQTWQVKSPSWPSEHYGTMTLSLSQGSDTTAATFTLDGVPAGTQADVEKALNSFYIQGLKQMGLVSSSISTSFITPIRPKQKKLRRKRPSSSWFNSPIIGGAAVVGLSALLIGVVYTSFPSSTFLSGMRQQ

SEQ ID NO: 10576 - protein, 318 aa, Triticum aestivum
  misc_feature (127)..(127): Xaa can be any naturally occurring amino acid
  misc_feature (187)..(187): Xaa can be any naturally occurring amino acid
  unsure (1)..(318): unsure at all Xaa locations
MEERYEALKELGTGNFGVARLVRDKRTKELVAVKYIERGKKIDENVQREIINHRSLRHPNIIRFKEVCVTPTHLAIVMEYAAGGELFERICTAWRFSEDEARYFFQQLLSGVSYCHSMEIRFRNLGXGTTVQNSSWCTPAYIAPEVLSRKEYDGKVADVWSCGVTLYVMLIGSYPFEDPEDPRNFRXKTISRILGVQYSIPDYVRVSSDCRRLLSQIFTADPSKRITIAEIKKLPWYLKSLPKEIAERDRANFKEPETETGTAAAAAQPVEEIMRIIQEAKAPGEMSKSSADAALLAELAELQSDEEEEGPGAEGETY

SEQ ID NO: 10577 - protein, 311 aa, Clostridium perfringens
ARVPVVALIGLTLLPVSIDWAAGGAGSANYASLENLAVAMFVLIITLLLNNYGKGMISSASILIGIVVGYIVCIPLGLVDFTSVKEASWLSFPKILEFGVTFDAKAVMAFIPAYFVATIGTVGMLKSYWRDILLLIFGDKRVAAGVLSDGVGSALGGLVGSCPNTSFSQNIGIISLTKVASRHVAVMAGILLVILGFLPKVAAIITGIPNPVLGGVGIMMFGTVAAAGIRTLSNIKLTERNLLIIAISMGLGLGVTFRPDVIHNLPEAIRMIFSSGISTGTIAALILNAVLKESPTSMEFENMYDEETKAS

SEQ ID NO: 10578 - protein, 309 aa, Streptococcus pyogenes serotype M1
MIYLAGGCFWGVEEYFSQVDGVLDAVSGYANGRGDTTNYQLIHQTGHAETVEVAYDANRISLKELLLHFFRIIDPTSLNKQGNDRGSQYRTGIYYTDKADLAIIDEVFKEKAKDYKKKIVVEKAPLKHFIKAEDYHQDYLKKNPNGYCHIDINQATYPVIDESKYPKPSATEIKEKLSADEYRVTQKNETEKAFSNRYWDSFDAGIYVDVVTGEPLFSSKDKFESGCGWPSFSRPISPDVVRYKEDKSFNMTRTEVRSRSGNSHLGHVFTDGPKDQGGLRYCINSLSITFIPKADMEAKGYGYLLSSVE

SEQ ID NO: 10579 - protein, 519 aa, Burkholderia fungorum LB400
MTAPPTGQTTRRAAGLIAAQLNHQEFDMNEATARKPHPLDKLKDPSLLRTQAYVDGRSQGGAQEFAVFDPATGAEIARVPNLAAAEARQAIDAANAALPAWRALTGKQRAAMLRRWYELIVAHAADLAAIMTAEQGKPLAEARAEALYGASFVEWFAEEAKRVSGDVLASPADDRKIVVIRQPIGVCVSITPWNFPLAMITRKVAPALAAGCTIVVKPAEQTPLSALALAELAHRAGLPAGVLNVLTGDAANAIEIGKVFCESEIVRHLSFTGSTPVGRLLMQQCAPTVKKVALELGGHAPFIVFDDADVDAAVQGAMVSKYRNAGQTCVCANRFYVHDAVYERFVRQFAEASRGVKVGNGFLEGVDQGPLIDDDAVAKVRQHVDDALAKGARQVMGGRIEGRFVEPVLLAEVTHDMLIAREETFGPVAAVFRFRDEAEVTRLANDTQFGLASYFYSRDIGRVWRVAEALEYGMVGINTGLISNEVAPFGGVKQSGLGREGSKYGIEEYLQIKYLCMGV

SEQ ID NO: 10580 - protein, 436 aa, Prochlorococcus marinus subsp. marinus str. CCMP1375 [sequence omitted]

SEQ ID NO: 10581 - protein, 493 aa, Zea mays
MVLSHGVGGSDESVHSTFASRYVRTSLPRYRMPEQSIPKEAAYQIINDELMLDGNPRLNLASFVTTWMEPECDKLIQASVNKNYVDMDEYPVTTELQNRCVNMIAHLFNAPLGDAETAVGVGTVGSSEAIMLAGLAFKRRWQNKMKAAGKPCDKPNIVTGANVQVCWEKFARYFEVELKEVKLSDGYYVMDPQKAVDMVDENTICVAAILGSTLNGEFEDVKLLNDLLTKKNAETGWDTPIHVDAASGGFIAPFLYPELEWDFRLPLVKSINVSGHKYGLVYAGIGWCIWRTKEDLPEELIFHINYLGADQPTFTLNFSKGSSQVIAQYYQLIRLGFEGYKNIMENCQENATVLKQGLEKTGKFNIVSKDNGVPLVAFSLKDSSRHNEFEISDFLRRFGWIVPAYTMPPDAQHVTVLRVVIREDFSRTLAERLVLDIEKVLHELDALPARVPSGDLAALAAAESSEREMEKQRQVISLWKRAVLAKKKTNGVC

SEQ ID NO: 10582 - protein, 368 aa, Streptococcus thermophilus
MQNKEKHSQVAILGLQHLLAMYSGSNLVPIMIAGALGYSAHQLTYLISTDIFMCGVATFLQLQLNKHFGIGLPVMLGVAFQSVAPLNMIGKSHGSGAMFGALIISGIYVIFVSGVFSKFANLFPSIVTGSVITTIGLTSLSLSLSEIWGTTLTNQLVKAFFLAAITVLIILLVNIFTKGFIKSISILIDLVIGTVIAASMGLIDFSPVAAEPVVHVPTPFYFGMPKFELSSIIMMCIIATVSMVESTGVYLALSDITKDPIDSTRLRNGYRAEGMAVLLGGLFNTFPYTGFSQNVGLVKLSGIKKRLPIYYTAGFLVLLGLLPKFGAWLKSSQAPSTWWCYASHVQFCFYFKGCKFLTRVDFANNEHN

SEQ ID NO: 10583 - protein, 234 aa, Streptomyces carzinostaticus subsp. neocarzinostaticus
MILAGGKGTRLRPYTSRLPKPLVPIGDEFSILEIVLSQLSQRGFDTVTLAIGYLGHLIRSFVGDGSRWNMHITYASEDTPRGTIGPVLGILDQLPEHFLVMNGDILTDLDYADVLAHHTRGEAPLTVATCTREVRIDFGVLTTTSNRVVHFVEKPTVDYRVSMGVYGLSRTTLETYPSHMPFGFDDLVLDLLARGVQPAEYPFDGYWLDIGRPDDYDRANAEFDSIKGTLLKGA

SEQ ID NO: 10584 - protein, 535 aa, Saccharophagus degradans 2-40
MTLKVHELLNNARLNKGTAFTLEEREELGLSGLLPPHVSTMKEQVERALSSIRRKESDIDRYIFLSALQKRNERLYYRLLIDHTKELMPLVYTPTVGQACLEFASIFRETSGFYLSYADKGLIQKRLANWPEQDVRLIVVTDGERILGLGDLGANGMGIPIGKLALYCACAGVKPEQCLPIMLDLGTNNESIRNDPLYLGVPEPRKRGSEYDDFLEEFVRAVEKQFPNALLQFEDFATGNAVNLLEKYRDQLLCFNDDIQGTASVVLAGLMATTRISKIPLQEQRFLFLGAGSAATGIGHLLTTALEREGITTDEARARLFFIDRKGLVTQCRDDLPGHVAPFAANMPPMDLKQAIDTIKPNALIGASGTAGVFTEEIIHTVASCHRNPTIFALSNPTSKAECTAEDAYKFSDGRAIFASGSPFDVVHINGEIKVPGQGNNAYIFPGLGLGAIHGKITRITDDQLITAAQELAGSVSDKQIQHGCLYPPLDEIRNVSVKIAAAVARDAERTGLTSEPVPENFEELLTAELYDPLY

SEQ ID NO: 10585 - protein, 123 aa, Thermoactinomyces vulgaris
MATFGAGCFWGVEETFRQVPGVIDTAVGYMGGTTENPTYEEVCTDKTGHAEVVQVEYDPEQVSYEELLNVFWDNHNPTTLNRQGPDVGTNIARLFFTTLKSKEIPQKNPKRKWIKAGVGKIRL

SEQ ID NO: 10586 - protein, 356 aa, Actinobacillus actinomycetemcomitans
MKKSKLVVALAAILSCAAIPTTVMAESNVQQTMEKSNMSEAKKDLHEIYLAGGCFWGIEAYMERIYGVEDAISGYANGKSDKTNYQKIGITDHAETVKVTYDRNKVSLDKLLKYYFQVIDPTSVNKQGNDRGRQYRTGIYYQDTADKSIIEKEITALQGKYKNKIQIEVEPLHNYIVAEEYHQDYLKKNPNGYCHIDLEQANYVIIDEKDYPKPSDAELKAKLTPLQYSVTQNKNTEHSFSNEYWDNFKPGIYVDVTTGEPLFSSKDKFESGCGWPSFTKPITKEVVTYQDDHSFNMLRTEVISRSGKAHLGHVFDDGPKDKGGLRYCINSAAVKFIPLEDMVKENYGYLTNAVKE

SEQ ID NO: 10587 - protein, 97 aa, Brassica napus
VNWRSEGRDDNLLATFSSVVKRLGVTTVKNYPAILEFWVGGGKIKSWRGLSGEGTKAQEFWGGWTPKIRRWDERAKAGPKKGPKIPFSWIHDKKGQF

SEQ ID NO: 10588 - protein, 73 aa, SINNINGIA CANESCENS
ISGTNGEVMPGQWEFQVGPSVGIEAGDHIWCARYLLERITEQAGVVLSLDPKPMEGDWNGAGCHTNYSTKSMR

SEQ ID NO: 10589 - protein, 153 aa, Glycine max
MSLIPSFFGGRRSNVLDPFSLDVWDPFKDFPFPTSLSAENSAFVSTRVDWKETPEAHVFKADIPGLKKEEVKLEIQDDRILQISGERNVEKEDKNDTWHRVERSSGKFMRSFRLPDNAKVDQVKASMENGVLTVTVPKEEIKKPDVKAIEISG

SEQ ID NO: 10590 - protein, 521 aa, Flammulina velutipes
MVRFQSFLPYLALFFAASAYAAIGPVADLVISNADVTPDGFTRAAVVVNEAFPSPLITGYKGDHFRLNVINRMTNHTMLKTTSIHWHGLFQRGTNWADGPAFVTQCPIASGDSFLYDFRVPGQAGTFWYHSHLSTQYCDGLRGPSVVYDPLDPLGWLYDVDDDSTVITLADWYHFAARLGPRFPAGLANSTLINGLGRSPDAPGADLAVVNVTHGKRYRFRLVSLSCDPSYTFSIDGHELTVIEADGVDTYPVTVNAIEIFAAQRYSFVLTANQTIDNYWIRANPNLGNLGFADGINSAILRYDGANAVEPVTSQQSTQILLKETDLHPFIPRWTPGRPEPGGVDLALNMAFDFNGTNFFVNNATFDPPPVPVLLQILSGKHAAQDLLPSGSVYALPSHSSIEITFPATARAPGGPHPFHMHGHVFAVVRSAGSSTYNYRNPVWRDTVSTGTSAANDNVTIRFRTDNPGPWFLHCHIDFHLQAGFAIALAEEIPRIPLANPVTYEWSRLCPVYDALAPEDQ

SEQ ID NO: 10591 - protein, 428 aa, Bacillus cereus ATCC 14579
MDNQHNQNHIMGTLQWFIFLLANSIALPIVVGGLFHLTTEEIFYLMQRTFFVVGISSFLQGWLGHRLPIADGPAGSWVGVFTVLAYATAGQDQLHSTLQILELGMIISGIILIGLGVTGFIGRILFLFTPLVTGTFLLLLCLQLSGVFLKGMLGITATISQIDGFTAMIAFSIFLFVIILSNFGKGFVKSYAVLIGLISGWIIFLIAGKVTIPSQVTHFVQLPHIFAWGLPKWNTGMAVSSFVMVCILVSNTVAAIIAINQATIHKATIEQKQLKDGTWVGGISHIISSVFSTVGVVPLPATAGFIRLTKQKYIRSFLMACALLVVMSLFPSIIRYLASLPSAVASAVLMASFVQLIGIGFNNIKQVPMSERNVTILGVAVLFGSGVMFLPSGALQSLPSVMQYIFGNGLFVGTVVSILLEQIWRVGK

SEQ ID NO: 10592 - protein, 146 aa, Saccharomyces cerevisiae
SSNLTEEQIAEFKEAFALFDKDNNGSISSSELATVMRSLGLSPSEAEVNDLMNEIDVDGNHQIEFSEFLALMSRQLKSNDSEQELLEAFKVFDKNGDGLISAAELKHVLTSIGEKLTDAEVDDMLREVSDGSGEINIQQFAALLSK

SEQ ID NO: 10593 - protein, 221 aa, Bacillus cereus ATCC 14579
MLKKAIAEFIGTFVLVLFGTGVAVTGGGIEGIGILGIAMAFGLSIVAMAYSIGTISGCHINPAVSVAMFINKRMNAMELCYYVLAQILGGLLGTATLVTILKSAKTPLDNLGQNGFGTLGLSGAFLVEFILTFVFILVIVAVTGKKGSSSLAGLVIGFTLVLIHLLGIPLTGTSVNPARSIAPALFVGGEALSQLWVFIVAPILGGIFAAIVGKFILNTEK

SEQ ID NO: 10594 - protein, 989 aa, Burkholderia vietnamiensis G4
MTSAQILIVEDDRIVARDIAQQMSRAGYVVVGSTGSGEDALALVETLAADSKPDLVLMDVRLEGELDGIDTARRIREARDIPVVFLTAYADEETIRRATAAEPYGYVLKPFDDMQLRTVVEMALYKHGAERRLRESEQRYAITLSSIGDGVLSTDVDGFVTFVNLAGEALTGWSRSEATGRRLSEVFSLHDENTHAPIEDPMAAVLQTGSDGGLPARTILRARGGSDLPVECTGTPMTDERGVRQGIVIVFRDVTQKRRAQEAEILRETNARLEMAMYGSNVGVWEIDMPEGDHKRGFARYSNIYEWLGFDTPQARLDYEAYMSVLHPDHRDSTDRAVASFLESGDGLFELENRLRHRDGSDRWVLVRGTARRDATGKPVRFVGSLVDITELKMTEQALRASEERFRGTFENAAVGVAHCDLDGRFLRVNQRSGEIVGWPRDALQQRRLHELIHADFSVASTERFRLLTEGRLKHYSEEVPLVRFDGERVWVTLSVALQHDASGQTAHVIVIIQDISERKALEETVRVAKDAAEAASRAKDQFLANISHELRTPLNGILGYAQILQRDARLDTRQLASVGVIEQSGQHLLTLINDILDFARLGAGKLELQVGEVSLRGFLETIAEIVAVRAQQKRLVLNYVAAPDLPAVVRVDERRLRQVLLNLLANAVQFTDHGEVTLSVSRGAAGRLRFEVRDTGIGVSADRLEAIFQPFEQAGDHTRRGGGAGLGLAISRQLVRMMGGEIEVTSSAGEGSVFGFELDAPASAAGPCERIPRLQADRLDGARRVILVVDDVPANRALLAEVLGQAGFRVIESSDGRDALDKAAACAPDLIVLDTVMPLMGGIETLHHLRRSHTLGATPVIVVSADASEQNARANIDAGANVFLEKPLNLDRLLGSIAMLLGLATQQGAGPACEADRPMIIPPREDMAALHRYALLGSMRDISRHADRLASSHEKYEPFAARLRHLAMTYESQALLSLIEHHLNSEGS

SEQ ID NO: 10595 - protein, 492 aa, Methanosarcina mazei Go1
MIREYKLLIGGKSVDSSTGETFDDINPATLENLATLQVAGIEDVDRAVEAAEAGFRVWSEVPAPGRAEVLFRAARIMQERKEGLARLMTEEMGKVLPETRGDVQEAIDITIYAAGEGRRMFGETTTSELRDKFCMTVLRPVGVVGMITPWNFPIAIPSWKIMPALIAGNAIVFKPASDTPLLTIKLVEILMEAGLPPGVINIVPGPGGSTGKAIVQHPRIRAISFTGSLDTGKWIMEECAKSMKRVSLELGGKNPVIVMDDANLELALEGVVWGAFGTTGQRCTATSRLILHEKIKDEFIKRLLAKTKSLRVGNGLLPETDVGPVINKAQLEKIEKYVRIGKEEGAAILVGGNRIDPGLPGYFFEPTIFTDVSPEMRIAQEEIFGPVLSIITVSDFDEAIEVANNIKYGLSSAIYTENVRTAFRAIEKLEAGITYVNAPTIGAEVHLPFGGIKGTGNGFREAGTEAIKEFTEVKAVYIDYSGRLQKAQIDTE

SEQ ID NO: 10596 - protein, 333 aa, Streptococcus thermophilus
MAILVLGGAGYIGSHMVDRLVEKGQEKVVVVDSLVTGHRAAVHPDAIFYQGDLSDQDFMRKVFKENPDVDAVIHFAAYSLVGESMEKPLKYFDNNTAGMVKLLEVMNECGVKYIVFSSTAATYGIPEEIPILETTPQNPINPYGESKLMMETIMKWSDQAYGIKYVPLRYFNVAGAKPDGSIGEDHGPETHLLPIILQVAQGVREKIMIFGDDYNTPDGTNVRDYVHPFDLADAHLLAVEYLRKGNESTAFNLGSSTGFSNLQILEAARKVTGKEIPAEKADRRPGDPDILIASSEKARTVLGWKPQFDNIEKIIASAWAWHSSHPKGYDDRG

SEQ ID NO: 10597 - protein, 236 aa, Oryza sativa; identical to SEQ ID NO: 746

SEQ ID NO: 10598 - protein, 207 aa, Zea mays
MHRTYLGGEINFTDGSINPKSTVGTPAYIAHEVLLEKEYNGKVVADVWSCGVTLYVMLVGAYPFEDPDEPKNFRKTIQRILGVQYSIPDYVHISPECQNLVSRIFVADPATRITIPEIRNHPWFLKNLPADLMDDSTMSKQYEEPEQPMQSMDEIMQILAEATIPAAGPRGLNQFLNDGLDLDDDMDDLDSDTDLDLESSGEIVYAI

SEQ ID NO: 10599 - protein, 149 aa, Daucus carota
MADQLTDDQISEFKEAFSLFDKDGDGCITTKELGTVMRSLGQNPTEAELQDMINEVDADGNGTIDFPEFLNLMARKMKDTDSEEELKEAFRVFDKDQNGFISAAELRHVMTNLGEKLTDEEVDEMIREADVDGDGQINYVEFVKVMMAK

SEQ ID NO: 10600 - protein, 507 aa, Xanthomonas campestris pv. campestris str. ATCC 33913
MRPGSLMVLALLAPTLIAPPVFAQSVLTRDNGAKVGDNQNSQTAGATGPTLLQDVQLIQKLQRFDRERIPERVVHARGTGVKGEFTATADLSNLTKAKVFSAGEKTPVFVRFSSVVHGNHSPETLRDPHGFATKFYTSEGNWDLVGNNFPTFFIRDAIKFPDMVHAFKPDPRTNLDDDSRRFDFFSHVPESTRTLTLLYSNEGTPAGYRFMDGNGVHAYKLVNAQGEVHYVKFHWKTLQGIKNLDPKQVAAVQAKDYSHLTNDLVGAIKKGDYPKWDLYVQVLKPDDLAKFDFDPLDATKIWPDVPEQKVGQMVLNKNVDNFFQETEQVAMAPANLVPGIEPSEDRLLQGRIFSYADTQLYRIGTNGLSLPVNRPRVAVNNGNQDGEANTGHTTSGVNYEPSRLEPRPQDTAARYSELPLSGTTQQAKITLEQNFKQAGELYRSYSKKDRADLVQSFGESLATTDTESKHLVLSFLYKADPEYGAGVTRVAKGDLARVKQLASTLQD

SEQ ID NO: 10601 - protein, 547 aa, Legionella pneumophila
MAKELRFGDDARLQMLAGVNALADAVQVTMGPRGRNVVLEKSYGAPTVTKDGVSVAKEIEFEHRFMNMGAQMVKEVASKTSDTAGDGTTTATVLARSILVEGHKAVAAGMNPMDLKRGIDKAVLAVTKKLQAMSKPCKDSKAIAQVGTISANSDEAIGAIIAEAMEKVGKEGVITVEDGNGLENELSVVEGMQLIAVHSPYFINNQQNMSCELEHPFILLVDKKVSSIREMLSVLEGVAKSGRPLLIIAEDVEGEALATLVVNNMRGIVKVCAVKAPGFGDRRKAMLQDIAILTKGQVISEEIGKSLEGATLEDLGSAKRIVVTKENTTIIDGEGKATEINARITQIRAQMEETTSDYDREKLQERVAKLAGGVAVIKVGAATEVEMKEKKARVEDALHATRAAVEEGIVAGGGVALIRAQKALDSLKGDNDDQNMGINILRRAIESPMRQIVTNAGYEASVVVNKVAEHKDNYGFNAATGEYGDMVEMGILDPTKVTRMALQNAASVASLMLTTECMVADLPKKEEGVGAGDMGGMGGMGGMGGMM

SEQ ID NO: 10602 - protein, 299 aa, Triticum aestivum
FLWPPPPFLAPFGVPPQTPLVNPVKGAAKKIKFLPARARGPRVARPRAAVSGAEKEKAHPAESGGKGDERVVQVHSAEEFDSALQKAKNRLVVVEFAASHSVNSKRIYPCMVDLSRTCGDVDFLLVMGDESEATRELCQREGITQVPHFSFYKGTEKVHEEEGIGPDQLAGDVLYYGDNHAGVVQLHSRTDVEALMAEHSGEGGKLLVLDVGLKHCGPCVKVYPTVVKLSRSMADTAVFARMNGDENDACMQFLKDMEVVEVPTFLFIRDKKIVGRYVGSGKGELIGEILRYQGVRVTY

SEQ ID NO: 10603 - protein, 149 aa, Daucus carota
MADQLTDDQISEFKEAFSLFDKDGDGCITTKELGTVMRSLGQNPTEAELQDMINEVDADGNGTIDFPEFLNLMARKMKDTDSEEELKEAFRVFDKDQNGFISAAELRHVMTNLGEKLTDEEVDEMIREADVDGDGRINYEEFVKVMMAK

SEQ ID NO: 10604 - protein, 440 aa, Vibrio sp. Ex25
TYQVELDARLEQAKEDDLLTLIYTSGTTGQPKGVMLDYANIAAQLEGHDQRLSLSQSDVSLCFLPLSHVFERAWTFYVLYKGATNCYLQDTMQVRDALSQVRPTVMCAVPRFYEKIFSAIHEKVSRAPIHRKIMFTWAVNMGAKMAACHQEKRQPSLMLRKSYALADKLVLSKLRALLGGQINFMPCGGAKLDETIGRFFHAIGINVKLGYGMTETTATVSCWDDKCFNPDSIGMSMPGAQVKIGENNEILVRGPMVMRGYYKMPEETEKTFDEHGFLKTGDAGYIDENGNLFITDRIKELMKTSGGKYIAPQMIEGAIGKDHFIEQIAVIADTRKFVSALIVPCFDSLEEYAKELNIKYHDRVELIKHHQVVEMLEKRVNDLQKELAKFEQVKKFKLLPRAFSMDDGELTPTQKLRRKVINDKYQDEIEEMYKEKSEKK

SEQ ID NO: 10605 - protein, 407 aa, Ralstonia metallidurans CH34
MAAYPFVPALREPQGSPIRELFKYLSDPEMISFAGGYPSAALFDVEGIGAASAQALRERPAECLQYGATEGTPALRNALAALMAERGAAVALDELLITSGSQQGFDFLVRALVEPGSLVLVEEPTYSATLQALRLAGADVRGVPSDHDGMNVDALEAMLADAPARPRMIYTVPTFANPTGATLSPARRLQLLELVARHEIVLVEDDPYGALSFDGPPPPSLLALCDQVSGARPWLVHLASLSKTLAPGLRLGWMVAAPEIVRRAVIAKQVSDLCTPPWLQLTAAHYLQAGNLPGQIAREVAVYRDKRDRLTTALHQAFGTRIRFADPAGGMFLWVSVDGIDDAAALLPHAIAEKVLFVPGTGFYAERRARPAFRLSFVGADPAQIEEGVARLARAAARAGVSVVNPD

SEQ ID NO: 10606 - protein, 577 aa, Bacillus thuringiensis serovar konkukian str. 97-27
MNRGRDVMSKFTVASNGSLETTLRGVEVLSTPLLNKGVAFTQEEREELGLKGLLPPAVLTLEEQARRAYEQFCSQPDDLLKNVYLTALHDRNEVLFYRILTDHLREMLPIVYTPTVGVAIQRYSHEYRKPRGVYLSINDPSGIEEAFANIGATAENIDLVVVTDGEGILGIGDWGVGGINIAIGKLAVYTAAVGIDPSRVLPVILDVGTNREELLDNPFYIGNRHPRITGEAYDEFIDTFVQAVNKQFPKALLHWEDFSSRNARKILDKYRHDICTFNDDIQGTGAVSLAAVLSAVKASGVPLSEHRVVVFGAGTAGIGIADQVRDAMVRVGVSEEESYKRFWCIDRNGLVTDNMEDLLDFQMPYARKEAEVSEWKENGVIGLAEVVKQVKPTILIGTSTVAGAFKEEIIKEMASHVERPIILPMSNPTPLAEAKPADLIKWTEGRALVATGSPFEPVTYNGVTYVIGQSNNALIFPGLGLGTIVVRASVMTDGMFAAAAEAVASMVDTSQPGAPILPEVEELRNISEMVAIEVAKVAVAEGVARENLSDNDIKIAVKEAIWEPEYRQIKAVEKVTI

SEQ ID NO: 10607 - protein, 149 aa, Daucus carota
MADQLTDDQISEFKEAFSLFDKDGDGCIATKELGTVMRSLGQNPTEAELQDMINEVDADGNGTIDFPEFLNLMARKMKDTDSEEELKEAFRVFDKDQNGFISAAELRHVMTNLGEKLTDEEVDEMIREADVDGDGQINYEEFVKVMMAK

SEQ ID NO: 10608 - protein, 250 aa, Brassica juncea
MTKSYPTVSEDYQKAIEKCKRKLRGLIAEKNCAPIMVRLAWHSAGTFDCASKTGGPFGTMRFDAEQGHGANSGIHIALRLLDPIREQFPAISFADFHQLAGVVAVEVTGGPEIPFHPGREDKPQPPPEGRLPDATKGCDHLRQVFTKQMGLSDKDIVALSGAHTLGRCHKDRSGFEGAWTSNPLIFDNSYFKELLTGEKEGLLQLVSDKALLDDPVFRPLVEKYAADEEAFFADYAEAHLKLSELGFADA

SEQ ID NO: 10609 - protein, 505 aa, Staphylococcus warneri
MSKQDGKLTGLFGAPVSDRENSMTAGPRGPLLMQDIYFLEQMSHFDREVIPERRMHAKGSGAFGTFTVTNDITQYTSAKMFSEVGKQTEMFARFSTVSGERGAADAERDIRGFALKFYTEDGNWDLVGNNTPVFFFRDPKLFVSLNRAVKRDPRTNMRSAQNNWDFWTGLPEALHQVTILMSDRGIPKDLRHMHGFGSHTYSMYNDKGERVWVKYHFRTQQGIENLTDEEAANVIATDRDSSQRDLFNAIENGDYPKWKMYIQVMTEEQARNHKDNPFDLTKVWYHGDYPLIEVGEFELNRNPNNYFQDVEQAAFAPTNIVPGLDYSPDKMLQGRLFPYGDAQRYRLGVNHWQIPVNQPKGVGIENLCPFSRDGQMRILDDNQGGGPHYYPNNQGVYDSQPEFKKPPFPADGDGYEYNQRQDDDNYFEQPGKLFRLQSDEAKERIFTNTANAMDGVTEDVKRRHIRHCYKADPDYGKGVAKALGIDINSIDLEGEQDETYENFKN

SEQ ID NO: 10610 - protein, 504 aa, Zea mays
MAVGGDDDSMERDFAARLRLAHSPSPATPAAAASSSPTAAGGIAFRAPQEQFTADDFVLGKIYGVGSYSKVVRAKKKDTGRVYALKIMDKKFITKENKISYVKMERIVLDQLDHPGVIRLFFTFQDTYSLYMALESCEGGELFDQIVRKGRLSEDDARFYAAEIVDILEYLHGLGLIHRDVKPENLLLTSDGHIKIADFGSVKPTRDTPIKVLPNSTTERACTFVGTAAYVPPEVLNSAPATFGNDLWALGCTLYQMLSGSSPFKDASEWLIFQRIIARDLKFPEYFSAEARDLVDKLLDVDPGKRPGAGPDGYSSLKEHPFFRGIDWKNLRKTRPPKLAIDANVNEDEDSQDSNWLAHMGSVAVNQQSNTVGNNGAPSSSEVRSHISKLASIDSFDSKWQEFLDPGESVVLISKLKKINKLANKKIQLILTDKPQLICVDPSKMVAKGNIIWSDDPSELSVQVSDSSHFRICTPKKVSTFEDAKQRAWQWKKAIEDLQRCQRN

SEQ ID NO: 10611 - protein, 54 aa, Glycine max
MGSETFLEVILAILLPPVGVFLRYGCGVELWIDLVLTILGYIPGIIYAIYVLIG

SEQ ID NO: 10612 - protein, 250 aa, Brassica juncea
MTKSYPTVSEDYQKAIEKCKRKLRGLIAEKNCAPIMVRLAWHSAGTFDCASKTGGPFGTMRFDAEQGHGANSGIHIALRLLDPIREQFPTISFADFHQLAGVVAVEVTGGPEIPFHPGREDKPQPPPEGRLPDATKGCDHLRQVFTKQMGLSDKDIVALSGAHTLGRCHKDRSGFEGAWTSNPLIFDNSYFKELLTGEKEGLLQLVSDKALLDDPVFRPLVEKYAADEEAFFADYAEAHLKLSELGFADA

SEQ ID NO: 10613 - protein, 1829 aa, Streptomyces coelicolor A3(2)
MESGAATRATKTRAKGGQSLSNQGKSRGGGARSGSTTVDTAALNRLLAALVSMREGNFRRRLTVSGDGVMSEIAAVFNEVADRNLHLTGELARVRRVVGREGKLTERLETGACEGSWAAAIDHSNALVDDLVRPVSEVSRVLSAVADGDLSPRMELRTQNDEGTGQPLRGEFLKVGRTVNNLVDQLSTFTDEVTRVASEVGTEGKLGGQARVRGMSGSWKDLTDSVNTMAYRLTAQVRDIALVTTAVAKGDLSRKVTVHVAGEMLELKNTVNTMVDQLSAFSSEVTRVAREVGTEGALGGQAQVPGVAGVWKELTDSVNTMAGNLTAQVREISHVTTAVANGDLSKKVTVPARGEVAQLAETINQMTETLRIFADEVTRVANETGGEGQLGGQANVPGAAGIWKDLTDSVNTVFRNLTTQVRDIAAVTTAVASGDLSQKVTVDVAGEMLELKNTVNTMVDQLSAFGAEVTRVAREVGVEGELGGQAQVPGAAGTWKDLTDSVNTAFRNLTGQVRNIAQVTTAVANGDLSQKVTVDVSGEMLQLKNTVNTMVDQLSSFADQVTRMARDVGTEGRLGGQARVDGVSGTWKELTDSVNSMAGNLTSQVRNIAQVTTAVARGDLSQKIDVDARGEILELKNTINTMVDQLSSFAEQVTRVAREVGTEGRLGGQAQVPGVAGVWRDLTDSVNGMAGNLTAQVRNIAQVATAVARGDLSQKITVDARGEILELKNTLNTMVDQLSSFAQEVTRVAREVGTEGILGGQAEVQGVSGTWKDLTQSVNGMANNLTMQVRNIAEVTTAVAKGDLSKKITVDAKGEILELVTTVNTMVDQLSSFAEQVTRVAREVGTEGILGGQASVPGVVGIWKDLNDNVNLMAKNLTVQVRNISQVAAAVANGDLTRTVTIEARGEVAQLADTFNTMVRTLRSFADQVTKVAREVGTDGILGGQAQVPGVSGTWKDLTESVNQMASNLTGQVRNIAMVTTAIAKGDLTKKIDIDARGEILELKTTINTMVDQLSSFAEEVTRVAREVGTEGQLGGQARVRDVDGTWRDLTESVNEMAGNLTRQVRAIARVATAVTRGDLNLKIDVDASGEISELQDYINKMIANLRDTTIANKEQDWLKGNLARISGLMQGRRDLQDVASLIMSELTPVVSAQHGAFFLAMPLVDGQEQAGAEGDAYELRMLGSYGYSMGSMPTSFRPGEALVGTAAQEKRTILVENAPSGYLKISSGLGEAPPAQVIVLPVLFEGQVLGVIELASFTPFTHIQKDFLNQIAEMIATSVNTISVNTKTEVLLSQSQELTEQLRERSEELEQRQKALQSSNAELEEKAELLAQQNRDIEVKNTEIEEARQVLEERAEQLAVSMRYKSEFLANMSHELRTPLNSLLILAKLLADNADANLTPKQVEFAETIHGAGSDLLQLINDILDLSKVDAGKMDVSPTRIALVQLVDYVEATFRPLSAEKGLDLSVRVSPGLPATMHTDEQRLLQVLRNLLSNAVKFTDSGSVELVIRPARDEVPTAIREQLLEAGSMNDPDAELIAFSVSDTGIGIAASKMQVIFEAFKQADGTTSRKYGGTGLGLSISREIAQLLGGEIHAQSEPGRGSTFTLYLPLHPSELPPHGYQQPLPSVEAGELPASSGAVAELPGAEAETPAEVKSYQDAQNGAAALFRRRRKSSADTEGRPEVRERQPGAGQEAVPQAHRGIRFGGQKVLIVDDDIRNVFALTSVLEQHGLSVLYAENGREGIEVLEQHEDVAVVLMDIMMPEMDGYATTTAIRRMPQFAGLPIIALTAKAMKGDREKAIESGASDYVTKPVDPDHLLTVMQQWMREE

SEQ ID NO: 10614 - protein, 833 aa, Saccharomyces cerevisiae
MNNAANTGTTNESNVSDAPRIEPLPSLNDDDIEKILQPNDIFTTDRTDASTTSSTAIEDIINPSLDPQSAASPVPSSSFFHDSRKPSTSTHLVRRGTPLGIYQTNLYGHNSRENTNPNSTLLSSKLLAHPPVPYGQNPDLLQHAVYRAQPSSGTTNAQPRQTTRRYQSHKSRPAFVNKLWSMLNDDSNTKLIQWAEDGKSFIVTNREEFVHQILPKYFKHSNFASFVRQLNMYGWHKVQDVKSGSIQSSSDDKWQFENENFIRGREDLLEKIIRQKGSSNNHNSPSGNGNPANGSNIPLDNAAGSNNSNNNISSSNSFFNNGHLLQGKTLRLMNEANLGDKNDVTAILGELEQIKYNQIAISKDLLRINKDNELLWQENMMARERHRTQQQALEKMFRFLTSIVPHLDPKMIMDGLGDPKVNNEKLNSANNIGLNRDNTGTIDELKSNDSFINDDRNSFTNATTNARNNMSPNNDDNSIDTASTNTTNRKKNIDENIKNNNDIINDIIFNTNLANNLSNYNSNNNAGSPIRPYKQRYLLKNRANSSTSSENPSLTPFDIESNNDRKISEIPFDDEEEEETDFRPFTSRDPNNQTSENTFDPNRFTMLSDDDLKKDSHTNDNKHNESDLFWDNVHRNIDEQDARLQNLENMVHILSPGYPNKSFNNKTSSTNTNSNMESAVNVNSPGFNLQDYLTGESNSPNSVHSVPSNGSGSTPLPMPNDNDTEHASTSVNQGENGSGLTPFLTVDDHTLNDNNTSEGSTRVSPDIKFSATENTKVSDNLPSFNDHSYSTQADTAPENAKKRFVEEIPEPAIVEIQDPTEYNDHRLPKRAKK

SEQ ID NO: 10615 - protein, 590 aa, Prochlorococcus marinus str. MIT 9312
MRSKNNQNPIIRLYLNLIEERRLLFFAFFSSIINKILDLAPPVIIGLAVDIVVKEQNSWISGFGIKAVPAQLIFLAFASGIVWSGESSFEYLYSILWRNLAQLSQHKLRIKAYEHIQELDMDFFENDNTGRLLSILNDDINQLERFLDQGANQIIQLFITVLIIGGTMIFVAPKIALFAFFPIPIIFLGSIKFQRKLAPKYRDVRNKAGLLASRLNNNLSGILTIKSFTKEKWELNRLNKESLAYQRSNKAAIKLSSAFIPLIRFAILFAFIAILLIGGFQTWNKTLNVGTYSFLVFITQRLLWPLTTLGHVLDDFQRSMASIDRVIDLIDTPIKIKDGKIKIEPKDIKGEIIFNNVNFNYPGRDLTLKNINFKIEKNSTLGIVGLTGSGKSTIIKLLLRIYDSNNGSITLDDISIKEINLRNLRKCISLVSQETYLFHGSVQENIAYGSINPSFKDIIKASKIAEAHKFIEQLPDGYKTIVGERGQRLSGGQRQRIALARAVLKDAPILILDEATASVDNETEALIQKSLSKITKERTTIVIAHRLSTIKNADNIIVIDKGKIVESGKHEKLLDQNKIYADLWIVQLGI

SEQ ID NO: 10616 - protein, 269 aa, Brassica napus
  misc_feature (215)..(215): Xaa can be any naturally occurring amino acid
  unsure (1)..(269): unsure at all Xaa locations
MAEEYKNASEEFKNVPEHESTPKVATTEEPSATTGEVKDRGLFDFLGKKEEVKPQETTTLESEFEHKAQVSEPPAFVAKHEEEEEREHKPTLLEKLHHKHEEEEEENKPSLLQKLHRSNSSSSSSDEEGEDGEKRKKEKKKIAEEDEKTKEDRKGVMEQIREKFPHGTKTEDDTPVIATLPVKEETVEHPEEKKGLMEKIKEKLPGHSEKPEDSXQVVDTAAAVPVTEKTAEHPEEKKGLMEKIKEKLPGYHAKSTEEEEKKKKKGRPD

SEQ ID NO: 10617 - protein, 175 aa, Triticum aestivum
MAPTVMASSATSVAPFQGLKSTAGLPVSRRSSSAGLSSVSNGGRIRCMQVWPIEGIKKFETLSYLPPLSTEALLKQVDYLIRSKWVPCLEFSKVGFVFREHNSSPGYYDGRYWTMWKLPMFGCTDATQVLNEVEEVKKEYPDAYVRVIGFDNLRQVQCVSFIAFRPPGCEESGKA

SEQ ID NO: 10618 - protein, 785 aa, Zea mays
MAGKDGVSLKSVSYGARLRRSCDASLREAGSMRDPFLKHRVKKFDLSSLDWIDEIPDCPVFSPSTQEFEDPLVYLSKIAPVAAKYGICKIISPVSASVPAGTVLMKELGGIKFTTRVQPLRLAEWTKDDKFAFFMSGRKYTFREFEKMANKEFVRRYSSAACLPSRYMEEEFWHEIAFGKMESVEYACDIDGSAFSSSSHDQLGRSKWNLKRFSRLPNSTLRLLRAAVPGITDPMLYIGMLFSMFAWHVEDHYLYSINYHHCGAPKTWYGIPGSAASDFEKVVREHVYDHEILSGEGESAAFDVLLGKTTIFPPNILLDHHVPVYRAIQKPGEFVVTFPRAYHSGFSHGFNCGEAVNFATGEWFPLGAVASQHYALLKRIPVLPYEELLCKEATFCANEFSLFEHGNVTLTGGTHIQSYMKGPFVQLMRFQHRVRWLLVKMGARTCYKADIDATVLCGICKRDCYVAHIMCNCRADAICLCHEEEISKCSCNCDRVVFVRKDIFELEEISKKFEEIGILDEVGKQMSQNDGYNMHPYLSNGIDHNAKYFPYCKILIDTSPELRTFSEVDVLGYDLNKPYPTLSTITSAHGPHEYSTQSDECTSSKQRTYSSSCPENGTLSVYPLCTSDQAFSTDKLAAQDTDDSDCEVFRVKRRSSIVMEKRCSEDLTITLTENQALRRLKKACSDDRQENATESHCLDFISGNTDNFINRSKQKMNVDQLDAKNVEDEVAFGQKSIGCSYLSPSVDLGPKRLKIRGPSFPSTVSEVEISYRFQEDIDLASQHTQ

SEQ ID NO: 10619 - protein, 271 aa, Burkholderia fungorum LB400
MISYPHNAGSAMTRVIQGGLDGPVVVLLHGLSARADRWKHNLDALGQAGVRAMAIDLPGHGFASKHEDFDYSAHGYSRWLDQFVQTLGVEKLVLVGTSFGGFVAAHYAADHPERVAGLMAVGAIGLVPAGEARRMKTVQWLGEMQKEQIRSRMYRGVLDPQLISEELVEEDYRINNSAGAAEAFAALARYYRERLDDDAVAARLADAASRFPVSIVWGRDDPSVSPDYGARAHQIIAGSTLTFVDDCGHFPYWERPAEFNALLTNFVKRCI

SEQ ID NO: 10620 - protein, 356 aa, Azoarcus sp. EbN1
MTQITTPVTVITGFLGSGKTTLVNRILQELHGERVAVIENEFGAVGVDAEFLITDGNETVIQLANGCLCCTVRGDFARALNTLSESSEAEGFVFDRVLIETTGIADPGPIVQTFLAETTILTRFHLDGVVTLVDSVHALAQLDMTENRAQVAYADRLLLTKFDLATESQIEAIGRRVAEMNPRAELLSVDLHNAPIVDVLNHLFDTHGYTFDYVPRKELTQIKRRRPATDKRFCLAAPTSRHTSDIVSYIFESSVPLDLERLNVFFDMAQRRYGPRLWRYKGIVWAAHQRPRLVVQGVQSLLQITGGTIWRTFEPRQTLLIFIGQAIDPAWIEEMLRRCEVDSVDNRNKLTRGQLE

SEQ ID NO: 10621 - protein, 361 aa, Triticum aestivum
MAGDGELLPRIAVVGAGIFARTQYIPRLREISHLVVLKAIWSRTQESAEAAAELARDFAPGIECKWGDAGLEEIMGDPSILGVAVVLAGQVQVELSLKMLKAGKHVIQEKPASGSTTEAETALSVYNSFPNKFPYKPIWALGENYRFEPAFVESSKLMNDIGDMMNIQVIVEGSMNSSNPYFNSSWRRNFVGGFILDMGVHFIAGLRMLVGSEVATVSSISRHVDTDLPPPDNICSLFQLENGCAGVLVFAVNSRSPKILWRVDGTKGTVKIERGVDGGKHGYQVLFSNESGECQKTFYPFCGVHEELKAFVHDMVQASKDGDHKAEPRSSYVEGARDVAVLEAMLESSAKQGAMVQVKKF

SEQ ID NO: 10622 - protein, 630 aa, Debaryomyces hansenii CBS767
MKIISLLYCIVFALGIVAKTHTFHFNASYITANPDGVHERRVIAINNEWPIPTIRIKKNDRVEIYFTNLLENRNTSLHFHGLFQQESNSMDGAEMVTQCPIAPGSTFLYNFTVTEQAGTYWYHSHSGAQYSDGLRGMFIVEDDKEPPFQYDEETTLTVSDWYHMEYPDVMSNFLSRYNPTGAEPIPQNSLFNDTKNSTWHVKPDTTYLVRIVNMGMFTSQYLYIEDHTFTIVEIDGNLIEPVETDSLYIAVAQRISVLVHTKKSKATNYRFVNIMDEEMLDFLPDELLVISTNWVAYNDKDLPQSLKNGPNEFEKLTEKLNPVDDFGLKPLSREALLPDSDYQIQLNFTMDNLGNGVNYAFFNNISYVLPKVPTLMTVLSSGEHAGDTEIYGSNTNTFVLQHNEVVEIVLNNMDDGKHPFHLHGHIFQVISRSEAGEDAEDPIVYDPENPDHTNFPDFPMIRDTVMVNPNGFIVLRFKANNPGVWFFHCHVDWHLEQGLAITLVEAPFEIQKSQSLSSNHLDACTSANVSSKGNAAGRYGDSSDIWHDLSGENSQPEPLPAGFTMKGYIAFFICSFCAVFGIYSIYKYGMEDIKNDSNEAVVQKLYRILDSHGALDESEQSALFSVNSRE

SEQ ID NO: 10623 - protein, 86 aa, Arabidopsis thaliana
  misc_feature (41)..(41): Xaa can be any naturally occurring amino acid
  misc_feature (60)..(60): Xaa can be any naturally occurring amino acid
  unsure (1)..(86): unsure at all Xaa locations
MANKALIHLLVIFVLALSHISFFPSHASRLGSLMEKPSIVXEPQQDTLMDVMKEVDHGVXWELNDYPGSGANIRHLPRVRRCVIDC

SEQ ID NO: 10624 - protein, 335 aa, Pyrococcus abyssi GE5
MSKPRVFITREIPEVGIEMLEKEFEVEVWEDEREIPREILLEKVKDVDALVTMLSERIDREVFERAPRLRIVANYAVGYDNIDVEEATKRGIYVTNTPGVLTDATADLAFALLLATARHLVKGDKFTRSGEWKKRGVAWHPKWFLGYDVYGKTIGIIGFGRIGQAIAKRARGFDMRILYYSRTRKPEVEKELNAEFKPLDELLRESDFVVLAVPLNKETYHMINEERLKMMKRTAILINVARGKVIDTKALIKALKEGWIAGAGLDVYEEEPYYNEELFSLDNVVLTPHIGSATFGAREGMAKLVAENLIAFKRGEVPPTLVNREVLKVRKPGFQ

SEQ ID NO: 10625 - protein, 180 aa, Triticum aestivum
QIDFSAGTSSKPGVLTKKPAGIDGDGAEVDGLCKDEGPPPALEDRRPRKRGRKPANGREEPLNHVEAERQRREKLNQRFYALRAVVPNISKMDKASLLGDAITYITDLQKKLKEMEVERERLIESGMIDPRDQTPRPEVDIQVVQDEVLVRVMSPMESHPVRAIFQAFEEAEVHAGESKI

SEQ ID NO: 10626 - protein, 327 aa, Colwellia psychrerythraea 34H
MKSVKNSWNSSIKDGEYQRKESQFRNWITTDGSAGITGRGGFQAEAGRYHLYVSLACPWAHRTLIFRQLKGLEDLITVSVVHPDMHENGWSFKHDEESAKLYGTTGDNLYDGKFISEKYLAQDPDYSGVNSVPVLWDKKDKVIVNNESSEIIRMFNSAFNDITGNTLDFYPEHLREKIDHENELVYHKINNGVYKTGFATTQEAYDKNVNELFAALEQIDEKLSKQRYLTGDEITEADWRLWATLVRFDSVYHTHFKCNLKLIKEFSNIYNYMLELFQVPNVAKTVNEAHIKRHYYASHVAINPYGIVPIAHQQDWTAQHNRDKQFS

SEQ ID NO: 10627 - protein, 211 aa, Campylobacter coli RM2228
MDNLISGAIKFMQEDFKEHEELFESLKNKQNPHTLFIGCSDSRVIPNLITNTGPGELFVIRNIANIVPPYRVGQDYLATTSAIEYALNSLRIKNIVVCGHSNCGGCNALYYSDEELDKIPNVKKWLTMLDPIKRDVTIFARDDIAMRSWLTEKLNLVNSLQNIFTYPGVQEALDEGRLEVHAWYYIIETGEIYEYDFKTKIFKLIQNRKMQ

SEQ ID NO: 10628 - protein, 149 aa, Daucus carota
MADQLTDDQISEFKEAFSLFDKDGDGCITTKELGTVMRSLGQNPTEAELQDMINEVDADGNGTIDFPEFLNLMARKMKDTDSGEELKEAFRVFDKDQNGFISAAELRHVMTNLGEKLTDEEVDEMIREADVDGDGQINYEEFVKVMMAK

SEQ ID NO: 10629 - protein, 323 aa, Campylobacter coli RM2228
MGKNSLIGGSIWDEYSQKVQDRMNNPQHMGEFSEEDAKARNAKLIVADFGAESCGDAVRLFWLVDEKTDKIIDAKFKSFGCGTAIASSDTMVDLCIGKTVDEAVKITNLDVEFAMRDNPETPAVPPQKMHCSVMAYDVIKQAAAHYKGISPEDFEDQIIVCECARVSLGTIKEVIKLNDLHTVEEITQYTKAGAFCKSCIKPGGHEKRDYYLVDILAETRAEIDREKLKNTMKSDVAFDEMTVVGQLKAVESVLDAEIRPMLHNDGGDLEVIDIQKAEGAAIDVYIRYLGACSGCSSGSGATLYAIETILQEELSPNIRVMPV

SEQ ID NO: 10630 - protein, 149 aa, Daucus carota
MADQLTDDQISEFKEAFSLFDKDGDGCITTKELGTVMGSLGQNPTEAELQDMINEVDADGNGTIDFPEFLNLMARKMKDTDSEEELKEAFRVFDKDQNGFISAAELRHVMTNLGEKLTDEEVDEMIREADVDGDGQINYEEFVKVMMAK

SEQ ID NO: 10631 - protein, 459 aa, Arabidopsis thaliana
  misc_feature (7)..(7): Xaa can be any naturally occurring amino acid
  unsure (1)..(459): unsure at all Xaa locations
MTLTFSXPPQPKAVAAATVTSSARVPVYPLASSTLRGLVSFRLTAKKLFLPPLRSRGGVSVRTMSELVQDKESSVAASIAFNEAAGETPSELSHSRTFLDARSEQDLLSGIKKEAEAGRLPANVAAGMEELYWNYKNAVLSSGASRADETVVSNMSVAFDRMLLGVEDPYTFNPYHKAVREPFDYYMFVHTYIRPLIDFKNSYVGNASIFSELEDKIRQGHNIVLISNHQSEADPAVISLLLEAQSPFIGENIKCVAGDRVITDPLCKPFSMGRNLICVYSKKHMNDDPELVDMKRKANTRSLKEMATTLRSGGQLIWIAPSGGRDRPNPSTGEWFPAPFDASSVDNMRRLVEHSGAPGHIYPMSLLCYDIMPPPPQVEKEIGEKRLVGFHGTGLSIAPEINFSDVTADCESPNEAKEAYSQALYKSVNEQYEILNSAIKHRRGVEASTSRVSLSQPWN

SEQ ID NO: 10632 - protein, 816 aa, Triticum aestivum
  misc_feature (161)..(161): Xaa can be any naturally occurring amino acid
  unsure (1)..(816): unsure at all Xaa locations
MGEAAGDRVLSRLHSVRKRIGDSLSAHPNELVAVFTRLVNLGNGMLQSHQIIAEYNTAIPEAEREKLKDGAFEDVLRAAQEAIVISPWVALAIRPRPGVWEYVRVNVSELAVEELSVPEYLQFKEQLVEGSNKDFVLELDFEPFNASFPRPSLSKSIGNGXVQFLNRHLSSKLFHDKESMYPLLNFLRAHNYKGMTMMLNDRIRSLSALQGALRKAEEHLSGLPADTPYSDFHHRFQELGLEKGWGDCAKRAQETLHLLLDLLEAPDPSTLEKFLGTIPMVFNVVILSPHGYFAQANVLGYPDTGGQVVYILDQVRAMENEMLLRIKQQGLDITPRILIVTRLLPDATGTTCGQRLEKVLGTEHTHILRVPFRTESGIVRKWISRFEVWPYLETFTEDVAHEISGELQANPDLIIGNYSDGNLVACLLAHKMGVTHCTIAHALEKTKYPNSDLYWKKFEDHYHFSCQFTTDLIAMNHADFIITSTFQEIAGNKDTVGQYESHMAFTMPGMYRVVHGIDVFDPKFNIVSPGADMSIYFPYSESQRRLTSLHPEIEELLYSDVDNNEHKYVLKDRNKPIIFSMARLDRVKNLTGLVELYGKNPRLQELVNLVVVCGDHGNPSKDKEEQAEFKKMFDLIEQYNLNGHVRWISAQMNRVRNAELYRYICDTKGAFVQPAFYEAFGLTVIEAMTCGLPTFATAYGGPAEIIVNGVSGYHIDPYQGDKASTLLVEFFEKCQVDPSHWTKISQGGLQRIEEKYTWKLYSERLMTLTGVYGFWKYVSNLERRETRRYLEMLYALKYRTMASTVPLAVEGESASK

SEQ ID NO: 10633 - protein, 112 aa, Bifidobacterium breve
LEVTKVEGNNVHTKVVVAGPVSSHKGINLPGVAVSLPALTEKDEADLRWAIRTGADIIAMSFVRFATDIDRAHEIMDEEGRRIPIVAKIEKPQALENLEEIVKTFDGIMVAA

SEQ ID NO: 10634 - protein, 514 aa, Methanosarcina mazei Go1
MKLGIGKIKDVLKSGAGKSTESGREEQKIEEIEPDRVEEATMTAKISEQESENTPDKEHLVPMNRTECKKTGLIFFPAFDWAISPTHPEREERLLYTRDQIFEEGLMDLPQIAEYKPRLAEFKDIARVHFCIPDIEAQATTPHLIAAGSCLVLADALMRGEVKNAFALVRPPGHHAMTVAHGNRGFCNINNEAILVEYLRKKYGIRRIAIVDTDVHHGDGTQEIFYNDPDILFISFHQDGRTLYPGSGFTNELGGPKALGRTINIPLPPGTPDEGILYVLDSLVMPILEDFKPELVLNSAGQDNHYTDPLANMRFSAQGYAKLNEKLGPDMAVLEGGYAIQSALPYVNTGIILAMAGLDYSCVMEPDFKPGMFVQAARDRQILEGVVATQLENWKNRNRLVEEEIAKHGDFYRRKKQIFYDTDMIQEVQEETIKMCPDCQGYVTIDSRAHRSINDTRIFGVSVPIYACNRCQAEAEEEYKKRLKSPEYEYVYLQDKKADEYRAYNMRTKQEIVY

SEQ ID NO: 10635 - protein, 112 aa, Bifidobacterium catenulatum
LEVTKVEGNNVYTKVIVAGPVSSHKGINLPGVAVSLPALTEKDEADLRWAIRTGADIIAMSFVRFATDIDRAHEIMDEEGRRIPVVAKIEKPQALENLEEIVKAFDGIMVAR

SEQ ID NO: 10636 - protein, 149 aa, Daucus carota
MADQLTDDQISEFKEAFSLFDKDGDGCITTKELGTVMRSLGQNPTEAELQDMINEVDADGNGTIDFPEFLNLMARKMKDTDSEEELKEAFRVFDKDQNGFISAAELRHVMTNLGEKLTDEEVDEMVREADVDGDGQINYEEFVKVMMAK

SEQ ID NO: 10637 - protein, 467 aa, Colwellia psychrerythraea 34H
MKDFSKYNTKELWNNDLKHNMHPFTDFSSFKKEGSLIMAESEGAYVFDTDGRKYLDGIAGLWCVNIGYGNEEMGQAMLDQTRRIPYYSSFGHLTTPPAVELSTKLASLAPKSLSHVFYGTGGSMSNDTAVRMVHFYFNRIGKPNKKQIITRTDGYHGSTYLSMTLTGVEYDHIGFDLAPDLVHRVSAPNVYRRPAGMTVPEYCDFLVNEVEQKILSIGPENVAMFVAEPIAGAGGVLVPPEGYHQRVAAVCKKYGVFILSDEVVTAFGRLGEMFSSEKIFGFTPDIITCAKGLTSGYIPLSANMISDEIYDVISVPQAEGASFTHGFTYSGHPVSCAVGLKNIEIMERMDLCGHVREVGKYFENQLIEKLSNLPLVGDVRGSHFMMCIESVANKETKELLDPNIAIGNRIADKCQAVGLLVRPLAHKNILSPPLTLSVAEVDFIVSTLHKAIIDVQDDLVKEGLWHG

SEQ ID NO: 10638 - protein, 638 aa, Agrobacterium tumefaciens str. C58
MKKLDLITIGRSSVDLYGSQVGGRLEDMASFAKYIGGSPTNIAAGAARLGLNSAVITRVGDEHMGRFIREQLVREGVDVRGVKTDPERLTALVLLGIRDQNQFPLIFYRENCADMALSEDDIDPAFIADAGCICATGTHLSHPNTEAAVLKALKLARENGAKTALDIDYRPNLWGVAGHGDGESRFVESQKVTAKLQSTLHLFDLIVGTEEEFHIAGGSTDTLTALNAVRKVSNATLVCKRGPMGASVFTGDIPDSLDDGETGEGFPIEVFNVLGAGDGFMAGLFRGWLRGEDWPTTLKYANACGAFAVSRHGCTPAYPSWEELQYFFKAGIRNKALRKDEALEQVHWSTNRKGDWDTMRVFAFDHRMQLEAIADELGVKHEQIGAFKKLCLQAAQKVSGGEAGYGILCDGRLGRDALFAASGSGLWIGRPVEWPGSRPLTLEPDLGKDFGGLSEWPLENVVKVLCFYHPDDTDEMRAAQEETVIRLFEAARRNRLEMLLEVIPSKVGPTDDLTAARIIERFYEIGVYPDWWKLEPMKTTAAWKNACDAVHRNDPYVRGIVVLGLDAPQSELEESFRLAAGFDLVKGFAVGRTIFADAARGWLGGKITDEEAVKDMAQRYTSLCRIWDEARAKKGEAA

SEQ ID NO: 10639 - protein, 199 aa, Debaryomyces hansenii CBS767
MASNITWHPNLTHVERSELRNQKGVTVWLTGLSASGKSTIACALEQSILGRGLNCYRLDGDNVRFGLNKDLGFSENDRNENIRRISEVAKLFNDSCCITLTSFISPYQKDRQLARELHEKDNLPFVEVYVDVPVEVAETRDPKGLYKKAREGIIKEFTGISAPYEAPDKPEIHLKNYEGVSIEDAAQQIIDYLIKNNYV

SEQ ID NO: 10640 - protein, 812 aa, Thermobifida fusca YX
MLEGDPSGKPWTAERAPGRGPARLEEDGLTGLNLAADSGAELALLGMDLTLVIVVLAVALLALAVAGTLVREVLAASQGTERMQNIARAVQEGAAAYLKRQFRTLAVFVIIIPLLLLLLPADTEAVRWGRSIFFAIGALFSAMTGFLGMWLAVRGNLRVAAAARAGEARAAMRIAFRTGGVAGMFTVGLGLLGAALVVLIYRADAPIVLEGFGFGAALLAMFMRVGGGIFTKAADVGADLVGKVEHHIPEDDPRNAATIADNVGDNVGDCAGMAADLFESYAVVLVASLVLGRVAFGTEGLVFPLLVPMIGVITAIIGIFVVSPRARDANAMAAINRGFFISAVISAVLVVGAALLYLPDTFAELEGVPADIAALDGNPQLIAIGAVLIGLLLAAAIQLLTGYFTETNRPPVREIGESSRSGPATVVLAGVSVGLESAVYSALLIAGAVYAAFLLGGGNITVSLFAVALAGTGLLTTVGVIVAMDTFGPVADNAQGIAEMSGDVEGSGAEVLNSLDAVGNTTKAITKGIAIATAVLAATALFGAFRTAVEAELGATEFSLSVDQPDVLVGVIIGAAVVFLFSGLAIMAVGRAAGRVVHEVREQFRTRPGIMDGTEKPEYGRVVDICTRDSLRELITPGLLAVLTPIALGFALGYAPLGAFLGGGIAAGALMAVFLANSGGAWDNAKKLVEDGHYGGKGSEAHEATVIGDTIGDPFKDTAGPAINPLLKVMNLVALLIAPSVVIYADNLALRLGITVASVALLVGVIVWSKRRSTDGSFAAEATKTQPEAPAADQGAAKEEPVSQGGGASSQE

SEQ ID NO: 10641 - protein, 152 aa, Triticum aestivum
  misc_feature (86)..(86): Xaa can be any naturally occurring amino acid
  misc_feature (104)..(104): Xaa can be any naturally occurring amino acid
  misc_feature (111)..(111): Xaa can be any naturally occurring amino acid
  misc_feature (118)..(118): Xaa can be any naturally occurring amino acid
  misc_feature (124)..(124): Xaa can be any naturally occurring amino acid
  misc_feature (147)..(147): Xaa can be any naturally occurring amino acid
  unsure (1)..(152): unsure at all Xaa locations
MGALDHLSRLCNLTHTREAIRIKKRRPLTTVNIKVKMDCEGCERRVKSAVKSIRGVTAVVVNRKISKVTVTGYVGPPKVLARVKEXLGKTTADMWPYVPYTVAXYPNVGGXYNKKGPXGPVRNXPQGMADPARRSQIHEHFNDEDVXACTVM

SEQ ID NO: 10642 - protein, 378 aa, Vibrio cholerae
MKRLFAWGAPLFALVALTLSLFSQADTKPSTIDSTSANYQQATLAGGCFWCTESDMEKLPGVVDVISGYAGGDVDNPTYKQVSSGKTGHIEVIQVTFDPKIVTYEQVLDNFFRHIDPTDDQGSFVDRGEQYRPAIFYHNAEQLEVAKRFMMEIDQLGIFKKPLKTELIEFKKFWPAEDYHQDYYKKNKVRYNYYRYASGRDQYLDEIFGADRNTHPKTLRQWIDEKNGQANVKAYVRPSDEQIRAKLTSLQYKVTQRDGTERPFDNEYWDNKEEGIYVDIVSGEPLFSSTDKYDSKTGWPSFTQPLNSSYIVTKDDNSLFYTRTEVRSRFADSHLGHVFNDGPAPTGLRYCMNSAAMRFIPKQEMAAQGYGEYLALFK

SEQ ID NO: 10643 - protein, 765 aa, Saccharophagus degradans 2-40
MTTVHNLGFPRIGAKRELKFACEAYWRGEIDQTQLDKTAHTLRANHWQTQLDAGVEWLPVGDFSYYDHVLDTSFLVGNIPVRAQADGQSKLDTYFKVARGTAKEAAGASCCGGSHAAEMTKWFDTNYHYLVPELNANTHFKLNASKLLTELEQARALTSKVKPVILGPLSYLWLAKITDGSTHKLGFLDDLITVYRELLGTLAKEAVEWVQFDEPILALDLPEQWQHAFERVYHQLQLPNLSVLLATYFGPLDTNLRLAARLPTAALHLDITRGGDDLPRVLDILSPHKILSVGVIDGRNIWKADLNKLLAQLKPVKERLGNGLWLAPSCSLLHTPVDLDSEEALDADIKNWLAFAKQKLQELNILQRALDNGETSVAEALVHNAGAIAARKASAKVNNAKVQSLVNNISPSLSERESPFATRIEKQQAKYNLPTLPTTTIGSFPQTSEIRKNRKAFKSGEISQQQYDRTLRAEIAHAIELQEKIGIDVLVHGEAERNDMVEYFGEQLDGYVFTQFGWVQSYGSRCVKPPIIFGDVSRPRKITVDWAEYAQSLTSKPVKGMLTGPITMLQWSFVRDDQPRKITAQQIALALRSEVNDLEAAGITIIQVDEPALREGLPLRKKDWQNYLDWAVEAFKISTAGVGDTTQIHTHMCYAEFNDIIQAIADLDADVITIETSRSNMELLSAFEQFNYPNDIGPGVYDIHSPNIPATEQVVGLIKKAAENLPLQRLWINPDCGLKTRKWEDVIPALENMVNAAKQLRAEVA

SEQ ID NO: 10644 - protein, 466 aa, Burkholderia fungorum LB400
MSKTSLIAADRKHLIHPVINYRAHEARGATVLESGQGAYLRDIDGNELLDAFSGLWCVNVGYGQQSIVEAATRQMTKLPYATTYFHFSSEPAIELADKLVALAPASLQHVYFTLGGSDAVDSAIRFITHYFNATGRPSKKQMIALERGYHGSSSVGAGLTALPAFHRNFDLPLPHQHHLPSPYAYRQTHGDDAQALIAASVAALEAKVAALGTDNVAAFFCEPIQGSGGVIVPPVGWLKAMRDACRRLDILFVADEVITGFGRTGPLFACEAEQVEPDLMTVAKGLTSGYAPMGAVLMSDEIYQGIAGDARDTAIVGHGQTYSAHPVSAAIGLEVLRLYQEGGLLANGQAQAPRFAAGLDALLGHPLVGDSRHRGLLGALELVADKDSRARFDPALKLPDRIAAAAYRNRLVFRAFGDSILGFAPALCFGEAEFEQMFGRLKRTLDEVLDETEVRAALRTAGRAAA

SEQ ID NO: 10645 - protein, 73 aa, SINNINGIA GLAZIOVIANA
  misc_feature (55)..(55): Xaa can be any naturally occurring amino acid
  unsure (1)..(73): unsure at all Xaa locations
ISGTNGEVMPGQWEFQVGPSVGIEAGDHIWCARYLLERITEQTGVVLSLDPKPIXGDWNGAGCHTNYSTKSMR

SEQ ID NO: 10646 - protein, 386 aa, Arabidopsis thaliana
MSPDGELVPVDSSAVVTAKRKTSQLSRSWISIDATGQKTVLDVDKHVIMHRVQIHARDLRILDPNLFYPSAILGRERAIVLNLEHIKAIITAEEVLIRDSSDENVIPVLEEFQRRLPVGNEEHGAHGDGDVGEEDESPFEFRALEVALEAICSFLAARTTELEKSAYPALDELTLKISSRNLERVRKLKSAMTRLTARVQKVRDELEQLLDDDGDMADLYLTRKLVGASSSVSVSDEPIWYPTSPTIGSMISRASRMSLATVRGDDETDVEELEMLLEAYFMQIDSTLNKLTELREYIDDTEDYINIQLDNHRNQLIQLELMLSAGTVCVSVYSMIAGIFGMNIPNTWNHDHGYIFKWVVSLTGTFCIVLFVIILSYARFRGLIGS

SEQ ID NO: 10647 - protein, 1080 aa, Psychrobacter arcticus 273-4
MNPVEQFTPQEPILFNPIDLLSPEYIAQSSTELHTRISPLYSVDEERWLTQLLPLAKPTDAERDSAATQTRQLVEHVRNDGKAVKMVDSLLLEYSLDTQEGVLLMSLAEALIRVPDNYTADALIHDKMSVADWKKHLKNDNGFMVNASTWGMMMTGRVVSIDSDTTASGFLDRMTKKMGEPVIRSAMQKAMRIMGHQFVLGETIEGANKNSQPYRNKGYTYSFDMLGEAAITHKDAEKYFNDYLHAIKATASVKVKEGMPKPSVSIKLSALHSRYEATQEAQVMGLLRQRCLLLIEAAREVNVDISIDAEEADRLEISLKLFESLYRDNLTADWDGLGLVVQGYSKRAIAILAWLARLAIEVGDRIPVRLVKGAYWDTEIKLAQQKGLSGYAVWTRKEGTDTAYLACARFLLSEHLRGLIWPQFATHNAHTLASIMTMSSHRDFEFQRLHGMGDALYDHILQAYQIPVRIYAPVGAHKDLLPYLVRRLLENGANSSFVHQLLDKSYPIDKLTVHPYDKLLTNATLHNPDIPLPLAIYGARRASFGPNIFIGSQWIPFKAAIDTHIHKTWSATSVINGKAINDYDADGKIHQLDSQAVRAPWNHEVIVGEVVYANATIAQQAIAAAVAGQGEWQAVSAAKRAAILRKMADLYEENYAELMALCQVEAGKTLQDSIDEIKEAVDFCRFYADEAERLDDVVYEFIDLAGKPSRQVYKARGTFICISPWNFPLAIYTGQVVAALAAGNTVVAKPAEQTSLIAHFAAQLMYQAGVPVAALQLVIGAGDVGAALTAADNIAGVIFTGSTQTAQRINQSLNAHAQVSGELPVFIAETGGQNAMIMDSTALPEQVVRDAVLSAFGSAGQRCSACRILCVQEEMADDVIELLQGNMAELIVGNPLYATTDVGPVIDIDAKRGLEAHIERMRAEPTATILAQTPMSASSEVSQDQATFVLPTAIEVKSIDVIGGEHFGPILHVLRYEARDLNKLIDAINATGFGLTLGIHSRIENTVEHIERRAFVGNTYINRNQIGAVVNVQPFGGCGLSGTGPKAGGPHYVARLMTLTTEQLALKNNTTENITQTTIA

SEQ ID NO: 10648 - protein, 516 aa, Zea mays
MQFALALDTNSGPHQIRSCEGDGIDRLEKLSIGGRKQEKALRNRCFGGRVAATTQCILTSDACPETLHSQTQSSRKNYADANRVSAIILGGGTGSQLFPLTSTRATPAVPVGGCYRLIDIPMSNCFNSGINKIFVMSQFNSTSLNRHIHRTYLEGGINFADGSVQVLAATQMPEEPAGWFQGTADSIRKFIWVLEDYYSHKSIDNIVILSGDQLYRMNYMELVQKHVEDDADITISCAPVDESRASKNGLVKIDHTGRVLQFFEKPKGADLNSMRVETNFLSYAIDDAQKYPYLASMGIYVFKKDALLDLLKSKYTQLHDFGSEILPRAVLDHSVQACIFTGYWEDVGTIKSFFDANLALTEQPSKFDFYDPKTPFFTAPRCLPPTQLDKCKMKYAFISDGCLLRECNIEHSVIGVCSRVSSGCELKDSVMMGADTYETEEEASKLLLAGKVPVGIGRNTKIRNCIIDMNARIGKNVVITNSKGIQEADHPEEGYYIRSGIVVILKNATINDGSVI

SEQ ID NO: 10649 - protein, 435 aa, Malus x domestica
MRMLSRNATFNSHGQDSSYFLGWQEYEKNPYHEVHNTNGIIQMGLAENQLCFDLLESWLAKNPEAAAFKKNGESIFAELALFQDYHGLPAFKKAMVDFMAEIRGNKVTFDPNHLVLTAGATSANETFIFCLADPGEAVLIPTPYYPGFDRDLKWRTGVEIVPIHCTSSNGFQITETALEEAYQEAEKRNLRVKGVLVTNPSNPLGTTMTRNELYLLLSFVEDKGIHLISDEIYSGTAFSSPSFISVMEVLKDRNCDENSEVWQRVHVVYSLSKDLGLPGFRVGAIYSNDDMVVAAATKMSSFGLVSSQTQHLLSAMLSDKKLTKNYIAENHKRLKQRQKKLVSGLQKSGISCLNGNAGLFCWVDMRHLLRSNTFEAEMELWKKIVYEVHLNISPGSSCHCTEPGWFRVCFANLPERTLDLAMQRLKAFVGEYYNV

SEQ ID NO: 10650 - protein, 236 aa, Eragrostis unioloides
  misc_feature (235)..(235): Xaa can be any naturally occurring amino acid
  unsure (1)..(236): unsure at all Xaa locations
RDRHGMDVGEWDPSKDKYIAMKYDAETVMEAKALNKEALQAAVGLPVDRKIPLVAFVGRLEEQKGPDVMAAAIPEILEQDVQIVLLGTGKKKFERLFKSAEAKYPDKVCAVVKFNAPLAHHIMAGADLLAVTSRFEPCGLIQPQGMRYGTPCACASTGGLVDTVVEGKTGFQMGRLSVDCKVVEPADVKKVATTIKRAIKIVGTPAYKEMVMNCMAQDLSWKGPAKNWENVLLSXG

SEQ ID NO: 10651 - protein, 1103 aa, Aspergillus oryzae
MSTPKAEPVPIPGPRGVPLMGNILDIESEIPLRSLEMMADTYGPIYRLTTFGFSRCMISSHELAAEVFDEERFTKKIMAGLSELRHGIHDGLFTAHMGEENWEIAHRVLMPAFGPLNIQNMFDEMHDIATQLVMKWARQGPKQKIMVTDDFTRLTLDTIALCAMGTRFNSFYSEEMHPFVDAMVGMLKTAGDRSRRPGLVNNLPTTENNKYWEDIDYLRNLCKELVDTRKKNPTDKKDLLNALINGRDPKTGKGMSYDSIIDNMITFLIAGHETTSGLLSFAFYNMLKNPQAYQKAQEEVDRVIGRRRITVEDLQKLPYITAVMRETLRLTPTAPAIAVGPHPTKNHEDPVTLGNGKYVLGKDEPCALLLGKIQRDPKVYGPDAEEFKPERMLDEHFNKLPKHAWKPFGNGMRACIGRPFAWQEALLVIAMLLQNFNFQMDDPSYNIQLKQTLTIKPNHFYMRAALREGLDAVHLGSALSASSSEHADHAAGHGKAGAAKKGADLKPMHVYYGSNTGTCEAFARRLADDATSYGYSAEVESLDSAKDSIPKNGPVVFITASYEGQPPDNAAHFFEWLSALKGDKPLDGVNYAVFGCGHHDWQTTFYRIPKEVNRLVGENGANRLCEIGLADTANADIVTDFDTWGETSFWPAVAAKFGSNTQGSQKSSTFRVEVSSGHRATTLGLQLQEGLVVENTLLTQAGVPAKRTIRFKLPTDTQYKCGDYLAILPVNPSTVVRKVMSRFDLPWDAVLRIEKASPSSSKHISIPMDTQVSAYDLFATYVELSQPASKRDLAVLADAAAVDPETQAELQAIASDPARFAEISQKRISVLDLLLQYPSINLAIGDFVAMLPPMRVRQYSISSSPLVDPTECSITFSVLKAPSLAALTKEDEYLGVASTYLSELRSGERVQLSVRLSHTGFKPPTELSTPMIMACAGSGLAPFRGFVMDRAEKIRGRRSSGSMPEQPAKAILYAGCRTQGKDDIHADELAEWEKIGAVEVRRAYSRPSDGSKGTHVQDLMMEDKKELIDLFESGARIYVCGTPGVGNAVRDSIKSMFLERREEIRRIAKEKGEPVSDDDEETAFEKFLDDMKTKERYTTDVFA

SEQ ID NO: 10652 - protein, 475 aa, Zea mays
MAGGFRVLHLVRPFLAFLPEVQSADRKIPFREKVIYTVISLFIFLVCSQLPLYGIHSTTGADPFYWMRVILASNRGTVMELGITPIVTSGMVMQLLVGSKIIEVDNSVREDRALLNGAQKLLGILIAIGEAVAYVLSGMYGSVSQLGTGNAILIILQLFFAGIIVICLDELLQKGYGLGSGISLFIATNICENIIWKAFSPTTINSGRGAEFEGAVIALFHLLITRTDKVRALHEAFYRQNLPNVTNLLATVLVFLIVIYFQGFRVVLPVRSKNARGQQGSYPIKLFYTSNMPIILHSALITNLYFISQLLYRKYSGNFLVNLLGKWKESEYSGHSVPVGGLAYYVTAPSSLADVLANPVHALFYVVFMLSACALFSKTWIEVSGSSAKDVAKQLKEQQMVMPGHRESNLQRELNRYIPTAAAFGGVCIGALTVLADFMGAIGSGTGILLAVTIIYQYFETFEKERATELGFFGF

SEQ ID NO: 10653 - protein, 235 aa, Eragrostis sessilispica
GIVNGMDVSEWDPSKDKYIAVKYDAETGIEAKALNKEALQAAVGLPVDRKIPLVAFVGRLEEQKGPDIMAAAIPEILEQDVQIVLLGTGKKFERLFKSAEEEYPDKVRAVVKFNAPLAHHIMAGADLLAVTSRFEPCGLIQLQGMRYGTPCACASTGGLVDTVVEGKTGFQMGRLSVDCKVVEPADVKKVATTIKRAIKFVGTPAYQEMVRNCMAQDLSWKGPAKIWENVLLSMG

SEQ ID NO: 10654 - protein, 459 aa, Rickettsia typhi str. Wilmington
MQEFDLVVIGSGPAGYTGSIRAAQLGLKVACIEKNDTLGGTCLNIGCIPSKALLNTSKKYEETLRYFENIGIIADTKLDLQKMLSNKDKIVLDLTKGIESLFVKNKVTKIKGEAKIISNNIVEVNKEHIKASNILIATGSSVIGIPTVIIDEEFIVSSTGALKLSKVPEHLIVVGGGYIGLELGSVWRRLGSKVTVIEYASSIVPMLDKEIAKQFMTIQQKQGIKFKLNTKVVASEVRSGKVNLTIEEADKRSIITSDVVLIAVGRKAYTKNLGFESIGITTDNQGRIEINEYFQTAVSNIYAVGDVVKGAMLAHKAEEEAIAAVEIIAGQAGHVNYNLIPSVIYTYPEVASVGATEQQLQEQGIHYKVGKFPFLANSRARAIGSTEGMVKILADSKTDRVLGAHIIGSDAGTLIAELIAYMEFGASTEDIARTCHAHPTLSEAIKEAALSVDKRTINI

SEQ ID NO: 10655 - protein, 110 aa, Bifidobacterium longum bv. Infantis
VTKVEGNNVHTKVVVAGPVSSHKGINLPGVAVSLPALTEKDENDLRWAIQTGADIIAMSFVRFATDIDRAHEIMDEEGRRIPIVAKIEKPQAVENLEDIVKVFDGIMVAR

SEQ ID NO: 10656 - protein, 149 aa, Daucus carota
MADQLTDDQISEFKEAFSLFDKDGDGCITTKELGTVMRSLMADQLTDDQISEFKEAFSLFDKDGDGCITTKELGTVMRSLDSEEELKEAFRVFDKDQNGFISAAELRHVMINLGEKLTDEEVDEMIREADVDGDGQINYEEFVKVMMAK

SEQ ID NO: 10657 - protein, 236 aa, Eragrostis sessilispica
  misc_feature (235)..(235): Xaa can be any naturally occurring amino acid
  unsure (1)..(236): unsure at all Xaa locations
GIVNGMDVSEWDPSKDKYIAVKYDAETAIEAKALNKEALQAAVGLPVDRKIPLVAFVGRLEEQKGPDVMAAAIPEILEQDVQIVLLGTGKKKFERLFKSAEEEYPDKVRAVVKFNAPLAHHIMAGADLLAVTSRFEPCGLIQLQGMRYGTPCACASTGGLVDTVVEGKTGFQMGRLSVDCKVVEPADVKKVATTIKRAIKFVGTPAYQEMVRNCMAQDLSWKGPAKTWENVLLSXG

SEQ ID NO: 10658 - protein, 358 aa, Oryza sativa (japonica cultivar-group)
MSAYCGKYKDELIKNAAYIGTPGKGILAADESTGTIGKRFASINVENVEENRRSLRELLFCTPGALQYLSGVILFEETLYQKTKDGKPFVDVLKEGGVLPGIKVDKGTIEVAGTEKETTTQGHDDLGKRCAKYYEAGARFAKWRAVLKIGPNEPSQLAIDLNAQGLARYAIICQENGLVPIVEPEILVDGPHDIDRCAYVSEVVLAACYKALNEHHVLLEGTLLKPNMVTPGSDAKKVSPEVIAEYTVRTLQRTVPAAVPAIVFLSGGQSEEEATLNLNAMNKLSTKKPWSLSFSFGRALQQSTLKAWSGKAENIEKARAAFLTRCKANSEATLGTYKGDAVLGEGASESLHVKDYKY

SEQ ID NO: 10659 - protein, 375 aa, Synechocystis sp. PCC 6803
MTMAMQPQTLVIKIGTSSLARPETGQLALSTIAALVETVCKLIGQGHRVVLVSSGAIGVGCSRLGLTERPKKMALKQAIAAVGQGRLMRTYDDLFSSLRQPIAQILLTRRELIERTAYVNAYNTFQALFELGVIAIVNENDTVAIDELKFGDNDTLSALVASLVEADWLFLLTDVDRLYSSDPRLDPDAYPIPLVKAAELAQLQVRTDSTGSAWGTGGMATKITAARIATGSGVRTVITHGQKPEQILAILQGANLGTQFEAQPRSDNARKRWIAYGLVPTGKIFIDAGAVQALKARGKSLLAIGVVALEGEFSATDAVIICDPQGQELGRGLVNYNCNELEKIKGLHSEAIAAVLGYVGPDTVIHRDNLVLQEN

SEQ ID NO: 10660 - protein, 108 aa, Bifidobacterium longum
KVEGNNVYTKVVVAGPVSSHKGINLPGVAVSLPALTEKDEADLRWAIRTGADIIAMSFVRFATDIDRAHEIMDEEGRRIPIIAKIEKPQALENLEEIVKTFDGIMVAR

SEQ ID NO: 10661 - protein, 439 aa, Ralstonia metallidurans CH34
MLSREDNELLVRVGPGTAMGTMMRLYWIPFLKSSEVTAGGQPYRVRLLGEDLVAFRDNSGNVGLVDHTCPHRGAPMVFGRNENDGLRCVYHGWKFKVSGQCEEMPCEPADSPMCKRMKIKAYPVKERNGILWAYMGPDAENAPELPDVEWNMVPEEQVAISMRVQECNWLQALEGELDSAHAAILHGRVGEGGVINQWRQAQDLSPTFECVQHDAGISIGARRKTPDGENYVRVNQFLMPFWTLVPPQSQFPELSGHAWVPIDDEHTLCLMFSYHPAKPFYERTRKLFKEGHNGRETGHHSDNAFEKRPVTEPYHTYWSKFNRGNAYQFDYQSQVEKYNSGMPGLWIQDAACQSGTTPILDRSKEHLGTSDTGVARMRRVLLEAVKKLVATGEHPVSSNAPAAFRWRAVSLTIPLGGDWTKLGEEAMRAEPGKDFGYTP

SEQ ID NO: 10662 - protein, 110 aa, Bifidobacterium adolescentis
VTKVEGNNVYTKVVVAGPVSSHKGINLPGVAVSLPALTEKDEEDLRWAIRTGADIIAMSFVRFATDIDRAHEIMDEEGRRIPVVAKIEKPQALENLEEIVKAFDGIMVAR

SEQ ID NO: 10663 - protein, 331 aa, Xanthomonas campestris pv. campestris str. ATCC 33913
MSNTPPLPHCAQPQAFGCGNPLVERSTRKAVVLTALMMVVEIVGGWVLNSMALLADGWHMSSHALALGLALFAYAFARRHARDGRFAFGTWKVEVLGGYTSAILLLGVAGLMAFQSVERLVSPKPVHYPEATAIAVVGLLVNLICAWWLRDSHGHAHHHDHAHGHGHGHTHGHGSHGHAHTHGHGDLNLRAAYLHVVADAATSVLAIVALVVGMRWGVTWMDPLMGIVGAVLVTVWAWGLLRSTGRVLLDAEMDAPVVEEIREVIAALPYAARIADLHVWRIGTDRHACLISLVTEATVAAEAIRAALQIHEELVHITVEVQRPEGASAAV

SEQ ID NO: 10664 - protein, 458 aa, Sodalis glossinidius
MYRKELLLVCQPCEKNLDYLTRQARFESNVRSYPRKLPLAIARAQGCWVTDVEGKRYLDCLAGAGTLALGHNHEAVVGAIQQFLASGLPMHTLDLTTPLKDAFSERVLSLLPAEGQDYCLQFCGPSGADAVEAALKLAKTVTGRSNVISFSGGYHGMTHGALSVTGNIGPKEALHGLMSGVQFFPYPHQYRCPLGIGGQRGEQALSHYFSQFIEDVESGVARPAAVILEAIQGEGGVNPAPVEWLRQVRTVTEKHGILLIVDEVQCGFARTGDMFAYQYAGIEPDIVVMSKAVGGGLPMALLGIKRGFDAWQPGAHTGTFRGNQMAMATGMATLNMLVGENIAAQAAQRGAWLQQQLNALRQRYPALGQVRGRGLMLGIEIVDERQPADALGSYPMDAPLAVAIQQHCFQQGLLLERGGRHGNVVRLLPPLTINEQECQSVIDRFTLALNGALVTSRC

SEQ ID NO: 10665 - protein, 347 aa, Ralstonia metallidurans CH34
MYLKNAWYVAGWNSEFQKDQLVSRRLLGQDIVFYRRGDGSVAALEDRCCHRAAPLSKGQQEGDQIRCMYHGLLFNCAGQCVEVPGQERISDKLKVRSFPTEVRDNLVWIWMGQPELADASEIKQVHWHNREGWRVEEGGYLRYASGVQLIVDNLLDFSHLGFVHNKSIGTRKQGNIRPETEFQGETVSVRFTTLGSPPPAFARELGQLPENVDRFNYYVWHIRGNLFVQDSVIAPVGEGYESLDPATMKLHTFIALTPCDENTAHYFWATAHNNFTSTTEDLTRRLTEQVAHAFDEDREIIEAQQAVISTAPDAPMVAIAADGTLLKVRRMLDALLLEERSPKAATQ

SEQ ID NO: 10666 - protein, 111 aa, Bifidobacterium angulatum
EVTKVEGNNVHTKVVVAGPVSSHKGINLPGVAVSLPALTEKDEEDLRWAIRTGADIIAMSFVRFATDIDRAHEIMDEEGRRIPVVAKIEKPQALENLEEIVKAFDGIMVAR

SEQ ID NO: 10667 - protein, 729 aa, Oryza sativa
MGKGGELWDDSALVDAFDHAVATFKAMHSKNTQATTSENEEPGDPAVAAPAGEENISAEVADELIEKDGSQTEPCEASETPYQTHEERKSTEQAPLQEKDLDKEAHFSEPKIHASDVADAEQKDTSNQQTWDYNELVKKYYELEEQSRKVLEQLHQTNYWNYQVPGQSSVYQQPQVPAYSATAPDPHSSTIQSPCCCANVPLVSVSCCSTGQTSGVSSCMQPSGGCSISLTCDQCPGTSATDSTGATCVQQAEKVSTDSDQVAKAAMMTAEGAMNFMRSTISGDLGSFPRTDAASGKESMPMGMNPNFDTMGADSDLAVVLNAWYAAGFYTGSLPVKMSDNLMDKVSAFGERLKITGSEVSKKMTAGMSSMSFKMKEIFQGQTPADKIVEEATSENLDGPDWSANLEICDLINTEKVNSVELIRGIKKRIMLKDARVQYLSLVLLETIVKNCEKAFSEVAAERVLDEMVRLIDDPQTVVNNRNKALMLIEAWGESGDELRYLPVYEETYKSLKSRGVRFPGRDNESLAPIFTPARSVAEAEVDANFSQQTFEDVQVHTYTAEETKEAFDVARNSIELLSTVLSSSPQQDALQDDLTSTLVQQCYQSQHTIQRMIETAGDNEAMLFEALSVNDEIQKVLSKYEQMKKPAASENAEQRPVVIPIATEHEDSATVGNEDALVRKPAGSRARSGGDDDILDDLDEMIFGKKGGSSSQEGPKKQDPKKDDLISF

SEQ ID NO: 10668 - protein, 470 aa, Colwellia psychrerythraea 34H
MLLWLRNDLRTHDNPALHYFLSRNALSQHDSAVPAKAIFFICEQQWQQHDWSPIKIDFIKRHAHALVKELALLNIELELIELDNFTQQKTYLHSYCQLHNITEVVANSEVEFNEQQRDKALYLELKASGIPLTLLEADVIVPKGKVLNQSGIMYKVFTPFKRAWLTYIQQGGFEYLGKVSVKSSAVNKADNQEEDQGSISSTWPLATVFEQQILPKFYQQKISTYKLNRDIPSIKGTSGISPYLAAGVISPRFVLRLLLNKHPDLLVASDSEEFSWLNEIIWREFYRHLLFHEQRLCKHQCYKENYQEMLWHNDAALFDAWCQGRTGYPLVDAAMRQLNQTGWMHNRLRMVVASFLTKHLLIDWRLGEKYFMQHLIDGDLASNNGGWQWAASTGCDAQPYFRIFNPIRQSERFDPKGVFIRKYIPELNNISDKAIHFPHQYIKDNELNIYWPAIVEHKEARLKALAFYKV

SEQ ID NO: 10669 - protein, 585 aa, Oryza sativa
MSPHAVMANVPEKTWWKEAVVYQIYPASFNDSNGDGLGDIPGIVSKIPYIKSLGVNTIWLSPIFASPQHDMGYDISDYRAIHEPYGTVEDVQSLIDQLHSNDMRLLMDLVVNHTSDEHAWFKESRSSKDNAKRDWYFWRDPKYDSEGNRKEPNNWKSIFGGSAWHFDEQTGQYYLALFLPSQPDLNWACEEMRQASYDDIRFWLDRGVDGFRIDSMNLMSKHPDLPDGKIVDDEPYQSGAEFFASGPKMHDYIREMRAIFDEYDAMTVGELGFTKDEQSVSEYVAKDRHELNMVFTGDIVDMDFGPDGKYGRDDFHPRKIRNITNMWQRVMPKVNGWNSVYLDNHDSGRSLSRYASDAPEHRATAAKMLATYLLTLSGTPFMLAGQEIGTANLGKDYGTEAYIDVEGRNHYDAVLKTRGGDHSKMGDVMREIQLKARDHGRLPMQWDSSANAGFSAEGTTPWMTINKDYVDWNVASQIDVPDSVLAYWRKMLALRKEHTDLLTYGSYKPLSELDTGEWVLGYERESFETGKKAVVLLNFSDKEQRVHVESPSREEYEVLVSNQEAGIKGGYVTLMPYGAVVLVSK

SEQ ID NO: 10670 - protein, 543 aa, Vibrio fischeri ES114
MEKRWWHNSVVYQIYPRSFCDSNNDGIGDLQGIISKLDYLQGLGIDVIWLSPVYQSPMDDNGYDISDYQAIAAEFGTMEDMKRLMQQAEDRGIKVVMDLVVNHTSDEHAWFVEAKSDKNSQYRDFYIWRDTDENGEAPSDIGSIFGGSAWQWDEENQQYYFHLFSKRQPDLNWENPEVHQKVFDMMNWWIDQGIGGFRLDVIDLIGKEVDKKITGDGERLHPLLQKMNQATFGDKDLLTVGETWGATPESAQLYSDPARHELSMVFQFEHITLLWEDGDKWKPKPLDLALFKQVMTKWQVELNNKGWNSLFWNNHDLPRVVSKYGCDGQYRVESAKMLATTLHMMKGTPYIFQGEEIGMTNVAFDTLEEYKDIETLNFYRVKTESGVSHESMMKGIHANSRDNARAPMHWDNSDNAGFTQGTPWIKLNPNYPEINVAAALEDKNSIFYHYQKLIALRKQNPVIVYGDFIPLFETHSAVFAYERKDNDQHLVVLNNFSAEPQTLALPEHIANRSVECLISNLEPTTQLGSELILAPYQSLVLAL

SEQ ID NO: 10671 - protein, 538 aa, Aspergillus fumigatus
MGFLEDEDQKYWDDVQAVKAWWKDSRWRYTKRPYTAEQIVAKRGNLKIHYPSNDQSKKLWKILESNFDKVASFTYGCLEPTMLTQMAKYLDTVYVSGWQSSSTASSTDEPSPDLADYPMNTVPNKVNQLFMAQLFHDRKQREERITTPKDQRSKLPNIDYLRPIIADADTGHGGLTAVMKLTKLFIERGAAGIHIEDQAPGTKKCGHMAGKVLVPISEHINRLVAIRAQADIMGETDLLAIARTDSEAATLITSTIDHRDHAFIVGSTNPNLQPLNDLMLAGEQAGKTGEELQAIEDQWIAQAGLKLFDDAVVDTIKAGVHVNKDALIKEYLTAAKGKSNSEARAIAKGITGVDIYWDWDAPRTREGYYRYQGGTQCAINRAVAYAPFADLIWMESKLPDYAQAKEFADGVHAVWPEQKLAYNLSPSFNWKKAMPREEQETYIKRLGALGYAWQFITLAGLHTTALISDQFARAYAKQGMRAYGELVQEPEMEQGVDVVTHQKWSGANYVDNMLKMLTGGVSSTAAMGKGVTEDQFKH

SEQ ID NO: 10672 - protein, 335 aa, Enterococcus faecalis V583
MGKVVTLGEIMLRLSTPVGIRVAQTENFAVHYGGGEANVAISLANYGHQVTFASKVPDNSLGEAAKKHLSRYGVSTEFVRTGGTRLGTYYLETGTGERAASVVYDRAYSSFAQIEEMEWDLHELFSGVEIFHISGITAALSKNWQSMTVALVKAAKQAGCQVSFDINYRGKLWSQKEASVALKAILPFVDICSAGVLDARYLLEIPEPEEELEDALTWYYRKMQERYPNIQVFYSTKRQVHSATDNELIGTLWYKGAYYTSKCHRLQPIVDRVGAGDAFAGGVLHGILAAYDPQTCIDFATAASALKHTVHGDCNQFSQKEVLAFLATGSGKINR

SEQ ID NO: 10673 - protein, 582 aa, Zea mays
MDTLFRSVSLQASEQQQQQQSASYNSRSTTSSGSRSSSHQTDASYNYYYHSNSGVGGVGQYYYGQQHPHQHQHQQYYLEPYQQEECGNAHRLYMDEDFSSSSSSRQHFHSHGAAVQPATSSAVTATAPTPPLSTSSTAAGAAHALFEAADLSFPPDLNLDFSSPASSSGGCVASSAAVGGGGGGRWASQLLLECARAVAARDSQRVQQLMWMLNELASPYGDVEQKLASYFLQGLFARLTASGPQTLRTLAAASDRNTSFDSTRRTALRFQELSPWSSFGHVAANGAILESFLDAAAAAARLLWPTLLEALATRSTDDTPHLSITTVVSSAPSAPTAAVQRRQRVMREIGQRMEKFARLMGVPFSFRAVHHAGDLAGLDLDALDLRDGGATTALAINCVNSLRGVVPGGARRRDAFAASLRRLDPRVVTVVEEEADLVAFDPGAPEESGDTEAAFLKVFGEGLRFFSAYMDSLEESFPKTSNERLALERGAGRAIVDLVSCPASESMERRETAVSWARRMRSAGFSPVAFSEDVADDVRSLLRRYREGWSMRDTGLDDSAAGAGIFLAWKEQPLVWASAWRP

SEQ ID NO: 10674 - protein, 42 aa, Morinda citrifolia
FGGCPKFLRRVDTALKNMGINERVPYNAPLIQFSSWMGGDRD

SEQ ID NO: 10675 - protein, 154 aa, Populus tremula x Populus tremuloides
MQIFVKTLTGKTITLEVESSDAIDNVKAKIQDKEGIPPDQQRLIFAGKQLEDGRTLADYNIQKESTLHLVLRLRGGTMIKVKTLTGKEIEIDIEPNDTIDRIKERVEEKEGIPPVQQRLIYAGKQLGDDKTARDYNIEGGSVLHLVLALRGGCL

SEQ ID NO: 10676 - protein, 158 aa, Zea mays
MSLIRRSNVFDPFSLDLWDPFEGFPFGSGSSSSLFPSFPRTSSETAAFAGARIDWKETPEAHVFKADVPGLKKEEVKVEVEDGNVLQISGERNKEQEEKTDTWHRVERSSGRFLRRFRLPENAKTEQIRAAMENGVLTVTVPKEDAKKPEVKSIQISG

SEQ ID NO: 10677 - protein, 133 aa, Arabidopsis thaliana
  misc_feature (9)..(12): Xaa can be any naturally occurring amino acid
  misc_feature (14)..(14): Xaa can be any naturally occurring amino acid
  misc_feature (20)..(20): Xaa can be any naturally occurring amino acid
  misc_feature (25)..(25): Xaa can be any naturally occurring amino acid
  misc_feature (29)..(29): Xaa can be any naturally occurring amino acid
  misc_feature (33)..(33): Xaa can be any naturally occurring amino acid
  misc_feature (41)..(41): Xaa can be any naturally occurring amino acid
  misc_feature (69)..(69): Xaa can be any naturally occurring amino acid
  unsure (1)..(133): unsure at all Xaa locations
ATPNDPGFXXXXDXPKQRGXNGSHXPIKXRYIXNPMRVETXCPSKFRELVQELTGQDAADLPPSPTTFXTAVDLHRPCESEMNLEPLDGEVRGEYYSPLDEEVFNAPQMSAGLSGFFSSGFYNVNALGSIGSL

SEQ ID NO: 10678 - protein, 496 aa, Mentha x gracilis
MELDLLSAIIILVATYIVSLLINQWRKSKSQQNLPPSPPKLPVIGHLHFLWGGLPQHVFRSIAQKYGPVAHVQLGEVYSVVLSSAEAAKQAMKVLDPNFADRFDGIGSRTMWYDKDDIIFSPYNDHWRQMRRICVTELLSPKNVRSFGYIRQEEIERLIRLLGSSGGAPVDVTEEVSKMSCVVVCRAAFGSVLKDQGSLAELVKESLALASGFELADLYPSSWLLNLLSLNKYRLQRMRRRLDHILDGFLEEHREKKSGEFGGEDIVDVLFRMQKGSDIKIPITSNCIKGFIFDTFSAGAETSSTTISWALSELMRNPAKMAKVQAEVREALKGKTVVDLSEVQELKYLRSVLKETLRLHPPFPLIPRQSREECEVNGYTIPAKTRIFINVWAIGRDPQYWEDPDTFRPERFDEVSRDFMGNDFEFIPFGAGRRICPGLHFGLANVEIPLAQLLYHFDWKLPQGMTDADLDMTETPGLSGPKKKNVCLVPTLYKSP

SEQ ID NO: 10679 - protein, 159 aa, Arabidopsis thaliana; identical to SEQ ID NO: 856

SEQ ID NO: 10680 - protein, 249 aa, Burkholderia vietnamiensis G4
MNATHDSARPPLAGRTALVTGGGRGLGEAICEELAQYGAHVIVADLDGDRAAAVAQRLARHGGQAIGRPLDVRDEASVLQVVHDAREALGDLDVIVNNAAIDVTAPIDDVSVDAWQQVMMTNLFGPYLMCHAAVPIMKARGSGHIVNIASTASKRAWPNASAYHATKWGLLGLSHALHAELRPAGVSVSAIVAGGMRTPFLLDRFPDIDEDTLQPPEHVAAAVRFVLTQPPGTVVPELMVLPMKETSWP

SEQ ID NO: 10681 - protein, 73 aa, SINNINGIA INSULARIS
  misc_feature (13)..(13): Xaa can be any naturally occurring amino acid
  unsure (1)..(73): unsure at all Xaa locations
ISGTNGEVMPGQXEFQVGPSVGIEAGDHIWCARYLLERITEQAGVVLSLDPKPIEGDWNGAGCHTNYSTKSMR

SEQ ID NO: 10682 - protein, 494 aa, Mentha x gracilis
MELNLLLVIIILVATYTVSLLNKQWRKPKSQQKQPPKLPVIGHLHLLWGGLPPQHLLRSIAREYGPVAHVQLGEVYSVVLSSAEAAKQAMKVLDPNFADRFDSVGSRIMWYDNDDIIFSPYNDHWHQMRKICVSELLSPKNVRSFGFIRQEEIERLIRVMKQSEGAPVDVTEEVSKMSCFVVCRAAFGSVLKDQGSLAELVKESLAMASGFELKDLYPSSWLLNLLSFNNYRLKRMRRRLDHVLDGFLEEHRVKKNGEFGGEDIVDVLFRMQKDSNIKIPITSNGIKGFIFNTFSAGAEASSTTISWALSELMRNPAKMAKVQAEVREALKGKTSVDLSEMQELKYMRSVVKETLRLHPPFPLIPRQSREECEINGFYIPARTRILINAWSIGRDPLYWEDPDTFRPERFDEVSRDFMGNDFEFIPFGAGQRICPGLHFGLANVEIPLAQLLYHFDWKLPQGMTDADLYVAGTPGLSGPRKKNVFLVPTIHKSR

SEQ ID NO: 10683 - protein, 647 aa, Psychrobacter arcticus 273-4
MSDASKRVFMNDKSVSKSTSQLATLIQMGKEQGYLTYAEVNDQLPDSITESDQIEDIIQMLTDVGIKIFESAPDADDILMNDDSSDDDMAADEAAAVLASVETEPGRTTDPVRMYMREMGTVDLLTREGEIAIAKRIEEGIRDVQHAMSYWPGTVQFVLDEYQKVQDGEKKLSDVITGFLDPETEEDKIAAQEAKEAAKEERERIKEEKENPPIIKEKAKAKSGLDDDEDEDDVEEDAEEETSGIDPEEVRLRLEEIEHLFIKAKQALLDYGRGSAQANEAYEQLASRFMMLKLNNRLSDQVMAIMHDVYDDVRKHERQIMRLVIRRGRMPREEFRKTFPSNETNVDWLIERIKGKPAFAATLEKVTDDVILLQRAIRDYEHKLEMEIHDMKDVARRMAIGEAKARRAKKEMVEANLRLVISIAKKYTNRGLQFLDLIQEGNIGLMKAVDKFEYRRGYKFSTYATWWIRQAITRSIADQARTIRIPVHMIETINKINRVSRQLLQEMGREPTPEELGERLEMDEVKVRKVLKIAKEPISMETPIGDDEDSHLGDFIEDGTISSPVDDATAAGLREATRDVLGNLTEREARVLKMRFGIDMPTDHTLEEVGKQFDVTRERIRQIEAKALRKLRHPSRSEHLRSFLEND

SEQ ID NO: 10684 - protein, 573 aa, Aspergillus oryzae
MANSPHGGVLKDLLARDAPRHDQLAAEAESLPAIVLSERQLCDLELIMNGGFSPLEGFMNQKDFDGVCENCRLADGNLFSMPITLDASQQVINELKLQAGSRVTLRDFRDDRNLAILTIDDIYRADKEKEAKLVFGGDPEHPAIKYLNTKVEEFYIGGKIEAVNKLNHYDYVALRYTPAELRIHFDKLGWSRVVAFQTRNPMHRAHRELTVRAARARAANVLIHPVVGLTKPGDIDHFTRVRAYQALLPRYPNGMAVLGLLGLAMRMGGPREAIWHAIIRKNHGATHFIVGRDHAGPGKNSKGEEFYGPYDAQHAVEKYKDELGIEVVEFQQVTYLPDTDEYKPKDEVPAGVKTLDISGTELRNRLRTGAHIPEWFSYPEVVKILRESSPPRHTQGFTVFLTGYQNSGKDAIARALQVTLNQQGGRAVSLLLGDTVRHELSSELGFSREDRHTNIQRIAFVASELTKAGAAVIAAPIAPYEHSRKAAREAVSQHGSFFLVHVNTPLEYCEKTDKRGIYAKARAGEIKGFTGVDDPYEAPENAHLTVDVSKQSVRSIVHEIILLLETEGFFDRA

SEQ ID NO: 10685 - protein, 334 aa, Mycobacterium tuberculosis H37Rv
MTRTSEGLAAFVVDQLEELYRRMWVLRLLDMALEQLRIEGLINGPLQGGFGQEAVSVGAAAALGEGDVIITTHRPHAQHVGTDAPLGPVIADMLGATAGDLEGADEDAHIADPRAGLPAAIRVVKQSPLLAIGHAYALWLRDTGRVTLCVTQDCDVDADAFNEAADLAAVWQLPVVILVENIRGALSVHLDRYTHEPRVYRRAVAYGMPGVSVDGNDVEAVRDCVANAVVRARAGGGPTLVQAITYRTTDFSGSDRGGYRDLAGSEQFLDPLIFARRRLIAAGTTRGRLDEQERAACQQVADAVAFAKARARPNGGGPISRPTSGWHQQPKTRF

SEQ ID NO: 10686 - protein, 262 aa, Bacillus subtilis
MGRLENKTAVITGAATGIGQATAEVFANEGARVIIGDINKDQMEETVDAIRKNGGQAESFHLDVSDENSVKAFADQIKDACGTIDILFNNAGVDQEGGKVHEYPVDLFDRIIAVDLRGTFLCSKYLIPLMLENGGSIINTSSMSGRAADLDRSGYNAAKGGITNLTKAMAIDYARNGIRVNSISPGTIETPLIDKLAGTKEQEMGEQFREATNGSRRSDVLASPKKWQQWHCSSHQTTAHTSQEKTSPQTAASWRTHGLGRC

SEQ ID NO: 10687 - protein, 111 aa, Bifidobacterium animalis
EVTKVEGNNVYTKVVVAGPVSSHKGINLPGVAVSLPALTAKDEEDLRWAIRTGADIIAMSFVRFATDIDRAHEIMDEEGRRIPVVAKIEKPQAVENLEDIVKVFDGIMVAR

SEQ ID NO: 10688 - protein, 76 aa, Malus x domestica
MKYILVTGGVVSGLGKGVTASSIGLLLKACGLRVTSIKIDPYLNTDAGTMSPVEHGEVFVLDDGGEVDLDLGNYDR

SEQ ID NO: 10689 - protein, 405 aa, Zea mays
  misc_feature (36)..(36): Xaa can be any naturally occurring amino acid
  unsure (1)..(405): unsure at all Xaa locations
MAAMPGGAHGAGAADPMQVDQPLPPAAAGTAHAPAXRQGSDPVTGHIISTTIGGKNGEPKRTISYMAERVVGTGSFGIVFQAKCLETGETVAIKKVLQDKRYKNRELQIMRSMDHCNVVSLKHCFFSTTSRDELFLNLVMEFVTESLYRVLKHYSNMNQRMPLIYVKLYTYQIFRGLAYIHTVPGVCHRDVKPQNLLVDPLTHQVKICDFGSAKMLVKGEANISYICSRYYRAPELIFGATEYTTSIDIWSAGCVLAELLLGQPLFPGESAVDQLVEIIKVLGTPTREEIRCMNPNYTEFRFPQIKAHPWHKIFHKRMPPEAIDLASRLLQYSPNLRCTALEACAHPFFDDLREPHARLPNGRPFPPLFNFKQELANASPELINRLIPDHARRHLGLTLLPATGP

SEQ ID NO: 10690 - protein, 504 aa, Mycobacterium tuberculosis H37Rv
MPELATSGNAFDKRRFSRRGFLGAGIASGFALAACASKPTASGAAGMTAAIDAAEAARPHSGRTVTATLTPQPARIDLGGPIVSTLTYGNTIPGPLIRATVGDEIVVSVTNRLGDPTSVHWHGIALRNDMDGTEPATANIGPGGDFTYRFSVPDPGTYWAHPHVGLQGDHGLYLPVVVDDPTEPGHYDAEWIIILDDWTDGIGKSPQQLYGELTDPNKPTMQNTTGMPEGEGVDSNLLGGDGGDIAYPYYLINGRIPVAATSFKAKPGQRIRIRIINSAADTAFRIALAGHSMTVTHTDGYPVIPTEVDALLIGMAERYDVMVTAAGGVFPLVALAEGKNALARALLSTGAGSPPDPQFRPDELNWRVGTVEMFTAATTANLGRPEPTHDLPVTLGGTMAKYDWTINGEPYSTTNPLHVRLGQRPTLMFDNTTMMYHPIHLHGHTFQMIKADGSPGARKDTVIVLPKQKMRAVLVADNPGVWVMHCHNNYHQVAGMATRLDYIL

SEQ ID NO: 10691 - protein, 112 aa, Bifidobacterium bifidum
LEVTKVEGNNVHTKVVVAGPVSSHKGINLPGVAVSLPALTEKDENDLRWAIQTGADIIAMSFVRFATDIDRAHEIMDEEGRRIPIVAKIEKPQAVENLEDIVKVFDGIMVAR

SEQ ID NO: 10692 - protein, 218 aa, Malus x domestica
AGRFLVTIHGKGGHAASPHLATDPILAACLTIISLQQIVSRETNPLESRVVTVGFVDDGQAGNVIPETVTLKGTFRSMTSEGLYYLQQRIKEVTEMQASVHRCTATVDFMLEKMRPYPATVNDEAMYKHAKSVGETLLGEPNVKLLPMGMGAEDFSFYAEKMAAAFFMIGTKNATFVSKTDLHSPFLVIDEEVLPIGAAFHAAVALSYLDNVDAVVTH

SEQ ID NO: 10693 - protein, 448 aa, Trichodesmium erythraeum IMS101
MNMNFKSSNPASSLALPPGDLGLPFIGQNKKIFKNPQNFIEEVYQKYGPVYKTNFLGKNFIYFQGYEAIKFILTNENKYFTYSQILRNYQRIFGENDITVLAGKEHRERQKILAKTIKSKNLNNYIDIIHDLSQSYFLKWIKSDYVDLYSEINNYTLDMILKLLLGIDYASKSEISNYLKDMSSGLNTIPVVFPWTKFGSALESKNKLFNQFEQIIVRRKKENNFGSDILGILLTVQEQMNYELTPREIVGQMVNLLSLGKKELSSALSSFFILTSEHLDVLKLLQIEQEKMDVSEPLSLDKYKKMVYLEQVIKEVLRLVPPVSGGLRKIIEDCSFQGFRIPKGWHAYYYISSVLKDPEIYKQPEIFNPERFNPTNAEDKKKPLCYIPFGGGARECIGKEFAYLVIKIFISALLDNCSWKFKENQDLTINTFPVARPAHKIEVCFTPK

SEQ ID NO: 10694 - protein, 495 aa, Glycine max
  misc_feature (277)..(277): Xaa can be any naturally occurring amino acid
  unsure (1)..(495): unsure at all Xaa locations
MFSPSMDSARDASGVAGTVLIPMRFVWPYGGRSVYLSGSFTRWSELLQMSPVEGCPTVFQVIHSLIPGHHQYKFFVDGEWRHDDHQPCVSGEYGIVNTVLLATDPNIVPVLTPEIVSGSNMDVDNEAFRCMVRLTDSTLNNVLLPRISDADIQISRQRISAFLSSHTAYELLPESGKVVALDVDLPVKQAFHILHEQGIFMAPLWDFCKGQFVGVLSALDFILILRELGNHGSNLTEEELETHTISAWKEGKSYLNRQNNGHGTMFSRRFIHAGPYXYLKDIAMKILQKEVSTVPIIHSSSEDASFPQLLHLASLSGILKCICRYFRHCSSSLPVLQLPICAIPVGTWVPKIGESNRQPLAMLRPTASLASALNLLVQAQVSSIPIVDDNDSLLDIYCRSDITALAKNRAYAHINLDEMTVHQALQLGQDAYSPYELRSQRCQMCLRSDPLHKVMERLANPGVRRLVIVEAGSKRVEGIVSLRDIFKFFIGGYDT

SEQ ID NO: 10695 - protein, 123 aa, Glycine max
  misc_feature (39)..(39): Xaa can be any naturally occurring amino acid
  unsure (1)..(123): unsure at all Xaa locations
MTSSSSALVLLLAAIFVFSGVAQSPALHNLRRRLLSPLXTPPKAATPSPSSSKSPPAVSPTPSPSGGISPPSPPSSVPASSPSSISSPPSDAPAPSENAAVSNGFAAAGSVVVGLVAAASLIM

SEQ ID NO: 10696 - protein, 111 aa, Bifidobacterium longum
EVTKVEGNNVYTKVVVAGPVSSHKGINLPGVAVSLPALTEKDEADLRWAIRTGADIIAMSFVRFATDIDRAHEIMDEEGRRIPIIAKIEKPQALENLEEIVKTFDGIMVAR

SEQ ID NO: 10697 - protein, 372 aa, Ustilago maydis
MPSLASRSGPPAASSSDPKTSSSSTEKVAKSVGSASPLRSSPNRPYALSDFEVVETLGTGTFGRVLLVRLKDRDVADRSAYFALKVLAKTDVIKLKQVSHINSERCILTKVDHPFLVNMIASFQDSKNCYMLMEYVVGGEIFSYLRRAGHFSADVARFYISTIVLAIEYLHSNKVVYRDLKPENLLIDSNGYTKITDFGFAKEVEDRTWTLCGTPEYLAPEIIQCSGHGSAVDWWSLGILLFEMLAGYPPFYDPNPILIYEKILAGNLVFPEEIDPLSRDLISSLLTADRSRRLGNLRGGANDVKNHPWFHGVDWKALQEGRILPPIVPYLGRPGDTSNFSKYEPARPSAMPGLYGADSGHHDLYADLFPDF

SEQ ID NO: 10698 - protein, 111 aa, Bifidobacterium pseudolongum
EVTKVEGNNVHTKVVVAGPVSSHKGINLPGVAVSLPALTEKDENDLRWAIQTGADIIAMSFVRFATDIDRAHEIMDEEGRRIPIVAKIEKPQAVENLEDIVKVFDGIMVAR

SEQ ID NO: 10699 - protein, 111 aa, Bifidobacterium thermophilum
EVTKVEGNNVYTKVVVAGPVSSHKGINLPGVAVSLPALTEKDEADLRWAIRTGADIIAMSFVRFATDIDRAHEIMDEEGRRIPIVAKIEKPQAVANLEDIVKTFDGIMVAR

SEQ ID NO: 10700 - protein, 507 aa, Symbiobacterium thermophilum IAM 14863
MLSAFSPPLPCDPARSHPTPEFPSSLQDYCEIRGIQSQPPARRDPTMDWLASLRSQIKPYRDRFPSHARLPRAGLPRAEILAEIAAMGAAESPAWRDGYASGAVYHGDEHHIAFLNEVYALQSQSNPLHPDLWPSTAKFEAEVVAMTAHMLGGDAAGGTVCGTVTSGGTESLLLAMKTYRDWARATKGITAPEAVVPVSAHAAFDKAAQYFGIKLVRTPLDADYRADVAAMREAITPNTVVVAGSAPGYPHGVVDPIPEIAALAAEHGIGCHVDACLGGFILPWAERLGYPVPPFDFRLEGVTSVSADTHKYGYGAKGTSVILYRRPDLLHYQYFIAADWPGGLYFSPTFAGSRPGALSATAWAAMLSLGEEGYLDATRRILQAADRLKAGVRAIPSLKILGDPLWVIAVASDELNIYQVMEEMAGRGWRLNGLHRPPAFHVALTLRHTEPGVVDRFLADLQDAVAQVRAHPEKATGMAPVYGMAAAAPPELVRQVLTGFIDLLYEV

SEQ ID NO: 10701 - protein, 42 aa, Morinda citrifolia
LEGVPKFLRRVDTALKNMGINERVPYNAPLIQFSSWMGGDRD

SEQ ID NO: 10702 - protein, 56 aa, Morinda citrifolia
KGVPKFLRRVDTALKNIGINERVPYNAPVIQFSSWMGGDRDGNPRVTPEVTRDVCL

SEQ ID NO: 10703 - protein, 92 aa, Brassica rapa
  misc_feature (64)..(64): Xaa can be any naturally occurring amino acid
  unsure (1)..(92): unsure at all Xaa locations
KETVCVTGASGFIGSWLVMRLLERGYFVRATVCDPGNLKKVQHFFDLPNAETQLTLWKADLFDXGSYDDAINGCDGVFHIATPMDFEFKDPE

SEQ ID NO: 10704 - protein, 56 aa, Morinda citrifolia
KGVPKFLRRVDTALKNIGINERLPYNAPVIQFSSWMGGDRDGNPRVTPEVTRDVCL

SEQ ID NO: 10705 - protein, 92 aa, Brassica oleracea
KETVCVTGASGFIGSWLVMRLLERGYFVRATVRDPGNLKKVLHLLDLPNAKTQLTLWKADLSDEGSYDDAINGCDGVFHIATPMDFESKDPE

SEQ ID NO: 10706 - protein, 497 aa, Mentha x gracilis
MELQISSAIIILVATFVASLLIKQWRKSESQQNLPPGPPKLPLVGHLHLLWGKLPQHAMADMAKKYGPVTHVQLGEVFSVVLSSREATKEAMKLLDPACADRFESIGTRIMWYDNDDIIFSPYSDHWRQMRKICVSELLSARNVRSFGFIRQDEMSRLLRHLQSSAGETVDMTERIATLTCSIICRAAFGAIINDHEELVELVKDSLSMASGFELADLFPSSKLLNLLCWNKSKLWRMRRRVDTILEAIVEEHKLKKSGEFGGEDIIDVLFRMQKDSQIKVPITTNAIKAFIFDTFSAGTETSSTTTLWVMAELMRNPAVMAKAQAEVRAALKGKTSVDVDDVQELKYMKSVVKETMRMHPPIPLIPRSCREECEVNGYKIPNKARIMINVWSMGRNPLYWEKPETFWPERFDQVSRDFMGSDFEFIPFGAGRRICPGLNFGLANVEVPLAQLLYHFDWKLAEGMKPSDMDMSEAEGLTGIRKNNLLLVPTPYNPSS

SEQ ID NO: 10707 - protein, 497 aa, Debaryomyces hansenii CBS767
MSKTRNPEQSYVSIPQINNNNNSDDGQLQEEEFELQSLSSLDYENSTTDRVEQEEQNEAESQEGKSSMNMAFMNMANSILGAGIIGQPFALKNCGLIGGMIVLISLSFLIDWTLRLMVMNAEISQTRSYQDTVNYCFGKYGKIVLLFTISSFAYGGCMAFCVIIGDTIPHVLKAFIPDSITASSSVIGWMFRRNTIIVIFTTCISYPLSLNRDISKLAKASGFALIGMLVIVLITVVRGPFTDSALKAPLTKLEWTVNINIFQGISVISFALVCHHNTIFIYNSLRNATLARFAKLTHIACAVSMICCFVMGVNGFLNFGDNTKGNILNNFRSDDNWINLARFCFGLNMLTTFPLEIFVVRDVLKEVVFANHKTEGGSTSHLELSSRQHFIITSLLVFTSMTVSLFTCNLGIILELIGATSASLMAYIIPPLCHLKLSWNRADYKNAGFADRREFIIWKLVPCIACTTFGFLVMFISSYMSIITNMKDADGGHCIGE

SEQ ID NO: 10708 - protein, 489 aa, Clostridium perfringens str. 13
MSQEQNTNLKRGLKSRHLSMIAMGGAIGTGIFLAMGDTLHQAGVGGAFVAYGIIGVMVYFLCTSLGEMATYMPETGSFGAYATKFVDPALGFALGWNYWYNWAITIAAEMVAGSLLMKFWFPNIPAIVWSALFLVIILTLNLLSAKAYGESEFWFAAVKVATVIIFLIVGVLMIFGILGGDNVGFKNFYENGGPFIGGAKSIFMIFLIAGFSFQGTELVGVAAGESEDPEKNVPKAVNTIFWRILLFYLGTILVIGALVPNAQAGVETSAFTIVFEKLGLAGAASIMNAIILTSVLSAGNSGMYASSRMLYAMAKNGMAPKIFEKTNSRGVPVNAIIITTIIASLCFLTGIYAENTVYVWLVAASGLSGFIAWLGIAICHYRFRKAYVAQGKDMSRLVYKAKLFPLGPIIALILCGIIVLGQGYAYLDVRNGVDWGGLISSYIGLPLFFGLFAYYKIKYKTKIIDLKDVDLSVEHIDTDESIEDEVFSY

SEQ ID NO: 10709 - protein, 586 aa, Debaryomyces hansenii CBS767
MFLIKPYYRHKIASNIYSRSILLKSSPKICLSGNSNIIICKKQLTTKTNIKTKSKYTFFKFGIALGLGGSILYATNDSFRNSTRHIALTADRVGVVALATIRCFKLYKDTLEAVYDSPNDRNKALSETHLKAANITLKALEKNGGIYIKLGQHITALTYLLPREWTDTMIPLQDRCPQSSLEEIENMFQSDLGVSMNELFSDFNPDPVGVASLAQVHIATLRNSGERVAVKVQHPSLEEFVPLDVYMTQRVFRLMRKVFPEYPLTWLGDELQSSIYVELNFVNEAENSERTANYFKDFQNETALRIPKIVSANPRILIMEYVGGARLDDLEYMKKNKINTSDVSSCLSHIFNNMIFTPDVGLHCDPHGGNLAIRSSKSRNGRNFEIILYDHGLYRQIPLKMKRDYSHFWLSLLDNDIPKMREYAEKITGIQGEQKFRIFASAITGRDPENALHYDISKARSDDEIINMQSQLQDDNGVLEDLMDMLSRMPRVILLILKTNDLTRHLDEGLDNPLGPERTFLILANYCAKCVFDEKKENINKNYKKFSFGWAIQSIKSWWFYQRRLSSLYIYDCVMSINNFKQKLGL

SEQ ID NO: 10710 - protein, 496 aa, Burkholderia fungorum LB400
MESLMSTNLEQLARALIRTDNFINGQWIAAASGRRFAVTDPATGNLIADVADSGPADARAATDAAAKALPAWRALLASERAAILHRWHALIVANRDALGALISLEQGKPLTEGRGEVGYGASYVAWFADEATRIYGDLIPQQQRGKRMSAVKEPIGVVAAITPWNFPLAMIARKIAPALAAGCTVVAKPAEDTPLTAIALVMLAHEAGVPDGVLNLISASRAAAAETVGDWLADSRVRKITFTGSTPVGKHLARESAGTLKKLSLELGGNAPFIVFDDADLDAAVNGLLAAKFRNGGQTCVCPNRVYVQHGVYEHFAALLRARVAELRVGPASDPTSQIGPMINVRAVDKIARHVDDAVEHGAVVLTGGRRLTELGPHYYAPTVLGNASASMALCGEETFGPVVPLFPFDTEQDAVQAANDTPFGLASYFYSENMRRIERVSRALEAGIVGINEGALASEAAPFGGVKESGYGREGSKYGLDDYLSIKYLCQGGLQ

SEQ ID NO: 10711 - protein, 506 aa, Brassica napus
MTSVNVKLLYHYVITNLFNLCFFPLTAIVAGKAYRLTIDDLHHLYYSYLQHNLITIAPLFAFTVFGSVLYIATRPKPVYLVEYSCYLPPTHCRSSISKVMDIFYQVRKADPSRNGTCDDSSWLDFLRKIQERSGLGDETHGPEGLLQVPPRKTFAAAREETEQVIIGALENLFKNTNVNPKDIGILVVNSSMFNPTPSLSAMVVNTFKLRSNVRSFNLGGMGCSAGVIAIDLAKDLLHVHKNTYALVVSTENITYNIYAGDNRSMMVSNCLFRVGGAAILLSNKPGDRRRSKYELVHTVRTHTGADDKSFRCVQQGDDENGKIGVSLSKDITDVAGRTVKKNIATLGPLILPLSEKLLFFVTFMGKKLFKDKIKHYYVPDFKLAIDHFCIHAGGRAVIDVLEKNLALAPIDVEASRSTLHRFGNTSSSSIWYELAYIEAKGRMKKGNKVWQIALGSGFKCNSAVWVALNNVKASTNSPWEHCIDRYPVKIDSDSGKSETRVQNGRS

SEQ ID NO: 10712 - protein, 411 aa, Arabidopsis thaliana
  misc_feature (40)..(40): Xaa can be any naturally occurring amino acid
  misc_feature (312)..(312): Xaa can be any naturally occurring amino acid
  misc_feature (323)..(323): Xaa can be any naturally occurring amino acid
  misc_feature (333)..(334): Xaa can be any naturally occurring amino acid
  misc_feature (336)..(336): Xaa can be any naturally occurring amino acid
  misc_feature (350)..(350): Xaa can be any naturally occurring amino acid
  misc_feature (352)..(352): Xaa can be any naturally occurring amino acid
  misc_feature (366)..(366): Xaa can be any naturally occurring amino acid
  misc_feature (399)..(401): Xaa can be any naturally occurring amino acid
  misc_feature (403)..(403): Xaa can be any naturally occurring amino acid
  unsure (1)..(411): unsure at all Xaa locations
KHTKKNSKTKKRPPPPPFCRRFFRIVFLLILSSADLAASXSQPGPTNQPYNYGRLSPAMAVIVVILIAALFFMGFFSIYFRHCSGVPDAGVSPAGGARSRATVNAAARGLDVSVVETFPTFLYSDVKTQKLGKGELECAICLNEFEDDETLRLLPKCDHVFHPHCIDAWLEAHVTCPVCRANLAEQVAEGESVEPGGTEPDLELQQVVVNPEPVVTAPVPEQLVTSEVDSRRLPGVPVDLKRVKFSRSHTTGHSVVQPGECTERFTLRLPEDVRKRIMKDWKLNRTNSLLVLPRGGSARRGKPIARSRPRSXRWLFRKTPSFXVEGVRDDGCXXRXGATGSVRASAVPNXSXGSDSVRAGDRWAFXRNASFLWRNSSVHVPRGGVNKDGEGTSVKSTGXXXSXSGTVRLPV

SEQ ID NO: 10713 - protein, 529 aa, Debaryomyces hansenii CBS767
LLPLVKINKLLSMFNNSTRQLFKQSSIRLQTINRHLSSSMAPLQAIRKYDYLVIGGGSGGVASARRAASYGAKVLLIELKFNKMGGTCVNVGCVPKKVMWYAGDLAEKRHHLKSYGLSTTDDKVKYGDFDWSTFKDKRDAYVKRLNGIYERNLKNEGVDYIYGFAHFANSNGDVEVTLTGDQELSFLEEGKEFKKDEKLVFAGSKTLIATGGYAINPPNVEGHELGTTSDGFFELQKQPKSVAVVGAGYIGVELSGIFKALGSETHLVIRGDTVLRSFDESIQNSITDYYTDKLGVNIIKQSGSVSKVEKIDGDRKKITLGNGQVLEVDELIWTMGRKSLINIGLDKVGVTLNDKQQVDVDQFQQTANPNIFSLGDVIGKVELTPVAIAAGRRLSNRLFSGDKAFENDHLDYSNVPSVIFSHPEAGSIGLSCKEAKEKYGEDQIKIYKSKFNAMYYAMMEDDSLKSPTSYKVVCAGEDEKVVGLHIVGDSSAEILQGFGVAIKMGATKKDFDSCVAIHPTSAEELVTMK

SEQ ID NO: 10714 - protein, 269 aa, Zea mays
RAGPGSIDCRQRGGAAIKIQCDACEGAAATVVCCADEAALCARCDVEIHAANKLASKHQRLPLEALSASLPRCDVCQEKAAFIFCVEDRALFCRDCDEPIHVPGTLSGNHQRYLATGIRVGFASASSACSDACDAHDDSDHHAPPKAAVSSAAQQVPSPPQFLPHGWAVDELLQFSDCESSDKLHKESPLGFKELEWFTDIDLFHGQTPKAGRRLAEVPELFGTQAANGAAYYRPAKATATAGTGVRQSKKARTEVTDDEDHLIVPDLG

SEQ ID NO: 10715 - protein, 151 aa, Debaryomyces hansenii CBS767
MTYCMVGLTTKQPHIFTNPKAKANRKTKRWFKEVGLGFKTPKAAIEGNYIDKKCPFAGSVSIRGKILTGTVVSTKMHRTIIIRRDYLHYVPKYNRYEKRHKNLAAHVSPAFRVQEGDVVVVGQCRPISKTVRFNVLKVAVSKSKSKQFTKF

SEQ ID NO: 10716 - protein, 442 aa, Psychrobacter arcticus 273-4
MSSSPNANNKAGLLRWLPWILLLVVTAAFIWLFASMKTASEAKWEPPRTTPAEQQASEPVSDASTPIASYHNGVARASQSVVNIYTTQTMAEHPYMNDPVLRRFFEYHGGPSEEQGNTNLGSGVIVSEDGYIVTNAHVIEKADEITVAFNDGRKSRAKLIGTDPDSDLAVIKVDMTGLTPLGFREKPTLVGDVALAIGNPFGVGQTITQGIISATGRTGLGVNKFEDFIQTDAAINPGNSGGALVDARGELIGINTAIYSRSGGSMGIGFAIPTAIVEQVMNALIKDGKVSRGWLGIEIQSQLRDPTQLETSTGVEVLDVVPKSPAAKSGLKVGDIVLTIDGVEMTDANTLIQYVARKAPNTTLQAQILRQGKNAQVKILLEERPVEEPVTVPVVIQDEMLGGAQPPSLQAPEQDTPMMSEAERDRMREELLLLFERDGAPL

SEQ ID NO: 10717 - protein, 1347 aa, Ustilago maydis 521
MPRRGNLGGHRVVIASLFLPDTLHFIEPEYESAFAESPEESTAPPSPESLPRETPLPLHELNSRLAASMSLLSQDRQARSMPLPARSPKSRQPSFADTKINMSELMSEAAVPRLDVRDAPVSGASSPHIGSRRGSMSEHTSIVGATGATADASDIPVAPASDHGRSAITSDPQGSSSFGTSSLSGQTAPTATATATATTTTAAAAASAATPKSRRTSFNTNTSSGTALATTALAPEGTGTRTPGARAGGKLGITTPLSIISDLAARQAGPVPPPISTFESERHHPFGSGAVTPMVGSQTPGNVNRPPGLARAFPMSLSMTKANPSGALSAGPGQLPTLKSLNASKSVNNAPGPGSGSKTPGAPTSLKSVKMASAVASGSINDHGRGVPVSPAQTRKASTSTVERPSSRELLGHARIPRGRERSVASSPTATIKGRSHLHHQAGGSSNQGPPAAPSSVFSRNRSMRSTTRRNNGRRASSTSRSHLGRRTSTASLDTVADDDTGLALPPFEFVSNPSANGGLINAVKSIERERLRAGKLYVGTPALSTEGWLGPAEKRHLEQRYMKERSSMPVWLQDDDFDLSYNRFCKQILWPTFHYTSPTSKGLDNEHEAFRAYWEVNRRFADAIEDVYQEGDIVWINDYHLLLVPQMVRERLPHATIGLFVHIAFPSSEIFRCLSMRETLLKGMLGADLIGFQTHNFCRHFRQTVSRILQLEATPKGVQLEGSFVTVAPFPIGIDVRSLNAKRQDPEVREWVAQLRQKYAGKRIIVGRDKLDWIKGVRQKLLAFEAFLDENPKWAGQVVLIQVALATTEENEEIGEATDVVSRINNKYSTLTYQPVVFLHVQDITFGQYLALLTVADCFLATSLREGMNLTSHEFVVCQEVSHRPLVLSEFTGTYSGLRACIGINPWNTKQVAHAIHKALTMDESEMVQRWTDLHRVVVTQTAQQWITSLLGHLERAHLEQERLENMFVPRLEVAQLVSEWRAAHSRLLLIDLEETLVTYDPLAAHEQGGFCPPDWLFALLNDLAADSKNVVYILSGMGTDDLDRVASRIDSIGFVAEDGCFVKHAGESHWNSLVAPFDLRPVREILSYFSERTPNSYIEERGASVCWRFWNDKLGDRNSHEAQWARRQSAEVANLIHERFSHSLRVVPCRTNCLILPRHASRVAAVQHIIMQMSIVGSMSAPGAHSGSQQSSASTPSLSAQRPNDIAQRLADQPHHSPLESAYKQPSNYWPMPTAHSTRASSPVVQHHPTPHSSMRSHHGSVSVHLPHHYHQTHTFDFVLALSQDEKLLAYVNTLDLFAPVTCTTVDLEKNRGTEAAYFLAQSDVQEALEEMVGFRARDLKWANR

SEQ ID NO: 10718 - protein, 269 aa, Pseudomonas syringae pv. syringae
MSRLQTRFDQLKEQNRAALVTFVTAGDPGYDTSLAILKGLPAAGADVIELGMPFTDPMADGPAIQLANIRALEAKQNLLKTLQMVREFRKGNNDTPLVLMGYFNPIHKYGVPKFIADAKEAGVDGLIVVDMPPEHNGELCDPAQAAGIDFIRLTTPTTDDVRLPTVLNGSSGFVYYVSVAGVTGAGAATLEHVEEAVARLRRHTDLPISIGFGIRTPEQAAAIARLADGVVVGSALIDHIANAKNDQQAIDGVLGLCAALSEGVRNASV

SEQ ID NO: 10719 - protein, 725 aa, Aspergillus oryzae
MRALSLASLIGIASAACPYMTGELERRDTGTDDATAATEEFLSQYYMADNDTFLTSDVGGPIEDQNSLQVGDRGPTLLEDFIFRQKIQRFDHERVPERAVHARGVGAHGVFTSYGDYSNITAASFLGAEGKETPVFVRFSTVAGSRGSSDLARDVHGFATRFYTDEGNFDIVGNNIPVFFIQDAILFPDLIHAVKPRGDNEIPQAATAHDSAWDFFSQQPSSLHTLLWAMSGHGIPRSLRHVDGFGIHTFRFVTDNGDSKLVKFHWKSLQGKASMVWEEAQQVSGKNPDFMRQDLFEAIEAGRYPEWELGVQIMDEEDQLKFGFDLFDPTKIVPEEYVPITKLGKMTLNRNPRNYFAETEQVMFQPGHIVRGVDFTEDPLLQGRLFSYLDTQLNRHGGPNFEQLPINQPRVPVHNNNRDGAGQMFIPLNPNAYSPNTLNKGSPKQANQTVGKGFFTAPGRESTGRFTRAVSPSFEDVWSQPRLFYNSLTPAEQQFVVDAIRFENSNVKSSVVRNNVIIQLNRVSNDLARRVARAIGVEEPEADPTYYHNNKTTDVGTFGQKLKKLDGLKVGFLASVETPASIEAASELSKQLSEDGVDVVVVAERLSDGVDQTYSGSDAIQFDAVIVAPGAEGLFSTFSFTAPSNATSSSTLFPAGRPLQIVIDGFRFGKPVGAVGSAATALKNAGIQTSRDGVYVDKSVTSGFVDGIKDGLRTFKFLDRFKLDH

SEQ ID NO: 10720 - protein, 499 aa, Colwellia psychrerythraea 34H
MCGFVVSVTKNLVDFNEKVGPDTLLRGLDSYNSDVFYSNGSCLYFEFSHLYITEPEVNQPLQSNSQVLVLNGEIYNYQELAARLNIDPTKFNDVSTFFKHIECYGLLDTLMRSNGMYSGFLFNKITGQCEIFTDHVGKKPLLVWNSRIGWHVGTGIDFNYVDEKTTEIKVVPPGISAFDIKTGNTFKEYSHLPIKGNESNLIDTLEDAISLRVPKNRPFAVALSGGLDSSIIAYILEARLSENAHYYVVGERYPDSVLALLEHLNICLSRVHLIKPPPADELLKLITKTCHITKSYNPSIISNGLATLLLCKAVHQDGIRVMLSGEGADEFFCGYQGMYNGRNDPTEMRANLIKDLHFTELRRLDLISASFSVEARCPFLDQRVTQIAMMLDVKNLCDIPMNIGKTLLRDTFKHLLPHSIINAPKESFDITSGLQKLVIDELQKEFKSERVALRTIFEKTLANYPIVNHHYFSHYPAFDKMIDRRDLKYRKIEFSINTQ

SEQ ID NO: 10721 - protein, 308 aa, Methanothermobacter thermautotrophicus str. Delta H
MITTVVGSYPTEPRGPETLGERLLNFFGSYDRYRPAIEAAVRDQFRAGVDIISDGQVRGDMVGHFAAAIGGMKIEDGTSIIYSRITPPAGSIGAADLRYAYRILRGLTDDESRGVKGIITGPSTMIYASRIEGFYDPQKRDRAVMDMAGVLKIEAKHLQDAGAAMIQIDEPFLSTGIVDMKTAGRAIDHIAAGLDIEVSLHVCGDIRNVLSDLLRFKVDVLDLEFAGRPSNLEVLEEKWRGDKGVGFGCVDTTTERVESMEEIRNLIKRGADIVGEENLYIDPDCGMRKLPRKAAFSKLRNMVMAAGN

SEQ ID NO: 10722 - protein, 112 aa, Bifidobacterium longum bv. Suis
LEVTKVEGNNVYTKVVVAGPVSSHKGINLPGVAVSLPALTEKDEEDLRWAIRTGADIIAMSFVRFATDIDRAHEIMDEEGRRIPVVAKIEKPQALENLEEIVKAFDGIMVAR

SEQ ID NO: 10723 - protein, 294 aa, Glycine max
FGSRDGFGVNTYTLINKAGKALYVKFHWKTTSGEKSLLDDEAIRVGGSNHSHATQDLYDSIAAGNYPEWKLYIQTLDPENEDRLDFDPLDVTKTWPEDVLPLQPVGRMVLNKNIDNFFAENEQLAFCPAIIVPGVYYSDDKLLQTRVFSYADTQRHRLGPNYLQLPANAPKCAHHNNHHDGFMNFMHRDEEVNYFPSRYDPVRHAEKVPVPPRILGGKREKCMIEKENNFKQPGERYRSWPSDRQERFVRRWVDALSDPRVTHEIRSIWISYWSQADRSLGQKIASHLNLKPSI

SEQ ID NO: 10724 - protein, 112 aa, Bifidobacterium longum bv. Suis
LEVTKVEGNNVYTKVVVAGPVSSHKGINLPGVAVSLPALTEKDEADLRWAIQTGADIIAMSFVRFATDIDRAHEITDEEGRRIPVVAKIEKPQALENLEEIVKAFDGIMVAR

SEQ ID NO: 10725 - protein, 281 aa, Shigella flexneri
  misc_feature (215)..(215): Xaa can be any naturally occurring amino acid
  unsure (1)..(281): unsure at all Xaa locations
MSQTSTLKGQCIAEFLGTGLLIFFGVGCVAALKVAGASFGQWEISVIWGLGVAMAIYLTAGVSGAHLNPAVTIALWLFACFDKRKVIPFIVSQVAGAFCAAALVYGLYYNLFFDFEQTHHIVRGSVESVDLAGTFSTYPNPHINFVQAFAVEMVITAILMGLILALTDDGNGVPRGPLAPLLIGLLIAVIGASMGPLTGFAMNPARDFGPKVFAXLAGWGNVAFTGGRDIPYFLVPLFSPIVGAIVGAFAYRKLIGRHLPCDICVVEEKETTTPSEQKASL

SEQ ID NO: 10726 - protein, 426 aa, Vibrio fischeri ES114
MSINVDLDFDHQHIWHPYTSTLNPLACYPVTHAKGVNIYLENGTELVDGMSSWWSTIHGYSHPHLNQALKDQTDKMAHVMFGGITHQPAVELCKKLVELSPSRLEQVFLADSGSVAVEVSLKMALQYWHAKGQPRSKFLTVRHGYHGDTFAAMSVTDPDNSMHGLYKGFLPEHLFVESPSSKFGGVWNPDDILPLEAMLAERHNDIAAMILEPIVQGAGGMRLYHPQYLKEVRRLCDKYGLLLILDEIATGFGRTGKLFACEHAEIEPDIMCIGKALTGGYMTLSATLTSKVVADTVCSGDAGCFMHGPTFMGNPLACAVANASLELIQQNHWQTQTKQIETCFSELLPQLKKHNVVADVRWLGAIGVVELTTPVDMEKIQAHFVEQGVWIRPFGKLIYMMPPFISQPEHITKLVNAIDSALETLF

SEQ ID NO: 10727 - protein, 361 aa, Arabidopsis thaliana
MALEEEEESQNAPFCVLDGLFCEEESEFHEQVDLCDESVEKFPFLNLGLSDHDMLWDDDELSTLISKQEPCLYDEILDDEFLVLCREKALDWIFKVKSHYGFNSLTALLAVNYFDRFITSRKFQTDKPWMSQLTALACLSLAAKVEEIRVPFLLDFQVEEARYVFEAKTIQRMELLVLSTLDWRMHPVTPISFFDHIIRRYSFKSHHQLEFLSRCESLLLSIIPDSRFLSFSPSVLATAIMVSVIRDLKMCDEAVYQSQLMTLLKVDSEKVNKCYELVLDHSPSKKRMMNWMQQPASPIGVFDASFSSDSSNESWVVSASASVSSSPSSEPLLKRRRVQEQQMRLSSINRMFFDVLSSSPR

SEQ ID NO: 10728 - protein, 311 aa, Haemophilus influenzae 86-028NP
MKVAVLGAAGGIGQALALLLKLQLPAGTDLALYDIAPVTPGVAVDVSHIPTAVNVKGFSGEDPTPALEGADVVLISAGVARKPGMDRSDLFNINAGIVRGLIEKVAITCPKACVGIITNPVNTTVAIAAEVLKKAGVYDKRKLFGVTTLDVLRSETFVAELKGLNVSRTSVPVIGGHSGVTILPLLSQVQYAKWNEDEIEPLAKRIQNAGTEVVNAKAGGGSATLSMAQAAARFARSLVKGLSGETVVECTYVEGDGKYARFFSQPVRLGKEGVEEILPIGPLSNFEQQALENMLPTLRADIELGEKFING

SEQ ID NO: 10729 - protein, 129 aa, Arabidopsis thaliana
MLREAATGRGVVFATEALLAEYGKSIQGLTFVIQGFGNVGTWAAKLIHEKGGKVVAVSDITGAIRNPEGIDINALIKHKDATGSLNDFNGGDAMNSDELLIHECDVLIPCALGGVLNKENAGDVKAKFI

SEQ ID NO: 10730 - protein, 479 aa, Vibrio fischeri ES114
MDYKHNLQCVWFRHDLRTIDNPALQAAVDNQQPTFALFIYSESQWKKHNKAPIQIDLIKRRLVELKNELEQLNIPLIVISSPLFSEIPAKITALFNELSVNALFANKEYEHDERLRDTQVYESLLNTNCYFFDAKCILPVGTIINRTQQPYKVFTPFKKAWKASFYQQQPHITKTGKSVLCDPKLIKKLSLNNDDSFVFSSSNESGSWPVSTKAIIDILRQFCRQKVSQYHNNRDYPEIQGTSQLSPYLAIGAISAKQCALRLHLEANYELNQGEDIWLDELIWREFYTHLLHFYPNLSKNQAFLSYDKYIEWDNNLDHFERWCKGETGFPIVDAAMKQLNTTGWMHNRLRMITASFLVKDLHIDWRWGEQYFMSKLIDGDFASNNGGWQWCASVGCDSSPYFRIFNPITQGKKFDADCTFIKHWLPELKALSNKEIHHPNPAPLLKSDNYPDQIVDHAQQRIKVIEVYKQAKQLDIAS

SEQ ID NO: 10731 - protein, 228 aa, Brassica napus
MMGTVELNLRDTELCLGLPGGETGAPVTGTKRGFSETVDLKLNLNNEPEINEGSKPHDVVTSVSKEKSSSPKDPAKPPAKAQVVGWPPVRSYRKNVMGSSQKPSGGTDTAAFVKVSMDGAPYLRKVDLKMYKSYDELSNALSNMFSSFTMGKYGGEEGMIDFMNERNMALVTTWDYVPSYEDKDGDWMLVGDVPWPMFVDTCKRLRLMKGSDAIGLAPRAMEKCKTRA

SEQ ID NO: 10732 - protein, 321 aa, Arabidopsis thaliana
MALLLLSHCSILSFQPPLSSSSSFHSSHIQSLSKPVFASPSPIRNSISSSVSSSSSSVSSSNSIPQVVVTRERGKNNQIIKALEKNGISSLELPLIQHARGPDFDRLASVLNDKSFDWIIITSPEAGSVFLEAWKTASSPEVQIGVVGAGTARVFEEAMKSADGLLHVAFTPSKATGKVLASELPEKVGKRSSVLYPASLKAGNDIVEGLSKRGFEVVRLNTYTTVPVQSVDTVLLQQALSAPVLSVASPSAVRAWLHLIQNEEQWSNYVACIGETTASAARRLGLKNVYYPEKPGLEGWVESIMEALGAHADSSNPSSRN

SEQ ID NO: 10733 - protein, 255 aa, Zea mays
KGRSRLRSSSTRLFHSRNLYPSSGIVSHTPLPQLRKTLEKRRRRDIAEVEAPAAAVAAATPEVATVTEGGAATEAKGPHKLHRQWTFWYDIQSKPKPGAAWGTSLKKAYTFDTVEEFWGLYDHVFRPSKLPGTADFHLFKAGVEPKWEDPECANGGKWTVPCNRKPTFETMWLETLMALVGEQFDETDDICGIVASVRPRGDKLALWTRTASNEAVQVNIGKKWKDVIDYNDKIIYTFHDDSRRDKPSRGGRYTV

SEQ ID NO: 10734 - protein, 127 aa, Hordeum vulgare subsp. vulgare
MARTKQTARKSTGGKAPHKQLATTAARKSARTTGRLKKLHRYRPGTVALREIRKYQKSTELLIRKLPFQRLVREIAQDFKTDLRFQSHAVLALQEAAEAYLRGLFEDTNLCAIHAKRVTIMPKDIQL

SEQ ID NO: 10735 - protein, 364 aa, Brassica napus
MGSTAETQITPVQVTDDEAALFAMQLASASVLPMVLKSALDLDLLEIMAKNSSPMSPSEIASKLQTKNPEAPVMLDRILRLLTSYSILTCSNRTIPGGDSVERIYGLGPVCKYLTKNEDGVSIAALCLMNQDKVLMESWYHLKDAVLDGGIPFNKAYGMSAFEYHGKDLRFNTVFNNGMSNHSTITMKKILETYKGFEGLTSLVDVGGGIGATLKMIVSKYPDLKGINFDLPHVIEEATSHPGIDHVGGDMFVSVPKGDAIFMKWICHDWSDEHCVKFLKNCYEALPEDGKVILAECILPETPDSSLSTKQVVHVDCIMLAHNPGGKERTEKEFEALAKGSGFKGINVACNAFGVYVIELLKKM

SEQ ID NO: 10736 - protein, 194 aa, Colletotrichum trifolii
MVVATIKCVVVGDGAVGKTCLLISYTTNKFPSEYVPTVFDNYAVTVMIGDEPYTLGLFDTAGQEDYDRLRPLSYPQTDVFLVCFSVTSPASFENVREKWFPEVHHHCPGVPCLIVGTQVDLREDPSVREKLSKQKMSPVRKEDGERMAKDLGAVKYVECSALTQYKLKDVFDEAIVAALEPPAPKKKSHKCLVL

SEQ ID NO: 10737 - protein, 1328 aa, Alternaria brassicicola
MAAETYSSVSAIIRNLARQHDPTRDPSFSAQVSANGAKTAVNAIALPGPESDEKTQLQQELSALCSRIDFLEHKSNHAANQQGQFPLTPAQEPSDEGALYTPAGVFRGNNGPPAQGRRGSNKERAIWVSNWLAAKESNGDPEQPAAALTEEQLNYLRVHLNQQADQIRNQREHIDNLSQEVNKQLTTQSMVFEHGIEDIGALKRELGKHQQANLAFQKALREIGAIVTAVAMGDLSKKVLIHAKEMDPEITLFKRTINTMVDQLQEFASQVTFLAREVGTEGRLGGQANLPGVAGIWAELTDINGMAKNLTDQVREIAVVTTAVAMGDLSRKIERPARGEILQLQQTINSMVDQLQSFATQVTKVARDVGTEGKLGGQAEIAGVKGMWNELTVNVNAMAQNLTTQVRDIAQVTTAVAQGNLTRKVEAECKGEILELKNTINRMVDQLQQFAHEVTKIAREVGSEGRLGGQATVHGVEGTWKDLTENVNGMAMNLTTQVREIAEVTTAVARGDLSRKVKAEVQGEILSLKITINTMVDRLNTFAQEVSKVAREVGTDGILGGQAQVDNVEGKWKDLTNNVNTMAQNLTLQVRSISEVTQAIAKGDMSRRVHVDAEGEIRLLKDTVNDMVMRLDEWSLAVKRVARDVGVDGKMGGQADVRDIDGRWKEITTDVNTMAQNLTSQVRAFGDITNAAMEGKFTQITVEASGEMDELKRKINQMVSSLRESIQRNTAAREAAELANKTKSEFLANMSHEIRTPMNGIIGMTQLTLDTDLTHAQREMLTIVHNLAGQLLTIIDDILDISKIEANRMVMEEIPFSMRGTIFNALKSSASRANERKLNLAYDVSYKVPDYVVGDSFRLRQIILNLVGNAIKLTEPGEVKVAISMAQEQECDPDHYVFQFAVSDTGIGIRGDKLNLIFDTFQQADGSTTRKFGGTGLGLSISKRLVTLMGGRMWVESDAGKGSVFYFTYKVRLGKPAIQAIQPQLVAYKQHTVLFVDQGNTGFSDEITEHLKTLDLVPMVVHSVEEVPETTKRTDMPYDCVIVDNDKTARELRIAERFKYIPLVMLTPHVCISLRSALENGISSYMTTPCLPIDLGNALIPALDGRAAPLVSDHSKSFQILLAEDNAVNQKLAVRILEKYHHRVTVANNGLEAFEHIQKKRYDCVLMDVQMPVMGGFEATAKIREWERDNGIPSTPVIALTAHAMVGDREKCLAAQMDDYLSKPLRQNQLIQTILRCATVGSTMYDHSSEPRYTASSHLPNITLPGKGNDNGGASSSSGGLPSPGKKRPQLEARGFTERGGAQSPNLLAVDQTDNGSVERLLLRSHSS

SEQ ID NO: 10738 - protein, 477 aa, Methanococcoides burtonii DSM 6242
MNLPDHKTKIVCTIGPASSSEEMLRELIFAGMNVARINFSHGSFEDHSKVIRLIKKLCDELNVIVSVMADLPGPKIRVGEIKDSPINLQKGDKVKLTTKRIVGSKDLIPVDFDKLPYCIAKKSDVYFNDGFIQMRCSGICSNEAECEVIVGGQLSSHKGVNLPGIDLLLDPVTEKDLKILDFALDEGVNCFSVSFIEQGSDIQKIRDHATKKGRSVFLVAKIERGHSVGNIDDIMEATDALMIARGDLGVEIPIEEVPIVQKELIHKANLRGMPVITATHMLESMTDNVRPTRAEATDVANAILDGTDAIMLSGETAVGKYPLEAVHTMVRIARKTEAWRDSTGNGMGNIRNAIGETEMGISDVISLQVYDAIRKLSIELVVTPTHSGATPRRISRFKPDNWIIAMSHVELTCEQLAYSYGVYPISVSDSSEDLEKKMLGALLSRGIGKSGNTIVLTQGSSGGTNLLKIIELDQLVE

SEQ ID NO: 10739 - protein, 651 aa, Ustilago maydis 521
MNVSRSRAVSAGSTAGGASIGGAGVDIPGASTSHASSSLNAPTARTHRERDRNARPKDRHALALRSIRDFLRGRSSYDVLPVSFRLIVLDTKLVVKPALDVMWQAGVVSAPLWQSTPHELLGNSPNQPESESQSQTQMQTQEQEQEQERTQSTNDTEAAHDDGKISPTTRVTADAVVGAKKKLSHKAHQLSGFAGMLTVNDIIHLIQYYYRHSSYDSAAKDVEKFRLERLRDIEQALNVPPPPLLSVHPLRPLFDACQLLIKTHARRLPLLDYDEQTGMETVVSVLTQYRVLKFIAMNCRETSALWRSLRQLNIGTYCQSYRASRAAASGTTSHRGSDASEPGVLKTDNGQSLNMSELNDLGASDEGARRHVDASSASCSAWNGGGIEADGSSAGNAFAPIATATLDTTVFDVVHMFSERGISAVPILDEEGNVVDMYETVDVITLVRTGAYTSLDLTIRQALERRAPDFSGVWTCSPDDSLASIFALLRKRRVHRLLVLEPEAVALKSETSDQTTALDELDSYVDDLVEHQRLRDKKDTQAFCDNLKTPFELRLEKGDPVRRTRGTLVGIVCLSDILRYVIGEHKLDDSVGGIGTGVGVSRATSIASSTPSSQHDDQHQANGTAHLASASTGPDAPQTIPEHEALHLPPQ

SEQ ID NO: 10740 - protein, 126 aa, Acetabularia peniculus
FSYLPPLTDEQISKQVDYILANSWTPCLEFAASDQAYAGNDNCIRMGPVASTYQDNRYWTMWKLPMFGCTDGSQVLSEIQACTKAFPDAYIRLVCFDANRQVQISGFLVHRPPSATDYRLPADRQV

SEQ ID NO: 10741 - protein, 677 aa, Candida albicans SC5314
MPSLDELTISTIRGLSVDAVSAANSGHPGAPLGLAPAAHVVWQKMKFNPKDPNWINRDRFVLSNGHACALLYSLLVLYKFELTVDDLKQFRQLGSKTPGHPEATDTAGVEVTTGPLGQGISNAVGIAIAQKQFAATYNKPDITLSDSYVYTFVGDGCLMEGVSSETSSLAGHLQLNNLIAFWDDNRISIDGDTAVSFTENVPDRYRAYGWNVLEVPDANTNIEAIAAAVDEAKKSTDKPTLIRLVTTIGYGSLKQGSHDVHGSPLKPDDIKQLKKSWGFKEDVDFFIPEEVSEYLAKHVSENQKVQKEWEAKLAEYKKKYPTEGAEIQRRLDGKLPEGWKEYLPKYTPADKPLATRKLSENVINALHGKIPEFIGGSADLTGSNLTRAEGSVDFQPPSTGLGNYDGVYIRYGVREHGMGAIMNGIAAFGANYKNYDGTFLNFVSYAAGALRLSALSHHPVIWVATHDSIGLGEDGPTHQPIETLAHFRAIPNLSVWRPADGNEVSAAYAAAIESTSHPSVIALTRQNLPQLEGSSIENALKGGYTLVKKDNPDVIIVSSGSEVSISVAASEELAKQGVKANVVSLPDFFTFDQQSDEYRLSVLPDGVPILSVEVMSTFGWSKYSHEQFGLNRFGASGKAADLYKYFEFTPEGIAERAQKTIKYYEGKQLLSPLDRAF

SEQ ID NO: 10742 - protein, 468 aa, Methanococcoides burtonii DSM 6242
MEVRGEYEAIIYTGDTIHNVHSASEIQFISLNDAMIGFDSLKASSPLSSSSDKFELVGDIDIYNSDEFACEFHCGNVENMSILTRFLQDTFGLEKCSDDEMFQRFDSSLKAIRGVYAIACHIGDKVFLARDLIGVKSLWYDVSSGFAFASEKKFLEMAGLHEVVELDPRHILCYDFENDIIKSYDREFLQGLAEHQGSFVEIRNGFLSLLKEAVSKRVPDEDFGVMFSAGIDSTILALLCKGFAEAKGVKCNYYTVGLSGQVPSPDIACARKLADELELELNVHEIGLDTVEEYLSTVVPLIEDATVPKTGVALTMYAACRAAKEDGINVLFAGAGADELFAGYNRFKSSESVNEDCIRDIMEMHKVNTYRDDTVAAFTGTIVRYPYLDENFVEYALAIPKEYKISDEMNKIVLRKAGEELGLPKYVVERGKKAAQYGSSFDQALKKLAKRAGFANKTDYINSFQERR

SEQ ID NO: 10743 - protein, 131 aa, Rickettsia typhi str. Wilmington
MAYNKKVIDHYENPRNVGSLDKNKKNVGTGLVGAPACGDVMKLQIEVDDDEIITDAKFKTFGCGSAIASSSLVTELVKGRSVEDAQEIKNTEIAKELSLPPVKLHCSLLAEDAIKAAIADYKQKKGNKKDS

SEQ ID NO: 10744 - protein, 226 aa, Arabidopsis thaliana
MSSSDSVNNGVNSRMYFRNPSFSNVILNDNWSDLPLSVDDSQDMAIYNTLRDAVSSGWTPSVPPVTSPAEEDKPPATKASGSHAPRQKGMQYRGVRRRPWGKFAAEIRDPKKNGARVWLGTYETPEDAAVAYDRAAFQLRGSKAKLNFPHLIGSCKYEPVRIRPRRRSPEPSVSDQLTSEQKRESHVDDGESSLVVPELDFTVDQFYFDGSLLMDQSECSYSDNRI

SEQ ID NO: 10745 - protein, 199 aa, Magnetospirillum magnetotacticum MS-1
FGPDGALLARRRKLMPTASERLVWGFGDGSTLDVASTPLGRIGTAICWENYMPLLRTTLYAKGVEIYCAPTVDDRATWLPTMQTIALEGRCFVVSSSQYLVRKDCPAEYGAVQGDDPATVLIRGGSCIVGPLGNVLVEPDFEGESVRLAELDRADIVRGKFDFDVVGHYARPDIFSLSVNERPLEPVTVTGSGAREAHP

SEQ ID NO: 10746 - protein, 173 aa, Triticum aestivum
  misc_feature (78)..(78): Xaa can be any naturally occurring amino acid
  unsure (1)..(173): unsure at all Xaa locations
AYLGDTLEQVCTKKQAGTGPEFASRRHIDHNMEGIFLHVLADTMGSAGVVISTLLIKYKGWLIADPICSVFISIMIVXLLPLLRNSAEILLQRVPRSHEKDFEAALDDVKKINGVIGVHNVHLWNLTNTDIVGTFHLHISAEADKSVIRESASRIFQEAGVQDLTIQIECVER

SEQ ID NO: 10747 - protein, 94 aa, Streptococcus pneumoniae
MLKPLGDRLVLKVEEKEQTVGGFVLAGSAQEKTKTAQVVATGQGVRTLNGDLVAPSVKTGDRVLVEAHAGLDVKDGDEKYIIVGEANILAIIEE

SEQ ID NO: 10748 - protein, 101 aa, Penicillium olsonii
EYKEAFSLFNKDGDGQITTKELGTVMRSLGQNPSESELQDMINEVDADNNGTIDFPEFLTMMARKMKDTDSEEEIREAFKVFDRDNNGFISAAELRHVMTS

SEQ ID NO: 10749 - protein, 411 aa, Glycine max
MVTMEESPRSPEAKLGLRVEDLWDIQEPQLSPDEKFNACFESIPVSAFPPPPSNQEIEIKSDATLAEAVKILAEHNILSAPVVDVDAPNDASWIDRYIGIVEFAGIVVWILHQSEPTSPRSPSGGAANTAAVNGITSEAFGLESASTTSGNFFEDLTSSQLYKNTKVRDISGSFRWAPFLALERSNSFLTMLLLLSKYKMKSIPVVDLGAGRIDNIITQSSVIHMLAECAGLQWFESWGTKKLSEVGLPMVTPNHIIKVYEDEPVLQAFKLMRKKRIGGLPVMDRGSSTAIGNISLKDVQFLLTAPEIYHDYRSITAKDFLTAIRSYLEKHEGAFPMSGDLITCNKDCTIKELIQLLDHEKIHRVYVADNDGNLEGLITLRDIISRLVHEPRGYFGDFFDGVLPMPPNSRV

SEQ ID NO: 10750 - protein, 521 aa, GIBBERELLA ZEAE PH-1
MEKFPDFVDTPLGESPSDSPSNTPGWANGAPPRPSDRWLPVSKHDSNWSTASRGHTRQKSLTDAIRTIRGRNGSVSQNAQEIADALRAPVSPKLIILCLMWYASSALTNTSSKSILIAFDKPATLTLVQFAFVSSLCIFMAWLATIFPVLRTKVAALKYPIRKPTRDVIRTTLPLAAFQIGGHLLSSTATSKIPVSLVHTIKGLSPLFTVLAYRFVYDIRYPKTTYLSLIPLTFGVMLACSGKTTYGGELIGVIHALLATVIFVTQNIFSKKLFNEAAKAEAESPHSMSKKLDKLNLLCYSSGMAFLLTLPIWLWSEGFTLLMNLYHEGSIDLNEQPNSMDHGRLTLEFIFNGVFHFGQNILAFILLSIVSPVTYSVASLIKRVFVIVLALVWFRSPTTPIQGVGIALTFLGLYLYDRTKSSNKADQKAQSMQVKRSSLLPTTNGGLRPTPITESPQSTDLNPYPYREGYFGRPTAAEDSKKSDDGGARSRTPATSNGWLPPGTKQEDTWQPGDRVAGVAR

SEQ ID NO: 10751 - protein, 500 aa, Spinacia oleracea
MEKVKAAKKFIENHYRSQMKNIQERKERRWVLEKQLASSDVPEEEQMSLIKDLERKETEFMRLKRNRICVNDFELLTIIGRGAYGEVQLCREKKSENIYAMKKLKKSEMLSRGQVEHVRAERNLLAEVDSHCIVKLFYSFQDAEYLYLIMEYLPGGDMMTLLMREDILTEKVAKFYIAQSVLAIESIHKHNYIHRDIKPDNLLLDKNGHMKLSDFGLCKPLDCATLSTIKENESMDDVSKNSMDIDASLPDAGNGHSWRSAREQLQHWQRNRRKLAFSTVGTPDYIAPEVLLKKGYGMECDWWSLGAIMYEMLVGYPPFYSDDPITTCRKIVHWRHYLKFPDDAKLTFEARDLICRLLCDVEHRLGTGGAEQIKVHAWFKDVEWDRLYETDAAYKPQVNGELDTQNFMKFDEANPPTPSRSGSGPSRKMLTSKDLSFVGYTYKNFDAVKGLKHSFDRKGSTSPKRPSLDSMFNENGMDYTAKHAEEMDVQMLTADDCMSP

SEQ ID NO: 10752 - protein, 620 aa, Cornus canadensis
MASSGEQNQVELLENLKNRLAIAVRSIQWSYAIFWSISSRQPGVLEWGDGYYNGDIKTRKTVQAVEFNADQLGLQRSEQLKELYESLAVTESNQQARRPSAALSPEDLTDTEWYYLVCMSFVFNIGQGLPGRTFANGQPIWLCNAHYADSKIFSRSLLAKSASIQTVVCFPFLGGVVELGVTELVLEDPNFIQHIKTSFLENPYRTVPKIPSYASENTRTEKDLILAKPSHNLLDAALECGEIDMCAPNNNSSGFLPNQRTEKSVMVEGLSGGASQVQSWQFMDDEISNCVQNSTNSSESIARTSENPEKDCCLTDLPECNLTKLTSLDLPNDDIHYHSVVSSLLKNSHQLILGPYFHKCNRESSFMGWKKTPSDIQQRRRGTPQKLLKKVLFEVARMHGGCLVESRQDNSRKDGLWRPEDDEIGTTDLFSERRRRDKTKERYSVLGSLIPSTSKDDKVSILDGTIEYLKELERRLEDSECLEARTRSKPQDTAERTSDNYENDRIGIGKKPMINKRKACDIVEAELEINLVQLKDSSTDDVSVRIIDKDVFIEIRCPWRERLLLEIMDAISNFHLDSHSVQSSNIDGILSLSIKSKFKGSTVASTGMIIQALQRIIWKC

SEQ ID NO: 10753 - protein, 331 aa, Oryza sativa (indica cultivar-group)
MEANLPPGFRFHPRDEELIVDYLYHKLSGGDGGGGAGEFYGGVAMVDVDLNKCEPWELPAYFLHNLIIFPARARARAAGRRRRADAARVGATEWYFFSLHDRKYATGQRTNRATRSGYWKATGKDRAIVTRRRAAGGEAVAGGEVVGMRKTLVFYQGRAPRGSKTEWVMHEFRVDGHAVADHPSSSTSSSSSNLLKEDWVLCRVFYKSRTANPRPVVSGEAAVSLSGELSLPPPPPLPVAPAVIDGYTGGGYYEQDSSAGCHHHHHRPPTSAALPFKDLTDFRDLLSNMVQGGGAAAAAAKSEGFHLGWSEEESSGYVQQSAMASQAWNPF

SEQ ID NO: 10754 - protein, 356 aa, Colwellia psychrerythraea 34H
MKLFSSIKYTITAISYGVLIAVVLLLLIPGLVPGLNDTSLATSLFKGSQAQQAPLSFAKAVSIASPAVVNIYSQQIEVNPQYGRKARKSTRLGSGVIMDTHGYILTNLHVIRQADLIQVLLQDGQIYPAELIGFDHYTDLAVLKVNVNNLPVIPQKEQQTSLVGDIVLAIGNPLNLGQTVTQGIISATGRNGLSNTSYLEFLQMDAAINEGNSGGALINSNGILVGINSRKFTQSNPQLSIQGIFFAVPYQLAYKVMRQIIENGKVVRGWLGISTNRYHKELKGFVIEEVMDNSPAKAAGIQVGDVVYQIDNESINSVTGALDIIAETQPNTELTFKIYRQGNTIEAKVKIIELRN

SEQ ID NO: 10755 - protein, 298 aa, Triticum aestivum
MDGLHGADACFSPGRAMSPQVRPPAGPPDVGSHYLAELLQEHQKLVPFTQVLPICSKLLSNEIMRVTCLLKHQHGGDFERLPPMASPNQMHHHPSPPMPNFCGNGFGPWNHGAHPERVGFPQGPVGWQGAPQSPSSYIVKKILRLEIPTDTYPNFNFIGRLLGPRGNSLKRIEASTGCRVFIRGKGSIKDPGKEELLKGRPGYEHLDDPLHILIEAELPANVIDARLSKAQEILEELLKPVDESQDYYKRQQLRELAMLNSPLREESPRLSPHPSPHPSPHQGGASPFSNGGMKRSKQ

SEQ ID NO: 10756 - protein, 368 aa, Arabidopsis thaliana
MDRLKLYFSVFVLSFFIVSVSSSDVNDGDDLVIRQVVGGAEPQVLTSEDHFSLFKRKFGKVYASNEEHDYRFSVFKANLRRARRHQKLDPSATHGVTQFSDLTRSEFRKKHLGVRSGFKLPKDANKAPILPTENLPEDFDWRDHGAVTPVKNQGSCGSCWSFSATGALEGANFLATGKLVSLSEQQLVDCDHECDPEEADSCDSGCNGGLMNSAFEYTLKTGGLMKEEDYPYTGKDGKTCKLDKSKIVASVSNFSVISIDEEQIAANLVKNGPLAVAINAGYMQTYIGGVSCPYICTRRLNHGVLLVGYGAAGYAPARFKEKPYWIIKNSWGETWGENGFYKICKGRNICGVDSMVSTVAATVSTTAH

SEQ ID NO: 10757 - protein, 997 aa, Alternaria brassicicola
MAAETYSSVSAIIRNLARQHDPTRDPSFSAQVSANGAKTAVNAIALPGPESDEKTQLQQELSALCSRIDFLEHKSNHAANQQGQFPLTPAQEPSDEGALYTPAGVFRGNNGPPAQGRRGSNKERAIWVSNWLAAKESNGDPEQPAAALTEEQLNYLRVHLNQQADQIRNQREHIDNLSQEVNKQLTTQSMVFEHGIEDIGALKRELGKHQQANLAFQKALREIGAIVTAVAMGDLSKKVLIHAKEMDPEITLFKRTINTMVDQLQEFASQVTFLAREVGTEGRLGGQANLPGVAGIWAELTDINGMAKNLTDQVREIAVVTTAVAMGDLSRKIERPARGEILQLQQTINSMVDQLQSFATQVTKVARDVGTEGKLGGQAEIAGVKGMWNELTVNVNAMAQNLTTQVRDIAQVTTAVAQGNLTRKVEAECKGEILELKNTINRMVDQLQQFAHEVTKIAREVGSEGRLGGQATVHGVEGTWKDLTENVNGMAMNLTTQVREIAEVTTAVARGDLSRKVKAEVQGEILSLKITINTMVDRLNTFAQEVSKVAREVGTDGILGGQAQVDNVEGKWKDLTNNVNTMAQNLTLQVRSISEVTQAIAKGDMSRRVHVDAEGEIRLLKDTVNDMVMRLDEWSLAVKRVARDVGVDGKMGGQADVRDIDGRWKEITTDVNTMAQNLTSQVRAFGDITNAAMEGKFTQITVEASGEMDELKRKINQMVSSLRESIQRNTAAREAAELANKTKSEFLANMSHEIRTPMNGIIGMTQLTLDTDLTHAQREMLTIVHNLAGQLLTIIDDILDISKIEANRMVMEEIPFSMRGTIFNALKSSASRANERKLNLAYDVSYKVPDYVVGDSFRLRQIILNLVGNAIKLTEPGEVKVAISMAQEQECDPDHYVFQFAVSDTGIGIRGDKLNLIFDTFQQADGSTTRKFGGTGLGLSISKRLVTLMGGRMWVESDAGKGSVFYFTYKVRLGKPAIQAIQPQLVAYKQHTVLFVD

SEQ ID NO: 10758 - protein, 501 aa, Nocardia farcinica IFM 10152
MRTGANAPQGAGSGFVVVANRLPVDLERLPDGSTRWKRSPGGLVTALEPVLRNNKGAWVGWAGVPDVDVDPIIEDGLELHPVPLSAQEVADYYEGFSNGTLWPLYHDVIVRPTYDRAWWAAYVQVNRRFAEETAKVAAEGATVWVQDYQLQLVPKMLRMLRPDLTIGFFLHIPFPPVELFMQMPWRTEIIEGLLGADLIGFHLPGGAQNFLYLARRLAGQPTSRGTVGVRSKLGVVQVGFRTVRVGAFPISIASAELDEQSRRRSIRERAAKIRAELGNPKNILLGVDRLDYTKGIDIRLNALEELLVEGRFDPAETVMVQLATPSRERVESYIQMRGDIERQVGRINGEFARVGYPVVHYLHRPIPRDELLAFFVAADVMLVTPLRDGMNLVAKEYVACHSGLNGALVLSEFTGAAAELRQAYLCNPHDLDSVKDAIVSALEDDRETKRRRMRSLRRQVLAHDVDRWARAFLDALAQDQVAGSALITENDDYGDNDAPSR

SEQ ID NO: 10759 - protein, 216 aa, Parachlamydia sp. UWE25
MKKLIQGIADFRQGLTEESRHLFANLALGQTPDVLFIACSDSRVVPNLFASTNPGDLFVLRNIGNLIPPFSVDSDNSALAAIEFSIFSLNVPDIIVCGHSECGAMRALVEGIQGNCCSHLQSWLKHGENSLNLVRNGMTINPSLSEHNQISQINVLQQIEHIKSYPFIRERLDKNELRIHGWWFDIAHADVYCYKEDFNQFVLIDEKEAQLILART

SEQ ID NO: 10760 - protein, 549 aa, Legionella pneumophila str. Lens
MKSIKQLIRLIHINYILAKNGLDNVVVSIKLFAPLRFIVYLNPWNWLRKEKLTRGEALRKSLEELGPIFIKFGQALSTRPDILPEDIAKELSKLQDKVPPFPSHIAMNIIEQAYKQSAYDVFAQFDPIALASASMAQVHAATLKTGENVVVKILRPNMRRLIEQDLSIMYTIAALADRYWPEGKRFKPKEIVKEFEHTLLDELDLMREAANAAQLRRNFNQSPMLYIPEIYWDYCHHNILVIERIHGIPVTDIASLRAHGIDIKKLAERGVEIFFTQVFRDCFFHADMHPGNIFVSYQNPKDPQYICVDFGIIGTLTDNDKRYLAENLVAFFNRDYKRVAELHVESGWVSRDTPVAEFESSIRTVCEPIFEKPLKDISFGQVVFRLFQVARRFHMEVQPQLILLQKTLLAIEGLGRQLYPELDLWATAKPFLEKWVREQMGPKAFIKRLKQNLPFFTEQLPHMPKLIFDILEMKKDQLLTVHELTRMQSENNNPTIQWKSVGLGVFFSFLSLGVISYFDLLDYNHLTTITIAGSVLAGVFVLINRKIRN

SEQ ID NO: 10761 - protein, 432 aa, Photobacterium profundum SS9
MSKSADLFAKAQKIIPGGVNSPVRAFAGVGGSPLFIERADGAYIFDADGKAYIDYVGSWGPMILGHNHVAVRDAVIKAAQQGLSFGAPTEMEITMAELVSKLVPSMEQIRMVSSGTEATMSAIRLARGFTNRDKIIKFEGCYHGHADCLLVKAGSGALTLGQPNSPGVPADFAKHTLTCTYNDLETVREAFAAHPEQIACIIVEPVAGNMNCIPPVPGFLEGLRTICDDFGALLILDEVMTGFRVSEGGAQGYYNIKPDLTTLGKIIGGGMPVGAFGGRKDIMQYIAPTGPVYQAGTLSGNPVAMAAGHACLSVLTEEGNEKRLANTTKILANGFKSLADKYNIPLAINQVGGMFGFFFTEQKTVTSYADVTKCDIERFKRFFNLMLKSGVYLAPSAYEACFTSLAHGDKEIEATLNAAERAFATLAKEANA

SEQ ID NO: 10762 - protein, 701 aa, Arabidopsis thaliana
  misc_feature (283)..(283): Xaa can be any naturally occurring amino acid
  misc_feature (314)..(315): Xaa can be any naturally occurring amino acid
  misc_feature (318)..(318): Xaa can be any naturally occurring amino acid
  misc_feature (322)..(322): Xaa can be any naturally occurring amino acid
  misc_feature (341)..(341): Xaa can be any naturally occurring amino acid
  misc_feature (370)..(370): Xaa can be any naturally occurring amino acid
  misc_feature (382)..(382): Xaa can be any naturally occurring amino acid
  misc_feature (397)..(397): Xaa can be any naturally occurring amino acid
  misc_feature (534)..(534): Xaa can be any naturally occurring amino acid
  misc_feature (566)..(566): Xaa can be any naturally occurring amino acid
  unsure (1)..(701): unsure at all Xaa locations
MEQEKSLDPQLWHACAGSMVQIPSLNSTVFYFAQGHTEHAHAPPDFHAPRVPPLILCRVVSVKFLADAETDEVFAKITLLPLPGNDLDLENDAVLGLTPPSSDGNGNGKEKPASFAKTLTQSDANNGGGFSVPRYCAETIFPRLDYSAEPPVQTVNAKDIHGETWKFRHIYRGTPRRHLLTTGWSTFVNQKKLIAGDSIVFLRSESGDLCVGIRRAKRGGLGSNAGSDNPYPGFSGFLRDDESTTTTSKLMMMKRNGNNDGNAAATGRVRVEAVAGSGGACSXVDKAFEVVYYPRASTPEFCVKAADVRSAMRXXWCXGMRXKMAFETEDSSRISWFMGTXSAVQVADPIRWPNSPWRLLQVAWDEPDLXQNVKRVSPWLVXLVSNMPTIHLSPFSXWKKIRIPQPFEFPFHGTKFPIFSPGFANNGGGESMCYLSNDNNNAPAGIQGARQAQQLFGSPSPSLLSDLNLSSYTGNNKLHSPAMFLSSFNPRHHHYQARDSENSNNISCSLTMGNPAMVQDKKKSVGSVKTHQFXLFGQPILTEQQVMNRKRFLEEEAEAEEEKGLXARGLTWNYSLQGLETGHCKVFMESEDVGRTLDLSVIGSVQELYRKLAEMFHIEERPDLVTHVGYRDANGVIKRIGDEPFSDFMKATKRLTIKMDIGGDNVRKTWITGIRTGENGIDALRRLVPQHLRLNLKHIEE

SEQ ID NO: 10763 - protein, 520 aa, Saccharophagus degradans 2-40
MDTNADGVGDIPGIVQKLDYIASLGVDAIWISPFFKSPMHDFGYDISDYRDVDPLFGTLDDFDLLIDEAHKRGIKVMIDQVLSHTSAEHEWFKESRQSRDNPKADWYVWADPNEDGTPPNNWLAIFGGSAWEWDSRRGQYYLHNFLKSQPDLNFHCEDVQNQILQEVEFWLKRGVDGLRLDAINFCFHDKQLRNNPPKSASERKARGFSEDNPYAFQWHTYNNTQPENLAFLQRLRSLMDKYPNTVTLGEISSDDSLATMAEYTADNDKLHMAYSFELLADEFSAAYIRETVGTLESRLNDGWPCWSIGNHDVPRVASRWGKEDACDALSIVLNAMLLSLRGSVCCYQGEELGLKEAELTFEQLQDPYGITFWPKFKGRDGCRTPMPWDSQQHAGFSNGAPWLPVADDHKAKNVTVQQQADLSVLQAYKQFIAWRKTQPEILYGDIAFLSSHESTLAFTRSYEGSTLFAAFNLSNTEQVVNLPAGEWTALEGHGLSAAVSATQITLPPFGGFFAKQASNS

SEQ ID NO: 10764 - protein, 371 aa, Brassica rapa
MEKPNRMSESQNVVVSEAARSIIPNNSSAPPGFISISKKKLLKNLEIINDGERINAWVDSMRASSPTHPKSLPSSISSEQQLSSWIMQHPSALEMFEKITEASGGKQIVIFLDYDGTLSPIVDDPDRAFMSSKMRRTVKKLAKCFPTAIVTGRCLDKVYNFVKLAELYYAGSHGMDIKGPAKGFSRHKRVKQSLLYQPASDYLPMIDEVYRQLLEKTKSTPGVIVENNKFCASVHFRCVDEKKWSELVLQVRSVLNEYPRLKLNQGRKVFEIRPMIEWDKGKALEFLLESLGFGNSNNVFPVYIGDDRTDEDAFKLLRDRGEGCGVLVSKFPKDTDASYYLQDPSEASDEFLATIGGVETNAAKSVKRMYV

SEQ ID NO: 10765 - protein, 289 aa, Legionella pneumophila str. Lens
MSDYLDKTASLTPATKRIVCDKATEYPHTGSYNQVATHGTYLCRRCGLALFRGVSQFSSGCGWPSFDDEIANAVARKPDADGQRTEILCARCDAHLGHVFTGEYMTYKNLRHCVNSASLDFVADNEVLDTEEAILAGGCFWGVEYYLKRIPGVLKVESGYTGGHVSEPSYEQVCSGTSGHYEAVRVVYDAAKTNYHDIVKRFFEIHDPTQANGQGPDLGHQYLSAVFYFNQEQRQEAELLIQLLKKRGYQVVTQLLQTQSFWPAEDYHQDYYFKHHKIPYCHKSVDRFG

SEQ ID NO: 10766 - protein, 481 aa, Saccharophagus degradans 2-40
MCFGFIGIQFGFALQTANVSRIFQTLGAEIDAIPILWIAGPITGLLVQPIIGYMSDRTWNRFGRRRPYFTIGAVAATACLFIMPHSPALWMAAGMLWIMDASFNIAMEPFRAFVGDMLPPKQRTQGFATQSFFIGVASVVASALPWMLTNWLGMENTAPEGEIPSTVVYAFYFGGAVLVTTVMWTVFRTKEYTPEEIAAFNQYEQHNDSQADTSDDHKNYVAGGIGFAAVAIASTIAIHYFELREELYILAGLAAMFGGLQLIAHILQSKGRIHNAIYQITHDLFNMPRTMVQLAIVQFFSWFALFALWIYTTPAVTAFHYGTSDTTSAMYNKGADWVGIMFAAYNAFAALAAFFIPIMARRWGQKTTHCINLMLGAAGYISMMLIKDPSWLWVSMIGIGFAWASILSLPYAMLSGALPSSKLGLYIGIFNFFIVIPQILAASVLGIAVSGLFDGQAIYALVLGGVFLIIAALATLKVNDQ

SEQ ID NO: 10767 - protein, 101 aa, Penicillium olsonii
EYKEAFSLFDKDGDGQITTKELGTVMRSLGQNPSESELQDMINEVDADNNGTIDFPEFLTMMARKMKDTDSEEEIREAFKVFDRDNNGFISAAELRHVMTS

SEQ ID NO: 10768 - protein, 608 aa, Brassica rapa
MCGILAVLGCVDNSQATRSRIIKLSRRLRHRGPDWSGLHCYEDCYLAHERLAIIDPISGDQPLYSEDKTVVVTVNGEIYNHKALRESESLKSHKYHTGSDCEVLAHLYEEHGEEFINMLDGMFAFVLLDTKDKSYIAVRDAIGVIPLYIGWGLDGSVWFASEMKALSDDCEQFMAFPPGHIYSSKQGGLRRWYNPPWFSELVPSTPYDPLVLRDTFEKAVIKRLMTDVPFGVLLSGGLDSSLVASVAIRHLEKSDARQWGSKLHTFCIGLKGSPDLKAGKEVADYLGTRHHELHFTVQEGIDAIEEVIYHVETYDVTTIRASTPMFLMSRKIKSLGVKMVLSGEGSDEIFGGYLYFHKAPNKKELHEETCRKATPLEFLDHDVSCAYLLCLNLVCLLLMQIKALYQYDCLRANKSTSAWGVEARVPFLDKAFLDVAMGIDPEWKMIRPDLGRIEKWVLRNAFDDEKNPYLPKHILYRQKEQFSDGVGYSWIDGLKDHANKHVSDAMLTNANFVFPENTPLTKEAYYYRAIFEKFFPKSAARATVPGGPSVACSTAKAVEWDAAWKGNLDPSGRAALGVHVAAYEGDKAEAPRPEKVQKLAEKTAEAIV

SEQ ID NO: 10769 - protein, 458 aa, Candida albicans SC5314
MGKEKTHVNVVVIGHVDSGKSTTTGHLIYKCGGIDKRTIEKFEKEAAELGKGSFKYAWVLDKLKAERERGITIDIALWKFETPKYHVTVIDAPGHRDFIKNMITGTSQADCAILIIAGGTGEFEAGISKDGQTREHALLAYTLGVKQLIVAVNKMDSVKWDKNRFEEIIKETSNFVKKVGYNPKTVPFVPISGWNGDNMIEPSTNCPWYKGWEKETKSGKVTGKTLLEAIDAIEPPTRPTDKPLRLPLQDVYKIGGIGTVPVGRVETGIIKAGMVVTFAPAGVTTEVKSVEMHHEQLAEGVPGDNVGFNVKNVSVKEIRRGNVCGDSKNDPPKGCDSFNAQVIVLNHPGQISAGYSPVLDCHTAHIACKFDTLVEKIDRRTGKKLEENPKFVKSGDAAIVKMVPTKPMCVEAFTDYPPLGRFAVRDMRQTVAVGVIKSVEKSDKAGKVTKAAQKAAKK

SEQ ID NO: 10770 - protein, 525 aa, Staphylococcus aureus
MVKQLKFSEDARQAMLRGVDQLANAVKVTIGPKGRNVVLDKEFTAPLITNDGVTIAKEIELEDPYENMGAKLVQEVANKTNEIAGDGTTTATVLAQAMIQEGLKNVTSGANPVGLRQGIDKAVKVAVEALHENSQKVENKNEIAQVGAISAADEEIGRYISEAMEKVGNDGVITIEESNGLNTELEVVEGMQFDRGYQSPYMVTDSDKMVAELERPYILVTDKKISSFQDILPLLEQVVQSNRPILIVADEVEGDALTNIVLNRMRGTFTAVAVKAPGFGDRRKAMLEDLAILTGAQVITDDLGLDLKDASIDMLGTASKVEVTKDNTTVVDGDGDENSIDARVSQLKSQIEETESDFDREKLQERLAKLAGGVAVIKVGAASETELKERKLRIEDALNSTRAAVEEGIVAGGGTALVNVYQKVSEIEAEGDIETGVNIVLKALTAPVRQIAENAGLEGSVIVERLKNAEPGVGFNAATNEWVNMLEEGIVDPTKVTRSALQHAASVAAMFLTTEAVVASIQKKI

SEQ ID NO: 10771 - protein, 700 aa, Burkholderia vietnamiensis G4
MTNSAPSGSQPSAAPQSDSAKARQLDEHCQHPDGEALRTNQGVRIADNQNTLRAGARGPSLLEDFIMREKITHFDHERIPERVVHARGSAAHGVFRVYESMADYTKAAFLQDPAAETPVYVRFSTVQGPRGSADTVRDVRGFAVKFYTEEGNYDLVGNNMPVFFIQDAIKFPDFVHAVKPEAPNEMPTGASAHDTFWDFVSLVPETTHMVLWLMSDRALPASYRAMDGFGVHTFRFVNAAGAEHFVKFHWRPVSGAYSLLWDEAQRIAGHDPDFNRRDLWMAIERGDYPEFELGVQLIDPADARKFDFDLLDPTKLVPEELVPVKPIGRMTLNRNPDNFFAETEQVAFHPGHVVPGIDFTNDPLLQGRLFSYTDTQLSRLGGPNFHELPINRPLCPFANNQRDAMHRQTIAVGQASYEPNSLNGGWPRETPPAPAGGGFETVPEPLEGTKVRVRSESFADHFSQAALFYQSMTDIEQRHIRDAYCFELGKVTKPEIRARVVNEIIARFDAGLAAEVAERLGLPAPQTATTPAVARLAPSLSLVGRAKPTIRSRKIALVATPGVSQALVDQVRSTLAAAGAVPTVVAPTLAPIGSIAPQATLAGMPSVMFDAVFVCGGDGRELANNAEACHFVREAFKHLKPIAAVGSGRQLLSAAHLPDPAEGVCVGHVADLDAVLGAFSGELGRHRVWAREQQAAELPA

SEQ ID NO: 10772 - protein, 724 aa, Spinacia oleracea
LTVTPIRDDKGCVIKFIGMQVEVSKFTEGINDKALRPNGLPKSLIRYDPRQKEAALGSIIEVVQTVKHPRSLSQPLSNNDADRREVAGKFNLDYMLPKLAEIDNVGTPGRLSSPSRLSTPGRQTPKIDASSRDSDKSSRKSARISLLGFKGRSSAKHERPPSPEPEFLIPKDIDRDDSWERAERERDVRQGIDLATTLERIEKNFVISDPRLPDNPIIFASDSFLELTEYTREEILGRNCRFLQGPETDQTTVQKIRDAIKEQRDITVQLINYTKSGRKFWNLFHLQPMRDQKGELQYFIGVQLDGSDHVEPLRNRLSERTEIQSAKVVKATAENVDEAVRELPDANSRPEDLWAIHSEPVYPRPHKRGSSSWAAIQKITAAGEKVGLEHFNPIKPLGCGDTGSVHLVELKVPENWFAMKAMDKSVMLNRNKVHRACVEREIISTLDHPFLPTLYASFQTSTHVCLITDFCPGGELFALLDKQPLKIFKEESARFYAAEVVIGLEYLHCLGIIYRDLKPENILLQKDGHLVLTDFDLSFLTSCNPHIINHPQPKKRRSRSQPPPTFIAEPVTQSNSFVGTEEYIAPEVITGASHTSAIDWWALGVLLYEMLYGRTPFRGKNRQKTFANIMHKDLTFPSSIPVSLSARQLIYALLNRDPATRLGTQGGASEIKEHPYFRGINWPLIRCMDPPTLEAPFKLIGRDPNAKEVKWDDDGVLASPMDFF

SEQ ID NO: 10773 - protein, 294 aa, Saccharomyces cerevisiae
TTPLVHVASVEKGRSYEDFQKVYNAIALKLREDDEYDNYIGYGPVLVRLAWYTSGTWDKHDNTGGSYGGTYRFKKEFNDPSNAGLQNGFKFLEPIHKEFPWISSGDLFSLGGVTAVQEMQGPKIPWRCGRVDTPEDTTPDNGRLPDADKDADYVRTFFQRLNMNDREVVALMGAHALGKTHLKNSGYEGPWGAANNVFTNEFYLNLLNEDWKLEKNDANNEQWDSKSGYMMLPTDYSLIQDPKYLSIVKEYANDQDKFFKDFSKAFEKLLENGITFPKDAPSPFIFKTLEEQGL

SEQ ID NO: 10774 - protein, 390 aa, Brassica napus
  misc_feature (76)..(76): Xaa can be any naturally occurring amino acid
  unsure (1)..(390): unsure at all Xaa locations
MATSFFATLPLHGSQENRLLLPPIRLAPPPSSFLGSTRSLTIPSSRRLYHAHAARRSPVVGVQEVVKEKKVTNSLXLITKEEGLVLYEDMILGRSFEDMCAQMYYRGKMFGFVHLARAVMGELFGKVPGCCTGQGGSMHMFSKEHNMLGGFAFIGEGIPVATGAAFTSKYKREVLKQDCEDVTVAFFGDGTCNNGQFYECLNMAALYKLPIIFVVENNLWAIGMSHLRSTSDPEIWKKGPAFGMPGVHVDGMDVLKVREVAKEAVTRARRGEGPTLVECETYRFRGHSLADPDELRDAAEKAKYAARDPITALKKYLIENKLANEGELKTIEKKIDDLMEEAVEFADASPQPGRSQLLENVFADPKGFGIGPDGRYRCEDPKFTEGTAQV

SEQ ID NO: 10775 - protein, 525 aa, Staphylococcus aureus
MVKQLKFSEDARQAMLRGVDQLANAVKVTIGPKGRNVVLDKEFTAPLITNDGVTIAKEIELEDPYENMGAKLVQEVANKTNEIAGDGTTTATVLAQAMIQEGLKNVTSGANPVGLRQGIDKAVKVAVEALHENSQKVENKNEIAQVGAISAADEEIGRYISEAMEKVGNDGVITIEESNGLNTELEVVEGMQFDRGYQSPYMVTDSDKMVAELERPYILVTDKKISSFQDILPLLEQVVQSNRPILIVADEVEGDALTNIVLNRMRGTFTAVAVKAPGFGDRRKAMLEDLAILTGAQVITDDLGLDLKDASIDMLGTASKVEVTKDNTTVVDGDGDENSIDARVSQLKSQIEETESDFDREKLQERLAKLAGGVAVIKVGAASETELKERKLRIEDALNSTRAAVEEGIVAGGGTALVNVYQKVSEIEAEGDIETGVNIVLKALTAPVRQIAENAGLEGSVIVERLKNAEPGVGFNAATNEWVNMLEAGIVDPTKVTRSALQHAASVAAMFLTTEAVVASIPEKI

SEQ ID NO: 10776 - protein, 94 aa, Staphylococcus aureus
MRKPIGNRVIIEKKEQEQTTKSGIVLTDSAKEKSNEGVIVAVGTGRLLNDGTRVTPEVKEGDRVVFQQYAGTEVKRDNETYLVLNEEDILAVIE

SEQ ID NO: 10777 - protein, 424 aa, Glycine max
MGNSEEEKSVKTGSPSSSPATTEQTNQPNIHVYPDWAAMQYYGPRVNIPPYFNSAVASGHAPHPYMWGPPQPMMQPYGPPYAAFYSHGGVYTHPAVAIGPHSHGQGVPSSPAAGTPSSVESPTKFSGNTNQGLVKKLKGFDELAMSIGNCNAESAERGAENRLSQSVDTEGSSDGSDGNTAGANQTKRKRSREGTPITDAEGKTELQNGPASKETASSKKIVSATPASVAGTLVGPVVSSGMATALELRNPSTVHSKANSTSAAQPCAVVRNETWLQNERELKRERRKQSNRESARRSRLRKQAETEELARKVEMLTAENVSLKSEITRLTEGSEQMRMENSALREKLINTQLGPREEITLSSIDSKRAAPVSTENLLSRVNNSGANDRPAENENDICETKPNSGAKLHQLLDTNPRANAVAAG

SEQ ID NO: 10778 - protein, 497 aa, Escherichia coli
MVFPLLVKSNWKNKFENMGAQMVKEVASKANDAAGDGTTTATVLAQAIITEGLKAVAAGMNPMDLKRGIDKAVTAAVEELKALSVPCSDSKAIAQVGTISANSDETVGKLIAEAMDKVGKEGVITVEDGTGLQDELDVVEGMQFDRGYLSPYFINKPETGAVELESPFILLADKKISNIREMLPVLEAVAKAGKPLLIIAEDVEGEALATAVVNTIRGIVKVAAVKAPGFGDRRKAMLQDIATLTGGTVISEEIGMELEKATLEDLGQAKRVVINKDTTTIIDGVGEEAAIQGRVAQIRQQIEEATSDYDREKLQERVAKLAGGVAVIKVGAATEVEMKEKKARVEDALHATRAAVEEGVVAGGGVALIRVASKLADLRGQNEDQNVGIKVALRAMEAPLRQIVLNCGEEPSVVANTVKGGDGNYGYNAATEEYGNMIDMGILDPTKVTRSALQYAASVAGLMITTECMVTDLPKNDAADLGAAGGMGGMGGMGGMM

SEQ ID NO: 10779 - protein, 487 aa, Glycine max
  misc_feature (166)..(166): Xaa can be any naturally occurring amino acid
  misc_feature (190)..(190): Xaa can be any naturally occurring amino acid
  misc_feature (368)..(368): Xaa can be any naturally occurring amino acid
  unsure (1)..(487): unsure at all Xaa locations
METPSACWDNWVGEALETLYSLKVLRSLRPICLRSSQPREFGADDDAFQVFDEMQHWDRSSVEVEIAETTFSRWMHDTPSSGDEIVCSATGGDGEAGASYEKFKKLILFSGNDYLGLSSHPTIGKAVAKAAQEHGMGPRGSALICGYTNYHRLLESSLADLKKEIXGFAANMALMTAIGSIGTLLAGNSXPSEDEKIAVFSDQLRRPPPPSDALNHASIIDGIRLAERQKSVKVYVYRHCDVSHLNMLLSNCRMRKKVVVTDSLFSMDGDYAPMVELADLRKKHGFLLVIDDAHGTFVCGKNGGGVAEEFNCEKDVDICIGTLSKAAGCHGGFIACSKKWKLLIQSRGRSFIFSTAAPVPVAAAAHAXRDFSAAVKVAKHETWRREAIWNRVKDFHLLTGIPVTSPIISLIVGTEDKALQASRHLLQSGFHVTAIRPPTVPPNSCRLRVALSAVHTREDLENLAAALSRCINFQDTRIYDSNAYARL

SEQ ID NO: 10780 - protein, 199 aa, GIBBERELLA ZEAE PH-1
MIGDSGVGKSNLLSRFTRNEFNLDSKSTIGVEFATRSIQVDSKTIKAQIWDTAGQERYRAITSAYYRGAVGALLVYDISKHQTYENVTRWLKELRDHADANIVIMLVGNKSDLRHLRAVPTEEAKSFASENHLSFIETSALDASNVELAFQNILTEIYRIVSSKALDSGDSAQATIGAGTNISLSKPADDDAAKGGKCC

SEQ ID NO: 10781 - protein, 620 aa, Cornus canadensis
MASSGEQNQVELLENLKNRLAIAVRSIQWSYAIFWSISSRQPGVLEWGDGYYNGDIKTRKTVQAVEFNADQLGLQRSEQLKELYESLAVTESNPQARRPSAALSPEDLTDTEWYYLVCMSFVFNIGQGLPGRTFANGQPIWLCNAHYADSKIFSRSLLAKSASIQTVVCFPFLGGVVELGVTELVLEDPNFIQHIKTSFLENPYRTVPKIPSYASENTRTEKDLILAKPSHNLLDAALECGEIDMCAPNNNSSGFLPNQRTEKSVMVEGLSGGASQVQSWQFMDDEISNCVQNSTNSSESIARTSENPEKDCCLTDLPECNLTKLTSLDLPNDDIHYHSVVSSLLKNSHQLILGPYFHKCNRESSFMGWKKTPSDIQQRRRGTPQKLLKKVLFEVARMHGGCLVESRQDNSRKDGLWRPEDDEIGTTDLFSERRRRDKTKERYSVLGSLIPSTSKDDKVSILDGTIEYLKELERRLEDSECLEARTRSKPQDTAERTSDNYENDRIGIGKKPMINKRKACDIVEAELEINLVQLKDSSTDDVSVRIIDKDVFIEIRCPWRERLLLEIMDAISNFHLDSHSVQSSNIDGILSLSIKSKLKGSTVASTGMIIQALQRIIWKC

SEQ ID NO: 10782 - protein, 338 aa, Sulfolobus solfataricus P2
MQIRLTLMKALVFDKSGLENLKVKEVQEPQLGPHDVLIRVVKSGLNPIDYFVINAIPVTPMPHIPGAELAGVVEKVGDHVKGLNKGDKVVVYNRVFDGTCDLCLSGREMLCRNGGIMSVITNGGWSEYFSVPDKNIFKIPESMSWDVAASLPVAALTSYHSLKELEVGPNDIIVIFGASGNTGLFAVQLAKKFGATVIAVSRKNWLKEFGADYIVGYDDVVQKVKEITNGKMADVVINSLGSSMWENSLQVLGLDGQLAFFGTLTGSEVKVNLSSLYGRHIKVVGTTGGSRKELMELINLCKDCKVKVHKTYKLDEGVEAVKEIMNENREGRIMLQVS

SEQ ID NO: 10783 - protein, 620 aa, Cornus cf. canadensis Xiang and Fan 14-1
MASSGEQNQVELLENLKNRLAIAVRSIQWSYAIFWSISSRQPGVLEWGDGYYNGDIKTRKTVQAVEFNADQLGLQRSEQLKELYESLAVTESNPQARRPSAALSPEDLTDTEWYYLVCMSFVFNIGQGLPGRTFANGQPIWLCNAHYADSKIFSRSLLAKSASIQTVVCFPFLGGVVELGVTELVLEDPNFIQHIKTSFLENPYRTVPKIPSYASENTRTEKDLILAKPSHNLLDAALECGEIDMCAPNNNSSGFLPNQRTEKSVMVEGLSGGASQVQSWQFMDDEISNCVQNSTNSSESIARTSENPEKDCCLTDLPECNLTKLTSLDLPNDDIHYHSVVSSLLKNSHQLILGPYFHKCNRESSFMGWKKTPSDIQQRRRGTPQKLLKKVLFEVARMHGGCLVESRQDNSRKDGLWRPEDDEIGTTDLFSERRRRDKTKERYSVLGSLIPSTSKDDKVSILDGTIEYLKELERRLEDSECLEARTRSKPQDTAERTSDNYENDRIGIGKKPMINKRKACDIVEAELEINLVQLKDSSTDDVSVRIIDKDVFIEIRCPWRERLLLEIMDAISNFHLDSHSVQSSNIDGILSLSIKSKFKGSTVASTGMIIQALQRIICKC

SEQ ID NO: 10784 - protein, 282 aa, Nostoc sp. PCC 7120
MSITEHKITVNTLEWFYRESEPVGRSDLLPVLLLHGIPSQSYSWRNILPALAAQGTRAIAPDWIGSGFSAKPEKHEFAYSTEAYITALAGFIQALEIERFSLVVQGFLGSVGLQYALKYPEQIANIAILNTPISTAAKLPWKIKQMGLPFIGDMMTQDPLLIDRTLEGGSRYRIEDKDLDIYRKPFLKTSAVGRALLNTIRNLQLPVAMTEIESGFKQWQQPILVQWGMIDPWLPVEVAQKFVETAPNAELIKLNNVGHYPQEHYDKTILEDLLPFVRRAES

SEQ ID NO: 10785 - protein, 233 aa, Allium sp. AL-2003
VQLKRMENKINRQVTFSKRRNGLLKKAHEISVLCDAEVALIVFSAKGKLYEYSTDSSMEKILERYERYCFAEKSSTMSDIDSQEDWSLEYHKLKAKVESLNNRQRHLMGEQLESLSLREIGQLEQQLENSLKTVRTRKSQELLSSISELQDKEKTLRDENKALENELMKRARAKAILEQQARWKHHNHKQQDNLHNPNINIGNYQTRNNEGGVEPATDVQVRVVRNLLPHWML

SEQ ID NO: 10786 - protein, 161 aa, Zea mays
MSLIRRGSAFDPFSLDLWDPFQGFPFGSGSSSSSSLFPSFGGTTSSETAAFAGARVDWKETPEAHVFKTDVPGLKKEEVKVELEDGNVLQISGERSKEQEEKTDTWHRVERSSGKFLRRFRLPENARTEQISASMENGVLTVTVPKEEAKKADVKSIQISG

SEQ ID NO: 10787 - protein, 432 aa, Trichodesmium erythraeum IMS101
MVVTTLNTTKSEEIFAAAQKLMPGGVSSPVRAFKSVGGQPIVFDRVQGAYIWDVDGNQYIDYVGTWGPAICGHAHPEVLNGLKEVLEKGTSFGAPCALENTLAKMVIDAVPSIEMIRFVNSGTEACMAVLRLMRAFTGRDKVIKFEGCYHGHADMFLVKAGSGVATLGLPDSPGVPKHVTKNTLTAPYNDLETVKKLFEENPDQISGVILEPVVGNSGFIVPDAGFLEGLRMITKENGALLVFDEVMTGFRIAYGGAQEKFNVTPDLTTLGKIIGGGLPVGAYGGRQDIMSMVAPAGPMYQAGTLSGNPLAMTAGIKTLELLKKPGTYDQLNKITKRLADGLLNIAKETNNDIWGGHISAMFGIFFNKGPVHNYDDAKKSDLTKFSKFHRGMLEHGIYLAPSQFEAGFTSLAHTEEDIDRTLATAKKVMSSL

SEQ ID NO: 10788 - protein, 125 aa, Brassica napus
  misc_feature (5)..(5): Xaa can be any naturally occurring amino acid
  misc_feature (7)..(7): Xaa can be any naturally occurring amino acid
  misc_feature (10)..(10): Xaa can be any naturally occurring amino acid
  misc_feature (25)..(25): Xaa can be any naturally occurring amino acid
  misc_feature (35)..(35): Xaa can be any naturally occurring amino acid
  misc_feature (47)..(47): Xaa can be any naturally occurring amino acid
  misc_feature (85)..(86): Xaa can be any naturally occurring amino acid
  misc_feature (94)..(94): Xaa can be any naturally occurring amino acid
  unsure (1)..(125): unsure at all Xaa locations
HSSPXWXSAXEFLDEKAVKSQKKKXQFSSLEVQSXTRRCSHCGVQKXPQWRAGPLRAKTLCNACGVRFKSGRLLPEYRPACSPTXXTELHSNHXRKVIEMRQKKEMSGDADKPGMNRTVQAVRSF

SEQ ID NO: 10789 - protein, 266 aa, Arabidopsis thaliana
MEFVNSSPPRYECLLFDLDDTLYPLSSGLSDACSNNIIEYMVEKLGIDEDGVVELNQILYKKYGTSMAGLKAVGYEFDNDEYHRYVHGRLPYENLKPDPVLRSLLLGLPLRKLVFSNGDEVHVMKALTRLGIEDCFERIISFETLNPDINEAELSCVTGHLPENPVICKPTEIAFEKAFDIAQLNPHKTLFFDDSTRNIQTGKAVGLHTVLVGKSEKIDGSDYALESIHNMKEAFPELWSESIINNKETERIDYASQISIETSVQA

SEQ ID NO: 10790 - protein, 620 aa, Cornus canadensis
MASSGEQNQVELLENLKNRLAIAVRSIQWSYAIFWSISSRQPGVLEWGDGYYNGDIKTRKTVQAVEFNADQLGLQRSEQLKELYESLAVTESNQQARRPSAALSPEDLTDTEWYYLVCMSFVFNIGQGLPGRTFANGQPIWLCNAHYADSKIFSRSLLAKSASIQTVVCFPFLGGVVELGVTELVLEDPNFIQHIKTSFLENPYRTVPKIPSYASENTRTEKDLILAKPSHNLLDAALECGEIDMCAPNNNSSGFLPNQRTEKSVMVKGLSGGASQVQSWQFMDDEISNCVQNSTNSSESIARTSENPEKDCCLTDLPECNLTKLTSLDLPNDDIHYHSVVSSLLKNSHQLILGPYFHKCNRESSFMGWKKTPSDIQQRRRGTPQKLLKKVLFEVARMHGGCLVESRPDYSRKDGLWRPEDDEIGTTDLFSERRRRDKTKERYSVLGSLIPSTSKDDKVSILDGTIEYLKELERRLEDSECLEARTRSKPQDTAERTSDNYENDRIGIGKKPMINKRKACDIVEAELEINLVQLKDSSTDDVSVRIIDKDVFIEIRCPWRERLLLEIMDAISNFHLDSHSVQSSNIDGILSLSIKSKFKGSTVASTGMIIQALQRIIWKC

SEQ ID NO: 10791 - protein, 351 aa, Nostoc sp. PCC 7120
MVNTLPKPGIKTPSKETVLTPRFYTTDFETAANLDLSAQENELQAMLAEMRADYNRHHFVRDEAFEQSWEHIDGEARQAFIEYLERSCISEFSGFLLFKELSRKLKNRSPVLAEMFQLMARDEARHAGFLNKAMGDFKLSLDLATVTKTRTYTFFPIEWVLYTVYLSEKIGYWRYIIIFRHLEKHPENQFYPIFRYFESWCQDENRHGDIFKALLRSQPQLWNNWKARLWSRFFLLSVFATHTLTVHERSGFYKSLGLDATDFDLQVVRNTNETAGRAFPVMLNTEHPKFFPLLQRCAGYNLNISEIERSSQPKFVKLIRKLPLIAAIVWNLLMVYLIKPIDTEALRETVR

SEQ ID NO: 10792 - protein, 215 aa, Oryza sativa
MAPMKLYGSTLSWNVTRCVAVLEEAGAEYEIVPLDFSKGEHKAPDHLARNPFGQVPALQDGDLFLWESRAICKYVCRKNKPELLKDGDLKESAMVDVWLEVESNQYTPALNPILFQCLIRPMMFGAPPDEKVVEENLEKLKKVLEVYEARLTKCKYLAGDYISVADLSHVAGTVCLGATPHASVLDAYPHVKAWWTDLMARPSSQKVASLMKPPA

SEQ ID NO: 10793 - protein, 879 aa, Haemophilus influenzae 86-028NP
MTQEYSTLRNNISMLGRFLGETINDAQGEDILELIENIRKLSRNSRAGDDKARQALLDTLGSISNENIIPVARAFSQFLNLTNIAEQYQTISREHSLAQSSSQSLSELFKRLKEQNASVEEVHKTVEKLLIELVLTAHPTETTRRSLIHKHIEINKCLSKLEHHDLTEKERNIIERLLLRLIAEAWHTNEIRTVRPTPFDEAKWGFAMLENSLWQAVPEFLRQLNETAREFLGYDLPVGLKPVRISSWMGGDRDGNPFVTAQITKKVLYFARWKAADLFLQDISKLADELSMMKCSDEFRDKYGEHLEPYRFVVKNLRNQLTATLAYFDDHLSNRTPRVSESEIILEDNQLWEPLYDCYQSLIQCGMRIIANGSLLDILHRISCFGVTLSQMDIRQESTRHTDAIAEIMRYIGLGDYSQWMEDDKQAFLIRELSSRRPLIPQNWTPSPETKEILDTCKVIAQQKQGVIACYVISMARSASDVLAVHLLLKEAGVPYHIPVVPLFETLEDLDAAEKVMTQLFNVGWYRGVINNRQMVMIGYSDSAKDAGMMAASWAQYRAQEALVNLTEKLGIELTLFHGRGGTIGRGGAPAHAALLSQPPRSLKNGLRVTEQGEMIRFKLGLPAVAVETFDLYASAILEANLLPPPEPKPEWRTIMDELSTISCDIYRGVVRGDKDFVPYFRSATPEQELSKLPLGSRPAKRNPNGGVESLRAIPWIFAWMQNRLMLPAWLGAGAAIRQVIEQGKGDIIHKMCENWPFFSTRIGMLEMVFSKSDTWLSQQYDQRLVKKELWYLGENLRKQLEDDIQTVLSLSHQSELMSDLPWIADSIALRNIYTDPLNLLQVELLHRFRENPEQVNPDVEQALMITITGIAAGMRNTG

SEQ ID NO: 10794 - protein, 231 aa, Brassica oleracea
SSTGQAPGDDSEVILCPQAIFRDPFRKGKNILVICDCYAPTGEPIPTNKRYNAAKIFSHPDVKAEEPWYGIEQEYTLLQKDTNWPLGWPLRGYPGPQGPYYCAAGADKSYGRDIVDAHYKACLYAGINISGINGEVMPGQWEFQVGPAVGISAGDQLWVSRYIVERITEIAGIVVTFDPFPISGDWNGANAHANYSTKSMRSDGGYEVIKKAIKKLGMRHKEHIAAYGEGN

SEQ ID NO: 10795 - protein, 1328 aa, Alternaria brassicicola
MAAETYSSVSAIIRNLARQHDPTRDPSFSAQVSANGAKTAVNAIALPGPESDEKTQLQQELSALCSRIDFLEHKSNHAANQQGQFPLTPAQEPSDEGALYTPAGVFRGNNGPPAQGRRGSNKERAIWVSNWLAAKESNGDPEQPAAALTEEQLNYLRVHLNQQADQIRNQREHIDNLSQEVNKQLTTQSMVFEHGIEDIGALKRELGKHQQANLAFQKALREIGAIVTAVAMGDLSKKVLIHAKEMDPEITLFKRTINTMVDQLQEFASQVTFLAREVGTEGRLGGQANLPGVAGIWAELTDINGMAKNLTDQVREIAVVTTAVAMGDLSRKIERPARGEILQLQQTINSMVDQLQSFATQVTKVARDVGTEGKLGGQAEIAGVKGMWNELTVNVNAMAQNLTTQVRDIAQVTTAVAQGNLTRKVEAECKGEILELKNTINRMVDQLQQFAHEVTKIAREVGSEGRLGGQATVHGVEGTWKDLTENVNGMAMNLTTQVREIAEVTTAVARGDLSRKVKAEVQGEILSLKITINTMVDRLNTFAQEVSKVAREVGTDGILGGQAQVDNVEGKWKDLTNNVNTMAQNLTLQVRSISEVTQAIAKGDMSRRVHVDAEGEIRLLKDTVNDMVMRLDEWSLAVKRVARDVGVDGKMGGQADVRDIDGRWKEITTDVNTMAQNLTSQVRAFGDITNAAMEGKFTQITVEASGEMDELKRKINQMVSSLRESIQRNTAAREAAELANKTKSEFLANMSHKIRTPMNGIIGMTQLTLDTDLTHAQREMLTIVHNLAGQLLTIIDDILDISKIEANRMVMEEIPFSMRGTIFNALKSSASRANERKLNLAYDVSYKVPDYVVGDSFRLRQIILNLVGNAIKLTEPGEVKVAISMAQEQECDPDHYVFQFAVSDTGIGIRGDKLNLIFDTFQQADGSTTRKFGGTGLGLSISKRLVTLMGGRMWVESDAGKGSVFYFTYKVRLGKPAIQAIQPQLVAYKQHTVLFVDQGNTGFSDEITEHLKTLDLVPMVVHSVEEVPETTKRTDMPYDCVIVDNDKTARELRIAERFKYIPLVMLTPHVCISLRSALENGISSYMTTPCLPIDLGNALIPALDGRAAPLVSDHSKSFQILLAEDNAVNQKLAVRILEKYHHRVTVANNGLEAFEHIQKKRYDCVLMDVQMPVMGGFEATAKIREWERDNGIPSTPVIALTAHAMVGDREKCLAAQMDDYLSKPLRQNQLIQTILRCATVGSTMYDHSSEPRYTASSHLPNITLPGKGNDNGGASSSSGGLPSPGKKRPQLEARGFTERGGAQSPNLLAVDQTDNGSVERLLLRSHSS

SEQ ID NO: 10796 - protein, 178 aa, Deinococcus radiodurans R1
MGVLDIAKGMGVTLGKLFQKPLTVSYPEQRATLQPRFRGRHVLTRHPDTGLEKCIGCSLCAAACPAYAIYVEAAENDPRDPVSPGERYAKVYEINMLRCIFCGLCEEACPTGAVVLGNEFEMADYRSRDFVYGKEDMLVGVTGSRPQRREALSAGRPVRLGFQVEGGPRAELEGVEYP

SEQ ID NO: 10797 - protein, 173 aa, Colwellia psychrerythraea 34H
MLRPNMKTQQTKNDVHEPETIYFAGGCLWGVQEFIKHLPGVIATAAGRANGLTNTTKSSYDGYAECVEVIFIPNTVNVIELIGYFFEIIDPYSINKQGEDVGKKYRTGIYSKQSSHLKVAIGYITRRDDADKVVVEILPLLNYVKSDEEHQERLTRFPNDYCHIPKKILHKYK

SEQ ID NO: 10798 - protein, 405 aa, Thermobifida fusca YX
MVGLFDPTRYPGTGRAGNRPTSGTPSVGPETEERQVSDSTVREEPELIQLLTPDGEYVPHPDYPFEPATAQVRDLYRDLVLVRRLDAEAVALQRQGELGLWASLLGQEAAQIGSARALEPQDMAFPSYREHGVAWCRGVRPRDLLAMFRGVTNGGWDPYEHNFHLYTIVIGSQTLHATGYAMGVQRDGALGEDGTAVITYFGDGATSQGDTNEAFNYAAVNNAPVVFFCQNNQWAISEPNDRQSKAPIYQRAAGFGFPGIRVDGNDVFACLAVTRKALQHAREGQGPTLIEAFTYRMGAHTTSDDPTRYRTSAEIEEWRRKDPIARLRAYLVREGKADDGFFDAVEAEAEKLGEQVRAECRALPDPAPLDIFREVYAEPHRELDRQRAEFADYLASFEGAEGAAR

SEQ ID NO: 10799 - protein, 177 aa, Arabidopsis thaliana
MNMNIPSKKIVPVPTPSEKVVSLVSRTGRDLQRYNTAGYRQVVGCVPYRYKKHGGGEIEVLLISAQKKGKGMLLPKGGWEIDESIEEAALRETIEEAGVTGQLEESLGKWQYKSKRHTMIHDGHMFPLLVSQQFEIWPESEFRQRKWVSLSEAIELCQNSWMREALEAFINRKCQTQ

SEQ ID NO: 10800 - protein, 319 aa, Fragaria x ananassa
MAKVPSVTLSSCGDDIQTMPVIGMGTSSYPRADPETAKAAILEAIRAGYRHFDTAAAYGSEKDLGEAIAEALRLQLIKSRDELFITTKLWASFAEKDLVLPSIKASLSNLQVEYIDMYIIHWPFKLGKEVRTMPVERDLVQPLDIKSVWEAMEECKKLGLARGIGVSNFTSSMLEELLSFAEIPPAVNQLEMNPAWQLKKLRDFCKAKGIHVTAYSPLGAARTKWGDDRVLGSDIIEEIAQAKGKSTAQISLRWVYEQGVSIVTKSYNKERMRQNLDIFDFCLTEEELEKMSHLPQRKGVTFASILGPHDIVLKVDEEL

SEQ ID NO: 10801 - protein, 514 aa, Arabidopsis thaliana
FTNVCLWTLLAFMLTWTVFYVTNRGKKATQLADAVVEEREDGATDVIIVGAGVGGSALAYALAKDGRRVHVIERDLREPERIMGEFMQPGGRLMLSKLGLEDCLEGIDAQKATGMTVYKDGKEAVASFPVDNNNFPFDPSARSFHNGRFVQRLRQKASSLPNVRLEEGTVKSLIEEKGVIKGVTYKNSAGEETTALAPLTVVCDGCYSNLRRSLNDNNAEVLSYQVGFISKNCQLEEPEKLKLIMSKPSFTMLYQISSTDVRCVFEVLPNNIPSISNGEMATFVKNTIAPQVPLKLRKIFLKGIDEGEHIKAMPTKKMTATLSEKKGVILLGDAFNMRHPAIASGMMVLLSDILILRRLLQPLSNLGNAQKISQVIKSFYDIRKPMSATVNTLGNAFSQVLVASTDEAKEAMRQGCYDYLSSGGFRTSGMMALLGGMNPRPISLIYHLCAITLSSIGHLLSPFPSPLRIWHSLRLFGLAMKMLVPHLKAEGVSQMLFPVNAAAYSKSYMAATAL

SEQ ID NO: 10802 - protein, 1314 aa, Debaryomyces hansenii CBS767
MSSHQRQDSIASLSSTATGNIHPQKIGPWKLGKTLGRGATGRVLLATHQSTGQKAAVKVVSKSELNDDEINKKSADEAGLPYGIEREIIIMKLLTHPNVLRLYDVWETSKALYLVLEYVEGGELFDLLVERGPLQEVEAIKYFRQIILGTAYCHALGICHRDLKPENLLLDSGLNVKLADFGMAALESNGKLLETSCGSPHYAAPEIVSGLKYHGAASDIWSCGVILFALLTGRLPFDDENIRNLLLKVQAGSFEMPCELSPEAVDLIDKMLTVDPMKRIPTERILSHPLLTKYPIPNEDLISVKSLPHPETAYKSLGSEKNIDKQILQNLSILWHDRSQGDIVDCLLKTGSNPEKTFYALLMRYRHNQEESAGSSPTRSNSQNFNNKIGNKDNNRKKRMSQVSASTSRNRPVLFQYKNGIKSSIGNGNGRLSSTSSVSNSPRKSPVRRSSNRYSFAQSPRKFGGTSDETTLHSSSVPRNIYNEIVSAQRNGQGVMPPPLPSKDNMDSKSNPIVDEVSNQDLLSSAKISPTKNKRGSVIRNSISKNRLSRRKSRTSFTPGLKRNSITTKLLSTYAKLAGETDWEFMDKQTKRTSATFATLCDKIFNQEQYDAEDEKLIDEEEKQAKEYERLMEIERKKHEAELRARKELAKQRKREKRKSLLSSRKLSILVKDDANNSEQDITVTDSDALSQPKRQSRNQAMRSISEGHGKESDDLTKEDLENLKRRSVTQPTPRRRKTPVLTRRPVSRLDPLWTAYENEEIERAQDALEAEYRDADFKTKKKINRESMVSVMDDKEVDNEPHVDDDATDEVQDEEAVKAKSRGYELPEPDMERSDLSDEYMSEIRKSRLLNSQLNINAIANGEKEVKSEKRQDKEPKTLIGDVRIPTVTRKSRCFTNSNKRLSVLSMYSTKQSYRDLNSILGDENDENNDVEGQLPQLRTSFADRLDRAGLADAEEEDDEPLDEGSIMDFDQHLANKRSSYYAGDKSRRQSRYSTTKRNSQAPTVDVPAIPKKSNKERDREDDTFVTKDDDVHRRKSAYSAKGANNNDDEDMIFENIKLPNEDRRQSASTAKSNKKKSFQPSAESMLIPNVDNIPEDAKTRKPDPRSQPYEKVRKPKVSNGELKSTGPEGQVKNPLEDTTNEPRENQKRKGSIFRKLSWGSKKTMDNSAAQLPSPADSRAPSVEEKPKSKSGFFRWFSSSSNQPGIESEIRRFKAILPKQEMSSALFALLNSWSNFGLKNLRNDTVGYNITGEISKNNAFNLKNCKFRIKVNPREFNQKSEIVCARVKGSKVTTDTLFKEIEKVLQKEGVMDI

SEQ ID NO: 10803 - protein, 389 aa, Digitalis subalpina
MSWWWAGAIGAAKKKLEEDDAPSKHSSVALIVGVTGIIGNSLAEILPLADTPGGPWKVYGVARRTRPAWHEDNPINYVQCDISDPDDSQAKLSPLTDVTHVFYVTWANRSTEQENCEANSKMFRNVLDAVIPNCPNLKHISLQTGRKHYMGPFESYGKIESHDPPYTEDLPRLKYMNFYYDLEDIMLEEVEKKEGLTWSVHRPGNIFGFSPYSMMNLVGTLCVYAAICKHEGKVLRFTGCKAAWDGYSDCSDADLIAEHHIWAAVDPYAKNEAFNVSNGDVFKWKHFWKVLAEQFGVECGEYEEGVDLKLQDLMKGKEPVWEEIVRENGLTPTKLKDIGIWWFGDVILGNECFLDSMNKSKEHGFLGFRNSKNAFISWIDKAKAYKIVP

SEQ ID NO: 10804 - protein, 340 aa, Streptococcus thermophilus
MAVQMEYEKDVKVPALDGKKIAVIGYGSQGHAHSQNLRDTGHDVIIGVRPGKSFDKAKEDGFDTYTVAEATKLADVIMILAPDEIQQELYEAEIAPNLEAGNAVGFAHGFNIHFEFIKVPADVDVFMCAPKGPGHLVRRTFEEGFGVPALYAVYQDATGNAKDIAMDWCKGIGAARVGLLETTYKEETEEDLFGEQAVLCGGLTALIETGFEVLTEAGYAPELAYFEVLHEMKLIVDLIYEGGFKKMRQSISNTAEFGDYVSGPRVITEQVKENMKAVLADIQNGKFANDFVNDYKAGRPKLTAYREEAANLEIEKVGAELRKAMPFVGQNDDDAFKIYN

SEQ ID NO: 10805 - protein, 415 aa, Mycobacterium bovis AF2122/97
MTVPAPSQLDLRQEVHDAARRARVAARRLASLPTTVKDRALHAAADELLAHRDQILAANAEDLNAAREADTPAAMLDRLSLNPQRVDGIAAGLRQVAGLRDPVGEVLRGYTLPNGLQLRQQRVPLGVVGMIYEGRPNVTVDAFGLTLKSGNAALLRGSSSAAKSNEALVAVLRTALVGLELPADAVQLLSAADRATVTHLIQARGLVDVVIPRGGAGLIEAVVRDAQVPTIETGVGNCHVYVHQAADLDVAERILLNSKTRRPSVCNAAETLLVDAAIAETALPRLLAALQHAGVTVHLDPDEADLRREYLSLDIAVAVVDGVDAAIAHINEYGTGHTEAIVTTNLDAAQRFTEQIDAAAVMVNASTAFTDGEQFGFGAEIGISTQKLHARGPMGLPELTSTKWIAWGAGHTRPA

SEQ ID NO: 10806 - protein, 532 aa, Coxiella burnetii
AAALGNVVPDKPIWHMFDTVKGSDYLGDQDAIQYMCEQAPPSVYELEHYGLPFSRLDDGRIYQRAFGGHTRDFGKEMARRTCACADRTGHAMLHTLYQKNVEAGTHFYYEWYGIDLVRGAQGGIAGMIAMNMETSELVFFKSRATIFATGGAGRIYETTSNAYTNTGDGIGMVLRAGLPVQDMEFWQFHPTGIYGVGCLITEGARGEGGYLINKDGERFMERYSPHLKDLDCRDVVARSILQEVMAGGGVGPKKDHVLLKLDHLGEKVLRERLPGIIELSEKFANVDITKEPIPILPTCHYMMGGIPTNIHGQALTVDENGKDQIIEGLFAAGECACVSVHGANRLGTNSLLDLVVFGRAIGLHLEEALKTELKHRSENPDDIDAAIARLKRWEKPNNVENPALLRQEMRKAMSEDFGVFREEQKMKQGLERLQKLNERLQRAKLTDTSRTFNNARIEALELDNLMEVSYATAVSAQQRTESRGAHSRYDYKERDDANWLKHTVYFRDGHIAYRPVNMKPKGMDPFPPKSRD

SEQ ID NO: 10807 - protein, 126 aa, Glycine max
LSTCILRIHNLCTSLHTNLYIVGILETDDIKDLKPLNDRVLIKVAEAEEKTSGGLLLTEATKDKPSIGTVIAVGPGHLDEEGNRKPLSVTPGNTVLYSKYAGNDFKGKDGSDYITLRVSDVMAVLS

SEQ ID NO: 10808 - protein, 470 aa, Chlorobium tepidum TLS
MNKLVSLAKRRGFIFPSSEIYGGLSSCFDYGPLGSEMKKNIKDLWWNAMTRRHQNIVGIDASIMMNPTVWEASGHVASFNDPMIDDKTTKRRYRADHLIENHIEKLHRDGKEAEAAAIKVAYEAAGGTEDPNRTLYNIIIEAGIKAPDTGSADWTEVRQFNLMFQCNMGAVADSAGVVYLRPETAQGIFVNFHNVREASRMKVPFGIAQIGKAFRNEIVKGNFIFRMVEFEQMEMQYFVKPGTQLEAFEAWREERFRWYSETLGMSKEKLHWYKHDKLAHYADLAYDIKFEFPFGIEEIEGIHSRTDFDLSQHQKYSGKSMEYIDQTTNERYIPYVVETSSGCDRTFLALLSDAYQEDVVDGEPRVMLKLAPKVAPVKAAVLPLMKKGEMGEKAAQLCRDLSESFMVQYDDAASIGKRYRRQDEIGTPFCFTVDHDTLENGTITVRYRDTAAQERINMSKAAEFLATKLM

SEQ ID NO: 10809 - protein, 579 aa, Glycine max
MCGILAVLGCSDSSQAKRVRVLELSRRLKHRGPDWSGLHQYGDNYLAHQRLAIVDPASGDQPLFNEDKTVVVTVNGEIYNHEELRKQLPNHTFRTGSDCDVIAHLYEEHGENFVDMLDGIFSFALLDTRDNSFIVARDAIGVTSLYIGWGLDGSVWISSELKGLNDDCEHFESFPPGHLYSSKERAFRRWYNPPWFSEAIPSAPYDPLALRHAFEKAVVKRLMTDVPFGVLLSGGLDSSLVAAVTARYLAGTNAAKQWGTKLHSFCVGLEGAPDLKAAKEVADYIGTVHHEFHYTVQDGIDAIEDVIYHIETYDVTTIRASIPMFLMSRKIKSLGVKWVISGEGSDEIFGGYLYFHKAPNKDEFHQETCRKIKALHKYDCLRANKSTFAWGLEARVPFLDKDFIRVAMNIDPEYKMIKKEEGRIEKWVLRRAFDDEEHPYLPKHILYRQKEQFSDGVGYGWIDGLKAHAEKHVTDRMMLNAANIFPFNTPTTKEAYYYRMIFERFFPQNSARLSVPGGPSVACSTAKAVEWDAAWSNNLDPSGRAALGVHASAYGNQVKAVEPEKIIPKMEVSPLGVAI

SEQ ID NO: 10810 - protein, 620 aa, Cornus canadensis
MASSGEQNQVELLENLKNRLAIAVRSIQWSYAIFWSISSRQPGVLEWGDGYYNGDIKTRKTVQAVEFNADQLGLQRSEQLKELYESLAVTESNPQARRPSAALSPEDLTDTEWYYLVCMSFVFNIGQGLPGRTFANGQPIWLCNAHYADSKIFSRSLLAKSASIQTVVCFPFLGGVVELGVTELVLEDPNFIQHIKTSFLENPYRTVPKIPSYASENTRTEKDLILAKPSHNLLDAALECGEIDMCAPNNNSSGFLPNQRTEKSVMVEGLSGGASQVQSWQFMDDEISNCVQNSTNSSEAIARTSENPEKDCCLTDLPECNLTKLTSLDLPNDDIHYHSVVSSLLKNSHQLILGPYFHKCNRESSFMGWKKTPSGIQQRTRGTPQKLLKKVLFEVARMHGGCLVESRQDNSRKDGLWRPEDDEIGTTDLFSERRRRDKTKERYSVLGSLIPSTSKDDKISILDGTIEYLKELERRLEDSECLEARTRSKPQDTAERTSDNYENDRIGIGKKPLINKRKACDIVEAELEINLVQLKDSSTDDVSVRIIDKDVFIEIRCPWRERLLLEIMDAISNFHLDSHSVQSSNIDGILSLSIKSKFKGSTVASTGMIIQALQRIIWKC

SEQ ID NO: 10811 - protein, 252 aa, Prunus persica
MPIRNIAVGRPEEAYHPDALRAGLAEFISTLIFVFAGEGSGMAFAKLTHGAATTPAGLVAAALAHGFGLFVAVSVSANISGGHVNPAVTFGAFVGGNISLLRGILYWIAQLLGSAVACGLLRFAPNYQTTSAFALSEGVGVWNAFVFEIVMTFGLVYTVYATAIDPKRGSVGTIAPIAIGFVVGANILAGGAFDGASMNPAVSFGPALVSWNWHNHWIYWAGPLIGGGLAGLIYEFVFIGNSSHEPLPTADY

SEQ ID NO: 10812 - protein, 327 aa, Trichodesmium erythraeum IMS101
MTHPYAICLGEILFDCLADQAEKTFNKVESWTTYPGGAPANVACGLVNLGTTAALISSVGEDTEGKKLVQILQEIGVDTSGIQGHPYAQTRKVYVLRSKTGEREFAGFGKQTTTEFADTYLKAELLPESLFLNGEFLILGTLGLAYPQTRQAIYQALDLADRYHLKIMVDVNWRPSFWPNPDDAKPLIQSILKRSDFVKLSLEEAEWLFDCTDPAAITYRLDSVEGLLLTAGNQGCAYYLSENEGKVPAFSVDAVDTTGAGDGFVAGFIHQLRQYGIRRLQQPGVAKQIVTYASAVGAITTTKLGAVTAQPTESEVEAFLGSYLPKN

SEQ ID NO: 10813 - protein, 620 aa, Cornus canadensis
MASSGEQNQVELLENLKNRLAIAVRSIQWSYAIFWSISSRQPGVLEWGDGYYNGDIKTRKTVQAVEFNADQLGLQRSEQLKELYESLAVTESNPQARRPSAALSPEDLTDTEWYYLVCMSFVFNIGQGLPGRTFANGQPIWLCNAHYADSKIFSRSLLAKSASIQTVVCFPFLGGVVELGVTELVLEDPNFIQHIKTSFLENPYRTVPKIPSYASENTRTEKDLILAKPSHNLLDAALECGEIDMCAPNNNSSGFLPNQRTEKSVMVEGLSGGASQVQSWQFMDDEISNCVQNSTNSSESIARTSENPEKDCCLTDLPECNLTKLTSLDLPNDDIHYHSVVSSLLKNSHQLILGPYFHKCNRESSFMGWKKTPSDIQQRTRGTPQKLLKKVLFEVARMHGGCLVESRQDNSRKDGLWRPEDDEIGTTDLFSERRRRDKTKERYSVLGSLIPSTSKDDKISILDGTIEYLKELERRLEDSECLEARTRSKPQDTAERTSDNYENDRIGIGKKPLINKRKACDIVEAELEINLVQLKDSSTDDVSVRIIDKDVFIEIRCPWRERLLLEIMDAISNFHLDSHSVQSSNIDGILSLSIKSKFKGSTVASTGMIIQALQRIIWKC

SEQ ID NO: 10814 - protein, 437 aa, Brucella melitensis 16M
MDMKGKTMSDKTASFTLDGKTFDLPVRKGTVGPDVVDIGPLYKNSHAFTYDPGFTSTASCESKITYIDGDEGVLLYRGYPIDQLAEHGDFLETCYLLLYGELPTATQKADFDYRVTRHTMLHEQMTKFFTGFRRDAHPMAVMVGCLGAMSAFYHDSTDITDPHQRMVASIRLIAKVPTLAAMAYKYHIGQPFVYPKNDLDFASNFLHMCFTVPCEEYKVNPVLARAMDRIFILHADHEQNASTSTVRLAGSSGANPFACIAAGVACLWGPAHGGANEAALNMLSEIGSVDRIPEYIARAKDKNDPFRLMGFGHRVYKNYDPRAKIMQKTCHEVLGELGIKDDPLLDVAMELERIALTDEYFIEKKLYPNIDFYSGITLKALGFPTEMFTVLFALARTVGWVAQWKEMIEDPQQKIGRPRQLYTGATERDYVPLAKRK

SEQ ID NO: 10815 - protein, 512 aa, Cornus canadensis
VLEWGDGYYNGDIKTRKTVQAVEFNADQLGLQRSEQLKELYESLAVTESNPQARRTSAALSPEDLTDTEWYYLVCMSFVFNIGQGLPGRTFANGQPIWLCNAHYADSKIFSRSLLAKSASIQTVVCFPFLGGVVELGVTELVLEDPNFIQHIKTSFLENPYRTVPKIPSYASENTRTEKDLILAKPSHNLLDAALECGEIDMCAPNNNSSGFLPNQRTEKSVMVEGLSGGASQVQSWQFMDDEISNCVQNSTNSSESIARTSENPEKDCCLTDLPECNLTKLTSLDLPNDDIHYHSVVSSLLKNSHQLILGPYFHKCNRESSFMGWKKTPSDIQQRRRGTPQKLLKKVLFEVARMHGGCLVESRQDNSRKDGLWRPEDDEIGTTDLFSERRRRDKTKERYSVLGSLIPSTSKDDKVSILDGTIEYLKELERRLEDSECLEARTRSKPQDTAERTSDNYENDRIGIGKKPMINKRKACDIVEAELEINLVQLKDSSTDDVSVRIIDKDVFIEI

SEQ ID NO: 10816 - protein, 585 aa, Medicago sativa subsp. X varia
MADEPLYPIAVLIDELKNDDIQLRLNSIRRLSTIARALGEERTRKELIPFLTENNDDDDEVLLAMAEELGVFIPYVGGVEHASVLLPPLEAFCSVEETCVRDKAVESLCRIGSQMRESDLVEYFIPLVKRLAAGEWFTARVSACGLFHIAYPSAPEASKTELRSIYSQLCQDDMPMVRRSAATNLGKFAATVEYTHLKADIMSIFDDLTQDDQDSVRLLAVEGCAALGKLLEPQDCVAHILPVIVNFSQDKSWRVRYMVANQLYELCEAVGPEPTRAELVPAYVRLLRDNEAEVRIAAAGKVTKFCRILSPDLAIQHILPCVKELSSDSSQHVRSALASVIMGMAPVLGKEATIEQLLHIFLSLLKDEFPDVRINIISKLDQVNQVIGIDLLSQSLLPAIVELAEDRHWRVRLAIIEYIPLLASQLGVGFFDDKLGALCMQWLQDKVHSIREAAANNLKRLAEEFGPEWAMQHIIPQVLEMITNPHYLYRMTILRAISLLAPVMGSEVTCSKLLPAVVAASKDRVPNIKFNVAKVLESIFPIVDQSVVEKTIRPCLVELGEDPDVDVRFFSNQALQAIDHVMMSS

SEQ ID NO: 10817 - protein, 217 aa, Chelidonium majus
  misc_feature (211)..(211): Xaa can be any naturally occurring amino acid
  unsure (1)..(217): unsure at all Xaa locations
VKKAHEISVLCDAEVGLIVFSTKGKLFEFSSESSMDNILERYERQCFVEEELKATHPESEGNWSLEHTKLKARIEILQKNQRHFMGEDLDPLSLKELQNLEHQLDIALKHVRSRKNQLLYASIAELRKKEKALHEQNILLGKKIKQKEEQIAQWSAQQNDAQNSSSFLTQAPQNSQSFLTQALPSLTLRTGYYQTARVVVCEEDGARSNMXMPPWML

SEQ ID NO: 10818 - protein, 620 aa, Cornus cf. canadensis Xiang and Fan 15-1
MASSGEQNQVELLENLKNRLAIAVRSIQWSYAIFWSISSRQPGVLEWGDGYYNGDIKTRKTVQAVEFNADQLGLQRSEQLKELYESLAVTESNPQARRPSAALSPEDLTDTEWYYLVCMSFVFNIGQGLPGRTFANGQPIWLCNAHYADSKIFSRSLLAKSASIQTVVCFPFLGGVVELGVTELVLEDPNFIQHIKTSFLENPYRTVPKIPSYASENTRTEKDLILAKPSHNLLDAALECGEIDMCAPNNNSSGFLPNQRTEKSVMVEGLSGGASQVQSWQFMDDEISNCVQNSTNSSESIARTSENPEKDCCLTDLPECNLTKLTSLDLPNDDIHYHSVVSSLLKNSHQLILGPYFHKCNRESSFMGWKKTPSDIQQRRRGTPQKLLKKVLFEVARMHGGCLVESRQDNSRKDGLWRPEDDEIGTTDLFSERRRRDKTKERYSVLGSLIPSTSKDDKVSILDGTIEYLKELERRLEDSECLEARTRSKPQDTAERTSDNYENDRIGIGKKPMINKRKACDIVEAELEINLVQLKDSSTDDVSVRIIDKDVFIEIRCPWRERLLLEIMDAISNFHLDSHSVQSSNIDGILSLSIKSKFKGSTVASTGMIIQALQRIIWKC

SEQ ID NO: 10819 - protein, 587 aa, Medicago sativa subsp. X varia
MAMVDQPLYPIAVLIDELKNEDIQLRLNSIRRLSTIARALGEERTRKELIPFLSENNDDDDEVLLATAEELGVFVPYVGGVDHASVLLPPLETLCTVEETCVRDKSVESLCRIGAQMREQDLVEHFIPLVKRLASGEWFTARVSSCGLFHIAYPSAPEALKTELRAIYGQLCQDDMPMVRRSAATNLGKFAATVEAAHLKSDIMSVFDDLTQDDQDSVRLLAVEGCAALGKLLEPQDCVAHILPVIVNFSQDKSWRVRYMVANQLYELCEAVGPDSTKTELVPAYVRLLRDNEAEVRIAAAGKVTKFSRILSPELAIQHILPCVKELSTDSSQHVRSALASVIMGMAPVLGKDATIEQLLPIFLSLLKDEFPDVRLNIISKLDQVNQVIGIDLLSQSLLPAIVELAEDRHWRVRLAIIEYIPLLASQLGVGFFDDKLGALCMQWLKDKVYSIRDAAATNIKRLAEEFGPEWAMQHIIPQVLDMVNDPHYLYRMTILHAISLLAPVLGSEITTTNLLPLVVNAAKDRVPNIKFNVAKVLQSLIPIVDESVVESTIKPCLVELSEDPDVDVRFFASQALQSSDQVKMSS

SEQ ID NO: 10820 - protein, 219 aa, Chelidonium majus
  misc_feature (12)..(12): Xaa can be any naturally occurring amino acid
  unsure (1)..(219): unsure at all Xaa locations
GLVKKAHEISVXCDAEVALIVFSTKGKLFEYSTDSGMERILERYERYSYAERELVASELDQGNWSLEYTKLKAKIEILQKNQRHFMGEDLESMSLKELQNLEQQLDTALKQIRSRKNQLMYESISELQKKEKVLQEQNNQLGKKLKEKEKEVAQQQAQWDQQSQGQSSPSFLLSQSLPSLNIGGSYHMRGSNGSEEEGVRPQTTRTNTTLMPPWMVHHL

SEQ ID NO: 10821 - protein, 620 aa, Cornus cf. canadensis Xiang and Fan 16-1
MASSGEQNQVELLENLKNRLAIAVRSIQWSYAIFWSISSRQPGVLEWGDGYYNGDIKTRKTVQAVEFNADQLGLQRSEQLKELYESLAVTESNPQARRTSAALSPEDLTDTEWYYLVCMSFVFNIGQGLPGRTFANGQPIWLCNAHYADSKIFSRSLLAKSASIQTVVCFPFLGGVVELGVTELVLEDPNFIQHIKTSFLENPYRTVPKIPSYASENTRTEKDLILAKPSHNLLDAALECGEIDMCAPNNNSSGFLPNQRTEKSVMVEGLSGGASQVQSWQFMDDEISNCVQNSTNSSESIARTSENPEKDCCLTDLPECNLTKLTSLDLPNDDIHYHSVVSSLLKNSHQLILGPYFHKCNRESSFMGWKKTPSDIQQRRRGTPQKLLKKVLFEVARMHGGCLVESRQDNSRKDGLWRPEDDEIGTTDLFSERRRRDKTKERYSVLGSLIPSTSKDDKVSILDGTIEYLKELERRLEDSECLEARTRSKPQDTAERTSDNYENDRIGIGKKPMINKRKACDIVEAELEINLVQLKDSSTDDVSVRIIDKDVFIEIRCPWRERLLLEIMDAISNFHLDSHSVQSSNIDGILSLSIKSKFKGSTVASTGMIIQALQRIIWKC

SEQ ID NO: 10822 - protein, 251 aa, Brassica napus
  misc_feature (7)..(7): Xaa can be any naturally occurring amino acid
  unsure (1)..(251): unsure at all Xaa locations
GTASVVXAALIGALRFVGGSLANHRFLFLGAGEAGTGIAELIALEISKKCQIPLEEARKNIWLVDSKGLIVSSRKESIQHFKKPWAHDHKPIKELVDAVKAIKPTVLIGTSGVGQTFTQEVVETMAELNEKPIILSLSNPTSQSECTAEQAYTWSKGRAIFASGSPFAPVEYEGKTFVPGQANNAYIFPGFGLGLIMSGTIRVPDDMLLPASHAFPPHPTDPPYEKGMIFPPFRNIRKISARIAAKVAAKA

SEQ ID NO: 10823 - protein, 514 aa, Chlamydomonas reinhardtii
MALKMRVSQRQALGSQTFVCPHGSVVRKAVSSKARAVSRQAQVVRAQAVSTPVETKVANGVAASSAAGTGQNDPAGDISKTVLGIILGGGAGTRLYPLTKKRAKPAVPLGANYRLIDIPVSNCLNSNVTKIYCLTQFNSASLNRHLSQAYNSSVGGYNSRGFVEVLAASQSSANKSWFQGTADAVRQYMWLFEEAVREGVEDFLILSGDHLYRMDYRDFVRKHRNSGAAITIAALPCAEKEASAFGLMKIDEEGRVIEFAEKPKGEALTKMRVDTGILGVDPATAAAKPYIASMGIYVMSAKALRELLLNRMPGANDFGNEVIPGAKDAGFKVQAFAFDGYWEDIGTVEAFYNANLALTDPEKAQFSFYDKDAPIYTMSRFLPPSKVMDCDVNMSIIGDGCVIKAGSKIHNSIIGIRSLIGSDCIIDSAMMMGSDYYETLEECEYVPGCLPMGVGDGSIIRRAIVDKNARIGPKCQIINKDGVKEANREDQGFVIKDGIVVVIKDSHIPAGTII

SEQ ID NO: 10824 - protein, 346 aa, Enterobacter cloacae
MPARVSRPGITGRSHLMSQNTLKVHDLNEDAEFDENGAEAFDEKALVEEEPSDNDLAEEELLSQGATQRVLDATQLYLGEIGYSPLLTAEEEVYFARRALRGDVASRRRMIESNLRLVVKIARRYGNRGLALLDLIEEGNLGLIRAVEKFDPERGFRFSTYATWWIRQTIERAIMNQTRTIRLPIHIVKELNVYLRTARELSHKLDHEPSAEEIAEQLDKPVDDVSRMLRLNERITSVDTPLGGDSEKALLDILADEKDNGPEDTTQDDDMKQSIVKWLFELNAKQREVLARRFGLLGYEAATLEDVGREIGLTRERVRQIQVEGLRRLREILQGQGLNIEALFRE

SEQ ID NO: 10825 - protein, 218 aa, Corylopsis sinensis
GLVKKAHEISVLCDAEVALIVFSTKGKLFEYSTDSCMEKILERYERYSYAERQLVATDPNSQGNLSLEYSRLKAKVELLQRNQRHFLGEDLDSLSLRELQTMEQQLDTALKRIRSRKNQLMYESISELQKKEKAMQEQNNMLAKKIKEKEKTMTQQAQWEEQNQDPGAASFLLQQPLPCLNIGNTYNQGVGGGAPEVRRNELDLTLEPVYPCHIGCFA

SEQ ID NO: 10826 - protein, 263 aa, Brassica napus
  misc_feature (257)..(257): Xaa can be any naturally occurring amino acid
  unsure (1)..(263): unsure at all Xaa locations
RPRVRPKKLSLNPYADTFYSSSSPVESYISHHHKSSSPTQDSTLEEQPAWLDELLGDKTDCGGPSPLRRSASDSVVLLGDISADFAGFNQSEEDEESLTSEACGELESACVYGPNSPRARNSSSFSGSPIASAFSDYGSQKAPQNAVDTVKGSICHPHEADNACGSNAKRNPGQRSRVRKLQYIAELERRVSMLQAVEADLSVRVASLLQTRATLSLENSQMKQQMAILKQDKLIREGEYLLLKKEAQRLNSRLRNXGSSNNI

SEQ ID NO: 10827 - protein, 620 aa, Azospirillum brasilense
METGTGRGLLRFLTCGSVDDGKSTLIGRLLHDAGLISDDQLEQARRDSRGRAEEDGGIDFSLLVDGLEAEREQSITIDVAYRYFATDRRSFIVADAPGHEQYTRNMATAASGRSLAVLLVDARKGLLTQTRRHAIVASLMGIRHVVLAVNKMDLVEDGETVFAAIRQAFTVFSAPLGFRSVTAIPLSARHGDNVVHRSAAMPWHHGPTLLGHLETAAAEDDPTEDGPLRFLVEWVNRPNLDFRGLSGTLLSGSLETGGAVTVWPSGRSARIARIVTFDGDVTQARAGDAVTVTLDAAVDAGRGDLLSGPDGAPEVADQFAAHLLWMAEEPLIPGRSYLLRAGARWVPATVTALRHAVNVETLEHGAASVLGLNAVGLCNLSTAAPLAFDPYEASRHTGSFILVDRFSNRTVGAGMIRHPLRRAANLHRQELAVSTVERAALKRQRPAVLWFTGLSGSGKSTIANRVERRLHTLGHHTMMLDGDNVRLGLNRDLGFTDADRVENIRRVGEVAKLMTEAGLIVLCAFIAPFRAEREAVRALLPDGAFLEVFVDTPLDECMRRDPKGLYAKARAGTLRNFTGVDSPYEAPDAPELRLDTTAEDADALAERVVELLHRKGIAEA

SEQ ID NO: 10828 - protein, 866 aa, Haemophilus somnus 2336
MLGHFLGETISDAQGSDILDLIENIRVLSRDSRSGDEKAREKLLDTLSTISNENIIPVARAFSQFLNLTNIAEQYQTISRKHIDQVASDRSLEALFERLKAQNVPAEKVISTVEKLLIELVLTAHPTEVTRRSLLHKYVEINRCLSRLEHDDLTQSESTKLKRRLMQLIALAWHTNEIRTQRPTPVDEAKWGIAVIENSLWKAVPDFCRQLNLHLEKNFGVQHSVNLAPVKFSSWIGGDRDGNPFVTAETTRQVLIMNRWKAAELFLADIQVLSEELSVVHCTEEFRAKYGDHLEPYRVVVKNLRAKLVKTVAYYGEILENKPSTINTNDILTDDQQLWEPLYDCYQSLHQCGMRIIANGILLDCLRRIRCFGLSLSHLDIRQESLRHTKALSEITRYIGLGDYSQWMEDDKQAFLIRELSSRRPLLPRNWTPSPETQEILETCRVIAQQPEGVISCYIISMARTASDVLAVHLLLKEAGVTYYLPVVPLFETLDDLNASKEVMTQLFNVGWYRGVINNKQMVMIGYSDSAKDAGMMAASWAQYRAQEQLVNLCEKMGVELTLFHGRGGTIGRGGAPAHAALLSQPPRSLKNGLRVTEQGEMIRFKLGLPAVAVNSFDLYASAILEANLLPPPEPKESWRAIMNELSDSSCNIYRSVVRGDKDFVPYFRSATPEQELSKLPLGSRPSKRNPNGGVESLRAIPWIFAWMQNRLMLPAWLGASASIRQSIEKGNKETIEEMCKNWPFFSTRIGMLEMVFSKTDTWLSEHYDLNLVKKELWYLGQSLREQLQADIKTILSLSHEDELMSDLPWIAESIALRNIYTDPLNLLQVELLRRLRENPENPNPDVEQALMITITGIAAGMRNTG

SEQ ID NO: 10829 - protein, 229 aa, Corylopsis sinensis
VQLKRMENKINRQVTFSKRRAGLLKKANEISVLCDAEVGLIVFSTKGKLYDMERIFDRYERYSYAERQLVVTNHESQGSWTIEHAKLKARMEVLQRNQRHFMGENLDSVSLKELQNLEHQLDNALKHIRSRKNLLMQESISELQRKDKSLQEENNSLSKKIKEKENALAHRAQWEQQNQGLNSFPILLSQPPQSLNIGTYQTGCSEGEEGTPFQQRPNTLLPHWMVSHL

SEQ ID NO: 10830 - protein, 339 aa, Thermobifida fusca YX
MTETDSYDVICIGETMGQLSPASAVPLVEQPPLLPRIGGAESNVACGLAGLGHRVAWMSRVGDDPFGAIITRTLARYGVDTSLVEVDQERPTGLYLKDPAPKGTRVYYYRRESAASAIGPRLAERPELRTARLLHLSGITPALSTSCAAFVQRLFVSRPAHGPLLSFDVNYRPALWPADDAAPVLLDLARAADLVFVGRDEAEQLWQASTADQVRALLPDVPLLVVKDADVGATSYTGARRVFVPAPRVDVVEAVGAGDAFAAGFLSGLLDDRTPEECLRLGHIMAAATLLSVADLAPFPPREARERLLALSPAAWAALCIPDPDLFPLDPSDPLFSGA

SEQ ID NO: 10831 - protein, 394 aa, Clostridium perfringens str. 13
MNINLMDEAQELKDLLVALRRDFHENPELGFEEWRTSGKIKEFLANEGIEYIETAKTGVCGIIKGTLKDESKKDRCIALRADIDGLPMDDKKTCSYSSKVKGRMHACGHDAHTTILLGAAKLLSRHRDKFSGTVKLLFEPAEETTGGAPIMIEEGVLENPRVEKIIGLHVEETLDAGQIMIKKGVVNAASNPFTIKIKGRGGHGAYPHMAVDPIVMASQVVLGLQTIVSREIKPVNPAVVTVGSINGGTAQNIIPDEVILKGVIRTMTLEDRAYAKERLREIATSICTAMRGECEIDIEESYPCLYNNSSVVDLVTEAAKEIIGSQNVKEQEAPKLGVESFAYFALERDSAFYFLGARNEERNIIYSAHNSRFDIDENLLPIGVSIQCKAALNY

SEQ ID NO: 10832 - protein, 183 aa, Triticum aestivum
  misc_feature (70)..(70): Xaa can be any naturally occurring amino acid
  misc_feature (169)..(169): Xaa can be any naturally occurring amino acid
  misc_feature (176)..(176): Xaa can be any naturally occurring amino acid
  unsure (1)..(183): unsure at all Xaa locations
SFTYSVVGPAVMASSVTTVVPFQGLKSTAGLPVRRLSGSASLSSVSNGGRIRCMQVWPIEGIKRFDILSXLPPLSTEALLKQVDYLIRSKWVPCLEYSKVGFVFREHKSSPGYYDCRYWTMWKLSMFGCTDATHVLNEVEEVKKEYPDAYVRVIGFDNMRQVQCVSFIXAFRPPGXCEESGKV

SEQ ID NO: 10833 - protein, 304 aa, Mycobacterium bovis AF2122/97
MANASETNVGPMAPRVCVVGSVNMDLTFVVDALPRPGETVLAASLTRTPGGKGANQAVAAARAGAQVQFSGAFGDDPAAAQLRAHLRANAVGLDRTVTVPGPSGTAIIVVDASAENTVLVAPGANAHLTPVPSAVANCDVLLTQLEIPVATALAAARAAQSADAVVMVNASPAGQDRSSLQDLAAIADVVIANEHEANDWPSPPTHFVITLGVRGARYVGADGVFEVPAPTVTPVDTAGAGDVFAGVLAANWPRNPGSPAERLRALRRACAAGVLATLVSGAGDCAPAAAAIDAALRANRHNGS

SEQ ID NO: 10834 - protein, 332 aa, Erwinia chrysanthemi
MSQNTLKVNELHEDAEFDENGIDVFDDKALAEEETSDSDQLDEELLSQGTAQRVLDATQLYLGEIGYSPLLTAEEEVYFARRALRGDVSSRRRMIESNLRLVVKIARRYNNRGLALLDLIEEGNLGLIRAVEKFDPERGFRFSTYATWWIRQTIERAIMNQTRTIRLPIHIVKELNVYLRTARELSHKLDHEPSAEEIAERLDKPVDDVNRMLRLNERITSVDTPLGGDSEKALLDILADEKDNGPEDTTQDNDMKQNIVKWLFELNAKQREVLARRFGLLGYEAATLEDVGREIGLTRERVRQIQVQVEGLRRLREILQVQGLDIEELFRE

SEQ ID NO: 10835 - protein, 196 aa, Lycopersicon esculentum
QAPGEDSEVILYPQAIFKDPFRRGNNILVMCDAYTPAGEPIPTNKRHAAAKVFSHPDVAAEETWYGIEQEYTLLQREVNWPLGWPIGGFPGPQGPYYCGTGADKAFGRDIVDAHYKACLYAGINISGINGEVMPGQWEFQVGPSVGISAGDEVWVARYILERIAEIAGVVVSFDPKPIPGDWNGAGAHTNYSTKSM

SEQ ID NO: 10836 - protein, 108 aa, Glycine max
  misc_feature (22)..(22): Xaa can be any naturally occurring amino acid
  misc_feature (29)..(29): Xaa can be any naturally occurring amino acid
  unsure (1)..(108): unsure at all Xaa locations
IINESVTEAGDSLKPFMRALGXGFMADEXATTVWLCSRKRASGFDYLLTHQAMEAVDNGTPIIRDLFSNFLSDPWHGAIYVCAELTPIVDIFVPPDSDFVRTDLRSST

SEQ ID NO: 10837 - protein, 361 aa, Arabidopsis thaliana
MDKYELVKDIGAGNFGVARLMRVKNSKELVAMKYIERGPKIDENVAREIINHRSLRHPNIIRFKEVVLTPTHIAIAMEYAAGGELFERICSAGRFSEDEARYFFQQLISGVSYCHAMQICHRDLKLENTLLDGSPAPRLKICDFGYSKSSLLHSMPKSTVGTPAYIAPEVLSRGEYDGKMADVWSCGVTLYVMLVGAYPFEDQEDPKNFKKTIQRIMAVKYKIPDYVHISQDCKHLLSRIFVTNSNKRITIGDIKKHPWFLKNLPRELTEIAQAAYFRKENPTFSLQSVEEIMKIVEEAKTPARVSRSIGAFGWGGGEDAEGKEEDAEEEVEEVEEEEDEEDEYDKTVKQVHASMGEVRVS

SEQ ID NO: 10838 - protein, 422 aa, Thermotoga maritima MSB8
MNFKRLIIYEAFARAYPGEKGKKFDSLIKDLERLKGMGINTVWLMPIHPTGIEGRKGTLGSPYAIRDYYEIDPLIGTKDDFKRFVKRAHELNMYVLMDMVLNHAAADNVLVREHPEWFLRDEKGNPTRKVPDWTDIVDFDYSNGELRKYMINMMKYWVEEFDVDGFRCDVAGLVPLDFWLQARKELDPVKRLIWLSETHDPYMYQAFDITYDYDGYYKFRDFIEGRGSLREYVDFLRMQDHMYPRGYIKMRFLENHDQPRIAKFIEEDSLVHWIAFLFTFKGVPLVHNGQEYGLKEDVDIFNEYTLPFPMEENRISILHRKLAHYRYGTSVFSEGEMLFVKNDQPEKVISYLWRYENRYILCMLNPLLENTKVTLDFSGIWESACIHSKNVFNDEIVRVPVKNSRATVEIGKEPLILSFVLY

SEQ ID NO: 10839 - protein, 286 aa, Solanum tuberosum
MTKEVEAVHEQAAEYSRKDYTDPPPAPLIDFEELTKWSLYRAVIADFIATLLFLYITVLIVIGYNIKPMLKPASVCGGVGLLGIAWAFGGMIFVLVYCTAGISGGHINPAVTFGLFLARKVSLIRAVLYMVAQCLGAICGVGFVKAFQSAYYNRYGGGVNVMAPGHTKGVGLAAEIIGTFVLVYVVFSATDPKRSARDSHVPVLAPLPIGFAVFMVHLATIPITGTGINPARSFGAAVIFNGDKAWDEHWIFWVGPFIGAFIAAVYHQYILRAGAIKALGSFRSNA

SEQ ID NO: 10840 - protein, 621 aa, Cornus canadensis
MASSGEQNQVELLENLKNRLAIAVRSIQWSYAIFWSISSRQPGVLEWGDGYYNGDIKTRKTVQAVEFNADQLGLQRSEQLKELYESLAVTESNPQARRPSAALSPEDLTDTEWYYLVCMSFVFNIGQGLPGRTFANGQPIWLCNAHYADSKIFSRSLLAKSASIQTVVCFPFLGGVVELGVTELVLEDPNFIQHIKTSFLENPYRTVPKIPSYYASENTRTEKDLILAKPSHNLLDAALECGEIDMCAPNNNSSGFLPNQRTEKSVMVEGLSGGASQVQSWQFMDDEISNCVQNSTNSSESISRTSENPEKDCCLTDLPECNLTKLTSLDLPNDDIHYHSVVSSLLKNSHQLILGPYFHKCNRESSFMGWKKTPSDIQQRRRGTPQKLLKKVLFEVARMHGGCLVESRQDNSRKDGLWRPEDDEIGTTDLFSERRRRDKTKERYSVLGSLIPSTSKDDKVSILDGTIEYLKELERRLEDSECLEARTRSKPQDTAERTSDNYENDRIGIGKKPMINKRKACDIVEAELEINLVQLKDSSTDDVSVRIIDKDVFIEIRCPWRERLLLEIMDAISNFHLDSHSVQSSNIDGILSLSIKSKFKGSTVASTGMIIQALQRIICKC

SEQ ID NO: 10841 - protein, 388 aa, Alkaliphilus metalliredigenes QYMF
MEIKDVVKKYNDYVIQMRRDFHMNPESSWEEFRTSGIVKAELDKLSIPYISVAGTGVVATIKGIGAGKIVALRADMDALEIEETNDVPYKSKFPGKMHACGHDGHTAMLLGAAKVFNEMKHEINGTVKLIFQPAEEVAAGARKMLDESNFMDDVDGSFAIHLWSGIEVGKISIEAGPRMASADIFEIIINGKSGHGSMPHQAIDAVVAASAVVMDLQSVVSREFSPLDSVVLSIGSFHAGTRFNIIANKAILSGTTRCFKNKIRDMLPSVMERIVKNTAASYRAEATLKYTPGTPPTINDPTCAKIAAGSVEKILGENGVVEMEKTTGGEDFALFLNKAPGVMAFVGMRNEEKDACYAHHHERFNMDEDALEIGTALYVQYALDFLNN

SEQ ID NO: 10842 - protein, 412 aa, Thermotoga maritima MSB8
MSVFLFVIVAVLFVLLFLVFKKRLSEYKILIEKLSDMLGEKGVPPLYLFERLKKYVDNLKETISRVEVSRDNFLTILNSLSEPIFILDREGKITFLNEIARELVQGRINPEGRPYYEIFEDYYINEMVEETIKSEEPQEGTLVTYVGNEKKYFHVKVIPVELKSGDKIFVILFHDVTKERKLDEMRREFIATVSHELRTPLTSIHGYAETLLEDDLENKELVKRFLKIIEEESARMTRLINDLLDLEKIEESEANFEMKDVDLCEVIEYVYRIIQPIAEENEVDLIVECEDVVVRGNKERLIQMLLNLVDNAVKYTSLKEKGEKKVWVRAYDTPDWVVVEVEDTGPGIPKEAQSRIFEKFYRVDKARSRKMGGTGLGLTIVKTIVDKHGGKIEVESEINQGTLMRVLLPKRR

SEQ ID NO: 10843 - protein, 625 aa, Cornus unalaschkensis
MASSGEQNQVGLLENLKNRLAIAVRSIQWSYAIFWSISSRQPGVLEWGDGYYNGDIKTRKTVQAVEFNADQLGLQRSEQLKELYESLAVTESNPQARRPSAALSPEDLTDTEWYYLVCMSFVFNIGQGLPGRTFANGQPIWLCNAHYADSKIFSRSLLAKSASIQTVVCFPFLGGVVELGVTELVLEDPNFIQHIKTSFLENPYRTVPKIPSYYASENTRTEKDLILAKPSHNLLDAALDAALECGEIDMCAPNNNSSGFLPNQRTEKSVMVEGLSGGASQVQSWQFMDDEISNCVQNSTNSSESISRTSENPEKDCCLTDLPECNLTKLTSLDLPNDDIHYHSVVSSLLKNSHQLILGPYFHKCNRESSFMGWKKTPSGIQQRRRGTPQKLLKKVLFEVARMHGGCLVESRQDNSRKDGLWRPEDDEIGTTDLFSERRRRDKTKERYSVLGSLIPSTSKDDKISILDGTIEYLKELERRLEDSECLEARTRSKPQDTAERTSDNYENDRIGIGKKPLINKRKACDIVEAELEINLVQLKDSSTDDVSVRIIDKDVFIEIRCPWRERLLLEIMDAISNFHLDSHSVQSSNIDGILSLSIKSKFKGSTVASTGMIIQALQRIICKC

SEQ ID NO: 10844 - protein, 236 aa, Heuchera americana
VQLRRMENKINRQVTFSKRRGGLVKKAHEISVLCDVEVALIVFSNKGKLFEYSTDSCMEKILERYERYSYAERRLVATGSESQENWSLEYTKLKAKIELLQRSQRQFMGEDLDLLSLRELQNLEQQLDTALKHIRSRKNQLMNQSISDLQKKEKAIQEQNNLLAKKIKEKEKAMSQQAEWEQQNNGASTSNFLNPQPLPCLNISSTYQGGAQPEAMRRNELDLTLEPIYSCHLGCF

SEQ ID NO: 10845 - protein, 625 aa, Cornus unalaschkensis
MASSGEQNQVELLENLKNRLAIAVRSIQWSYAIFWSISSRQPGVLEWGDGYYNGDIKTRKTVQAVEFNADQLGLQRSEQLKELYESLAVTESNPQARRPSAALSPEDLTDTEWYYLVCMSFVFNIGQGLPGRTFANGQPIWLCNAHYADSKIFSRSLLAKSASIQTVVCFPFLGGVVELGVTELVLEDPNFIQHIKTSFLENPYRTVPKIPSYYASENTRTEKDLILAKPSHNLLDAALDAALECGEIDMCAPNNNSSGFLPNQRTEKSVMVEGLSGGASQVQSWQFMDDEISNCVQNSTNSSESISRTSENPEKDCCLTDLPECNLTKLTSLDLPNDDIHYHSVVSSLLKNSHQLILGPYFHKCNRESSFMGWKKTPSGIQQRRRGTPQKLLKKVLFEVARMHGGCLVESRQDNSRKDGLWRPEDDEIGTTDLFSERRRRDKTKERYSVLGSLIPSTSKDDKISILDGTIEYLKELERRLEDSECLEARTRSKPQDTAERTSDNYENDRIGIGKKPLINKRKACDIVEAELEINLVQLKDSSTDDVSVRIIDKDVFIEIRCPWRERLLLEIMDAISNFHLDSHSVQSSNIDGILSLSIKSKFKGSTVASTGMIIQALQRIICKC

SEQ ID NO: 10846 - protein, 698 aa, Tropheryma whipplei str. Twist
MEYNVSRERRVSALTVFVWDDKDDLAVNTARVLAADAVENVGNGHPGTAISLAPAAYLLFQKVMRHNPSDPSWAARDRFVLSCGHSSLTLYIQLFLAGYKLSLQDLRGLRQWGSLTPGHPEYGHTPGVEITTGPLGQGLASAVGFAYSARFQRGLFKTDIFDHYVYVIASEGDIEEGVTSEACSLAGLQQLGNLLVILDRNYISIEDNTDIALSEDIKSRYLSYGWQVIEVPWRRAGAEYREDVLSLYEALLEAQKDTDRPSLIILETVIAWPSPGKQNTGAAHGAALGVNEVKDLKRILGFDPEKTFEVPDGVLQHTKGALDRGQSQQDNWENVFSSWRQEHPIEAALFDRLQNGVTPDIDHVLPVFSSEKPISTRAASGQVINRIAEVMPELWGGSADLAESNNTTIKSANSFLPESVTVDHWKSDRYGRILHFGVREHAMAALISGIVLHGNTRVFGGTFLVFSDYMRPAVRLAALMKIPSIFVWTHDSIGLGEDGPTHQPVEHLWALRAIPGLSVIRPADANEVAWAWKEILERRDGPVGLVLSRQNLPVLDRTCLAPASELRKGAYILADGSRYPRLILIATGSEVSLAIGAREVLENRGIPTRVVSAPCLEWFDQQEKSYRNHVLPPDVETRISVEAGLSLGWSKYIGDKGASVSIEHYGASAAGDVLFERFGFTVENIVKTADALLGGCGE

SEQ ID NO: 10847 - protein, 370 aa, Tropheryma whipplei str. Twist
MLCWEGVVNSLQKLSTAGVSVWLDDLSRSRITDGDLKKRIEKQCVVGVTTNPSIFAKSIASSRDYDSSFKNAFSRGCTLDEAVLSVISEDVSGALDLLADSYSASKGIDGRVSIEVDPTLAYDTEGTFRSVKSIWESINKPNLYVKIPATREGLEAISQSIASGVCVNVTLIFSLQRYREVIDAYLTGLERAVEAGRSIENIFSVASFFVSRFDVYVDEQLDNIGTPQALHLKGRAAVANARLAYEVYEEAFATPRYKILADKGANKQRPLWASTGVKNPRYPDTCYVTNLVARDVVNTMPEATLDAVNDHGEIRGDTITGTYEDSRAILSELAELGVNYTEVTDKLEADGVKQFIDSWNQLKSNVRSRF

SEQ ID NO: 10848 - protein, 625 aa, Cornus unalaschkensis
MASSGEQNQVELLENLKNRLAIAVRSIQWSYAIFWSISSRQPGVLEWGDGYYNGDIKTRKTVQAVEFNADQLGLQRSEQLKELYESLAVTESNQQARRPSAALSPEDLTDTEWYYLVCMSFVFNIGQGLPGRTFANGQPIWLCNAHYADSKIFSRSLLAKSASIQTVVCFPFLGGVVELGVTELVLEDPNFIQHIKTSFLENPYRTVPKIPSYYASANTRTEKDLILAKPSHNLLDAALDAALECGEIDMCAPNNNSSGFLPNQRTEKSVMVEGLSGGASQVQSWQFMDDEISNCVQNSTNSSESISRTSENPEKDCCLTDLPECNLTKLTSLDLPNDDIHYHSVVSSLLKNSHQLILGPYFHKCNRESSFMGWKKTPSGIQQRRRGTPQKLLKKVLFEVARMHGGCLVESRQDNSRKDGLWRPEDDEIGTTDLFSERRRRDKTKERYSVLGSLIPSTSKDDKISILDGTIEYLKELERRLEDSECLEARTRSKPQDTAERTSDNYENDRIGIGKKPLINKRKACDIVEAELEINLVQLKDSSTDDVSVRIIDKDVFIEIRCPWRERLLLEIMDAISNFHLDSHSVQSSNIDGILSLSIKSKFKGSTVASTGMIIQALQRIICKC

SEQ ID NO: 10849 - protein, 396 aa, Haemophilus influenzae 86-028NP
MFEHIKAAPADPILGLGEAFKSETRENKINLGIGVYKDAQGTTPIMRAVKEAEKRLFDKEKTKNYLTIDGIADYNEQTKALLFGKDSEVIKSNRARTVQSLGGTGALRIAAEFIKRQTKAQNVWISTPTWPNHNAIFNAVGMTIREYRYYDAERKALDWDHLLEDLSQASEGDVVLLHGCCHNPTGIDPTPEQWQELAALSAKNGWLPLFDFAYQGLANGLDEDAYGLRAFAANHKELLVASSFSKNFGLYNERVGAFTLVAENAEIASTALTQVKSIIRTLYSNPASHGGATVATVLNDTQLRQEWENELTEMRERIKKMRHLFVQLLKEYGAEQDFSFIIEQNGMFSFSGLTGEQVDRLKEEFAIYAVRSGRINVAGITEDNIRYLCESIVKVL

SEQ ID NO: 10850 - protein, 566 aa, Sulfolobus solfataricus P2
MEKIEYDAVVIGGGLAGLMSAHEIASAGFKVAVISKVFPTRSHSAAAEGGIAAYIPGNSDPNDNPDYMTYDTVKGGDYLVDQDAAELLSNKSGEIVMLLERWGALFNRQPDGRVAVRYFGGQTYPRTRFVGDKTGMALLHTLFERTSGLNVDFYNEWFSLDLVTDDKKVAGIVAMQMKTLTPFFFKTKAVVLATGGMGMLYRHTTNSYINTGDGFGIALRAGAALKDPEFVQFHPTALYPSDVLISEAARGEGAILKNIKGERFMTRYAPKKLDLAPRDIVSRAIITEIKEGRGFPGGYVGLDLTHLGEEYIKERLALAVEAAKSFAGVDAFTEPIPVRPAQHYYMGGIDVDIEGRNPDIVGLFSAGEAACVSVHGANRLGSNSLLDTLVFGQVTGRAVVQFLKSNSSNPTSNYEKEAEKVVDDAYKLVKSESGVHFGQILEKLRDTMWDYVGIYRDEGGLLNAMSEINKLRGMISNMYVTDKSKVYNTEFFNALELRNMLDLAFVIAKSALERKESRGAHYRTDYPDRDDNNWLKHTIAYLRGNTVEVTFKPVKITRWKPEPRVY

SEQ ID NO: 10851 - protein, 625 aa, Cornus cf. canadensis Xiang and Fan 9-1
MASSGEQNQVGLLENLKNRLAIAVRSIQWSYAIFWSISSRQPGVLEWGDGYYNGDIKTRKTVQAVEFNADQLGLQRSEQLKELYESLAVTESNQQARRPSAALSPEDLTDTEWYYLVCMSFVFNIGQGLPGRTFANGQPIWLCNAHYADSKIFSRSLLAKSASIQTVVCFPFLGGVVELGVTELVLEDPNFIQHIKTSFLENPYRTVPKIPSYYASENTRTEKDLILAKPSHNLLDAALDAALECGEIVMCAPNNNSSGFLPNQRTEKSVMVEGLSGGASQVQSWQFMDDEISNCVQNSTNSSESISRTSENPEKDCCLTDLPECNLTKLTSLDLPNDDIHYHSVVSSLLKNSHQLILGPYFHKCNRESSFMGWKKTPSGIQQRRRGTPQKLLKKVLFEVARMHGGCLVESRQDNSRKDGLWRPEDDEIGTTDLFSERRRRDKTKERYSVLGSLIPSTSKDDKISILDGTIEYLKELERRLEDSECLEARTRSKPQDTAERTSDNYENDRIGIGKKPLINKRKACDIVEAELEINLVQLKDSSTDDVSVRIIDKDVFIEIRCPWRERLLLEIMDAISNFHLDSHSVQSSNIDGILSLSIKSKFKGSTVASTGMIIQALQRIICKC

SEQ ID NO: 10852 - protein, 542 aa, Brucella melitensis 16M
MARYVFITGGVVSSLGKGIAAAALAALLQARGYRVRIRKLDPYLNVDPGTMSPYQHGEVFVTDDGAETDLDLGHYERFTGRPANQQDNITTGRIYRNIIEKERRGDYLGATVQVIPHVTDEIKNFVLEGNEDYDFVLCEIGGTVGDIEAMPFLEAIRQLGNELPRGTAVYIHLTLMPYIPAAGELKTKPTQHSVKELRSIGIAPDILLVRADREIPESERRKLSLFCNVRESAVIQALDVATIYDVPIAYHKEGLDSEVLSAFGIDPAPKPRMDRWEEVSHRLHNPEGEVTIAVVGKYTGLKDAYKSLIEALHHGGLANKVKVNLDWIEAEVFESEDPAPYLEKVHGILVPGGFGERGAEGKILAAKFARERKVPYFGICFGMQMACIEAARNLVGIEDASSSEFDPTREPVVGLMTEWLKGNMLEKRAAAGDLGGTMRLGAYEAVLKPDSKIAQIYGSTDIHERHRHRYEVNIDYKDRLEAAGLNFAGMSPDGVLPETVEYADHPWFIGVQYHPELKSRPFEPHPLFASFIEAAIEQSRLV

SEQ ID NO: 10853 - protein, 426 aa, Streptomyces fradiae
MSGAHSRRVVITGIGVTAPGGVGSKNFWSLLSDGRTATRRISFFDPSPFRSQVAAEADFDAELLGLSPQEIRRMDRAAQFAVVTAREAVADSGLEFASLDPHRTGVTVGSAVGATMGLDQEYRTVSDSGRLDLVDHEYAVPHLYNYLVPSSFAAEVAWAVGAEGPATVVSTGCTSGLDAVGYATELIREGSADVMVAGAADAPISPITVACFDAIKATTPRNEDPEHASRPFDGTRNGFVLGEGSAVFVLEELDSALRRGAHVYAEIAGYATRSNAFHMTGLRPDGREMAEAIRIALDEARLNPEDIDYVNAHGSGTKQNDRHETAAFKRSLGDHAYAVPVSSIKSMVGHSLGAIGSIEIAASALAMEHGVVPPTANLHTPDPECDLDYVPRTARDWKTDAVLSVGSGFGGFQSAIVLARPDRRTA

SEQ ID NO: 10854 - protein, 464 aa, Haemophilus influenzae 86-028NP
MNFRLLSQYHADIKKLIKISLPILLAQIAQNSMGLADTIMAGRVSSTDMAAISIGASIWMPLMLFGQGLLLALPPTISYLNGSGQRHRIAHQVRQGIWLVLGVSIPLGLLIYFCEIPLQYMQMESKMSDLARDYLHAMLWGLPAYLMLINFRCLNDGIAKTKPAMVITFLGLLINIPLNYIFIYGKFGIPAFGAVGCGIATAIVNWAMCLMMIFYSYTNAQERSLKVFSQLIEMPNLKTLKKLLRLGLPIAIAICCEVALFALTSLMLSPLGATIVASHQITLNTSSFIFMFPMSIGMAATILVGQALGTGSPQNAKKIGYAALLLGLTVTIITALITIFFRYEIASIFVTDEIVIAMAANLLLFAALYQFSDTIQMVVGGILRGYKDTKMILYITLFSYWVIGVPLGYTLGRTDWLIPHIDAKGFWIAFVVSLTFAAFLLSLRMKKMQAMSDNAILQRLEKLK

SEQ ID NO: 10855 - protein, 179 aa, Glycine max
MVAILKRQGENESEETIIGLAKSLMQLSRVQQQSNKPLLKTFSPTEFECKTCNRKFSSFQALGGHRASHKKPKFEAEELKEEAKKTKPKMHECSICGMEFSLGQALGGHMRKHRGAISENDNNNEALSSIKQAIAKAPVLKRSNSKRVMCLEMDLNLTPLENDLKLLFGNKAPRVDLSL

SEQ ID NO: 10856 - protein, 408 aa, Streptomyces fradiae
MNTGAVEVAVTGLGVVAPNGLGTDAYWAATRKGTSGIARISRFDPSRYPVQLAGEIEGFDAKGHLPGRLLPQTDRMTQLALVAADWAFEDAAVRPGDLPEFEMGVITASSSGGFEFGQRELQALWSRGSRYVSAYQSFAWFYAVNSGQISIRNGMRGPSGVVVSDQAGGLDAVAQARRQIRKGTRLVMSGAVDASICPWGWVAQMASNRLSTSRDPERAYLPFDDAAGGHVPGEGGALLVLEELEQARARGARQIYGVIAGYGSTLDPRPGSGRPAGLRKAIELALADAGAAPEEIDVVFADAAAVPELDRIEAEALTQVFGARAVPVTAPKTMTGRLYSGAAPLDLAAAFLAMRDGVVPPSVGVSPSPDHDLDLVVHQERAMTVRSALVIARGHGGFNSAVVVRAVG

SEQ ID NO: 10857 - protein, 436 aa, Clostridium perfringens str. 13
MAQQVISKEQGSIKTLGIFSYFKNGILGLQHLVAMFGATILVPLVTGLDPSVALFTAGIGTLIFHLCTKGKVPVFLGSSFAFIPVIQVIAAKYGDLRYAQGGIFFAGLAYVLISFGIKKIGVDKIKRFLPARVVGPMIMVIGLNLIPNALEMAGVKSLIAGETGAMTSVLIACTTLGLALIISKFGKGFFSQLAIITAVCVGYTLSLILGQVDTSLIQQSTMVAVPNFTLPKFDFGAIMITLPVILAVSMEHIGDITTNGQVVGKNFIEDPGLNRTVLGDGLATLVASLLGGPANTTYGENTGVLAITKNYNPSILRLTAVFAIILSFIAKFGAVIRTIPQSVMGGISLMLFSMIALVGVKTIKNEGVKLNKTNLILMGSIIFVGLSGLFMSEPIGIEISEAVSISGLSLAALIGVILNLIITKFESAKSRKEVIA

SEQ ID NO: 10858 - protein, 293 aa, Wolinella succinogenes
MSKSLYDTLGVDSGASAEEVKRAYRKLARQYHPDINKEAGAEEKFKEINAAYEILSDEKKRAQYDQFGDSMFGGQNFHDFARNQYSQNVNLDEILSSIFGASGGFGAGAGGSFGGFGGFGGFGGFEGVNLDLTSRITIPFATAILGGKQRVNLQHDSFEIKIPAGIQSGETIRLKGKGKSLQGRSGDLLLKVEVAPSQEYLREGNDLTKSFDLPLKTALFGGKVTIPTLHKEITLKVPANTKNAQQFRVKELGAPNRKSGVKGDLYLKANIILPPIESLEPSLREALEQHLPE

SEQ ID NO: 10859 - protein, 284 aa, Parachlamydia sp. UWE25
MKKYHSLTPEENSVINFKGTEYPNTGKYNHFSEPGVYVCKKCDAPLYLSSDKFLSHCGWPSFDDEIKGSVDKKVDSDGRRIEILCHRCGGHLGHVFKGEGLTTKNLRHCVNSVSLSFLPALTKESYERALFAGGCFWGVEYLFQKLTGVIKTKVGYSGGVTIDPTYEDICSGRTKHAETLEVVYDKNKITYEALAKFFFEIHDPSQFQRQGPDIGNQYRSAIFYLTKQQEEIAQCLIQLLSTKGIPIVTEVIPASVFYPAENYHQNYYGKTGKTPYCHIYTKRF

SEQ ID NO: 10860 - protein, 518 aa, Brassica napus
MDMAFVEVCLRMLLVFVLSWTIFHVNNRKKKKATKLADLATEERKEGGPDVIIVGAGVGGSALAYALAKDGRRVHVIERDMREPVRMMGEFMQPGGRLMLSKLGLQDCLEEIDAQKSTGIRLFKDGKETVACFPVDTNFPYEPSGRFFHNGRFVQRLRQKASSLPNVRLEEGTVRSLIEEKGVVKGVTYKNSSGEETTSFAPLTVVCDGCHSNLRRSLNDNNAEVTAYEIGYISRNCRLEQPDKLHLIMAKPSFAMLYQVSSTDVRCNFELLSKNLPSVSNGEMTSFVRNSIAPQVPLKLRKTFLKGLDEGSHIKITQAKRIPATLSRKKGVIVLGDAFNMRHPVIASGMMVLLSDILILSRLLKPLGNLGDENKVSEVMKSFYALRKPMSATVNTLGNSFWQVLIASTDEAKEAMRQGCFDYLSSGGFRTSGLMALIGGMNPRPLSLFYHLFVISLSSIGQLLSPFPTPLRVWHSLRLLDLSLKMLVPHLKAEGIGQMLSPTNAAAYRKSYMAATVV

SEQ ID NO: 10861 - protein, 376 aa, Mycobacterium bovis AF2122/97
MRSPHRDAIRTARGLVVKVGTTALTTPSGMFDAGRLAGLAEAVERRMKAGSDVVIVSSGAIAAGIEPLGLSRRPKDLATKQAAASVGQVALVNSWSAAFARYGRTVGQVLLTAHDISMRVQHTNAQRTLDRLRALHAVAIVNENDTVATNEIRFGDNDRLSALVAHLVGADALVLLSDIDGLYDCDPRKTADATFIPEVSGPADLDGVVAGRSSHLGTGGMASKVSAALLAADAGVPVLLAPAADAATALADASVGTVFAARPARLSARRFWVRYAAEATGALTLDAGAVRAVVRQRRSLLAAGITAVSGRFCGGDVVELRAPDAAMVARGVVAYDASELATMVGRSTSELPGELRRPVVHADDLVAVSAKQAKQV

SEQ ID NO: 10862 - protein, 595 aa, Psychrobacter arcticus 273-4
MSQAYQPDSTKTSAKKSSAVTLNPPKRKTLMRLLAYLKPYWWAILLTITGFAINAGTEIWIAKLLQYITDAINQNDQSKQGLFPFIIVMLFFVRGVGSFLGNYYTALVSRNLVYELRVEVFNKLLRLPSSFYLANPAGTISSKLIFDVEQVTAASTDSLKTLLRDGLTVIALMGFLLYSNWRLTLILFVVLPPILWIIRVASKRYLKLSKGIQATMGGVSHITNEVINGYQVVKNYGGQAYESKRFDEVSKKNLRQGMKIVVTNSINTPAVQLLMAVAMAVVVWLALRPAVIDDISAGQFISYIAAAGLLSKPVRSLTDVNQQLQRGIAAGESIFALLDEPEEEDTGVLSPALVGEIKLDNISLVYPDSTVALHDFNLDIRAGETVALVGRSGAGKSSLVNLLTRTLSTSSGQITLDGMPIEDIKLESLRAQIAMVNQQVVLFNTTVFNNIAYGSLAHKTPAEVEQAAKDAFAHDFIMQMPNGYQSEIGAEGLQLSGGQRQRLSIARALLKDAPILILDEATSALDNESEYYIQKALDNIMRNRTTLVIAHRLTTIESADRIAVLDGGRIVELGTHAELMQLHGHYAQMYARDFE

SEQ ID NO: 10863 - protein, 197 aa, Apium graveolens var. dulce
DPEAMKELREVTAKHPWNLMTTSADEGQFLNMLLKLINAKNTMEIGVYTGYSLLATALALPEDGKILAMDINRENYEIGLPIIEKAGVGHKIDFREGPALPVLDQMIQDGKYHGTFDFIFVDADEDNYINYHKRLIDLVKVGGLIGYDSTLWNGSVAEPADAPMRKYVRYYRDFVMELNKALAVDPRIEICMLPVGE

SEQ ID NO: 10864 - protein, 120 aa, Brassica napus
  misc_feature (24)..(24): Xaa can be any naturally occurring amino acid
  misc_feature (40)..(40): Xaa can be any naturally occurring amino acid
  misc_feature (105)..(105): Xaa can be any naturally occurring amino acid
  misc_feature (108)..(108): Xaa can be any naturally occurring amino acid
  unsure (1)..(120): unsure at all Xaa locations
MAVHIQNPNFLHTHQLRSSLTSAXASPASYHFTRYSPAKXPGFICKSNNKDDYLIDAPVSAGDGFSFSGGKYSDQPSPSDEWLKQGKWVKAHRVGGSGEEAKDPXFGXTMGSSSQASKDV

SEQ ID NO: 10865 - protein, 508 aa, Oryza sativa (japonica cultivar-group)
MATGVSVENINPKVILGPSSIAECIVTNARREINRYLTFFFQHLQQQLQTQPGSLPFDEIVYCNIGNPQSLGQKPITFFREVLALCNHPNLLEREEIKSLFSTDAIARAKKILSMIPGRATGAYSHSQGIKGLRDEIAAGIASRDGFPANADDIFLTNGASPGVHMMMQLLIRNNRDGIMCPIPQYSLYSASLALHGGALVPYYLDESSGWGLEVSKLKNQLEDARSKGITVRALVVINPGNPTGQILDEQQQYELVKFCKDEELVLLADEVYQENIYVTNKKINSFKKIARSMGYNGDDLQLVSLHSVSKGYYGECGKRGGYMEVTGFSTPVREQLYKIASVNLCSNITGQILASLIMDPPKAGDASYDLYEEEKDNILKSLSRRAKAMESAFNSIDGITCNKTEGAMYLFPRIYLPQKAIEAARAVNKAPDVFYALRLLDTTGIVVTPGSGFGQIIRCYLFTCNSEFLTTQVWSFVKGCRDMAREMHDPAAGGEDTFDDLPLQGIP

SEQ ID NO: 10866 - protein, 476 aa, Wolbachia endosymbiont of Drosophila melanogaster
MIQNILRLLHIITVLTRYNILPYLLPPSKKSINKIQGHKLKCALEKLGPVFIKFGQSISSRTDVLNEDITNNLLLICDRLPSFSHKIAVKTIESEFNCKLSDIFSSFSEKPIAAASISQVHRAVTTEGKEVAVKVLRPNIEKTFSRDIKMLSWLAEIAEKFSEQSKRLRPIELVKTFAEICRLELDLRFEAAHSSELKENTKNDRGFYVPEIDWNRTSKKVLTLEWIEATPIYEVEKLNNRKQIAINLIESFCNQVYRDCFFHADMHPGNLMVDSNNNIIALDCGIMGRIDRETCYYVIEILKGFLNRDYDHVAKMHFRAGYVSSQHRNFVTACRAIGEPIIGQPIQKISFASLLAQLLKITGDFDMKVQTQLLLLQKTMILLEGTCRKIYSEINMWKVVEAWISSQHENKIGYREKIRSSYPVKTIQGIFSLIEKLNLIADKKLENIQIKNKSNGKVYFLLWFVIIILIVKLLIS

SEQ ID NO: 10867 - protein, 136 aa, Mycobacterium bovis AF2122/97
MTERTLVLIKPDGIERQLIGEIISRIERKGLTIAALQLRTVSAELASQHYAEHEGKPFFGSLLEFITSGPVVAAIVEGTRAIAAVRQLAGGTDPVQAAAPGTIRGDFALETQFNLVHGSDSAESAQREIALWFPGA

SEQ ID NO: 10868 - protein, 175 aa, Zea luxurians
MEGGAGASEKGTVLVTGASGFVGSWLVMKLLQAGYTVRATVRDPANVGKTKPLMDLPGAKERLSIWKADLAEEGSFHDAIRGCTGVFHVATPMDFLSKDPENEVIKPTVEGMISIMRACKEAGTVRRIVFTSSAGTVNLEERQRPVYDEESWTDVDFCRRVKMTGWMYFVSKTLA

SEQ ID NO: 10869 - protein, 631 aa, Alkaliphilus metalliredigenes QYMF
MNELNVLHDSQKSYFRNPFGAAECGEKIKLRVKIDTMKNIEQVFLSIVDHNGGKREISMYQIETDNESHVFETEINCPEIPGLLWYQFKLIIQGEVIYYCNNDEKLGGQGMLKWHEGHSFQITVYKAGVEVPSWFRRAVMYQIFPDRFYEGETGTKNQHVKKNSFFYGSWEDKPMYIREAETNRIQRWEFFGGDLQGIIEKLNYLEELGITSIYLNPVFESPSNHRYDIGNYKKIDPLLGDSNIFERFCKEAEKRGIHIILDGVFSHTGSDSLYFNKEGNYQSLGAYQSKDSPYASWYQFDHFPDQYKSWWGIDTMPDVEEMDPSYLDYIIRDEDSVIKHWMKLGVKGWRLDVADELPSAFIKVLKKVLKETDPQAVLIGEVWEDATNKISHGEKREFLFGEELDSVMNYPLREALLDFFLTRGDGVTLQARLMKLYENYPKPYFYSLMNIIGSHDVPRALTALAYGDHSSITDEKEVAVKRLKLLSLFQMTFPGIPCIYYGDEAGAEGGNDPDNRRTYPWGSENEEILAWYKKITRIRRDHEVFVEGDWYSPYGDRDVYTFVRQKDGERAFVLFNRSNAEAYDLHLNNLEQLGNGVFKNLLISDDILEVIEGKARVRLEPLEGKVFYIKR

SEQ ID NO: 10870 - protein, 371 aa, Alkaliphilus metalliredigenes QYMF
MKDVMGIVNDIKIKRDLRDLVSHRSTAAVPFGGRYRVVDFVLSNMANGGIKNVGIFTQSNNRSLLDHVDSGKAWDLFNKRGGLFILPPTFSYERFGNRLGDIDHFYNHMDYLERSTQQYVLISNSNSIYNMDYSKIKEAYEKSGADIVILYQRKKEWDSSIKYVSMIMDEKSKIVDMSVNKLIGNNSFKDMGVAFMKKELFMEIIRECHSKGLNDFVKDGLIKNTKKYNMYGMPYDGYVANIDSINNYYKHNMNLLKPEIWKQLFFKEGLINTKVKDEAPSKYNKTAKVSNSLVANGCIIEGEVINSILFRGVKVGKNVTVKNSILMQKNVIHEGCQLEHVILDKDVVVTEGKVLKGDEGYPFVVSKKTVL

SEQ ID NO: 10871 - protein, 764 aa, Nicotiana tabacum
MGSALLPDLGTQIVIPVCAVIGIVFSSFQWYLVSRVKVSSEHGATSPSSNKNNKNGYGDCLIEEEEGINDHNVVAKCADIQNAISEGATSFLFTEYQYVGIFMIAFAILIFLFLGSVEGFSTSSQPCTYNKEKRCKPALATAIFSTVSFLLGAITSVISGFLGMKIATYANARTTLEARKGVGKACLVQVMGFLLAANGLLVLYIAINLFKLYYGDDWEGLFEAITGYGLGGSSMALFGRVGGGIYTKAADVGADLVGKVERNIPEDDPRNPAVIADNVGDNVGDIAGMGSDLFGSYAESSCAALVVASISSFGIDHDFTAMCYPLLISSMGILVCLITTLFATDFFEIKAVKEIEPALKNQLIISTAIMTVGIAIVTWTCLPSSFTIFNFGTQKVVKNWQLFLCVAVGLWAGLIIGFVTEYYTSNAYSPVQDVADSCSTGAATNVIFGLALGYKSVIIPIFAIAIAIFVSFTFAAMYGIAVAALGMLSTIATGLAIDAYGPISDNAGGIAEMAGMSHRIRERTDALDAAGNTTAAIGKGFAIGSAALVSLALFGAFVSRAGISTVDVLTPQVFIGLIVGAMLPYWFSAMTMKSVGSAALKMVEEVRRQFNTIPGLMEGLAKPDYATCVKISTDASIKEMIPPGALVMLTPLIVGIFFGVETLSGVLAGALVSGVQIAISASNTGGAWDNAKKYIEAGASEHARTLGPKGSEPHKAAVIGDTIGDPLKDTSGPSLNILIKLMAVESLVFAPFFATHGGILFKIF

SEQ ID NO: 10872 - protein, 371 aa, Alkaliphilus metalliredigenes QYMF
MKKECIAMILAGGQGTRLGMLTKNIAKPALPFGGKYRIIDFTLSNCSNSGIDTVGVLTQYEPLVLNSYIGIGSHWDLDKKSGGVMVLPPYVKENGGNWYRGTADAVYQNLDFVEHYEPEYLLVLSGDHIYKMDYSAMLKHHKEKQADATIAVIRVPSEETYRFGIMNTDEEERIIEFQEKPENAKSDLASMGVYIFNWKKLKKHLIEEDQNPDSSLDFGKNIIPKMLNEGEKLFAYGFQGYWKDVGTVESYWEANMDLIEDDASLDLHERNWIIYSVNPSQPPQYIGPSAKVTESLLNEGCQIFGEVSHSVIFPGVYIGKGAVVKDSVIMANAIIGDHAKIEKSIIAEKAIIQKKEIIGDNKKNDITVVAT

SEQ ID NO: 10873 - protein, 631 aa, Alkaliphilus metalliredigenes QYMF
MGKKMISQQDVYLFHEGTNYYGYKSLGAHVTVEGGQKGTRFTAWVPNAKEVRVAGDFNHWQGQQHPMEKIPDSKLWSVFIGGIQEGTLYKYEILGDNGAFYLKIDPYGFLSEPRPNTASIVCELEDYPWQDQKWQQNKVVENSLHRPVMIYEVHLGSWRRKADDSFCNYREIAHELGDYAVEMGYTHVEVMPIMEHPLDDSWGYQITGYYAVTSRYGNPKDFMYFVDYLHQKGIGVILDWVPGHFCADAHGLRQFDGGNVYEYQDANRAINKEWGTVNFDLGKPEVKSFLISNACFWMEMYHIDGLRVDAVANMLYLDYGREHGDWTANQYGGNENLEAVDFLKQLNKAVFQYFPNHFMIAEESTQWPMVTAPIHVGGLGFNYKWNMGWMNDTLKYMELDPIHRKWSHNLLTFSLMYTYTENFILPLSHDEVVHEKKSLLEKMSGNYWEKFANLRCYYGYLMAHPGKKLLFMGGEFGQFIEWNHNKALDWMLLDHEMHRKLHQYMKDLIHFYKEEASLWQNDYQVEGFQWIDPNDYQQSMITFMRRRADDFTIIICNFTTIPREQYRVGVPFKGNYKEVFNSDSTEYGGSGVKNPRVMKAEKVKWHNQSYSIETSIPPLGVLYIRQEKDEE

SEQ ID NO: 10874 - protein, 375 aa, Bradyrhizobium japonicum USDA 110
MLNATEGATLLGHAIGEAVARAKVDPKEVEDVVMGAALQQGATGGNIARKALLRAGLPVTVAGTTIDRQCASGLQAIALAARSVIFDGVEIAVGGGGESISLVQNDKMNGFHAQDPALLKIKGEVYMPMIDTAEIVAKRYGISREKQDEYSLESQRRTAAAQQGGKFKDELAPITTQMAVTDKATGAVSFKEVTLSQDEGPRPETTAEGLAGLKPVRGEGFSVTAGNASQLSDGASATVIMSDKEASKRGLKPLGIFRGFVSAGCEPDEMGIGPVFAVPRLLKRHGLTVDDIGLWELNEAFAVQVLYCRDKLGIDPEKINVNGGAIAVGHPYGMSGARLTGHALIEGRRRKAKYAVVTMCVGGGMGAAGLFEVLQ

SEQ ID NO: 10875 - protein, 655 aa, GIBBERELLA ZEAE PH-1
MKRFSQRVLSRGKDPNKSSKKNKDNKDGTASPSSRDNNQSPVLTPSSSTSTLNDPRNKQPQNSSNHGSEHGGASQPSNLSNVTQAGNAPDHFATGGASSPNGGSSSSRLPPTVVISPTPGHVPPPGAAETMPHDLAPPKAGQKSLLIHRGIDNRDAIPEGLRTPKRQHSSRFDISAHRELEKLPGFHEVPPNRRQELFMQKIDQCNVIFDFNDASGDMKSKEIKRLALHELLDYVANNRQVITEPMYPKVVDMFAKNLFRPIPPPINPQGEAFDPEEDEPVLEVAWPHIQVVYEFFLRFIESQDFNTNIAKAYIDHSFVLQLLELFDSEDPRERDFLKTTLHRIYGKFLNLRSFIRRSINNVFFQFTYETERFNGIAELLEILGSIINGFALPLKEEHKIFLTRVLLPLHKPKSLSMYHPQLAYCIVQFLEKDASLTEDVVIGLLRYWPKVNSTKEVMFLFAVVDVFAVMDPAEFAKVQEPLFHQLAKSVASPHFQVAERALYFWNNEYFCNLVSDNVEIILPIMFAPLYENSKGHWNRTIHGMVYNAMKLFMEINPQLFDDCSHEYTEQQNSAAAREALRERKWAALSEKADQQRQSNGNGVADAPAQITPMPRVDENDAATEDNSKRLDSLKLQDGRPSLHERDNSVGSARSR

SEQ ID NO: 10876 - protein, 363 aa, Deinococcus radiodurans R1
MKCFTSATPPSPSLFFSRTNQIKENPLMSAKMYYDRDVDTQVLENKLIAIIGYGSQAHAHAQNLRDSGFNVVVGLREGSSSKAKAEQAGLRVASIEDATKEADVVMLLIPDEQQPAVYEKSIAPHLTAGKALAFGHGFNVHFGRIKPPADVDVFLVAPKGPGHMLRRVYTDGAGMPGIFAVQQDASGKARDIALAYARGIGCTKAGVLETTFKEETETDLFGEQSVLCGGVTHLIQAGFETLVEAGYQPEIAYFETLHEVKLIVDLIYEKGFEGMRHSISNTAEFGDYVTGPRIITDQTKAEMKNVLGDIQSGKFAESFIKDAESGFPYMNEQRSKMRDHTVEKVGKELRDQMPFINKKELEV

SEQ ID NO: 10877 - protein, 108 aa, Oryza sativa
  misc_feature (46)..(46): Xaa can be any naturally occurring amino acid
  misc_feature (51)..(51): Xaa can be any naturally occurring amino acid
  misc_feature (97)..(97): Xaa can be any naturally occurring amino acid
  unsure (1)..(108): unsure at all Xaa locations
MSRVDPPRSPVRLVEHWVSSHRVRRYGGFTKVFSPMLLMVLLLPAXTGEMXGPVMVAEARTCESQSHRFKGPCARKANCASVCNTEGFPDGYCHGVXRRRCMCTKPCP

SEQ ID NO: 10878 - protein, 565 aa, Oryza sativa (japonica cultivar-group)
MDAKNQQSGDGQQRPAQQAAGMDPAKAAAQAATRRKKMTKQLTGKRDDTALHGAARAGQLVAVQQTLSGAPPDELRALLSKQNQAGETPLFVAAEYGYVALVAEMIKYHDVATACIKARSGYDALHIAAKQGDVEVVNELLKALPELSMTVDASNTTALNTAATQGHMEVVRLLLEADASLAVIARSNGKTALHSAARNGHVEVVRALMEAEPSIAARVDKKGQTALHMAAKGTRLDIVDALLAGEPTLLNLADSKGNTALHIAARKARTPIVKRLLELPDTDLKAINRSRETAFDTAEKMGNTESVAVLAEHGVPSARAMSPTGGGGGNPGRELKQQVSDIKHEVHSQLEQTRQTRVRMQGIAKQINKLHDEGLNNAINSTTVVAVLIATVAFAAIFTVPGEYVDDAGSLTPGQALGEANISHQTAFLIFFVFDSVALFISLAVVVVQTSVVVIERKAKKQMMAVINKLMWVACVLVSVAFLALSFVVVGKAERWLAVGVTIMGATILVTTIGTMLYWVIAHRIEAKRMRSIKRSSLSRSRSFSASGMSEAEWVEEEFKRMYAI

SEQ ID NO: 10879 - protein, 474 aa, Pseudomonas aeruginosa PAO1
MTLYLQLAETLGSRIEQGLYRPGDRLPSVRAMSIEHGVSLSTVQQAYRLLEDRGLAEPRPKSGYFVPAARQMPPLPAIARLAQRPVEISQWEQVLALVSTVPRPDVVQLGRGMPDISSPSLKPLTRSLARLNRHADARALAYDGIHGSPLLREEVARLLVDSGCRATASDVVITTGCHEALSVSIRAVCEPGDIVAVESPSFHGAMQSLKGLGMKALEIPTDPVNGISLEALELALEQWPIKAIQVTPNCNNPLGYIMPESRKRALLALAQRYDVAIIEDDVYGDLAYTYPRPRTIKSYDDDGRVLLCGSFSKVLAPGLRIGWMVPGRYADRVLHMKYISTGASALQPQLAIAEFIGNGHYEPHLRRMRAQYQRGRDLMIDWVARYFPEGTRASRPQGGFLLWVELDEAFDTLRLDKALRNRGVQVAVGCIFSASGKYRNCLRMNYAALPTPAIEQAVRRVGESACELLEPCEA

SEQ ID NO: 10880 - protein, 598 aa, Pantoea dispersa
MFLNGFKTVIALTMASSFYLAASPLTKPSTPIAATNIQKSADFPIWWKQAVFYQIYPRSFKDSNGDGIGDIPGIIEKLDYLKMLGVDAIWINPHYESPNTDNGYDISDYRKIMKEYGSMADFDRLVAEMNKRGMRLMIDIVINHTSDRHRWFVQSRSGKDNPYRDYYFWRDGKQGQAPNNYPSFFGGSAWQLDKQTDQYYLHYFAPQQPDLNWDNPKVRAELYDILRFWLDKGVSGLRFDTVATFSKIPGFPDLSKAQLKNFAEAYTEGPNIHKYIHEMNRQVLSKYNVATAGEIFGVPVSAMPDYFDRRREELNIAFTFDLIRLDRYPDQRWRRKPWTLSQFRQVISQTDRAAGEFGWNAFFLDNHDNPRQVSHFGDDSPQWRERSAKALATLLLTQRATPFIFQGAELGMTNYPFKNIEEFDDIEVKGFWNDYVASGKVNAAEFLQEVRMTSRDNSRTPMQWNDSVNAGFTQGKPWFHLNPNYKQINAAREVNKPDSVFSYYRQLINLRHQIPALTSGEYRDLDPQNNQVYAYTRILDNEKYLVVVNFKPEQLHYALPDNLTIASSLLENVHQPSLQENASTLTLAPWQAGIYKLN

SEQ ID NO: 10881 - protein, 311 aa, Deinococcus radiodurans R1
MKFYVIGDVTVDHLYHLDRLPAPGKEVTPKRSTMQPGGSGGTISVTLARLGHTVTLAARVGDDPFAEFALAEIKASGVSLSAIQKDPEHLTSTITVMQTSGGQRAMISDGAANRQLDPAKLKKKDVESADALIISAYSLTEGPQREYAQKAIEIARGAKKPVPVFIDLGTGAVEKVGTGLVAEVRGADYLTLNQHELLALTGTRSLSAGLARLAEAGVERVAVKVGKMGSVVWTPEDTELVDAVLPEGTVVDTTGAGDTFTAAFAHAVLSGLPLTQAARVANAAGALAATAVGAQSKPILVGDLERVAQSK

SEQ ID NO: 10882 - protein, 374 aa, Glycine max
TKPMGRAPCCEKVGLKKGRWTAEEDEILAKYIQANGEGSWRSLPKNAGLLRCGKSCRLRWINYLRADLKRGNISAEEENTIVKLHASFGNRWSLIANHLPGRTDNEIKNYWNSHLSRKIYSFPGAGAGASAGIMDTPKVVYIPPKRKCGRTSRWAMKKNKTYTQKVNDRINQRHTQIGFPQQNSDTAVPTPPTPSLESEGLSNAVNDFKVLDGDVAEFDEPRTEELEAEVNKRDNSVGGVEESSNTDEDILGLCELEGINEDSGMLLGFSDILESCLAETTCGVWDISEERESNDVVAADACRDKIASSEEGSCSSMNQDWDWESVLEFSNAVDNWEDQDKLLTWLWEDDDCKRLGETDTQILQNDMVIDWFLS

SEQ ID NO: 10883 - protein, 132 aa, Glycine max
  misc_feature (34)..(34): Xaa can be any naturally occurring amino acid
  misc_feature (50)..(50): Xaa can be any naturally occurring amino acid
  unsure (1)..(132): unsure at all Xaa locations
TSERLCIRNRIEKKAAHCKIWRIKYIGLQRLIQXTEPAYSSGNASKGGYXPFTEVQTRRHASVEVGISVDRQLAHLDFNSSAKEVHDDRYVIKAMKCSERSQNDNPPDTCTEDGEGSSTYAQVPGSVSQRDR

SEQ ID NO: 10884 - protein, 213 aa, Frankia sp. ACN14a
MSKAEFIQAEYIWIDGTEPEPLMRSKTRIIKKGKEPEIWGFDGSSTNQAPGSNSDCVLRPVFVTPDPIRGGDNILVLCEVELTDFTPHPTNTRAATRAVAEKYADMSPMFGIEQEYTFFKDGRPYGWPEVGYPAPQGPYYCGVGGSKMPGREIVERHTQACLDAGLAIEGTNAEVMMGQWEFQIGVLPAPAIGDQIWLGRWLLHRIAEDYGVE

SEQ ID NO: 10885 - protein, 101 aa, Brassica napus
  misc_feature (45)..(45): Xaa can be any naturally occurring amino acid
  misc_feature (71)..(71): Xaa can be any naturally occurring amino acid
  misc_feature (85)..(85): Xaa can be any naturally occurring amino acid
  unsure (1)..(101): unsure at all Xaa locations
MGEKIVKKVPITSEEEAIGPQQQFVTMNGKVYSLRFQEDFVDVSXKEVDLLNELEVSKLYHCDGLVLCVGXDNSKLLLWNPYLCXTRLIGPRESFHVTERH

SEQ ID NO: 10886 - protein, 499 aa, Vibrio fischeri ES114
MRVLLLSLKERELVTKTLSIVFVASEVDGLIKSGGLADVAKALPKSLKELGHSVQIVMPAYKTIAGRDDAEIILTTQLEHWPHTAYQVRSLNVDGIPVFAIESGDYFERAEMYAENNQAYADNGERFAFFSAATLDLLPKLLNKKPDIIHVNDWHTGLIPYLLKKRYVENEFYHQTRSVLSIHNAVFKGIFHYDEIACLSEFKSHFVPEASISHTHVSMLKAGVQCADKINAVSPNYAKELLTELGSHGMASDFQDRESDLIGILNGCDYSEWNPEKDSYIPKQFKVNRISMVRGKKACKAALQQELSLPQKDVAMYGMVCRLTNQKGIQYLLPILEQFLKNDLQLVIVGTGDPVLATRLTEIAQEHSDKFAFVEAYDNKLAHWVEAGSDFFIMPSEFEPCGLNQIYSMAYGTLPIVREVGGLKDSVNNYDDDIENATGFSFKNPEPMELLLVLMRSLLLYSQNLNEVKRVQLHAMKQDFCWNKAALKYIEMYRTAINS

SEQ ID NO: 10887 - protein, 322 aa, Schizosaccharomyces pombe
MVVYIVLYTCLAGFILLFLVYYYLTHSHCPRKQLEGEETCVFIENGQKKSLTLEKWSTSDNIQITVIVPAYNESKRIGNMLQETVDHLEKYYRSSSSAGQRRWEILIVDDESKDTTVNAVLEFSNKLDLRDHLRVCSLKRNRGKGGAVTWGMLYARGQYAIFADADGASQFSDLELLFKNMPPGPRGGVVVGSRAHMVNTAAVVKRSFIRNFLMHCFHKLLQILGIREIGDTQCGFKLFSREAYQSIFPRMHVEGWIFDIEVLTLARFFGLPIIEVPITWHEVGGSKMTLLKDSISMAIDLLVIRLNYTFGIWERPSAKRIT

SEQ ID NO: 10888 - protein, 435 aa, Zea mays
MLGDQRMILGLDSATSSSTAPDLTRAEEDPSVSRSCVIDRLQVGWAQKGGQVEGLVNCYSKKKNKTGSGSRNLAARAWSSEMEGSDEGGEVNTGDLIGGIGRELAISCLLRLPRSYYYDVACVNRSFYSLVRFGELYRLRREAGIVEQMIYCSCNVLEWEGFDPRRQRWFSIPSMPPIECFTLADKESLAVGTNILVFGKRVEAHVVLRYSLLTNSWTTGEMMNTPRCLFGSASFGEKAIVAGGIGQNGTLDSAELYDSEMQTWTTLPSMNRARQMCSGFFMDGKFYVIGGKSERHNEILSCAEEFDLESSTWRLIPDMAQGLNGGSGAPPLVAVVNNELYAADYATKEVRKYDKENNAWITLGLLPGRYTSVHGWGIAFRSCGDMLIVIGAMSAGGSGVIEICSWVPNNGLPDWKIIGTRRSGSFVYNCAVMSC

SEQ ID NO: 10889 - protein, 405 aa, Vibrio fischeri ES114
MAGVLGMILAGGEGSRLRPLTESRTKPAVPFGGSYRLIDFALNNFVNADLMRIYVLTQFKSQSLFQHMKKGWNVNGITDRFIDPVPAQMRTGKRWYEGTADAIYQNISFIESTDPEHVCIFGSDHIYKMDIRQMLDFHKKKKAALTVSALRMPAKDASGFGVIEVDEHGKMIGFEEKPSNPKCIPGQPGIALVSMGNYIFEAESLCKELIHDAALEDSSHDFGKDIIPKMFPEGNVYVYDFSTNHIKGEKKEVYWRDVGTIESYWEAHMDLLKKDAPFSLYNRKWPLHTYYPPLPPATFSDSDNGRVQIIDSLVCGGSYIRGSRIEKSVLGFRSNIASACDISESILLGNVKVGKGCVLRRVIVDKGADIAPGTEIGVNLQEDKKRYHVSDEGIVVIPKGERVGY

SEQ ID NO: 10890 - protein, 404 aa, Schizosaccharomyces pombe
MSFRNSSRMAMKALRTMGSRRLATRSMSVMARTIAAPSMRFAPRMTAPLMQTRGMRVMDFAGTKENVWERSDWPREKLVDYFKNDTLAIIGYGSQGHGQGLNARDQGLNVIVGVRKDGASWKQAIEDGWVPGKTLFPVEEAIKKGSIIMNLLSDAAQTETWPKIAPLITKGKTLYFSHGFSVIFKDQTKIHPPKDVDVILVAPKGSGRTVRTLFKEGRGINSSFAVYQDVTGKAQEKAIGLAVAVGSGFIYQTTFKKEVISDLVGERGCLMGGINGLFLAQYQVLRERGHSPAEAFNETVEEATQSLYPLIGKYGLDYMFAACSTTARRGAIDWTPRFLEANKKVLNELYDNVENGNEAKRSLEYNSAPNYRELYDKELEEIRNLEIWKAGEVVRSLRPEHNKH

SEQ ID NO: 10891 - protein, 325 aa, Arabidopsis thaliana
MASNGDKGLIVSFGEMLIDFVPTESGVSLAEAPGFLKAPGGAPANVAIAVSRLGGRSAFVGKLGDDEFGHMLAGILRKNGVDDQGINFDTGARTALAFVTLRADGDREFMFYRNPSADMLLRPDELNLDLIRSAKVFHYGSISLIVEPCRSAHLKAMEVAKEAGALLSYDPNLREPLWPSKEEAKTQIMSIWDKAEIIKVSDVELEFLTGSNKIDDETALTLWHPNLKLLLVTLGEKGCRYYTKTFKGAVDPFHVNAVDTTGAGDSFVGALLNQIVDDRSVLEDEERLRKVLRFANACGAITTTKKGAIPALPSDAEVRSFLEKK

SEQ ID NO: 10892 - protein, 594 aa, Schizosaccharomyces pombe
MNSYVLTSQVLVYNYSKRKNYWHFWLRSFMSNNRKFLVHIHLIPHLNSLYSICFLGFPGQELLVASDHIQKRNHHKPAVVGASITLMASVALVDFDPVKHAGVSSKRAYRVVLAGFLCFSDYKKVLGSSYASEEERQLALSECHLRCAERSLKVFEENGGIYIKIGQHLSAMGYVIPKEWTNTMVKLQDRCPSTSLKDIDHLFRVDTGKGLDETFDEFDPIALGVASLAQVHKARLKDSDVWVAVKVQHPSVSLNSPLDLSMTRWVFKAIKTFFPDFKLMWLADEIERSLPQELDFTREAKNSIETKEHFAHLSTSLYVPEVMWSKPRILVMEYVAGARIDNLSFMDEHSISRDLVSVDICHIFNEMIFGKGGHLHCDPHGGNVLIRSKPKNSKSPRNYEIVLLDHGLYRDIPHELQVDYANMWLNIINFNEKNLKFYAKKVANVSDENFPIFATAITGRPYKSLKSLPIGGPNHEEEQKKFISALQKGGMLQSIIRLLSTMPRLTLLLMKTNDLVRSLDENLKTKSGPEKLYLIMARYCLRCVYDDKMDSLWNSRSFWVSKVFKGTYYRLSYLFSSLKYTLAENYFYYKHMYL

SEQ ID NO: 10893 - protein, 325 aa, Wolbachia endosymbiont of Drosophila melanogaster
MVRAIQIKKTGGPEVLEFVDKSIGEPKGEEVLVRHTTIGLNRYDLEHRKGTRKIKNLPSVLGVEAVGVIEKLGKKISDGLKVGDRVGYCTAPPGAYCEKRIIHQKYLIKIPDDISDEVAAAVLFKGMTAHYLVNQSYKVRPGAFVLVHGANGGLGQIICQWAKDKKGVVIGSVSSDEKMKIALQSGCTYAINYNDKDFVSKVMEITQNRRVGAVYDPIGYATSKLSFESLGRFGIYVSYGQISGNAPISFSLLSSRSLFATGTSIYHYKHDRFTLVLTTMEIFEMIRKKLLTVRINKKYKFDEIIQAHRDMENRKASGLNIIKIS

SEQ ID NO: 10894 - protein, 587 aa, Agrobacterium tumefaciens str. C58
MIGSFLSPDDKKLLTRLFKENFKKHVGWYSAAIVAMLLVAGTTSLSAWIMRDIVNSVYLKQGFDVVLEIAFAVAAIFIVKGLATFVQSYYLSKAGNSIVAEQQRKIYDRLLKQGVSFFQNLPSSELLVRVTYNAQAARSVIDTIVTSFVRDLFSLLGLIIVMFAQNFLLSAISMIIGPVAIFSVRLVLRRVRKIMEAELASLGEIVNVVQETSIGVRVIKAFSLEKLMRQRMNKAVSDVEHRANGIAKLEAATSPIMETLSGLAIAVVIAVSGYTVLEKGGSPGDLMAFITALLLAYEPAKRLARMRVQIEGGMIGVRMMFEVLDAPLTLAEKKDAQPLPKASGNVELKNVSFEYVANQPVLKDVSVLFEGGKMTALVGPSGSGKSTIINLMMRLYDPQSGSVEINGMDLRDVSFASLREHVSYVGQETFLFSGTVKHNISVGRDNATDEEIIAAAKAANAHDFIMNMPDGYDSKLGENGSGLSGGQRQRVAIARAMLRDADILILDEATSALDSESEALVRDALERLTLNKTSIVIAHRLSTINRADKIVVMDNGQVVEQGSRRELLATDGLYKRLHSIQFDADVA

SEQ ID NO: 10895 - protein, 267 aa, Elymus virginicus
CELDNIMRLTGITGIVNGMDVSEWDPTKDKFLAVNYDITTALEAKALNKEALQAEVGLPVDRKVPLVAFIGRLEEQKGPDVMIAAIPEIVKEEDVQIVLLGTGKKKFERLLKSVEEKFLGKVRAVVRFNAPLAHQMMAGADLLAVTSRFEPCGLIQLQGMRYGTPCACASTGGLVDTIVEGKTGFHMGRLSVDCNVVEPADVKKVATTLKRAVKVVGTPAYQEMVKNCMIQDLSWKGPAKNWEDVLLELGVEGSEPGIVGGRSRRSP

SEQ ID NO: 10896 - protein, 522 aa, Arabidopsis thaliana
MVVSADCRISLSAPSCIRSSSTGLTRHIKLGSFCNGELMGKKLNLSQLPNIRLRSSTNFSQKRILMSLNSVAGESKVQELETEKRDPRTVASIILGGGAGTRLFPLTKRRAKPAVPIGGAYRLIDVPMSNCINSGINKVYILTQYNSASLNRHLARAYNSNGLGFGDGYVEVLAATQTPGESGKRWFQGTADAVRRFHWLFEDARSKDIEDVLILSGDHLYRMDYMDFIQDHRQSGADISISCIPIDDRRASDFGLMKIDDKGRVISFSEKPKGDDLKAMAVDTTILGLSKEEAEKKPYIASMGVYVFKKEILLNLLRWRFPTANDFGSEIIPFSAKEFYVNAYLFNDYWEDIGTIRSFFEANLALTEHPGAFSFYDAAKPIYTSRRNLPPSKIDNSKLIDSIISHGSFLTNCLIEHSIVGIRSRVGSNVQLKDTVMLGADYYETEAEVAALLAEGNVPIGIGENTKIQECIIDKNARVGKNVIIANSEGIQEADRSSDGFYIRSGITVILKNSVIKDGVVI

SEQ ID NO: 10897 - protein, 171 aa, Candida albicans SC5314
MGNELLSTARIYTFKIPDAYNNVIDFDQFKNKVILIVNVASLCGFTPQYKELQLLYEKYHERGLEILGFPCNQFGNQEPLQEEEIVESCRRNFGVSFPIMKKTKVNIDCDGHESELYKYLKSEKPGEVGFKGVRWNFEKFIVNRKGEVVARFNSLITPLQLEGFIEQLLSE

SEQ ID NO: 10898 - protein, 358 aa, Vicia sativa
MDRRFIFALFLFAATATAATDDFLIRQVVDNEEDHLLNAEHHFTSFKSKFSKSYATKEEHDYRFGVFKANLIKAKLHQKLDPTAEHGITKFSDLTASEFRRQFLGLNKRLRLPAHAQKAPILPTTNLPEDFDWREKGAVTPVKDQGSCGSCWAFSTTGALEGAHYLATGKLVSLSEQQLVDCDHVCDPEEAGSCDSGCNGGLMNNAFEYLLQSGGVVQEKDYAYTGRDGSCKFDKSKVVASVSNFSVVSLDEEQIAANLVKNGPLAVAINAAWMQAYMSGVSCPYVCAKARLDHGVLLVGFGKGAYAPIRLKEKPYWIIKNSWGQNWGEQGYYKICRGRNVCGVDSMVSTVAAAQSNN

SEQ ID NO: 10899 - protein, 226 aa, Zea mays
SFWSSHLPRTPYDISLDDETQNRNDQGFEKMVSGIYLGEIARLVLHRMALESDFFGDAADNLCTPFTLSTPLLAAIRKDDSPDLSEVRKILQEHLKVSFPDLHEIPDTPLKTRRLVVKVCDIVTRRAARLAAAGIVGILKKLGRDGSGVASSGRTGGQMRRTVVAIEGGLYEGYPVFREYLDEALVEILGEEVARTVALRVTVDGSGAGAALLAAVHSSNRQQGSI

SEQ ID NO: 10900 - protein, 510 aa, Bradyrhizobium japonicum USDA 110
MRFVSAPARPMPRPFDFALNLIQSGVNNMTFKRPYGAGLAALAVGLFAATAAYAEPTVNKGDNAWMLTSTVLVLLMTIPGLALFYGGLVRSKNMLSVLMQVFYTVCVVTVIWAVYGYSLAFTGGSDFIGGFSKAFMMGVTTDSKAATFSVDANISELIYMCFQMTFAAITPALIVGAFAERMKFSAIALFIPLWVTLIYFPIAHMVWYWPGPDAIQDAAKALAAATDAAAKTAAQAKLDEINADAGWIFKKGAIDFAGGTVVHINAGIAGLVGALLIGKRTGYGKELMAPHSLTMSMIGASLLWVGWFGFNAGSNLEANGGAALAMTNSFVATAAAALSWMFAEWIVKGHPSVLGVISGAVAGLVAVTPAAGFSGVMGAIVLGLVVGVVCLFFCTVVKNAIGYDDSLDVFGVHCIGGIVGALGTGILVNPALGGAGIIDYTAIPPKVADYDFAAQMVSQFWGVCTTLVWSGIGSAILYKVVDVIVGLRANVESEREGLDITEHTERAYNM

SEQ ID NO: 10901 - protein, 523 aa, Oryza sativa (japonica cultivar-group)
MANINMADTVPSCDTYLLFNGETLLPIGVRAFIYTAVLAYCFIGLSAITGRFFKSMESIMRHSREVVTVDPHTNATIVKHEKVWNYTIADVALLAFGTSFPQISLATIDAIRNLGQLTAGGLGPGTLVGSAAFDLFPIHAVCVVMPRAGSKKKISDLGVWLVELFWSFWAYIWLYIILEVWTPRVITLWEALLTVLQYGLLLLHAYAQDKRWPYVSIPLARGERPEDWVPAEDASVDYDDNYDGIGDILPGQNEDIVDIFSAHSYSNEGYHHVSEEDVEESSTGLTLKNKWEDTHWFSIWWQQFVDAATLESSVSRKMDSTCLRVIGISWNLIIAPWKMLFAFVPPYEIAHGWIAFICSLIFISGIAYGVTKITDQISCVTGVSPYVIAFTALAAGTSWPDLVASKIAAERQITADSAITNITCSNSVNIYVGIGVPWLVDTMYNYFVYQKPLYIDNAAGLSFSLLVFFATSFGCITVLVLRRVILGAELGGPRMWAWATSVYFMILWVVFVVLSSLKISGVI

SEQ ID NO: 10902 - protein, 206 aa, Michelia figo
  misc_feature (107)..(107): Xaa can be any naturally occurring amino acid
  misc_feature (204)..(204): Xaa can be any naturally occurring amino acid
  unsure (1)..(206): unsure at all Xaa locations
VQLKRMENKINRQVTFSKRRNGLLKKAYELSVLCDAEVALIIFSSRGKLYEFGSAGTNKTLERYQRCCYTPQDVVVSDRETQGWYQEVSKLKAKYESLQRSQRHLLXEDLGPLSVKELQHLERQLEVALSQARQRKTQIMIEQMEELRKKERQLGDINKQLKIKLEAEGQGPFRCIQGSWESGAMVGNNTFSMNAPQAAPLDAXSP

SEQ ID NO: 10903 - protein, 434 aa, Oryza sativa (japonica cultivar-group)
MANINMADTVPSCDTYLLFNGETLLPIGVRAFIYTAVLAYCFIGLSAITGRFFKSMESIMRHSREVVTVDPHTNATIVKHEKVWNYTIADVALLAFGTSFPQISLATIDAIRNLGQLTAGGLGPGTLVGSAAFDLFPIHAVCVVMPRAGSKKKISDLGVWLVELFWSFWAYIWLYIILEVWTPRVITLWEALLTVLQYGLLLLHAYAQDKRWPYVSIPLARGERPEDWVPAEDASVDYDDNYDGIGDILPGQNEDIVDIFSAHSYSNEGYHHVSEEDVEESSTGLTLKNKWEDTHWFSIWWQQFVDAATLESSVSRKMDSTCLRVIGISWNLIIAPWKMLFAFVPPYEIAHGWIAFICSLIFISGIAYGVTKITDQISCVTGVSPYVIAFTALAAGTSWPDLVASKIAAERQITADSAITNITCRYISAHLLSN

SEQ ID NO: 10904 - protein, 333 aa, Tropheryma whipplei TW08/27
MSEIGTRVYTECDADLSLIQNVLVAVIGYGSQGHAQALNLRDSGVNVVIGLKENSASRKSAQDSGFEVLLPQEAAKKAQLIALLVPDPAQRDVYESAIKHNLSEGDALLFSHGFNIRYGYITPPDGVDVLMVAPKGPGHMVRREYLDNRGTPAVFAIEKDASGRCFDLALSYAKGIGALRAGAIQTTFTEETETDLFGEQAVLCGGLEQLIQYGYETLVEAGYQPEVAYFEVLHELKLIIDLIVEGGLSKSRWSISDTAEYGSYVSGPRVIDKHVKENMKKILGEIRSGEFANRFIKDQDSGANEFTQLREIAARHPIEEVGARLRALFSWSK

SEQ ID NO: 10905 - protein, 123 aa, Brassica napus
  misc_feature (106)..(106): Xaa can be any naturally occurring amino acid
  unsure (1)..(123): unsure at all Xaa locations
MRPILMKGHERPLTFLRYNRDGDMLFSCAKDHTPTLWYADNGERHGTFRGHNGAVWCCDVSRDSLRLITGSADQSAKLWDVKTGQQLFSFKFGSPARSVDFALGDXLAVITTDPFMERTSAIH

SEQ ID NO: 10906 - protein, 239 aa, Phytolacca americana
  misc_feature (235)..(236): Xaa can be any naturally occurring amino acid
  unsure (1)..(239): unsure at all Xaa locations
VQLRRMENKINRQVTFSKRRSGLVKKAHEISVLCDAELALIIFSPRGKLFEYSTDSSMEKILERYERYFYAERQLASNDPNTEVNWTFDFAKLKAKLELLQRNHRHYLGQDLDSLNIKDLQSLEQQLDNALKHIRTRKNQLMHESISELHKKEKAMQEQNNMLVKKIKEREKAMAEAQGMQWQRQQNEPPEASNFLLPPPLTSWNTAGDAYHGQIAGEVKRNDLDLTLEPVYSCXXGCF

SEQ ID NO: 10907 - protein, 282 aa, Sinorhizobium meliloti
MAPFSSLGESRSKMEDKFDLSSARLVVVKIGSTLVLDRETSGIRSSWLESLTEDVSRLLTRGQQVVLVSSGAVAIGSTIVDRLATYSQVSHKQAAAALGQVQLTHAYSESLKRHGLQVAQLLMGRGDLVDPAHRLNTRAVLLRLIDLGAVPLVNENDTTATCGTRVGDNDRLAAWIAEIINADLLILLSNVDGLFMKDPRNNPLTPMLTEVESITREIEAMATQSVDPYSSGGMISKIEAGKIAMNAGCRMIIANGTRSHPLYAIESGGPSTHFIPVARDRV

SEQ ID NO: 10908 - protein, 387 aa, Haemophilus ducreyi 35000HP
MSYFAEKLAELAQVGLNRSLPEIEHQGKWIIAQNRKMLNFSSNDYLGLASDTELQQTFLQNILQEAPLHQWFSSSSSRLLTGNFPIYARLEQLLAQRFQRETALLFNSGYHANIGILPALVDKHSLILADKLVHASLIDGTRLAGCDFYRYQHNNLAHLTQLLEKHTGQYRRIIIVTESVFSMDGDVAPLPQLVALKKAFSSQTEVMLYVDEAHAIGVYGANGLGMAEFFDCIDDIDLLVGTFGKALASMGAYLICDQLIKQYLVNTMRPLIFSTALAPINVAWTHFLFEKLPQFQPKRAHLARLSQQLKQAVELRNGDTLATQSCIVPFVVGENRQAVEKSQYLQQQGYYCLPIRPPTVPKGTARIRFSLTADLTEAELNGLIACL

SEQ ID NO: 10909 - protein, 180 aa, Physcomitrella patens
MASAVVNQSEAAAVRAPSKPVKTYSKENEQLVKQSWEILKKDAQRNGINFFRKVFEIAPGAKAMYSFLRDSTIPFEENPKVKNHARYVFMMTGDAAVQLGEKGAYQVLESKLQKLAATHVNAGVTDDQFEIVKEAILYAIEMGVPDLWSPELKSAWGDAYDMLAEQVKAEMHAQRSAATS

SEQ ID NO: 10910 - protein, 511 aa, Zea mays
MDSARSWFTKLQTREKSIGKKKELPPNGKEPGDDAPSSATKQRVAAAKQYIEKHYKEQMKHLQDRKERRCSLEKKLADADVSEEEVNNILKQFEKKETEYMRLQRHKMSVEDFELLTMIGKGAFGEVRVCREKTTGNVYAMKKLKKSEMLRRGQVEHVRAERNLLAEVDHHCIVKLYCSFQDSEYLYLIMEYLPGGDMMTLLMRKDTLTEDEARFYVGETVLAIESIHRHNYIHRDIKPDNLLLDKHGHLRLSDFGLCKPLDYSNFPDLNEKDVTPPTKSSAMHGDGKQQSMPKRSQQEQLEHWQKNRRTLAYSTVGTPDYIAPEVLLKKGYGMECDWWSLGSIMYEMLVGYPPFYSDEPMTTCRKEHPWFSGLEWGKLYEIEAAYLPQVTDELDTQNFEKFEESSDGSSVQGSAKAGPWRKMLSSKDLNFVGYTYKNFELVNDPDVPGMAELKKKEKAKRPSVKSLFAVHARAQAQIHLKETEGEGSRSLKSTTKQPPRKEAPGNQQSLN

SEQ ID NO: 10911 - protein, 399 aa, Oryza sativa
MALSISTPPTSSSLLPASLQVGRWSSSAAMSAGPVAFSLRRPVLAARVAAGGNAPSSSVDEVVTELDAVASFSEIVPDTVVFDDFEKFAPTAATVSSSLLLGIAGLPDTKFKSAIDTALADGECNTMEKPEDRSTRPRAEFGTRVGAEMAHLVPGRVSTEIDARLAYDTQGIIQRVHELLKLYSDHDVLSERLLFKIPATWQGIEASRLLESEGIQTHLTFVYSFAQAAAAAQAGASVVQIFVGRVRDWARTHSGDPEIDEALKKGEDAGLALVKKVYAYIHKNGYKTKLMAAAIRNKQDVFSLLGIDYIIAPLKILQSLEESVTDTDVKYGYVPRLTPALGKTYNFTEEELVKWDQLSLAAAMGPAAEELLASGLEGYVNQARRVEELFGKIWPPPNV

SEQ ID NO: 10912 - protein, 627 aa, Lotus corniculatus var. japonicus
MPAWWNRKPWKNKQEHDDDEDGEYEAEEVEEAPRSGLQFNFMKSPISSARSSDKKKKKKIKDKKKPKSFDEVLYRNSPRTSKDCDGGAAAMEKKGLPLPRPTTPCDQASISGSSLSSSASASFDDHSISPHFNANRGQEEVKFNVRPKSPCSRGPTSPTSPLHQRLHALSLDSPTGGKQDEGTSQCHPLPLPPGSPTSPSAPCNTRANGVLENNTCNLSKWKKGKLLGRGTFGHVYLGFNSENGQMCAIKEVKVFSDDKTSKECLKQLNQEINLLNQFSHPNIVQYYGSELGEESLSVYLEYVSGGSIHKLLQEYGAFKEPVIQNYTRQIVSGLAYLHSRNTVHRDIKGANILVDPNGEIKLADFGMSKHINSAASMLSFKGSPYWMAPEVVMNTNGYGLPVDISSLGCTILEMATSKPPWSQFEGVAAIFKIGNSKDMPEIPEHLSDDAKNFIKQCLQRDPLARPTAQSLLNHPFIRDQSATKVANASITRDAFPYMSDGSRTPPVLEPHSNRSSITTLDVDYATKPALAAVRTLRNPRDSTRTITSLPVSPSSSPLRQHRPTHNSPFFSPPHPSYAMMGQSSYTSNNMHKNPARSNATLTLDPWLETSRYKAHTPPGGSPRMRFI

SEQ ID NO: 10913 - protein, 547 aa, Psychrobacter arcticus 273-4
MGSKTIGDATNDTGKDTETEVSNKESGRVLNPEHTEGKNKKERVEQTHEQVNDDIMHHPDLVNPLDDTRIDVKSGFTKDSQRLKSDKHEFEYDAVVLGAGPAGEAAAMKLAKSGKKVVVIDPREQVGGNCTHVGTIPSKALRQSVFNLINFRRDQMFTKAMDYHQVPLNIVLAKARKVILQQVQTHTRFYERNQIEVIHGWANFIDKNTIRIEIDENTFETITFNKAIITVGSRPYRPDILDFDHPRVFDSDKILQMDYVVKKIIIYGAGVIGCEYASIFTGLGYKVDLINNQNQLLSYLDSEISDAIAHDFRQFGVVIRSNEEIDHLETHDDCVILHLKSGKKIKSDAILWSNGRSGNTEGLNLECLGLKANSRGQLKVDDTYCTEVENIYAAGDVIGWPSLASAAYDQGRCAAAFMVGDRDAEPVSSVPTGIYTIPEISCIGKTEQELTDAKVPYEVGQAFFKHLARAQIIGERSGVLKILFHRETLEILGIHCYGNHASEIIHIGQAVMKCNATLEYFVNTTFNYPTMAEAYRVAALNGLNRVF

SEQ ID NO: 10914 - protein, 539 aa, Zea mays
SAPYVAAPAKATLLPVPAMDAVATSDAVLLLAAVAISLLITATFWSRHRRQGEAPSPPSLPLLGHLHLLGNGKPLHHSLAALAIARGTGGAPAPLLSLRLGARRALLVSEHAAAEECFTAHDAALGGRPRLLVGDRLNYGYTTGGWSSHGDHWRALRRFMAVELFAASRLAARAADRRAEVAALVGALVRDAPRAGAAVALRPRLFELVLNVMLRALTGAPGHGGGDVRGLQEIIEETFAVTGVMSVGDFYPALRWVDRLRGVDAALLRLQARRDAFVAGLVHDGRRSRNRKAVGGGGGGPTDTEKRSTIDELLSLQETDPVYYTDTVIKGIVSILLSAGTDTTALTMEWAMAQLLTHRDAMQKTRAEIDANVGTSRLVDESDTAHLPYLQCVVKETLRLCPVGPVIPAHEAMEDCAVGGFRVQRGTMVLVNAWLIHRDPRLWEAPGEFRPERFLDATATVAAPLLPFGLGRRRCPGEGMALRLLSLTLAALLQCFDWEVGGAAVDMAEGVGLSMPMAKPLEVVCRPREFVQTVLSAST

SEQ ID NO: 10915 - protein, 149 aa, Oryza sativa
MASTSGQAEAVEEWGKSERKSKRGATGESEGSEAQPSKWRTRRAHEIYSSKTPRRHPPRAFRVALLLGGGPAAQPGRPKAPALARKAKVLGRLVPGCRKLPFPALLAEASDYIAALEMQVRAMTALAEVLSTVSGSGSASSSGGSSSPA

SEQ ID NO: 10916 - protein, 481 aa, Chromobacterium violaceum ATCC 12472
MRKHTLTTAAGAPVVDNQNVQTAGPRGPMLLQDVWYLEKLAHFDREVIPERRMHAKGSGAFGTFTVTHDITRYTRAALFSDIGKKTDLFLRFSTVAGERGAADAERDIRGFAVKFYTEEGNWDLVGNNTPVFFLRDPLKFPDLNRAVKRNPYTNMRDANANWDFWTLLPEALHQVTIVMSDRGIPASYRHMHGFGSHTFSLINAKGERHWVKFHFHTQQGIRNLSDAEAEKLVGQDRESAQRDLLECIDRGDFPRWTLYIQVMTEAQADACPFNPFDLTKVWSHKDYPLIEVGVLELNRNPQNYFADVEQAAFNPANVVPGISFSPDRMLQGRLFAYGDAERYRLGVNHHLIPVNAPRCPFHNSYHRDGAMRVDSNAGATIGYEPNSQGKWQQQPAYDEPPLALQGNAYHYDFRADDDDYYSQPGALFRLMTPAQQQALFDNTARAMGGVDEAIKRRHIANCAKADPAYGAGVAKALGLSV

SEQ ID NO: 10917 - protein, 482 aa, Pseudomonas fluorescens Pf-5
MSQTKTLTTASGAPVADNQNSRSAGPRGPLLLDDFHLIEKLAHFNRENIPERRVHAKGSGAYGTFTVSRDITEYTSAKLFEAVGKKTPTFLRFSTVGGERGSADTERDPRGFALKFYTEEGNWDIVGNNTPVFFIRDPLKFPDFIHTQKRLPQSNLKSAQMMWDFWSHSPEALHQVTILFSDRGIPDGYRHMHGFGSHTYSLINAKGERHWVKWHYKTKQGIKNLAPADAARLAGTDPDYAQRDLFNAIERGEFPKWSVCIQVMTEAQAAAHYENPFDVTKTWSQKEFPLIEVGELELNRNPLNYFAEVEQAAFGPSNMVPGVGLSPDRMLQGRVFAYADAHRYRVGTNHQQLPVNAPLSPVNSYQRDGSMAFGSNGGAAPNYEPNSYGDAPKQAPRYAEPALALSGAADRYDHREDADYYSHAGALFRLMNDEQKALLINNIVGAMAGVAADVVDRQLQHFYKADPAYGEGIAKALGVSLK

SEQ ID NO: 10918 - protein, 251 aa, Triticum aestivum
TPQSYSYLPTHPPRPSLQPPEEQGEMSSGMGKVVCVTGASGYIASWLVKLLLHRGYTVRATVRDTADPKKTLHLQALDGAKDRLHLFKASLLEEGSFDAAVAGCDCVFHTASPFYHNVKDPKAELLDPAVNGTLNVLRSCKKASIKRVIITSSMAAVAYNGKPRTPDVVVDETWFSSAEVCEKNEQWYVLSKTLAEEAAWKFANDNGFEIVTINPAMVIGPLLQPTLNTSAEAILKFINGMSVCGFIINFL

SEQ ID NO: 10919 - protein, 414 aa, Thiomicrospira crunogena XCL-2
MEQILELSYALDTFYFLMSGALVMWMAAGFAMLEAGLVRTKNTTEILAKNVGLFAIACIMYMLVGYNIMYGDAINSVIPGLSFLLGGDNATAAVVAGGDGAPYYSNMSDFFFQVVFVATAMSVVSGAVAERMKLMSFFVFAIVLTSVIYPVQGYWKWGGGFLDQLGFLDFAGSGIVHMTGAAAALAGVLLLGARKGKYGPNGESKAIPGANLPLATLGTFILWLGWFGFNGGSELKISNVEEANAVSMIFVNTLLAAAAGVVGALLASKIKFGKADLTMMLNGALAGLVAITAEPLTPSALEATLIGLVGGIIVVAAILILDNKFKIDDPVGAISVHGVVGIYGLLAVTFTNPDSSLVAQLIGIAAIFSWVFITSLIVWAIIKAVMGIRISEEDEFEGADQSECGMEAYPEFTK

SEQ ID NO: 10920 - protein, 476 aa, Yarrowia lipolytica CLIB122
MSSISSSQQPNFKSILQYNARQEMIYWMAFVACLGTLQFGYHVAELNAPLDVIICHDAVTDCIDLHPRDVGYVTAAFSVGGLISALLAGMAASKYGPKKVSLFNTLSFIAGPLFMANATNTNTLAFGRFVSGLGAGAAIVVTPLFLNEIAPHNLRGMFGALSQISVNVGIVAAQVAGLIISQSWRYILIIGFFLGLINLASLAFIPESPKWLVSKNRATEATAILARLRDNRATAAREVEEWQKELQSVMFESDQLMAPASAASANHIEPVSLSAFLTRKPYRKPLLAILIIMTAQQLCGINSIIFYGVSILGQIIPKYSTLVNVFISVLGTVVTVGASRFIDVLGRKRLLLYSIFGMSVSAALVATGIINSWPIVSSLSAALFVVSFAIGLGPIPFLMVSEMVEPNCVGVGQSVGMTSNWIVTFAVGYFFPMVNARLGGATFYLFSVFGIAYLTLVVKFVPETKGKRNFTEVWTM

SEQ ID NO: 10921 - protein, 268 aa, Acinetobacter sp. ADP1
MMIVPKFGLGTFRLNDQIVIDSVKTALDVGYRAIDTAQIYDNEAQVGQAIQESGIARDQLFLTTKIWVDHLNSEQLIPSLKQSLQKLRTDAVNLTLIHWPAPQKGIDIAAVMQLLLQAKQQGLTEHIGISNFNIAQTKTAIESIGQSHIATNQIELSPYLQNRTLVDFLKAQQIDVTSYMTLAYGKVLHDPVLQDIASEHQASTAQIALAWALQSGYAVIPSSTKREHLISNLKAQEIQLSQQDMQLIAALERNGREVDPAELAPEWD

SEQ ID NO: 10922 - protein, 632 aa, Erwinia rhapontici
  misc_feature (236)..(236): Xaa can be any naturally occurring amino acid
  misc_feature (449)..(449): Xaa can be any naturally occurring amino acid
  unsure (1)..(632): unsure at all Xaa locations
MSSQELKAAVAIFLATTFSATSYQACSAGPDTAPSLTVQQSNALPTWWKQAVFYQVYPRSFKDTNGDGIGDLNGIIENLDYLKKLGIDAIWINPHYDSPNTDNGYDIRDYRKIMKEYGTMEDFDRLISEMKKRNMRLMIDIVINHTSDQHAWFVQSKSGKNNPYRDYYFWRDGKDGHAPNNYPSFFGGSAWEKDDKSGQYYLHYFAKQQPDLNWDNPKVRQDLYDMLRFWLDKGVXGLRFDTVATYSKIPNFPDLSQQQLKNFAEEYTKGPKIHDYVNEMNREVLSHYDIATAGEIFGVPLDKSIKFFDRRRNELNIAFTFDLIRLDRDADERWRRKDWTLSQFRKIVDKVDQTAGEYGWNAFFLDNHDNPRAVSHFGDDRPQWREHAAKALATLTLTQRATPFIYQGSELGMTNYPFKKIDDFDDVEVKGFWQDYVETGKVKAEEFLXNVRQTSRDNSRTPFQWDASKNAGFTSGTPWLKINPNYKEINSADQINNPNSVFNYYRKLINIRHDIPALTYGSYIDLAPDNNSVYAYTRTFGAEKYLVVINFKEEVMHYTLPGDLSINKVITENNSHTIVNKNDVEDPRGATSVCSPFQAQKRPGDPGYSAAHSIRFLPRFFASYRGDIHAFK

SEQ ID NO: 10923 - protein, 226 aa, Phytolacca americana
GLVKKAHEISILCDADVALIVFSTKGKLFQYATGSCMEKILERYERYSYAERQLITPDPESHLSWTLEHAKLKARVEILQKNQRNYMGEELDTLSLKELQTLEHQLDSALKQIRSKKNQLMYESISQLQKKDKALQEQNKSLSKEVKEKEKEKEKTMTQQAQWDNQNQDINSSSCLMSDQALPSLNIGMNYQTESGSSSVENEAIQQQNRNNTTIALMPHWMLSHL

SEQ ID NO: 10924 - protein, 215 aa, Pachysandra terminalis
GLVKKAHEISVLCDAEVALIVFSTKGKLFEYSTDSCMDQILERYERYCCAERELGAADTESQGSWTQEYTKLKSKIEVLQKNLRHLKGEDLESLRLKELQNLEQQLDNSLKHVRSRKNQLMHDSISELQKKEKELQEQNNMLNKKLKEKERAKTQQAQWEQQNQGPNSPSLQLSQPLPFLNIGGTYQTRSTRNQEEGGRPHHSNRTDALMPHWMV

SEQ ID NO: 10925 - protein, 109 aa, Glycine max
MAGLQRSEVSFRRQGSSGLVWDDKLLSGELNKNEDPKGAHGGDLNLNLNVRTTPPIQRSRSNGGYRTGKVSPAIEPPSPKLSACGFCSAFGKTGEKGRRAKPRAKHRSR

SEQ ID NO: 10926 - protein, 234 aa, Pachysandra terminalis
  misc_feature (204)..(204): Xaa can be any naturally occurring amino acid
  misc_feature (207)..(207): Xaa can be any naturally occurring amino acid
  misc_feature (211)..(211): Xaa can be any naturally occurring amino acid
  unsure (1)..(234): unsure at all Xaa locations
VQLRRMENKINRQVTFSKRRTGLLKKAHEISVLCDAEVALIVFSTKGKLSQYSSNSSMETILDRYERYSYAERKLMAGDHLDSQGSWPLEYTKLKSKIEVLQRNQRHFMGEELDSLSLKELQYMEHQLDTSLKHIRSRKNQLMNDSIYDLQKKEKALQEQNSTLIKKLKEKEKAPAHQACWEQQGQNLPSFLLSQPLPSLNIGXNYXLARXSRDEEEGAQSHARTNPIMPPWML

SEQ ID NO: 10927 - protein, 238 aa, Pachysandra terminalis
VQLRRMENKINRQVTFAKRRNGLLKKAYELSVLCDAEVALIIFSARGKLYEFCSSSSMQNTLERYQKCSYGPLEPSQPAKETQSSYLEYMRLKARVEGLQRSQRNLFGENLGPLSTKELEQLEHQLEMSLNQIRSTKTQFMLDQLSDLQRKEQMLQEANRSLKRKLEESNAENSLGPSWESGGHGVPFGHQPAQSEGFFQPLECNSTLQIGYNHVGADQMSITVPPQNVNGFVPGWMV

SEQ ID NO: 10928 - protein, 282 aa, Bradyrhizobium sp. BTAi1
MDTATHRLVNAPTLAQRAHNIRRHALRMGEVQGQGYIAQALDISDVLATAYFHAMRYRPEDPNWEERDRFLLSNGHYAIALYAALIEAGIVPEAELETYGSDDSRLPMSGMASYTPGMEMSGGSLGLGLSIAVGMGLGLKRKNSTSRVYTLFSDGELDEGSVWEAISSASHYKLDNLIAIVDVNNQQADGPSTQVMGFEPLVDRLQAFGWFVQRVNGNDLDAVVAAFDAAKTHEAPRPRMIVADTLMGKGVPFLEQREKNHFIRVEPHEWQLAIAALDAGRP

SEQ ID NO: 10929 - protein, 238 aa, Peperomia caperata
  misc_feature (207)..(207): Xaa can be any naturally occurring amino acid
  misc_feature (238)..(238): Xaa can be any naturally occurring amino acid
  unsure (1)..(238): unsure at all Xaa locations
VQLKRMENKINRQVTFSKRRTGLLKKAHEISVLCDAEVALIVFSTKGKLYEYATNSSSMPGILDRYERHSFTDKEFFIKEGEPPEGAWTLEYAKLKARYELLQKNYRHYLGEDLGSLSGKELQQLEGQLDASLKNVRSRRTQALFHTISDLQKKEKSLLEQNSVMIKKLQDLEKAEKAQQSQLEMQNHERTQNQPPLILLPPPALSXGSFRQENGPSVEGEAAPRVAQKNSLLPPWMX

SEQ ID NO: 10930 - protein, 360 aa, Papaver somniferum
MGSIRNVDEDIQACRYAMELASASVPVMVLKTAIELDILEIIKKPGPGTQISVSEIVSQIQNLKNPDAPVMLDRMLRLLASYNILTCSLKDGGNDDKVERLYGLAPVCKFLTKNEAGCSMSALLLMNQDKVLMESWYHLKDAILDGGIPFNKAYGVHAFEYHGKDLRFNKVFNKGMSDHTTITMNKILETYKGFEGLNSIVDVGGGVGATVSMIISKYPTIQGINFDLPHVIQDAPSFPGIKHVGGDMFASVPNADAIFMKWILHDWSDEHSVKILKNCYDALPKNGKVIIVECIIPEVSDSSVAGHGVFHLDNIMLAHNPGGKERSLKQFENLAKDTGFTDFQVVCSAYDTYVMEFYKN

SEQ ID NO: 10931 - protein, 423 aa, Streptomyces galilaeus
MTARRVVITGLGVIAPGGIGTKAFWERVVSGVSATRTITAFDASGFRSRMAAECDFDGVRSGLTVRDTARLDRATQFAVVAAREALADSGIEIDERNAHRTGVSLGSAVGCTQKLEEEYVARSDGGQRWLVDHAAGTPYLYDYFVPSSMAAEVAWEAGAEGPAALVSAGCTSGLDSLGHALDLIREGTVDIMIAGGSDAPIAPITVACFDAIKATSPRNDTPEHASRPFDRTRSGFVLGEGAAVLVLEERESALRRGAQIYAEIAGYAGRGNAHHMTGLRPDGLEMSAAITGALDDARIDREAVGYVNAHGTATRQNDIHETAAIKHSLGEHAHRVPVSSIKAVIGHSLGAVGSIEAVASALVIRHGVVPPTAGLHEPDPQLDLDYVPLTARDQATDTVLTVGSGFGGFQSAMVLTSAEGSRS

SEQ ID NO: 10932 - protein, 311 aa, Haemophilus influenzae Rd KW20
MKVAVLGAAGGIGQALALLLKLQLPAGTDLSLYDIAPVTPGVAVDVSHIPTAVNVKGFSGEDPTPALEGADVVLISAGVARKPGMDRSDLFNINAGIVRGLIEKVAVTCPKACVGIITNPVNTTVAIAAEVLKKAGVYDKRKLFGVTTLDVLRSETFVAELKGLNVSRTSVPVIGGHSGVTILPLLSQVQYAKWNEDEIEPLTKRIQNAGTEVLNAKAGGGSATLSMAQAAARFARSLVKGLSGETVVECTYVEGDGKYARFFSQPVRLGKEGVEEILPIGPLSNFEQQALENMLPTLRADIELGEKFING

SEQ ID NO: 10933 - protein, 407 aa, Streptomyces galilaeus
MSAATVVTGIGVLAPNGIGAEEFWAATLRAESGIGRITRFEPASYPSRLAGEVTGFSARDHIPSRLVPQTDRTTQFALTGSEWALRDSGLSADSLPADERGVVTASASGGFEFGQRELGHLWGKDPRHVSAYMSFAWFYAVNSGQISIRHDLRGPTGVLVTDQAGGLDAVAQARRRIRKGTPVMLSGGMDASLCPYGLAAQISAGMLSESDDPARAYRPFDPAADGHVPGEGGAILTLEDGERARARGARSHGEISGYAATFDPRPGSGRPANLDRAIRGALADAGLTPRDIAFVLADGAGEPEPDRAEARALTDVFGPRGVPVTVPKSMTGRLYAGAVPLDLVTALFALRDGVVPPTVHVDGPDPAYDIDLVTGSAGPSAETRALVLARGRGGFNSAMVVRRPSAA

SEQ ID NO: 10934 - protein, 594 aa, Agrobacterium tumefaciens str. C58
MSPSSCRLASSSPFNVISCVACSRAPSREADHSMNAHTRQDTSMTASVTSALTPNKDWWRGAVIYQIYPRSYQDSNGDGIGDLKGITDRLHHIAGLGADAIWISPFFTSPMKDFGYDVSNYVDVDPMFGTLADFDGLIAEAHRLGIRVMIDLVLSHTSDQHPWFVESRASRNNPKSDWYVWSEAKPDGTPPNNWLSIFGGSGWQWDPTRMQYYMHNFLTSQPDLNLHNPEVQEELLNITRFWLKRGVDGFRLDTINFYFHDLELRDNPALAPERRNASTAPAVNPYNFQEHLYDKNRPENIAFLKRFRAVLDEFPDIAAVGEVGDSQRGLEIVGEYTSGDDKMQMCYAFEFLAPDALTPQRVADVQADFARAAPEGWACWAFSNHDVVRHVSRWGEHVEDKDAFAKLLSALLMTQRGSVCIYEGEELGLTEADIAFEDLQDPYGIQFWPEFKGRDGCRTPMVWDAGHAQAGFSTSDKIWLPIPAEHKQRAVSAQQGNEASVLEHYRRFLAFRKQHPAFAKGGIEFQPLEGDVLSYTRKLGNETILCLFNLSATPANATLPKGNWEVLEGHGFASGLEGTSVELPAWGAFFARYA

SEQ ID NO: 10935 - protein, 269 aa, Oryza sativa
MEERYEALKELGAGNFGVARLVRDKRSKELVAVKYIERGKKIDENVQREIINHRSLRHPNIIRFKEARYFFQQLISGVSYCHSLEICHRDLKLENTLLDGSPTPRVKICDFGYSKVADVWSCGVTLYVMLVGSYPFEDPGDPRNFRKTISRILGVQYSIPDYVRVSSDCRRLLSQIFVADPSKRITIPEIKKHTWFLKNLPKEISEREKADYKDTDAAPPTQAVEEIMRIIQEAKVPGDMAAADPALLAELAELKSDDEEEAADEYDTY

SEQ ID NO: 10936 - protein, 400 aa, Xylella fastidiosa 9a5c
MPLFTDVELVPGDPILSLNDTYNADTRTNKVNLGIGIYCDESGCIPLLRAVQQVEEQLAKHPKPRGYLPIDGLPAYIKATQQLLFGVDSPLLTAGRVATSQTIGGSGALRVTAEVLKQVLPHATVAISRPSWENHRALFTAAGFKIEDYTYFDTLGHAVDFTGMVADLAKLQPKTVVLLHGCCHNPTGADLSRDQWKQLVALFQERQLLPCIDLAYQGFNQGIDADAYAIRLLAEEGISNYVVANSYSKSFSLYGERVGGLSIVASNTEQAQAIQSQVKRIIRTIYSSPSAHGAYLVAGVLNSHELRTLWEQELTQMRERIHGLRAGLVARLTALGAPEFDFIQRQAGMFSYSGLSKIQVDRLRDEFGIYAVSSGRICVAALSQHKLEYVAQAVVKVHQG

SEQ ID NO: 10937 - protein, 214 aa, Triticum aestivum
  misc_feature (19)..(19): Xaa can be any naturally occurring amino acid
  misc_feature (39)..(39): Xaa can be any naturally occurring amino acid
  unsure (1)..(214): unsure at all Xaa locations
SRLTPIDNVKAKIQDKEGXIPPDQQRLIFAGKQLKDGRXTLADYNIQKESTLHLVLRLRGGMQIFVKTLTGKTITLEVESSDTIDNVKAKIQDKEGIPPDQQRLIFAGKQLEDGRTLADYNIQKESTLHLVLRLRGGMQIFVKTLTGKTITLEVESSDTIDNVKAKIQDKEGIPPDQQRLIFAGKQLEDGRTLADYNIQKESTLHLVLRLRGGQ

SEQ ID NO: 10938 - protein, 158 aa, Chromobacterium violaceum ATCC 12472
MSIYDFSFRRLDGSEQAMADYRGSVLLLVNTASRCGFTSQYAGLEALHRRFGPQGLAIIGFPCNQFGAQEPGDAGEIGAFCQKNYGVDFAMADKVDVNGANAHPLWQYLKRQKRGLLGQAIRWNFSKFLVDRQGRVVARFAPFTRPEKLAARIEALLK

SEQ ID NO: 10939 - protein, 546 aa, Mycobacterium bovis AF2122/97
MDQHQRPDPMGPGSPRASARRPEPDPMGEPWWSRAVFYQVYPRSFADSNGDGVGDLDGLASRLDHLQQLGVDAIWINPVTVSPMADHGYDVADPRDIDPLFGGMPAFERLVAAAHRQGIKVTMDVVPNHTSSAHPWFQAALADLPGSPARDRYFFRDGRGPDGSLPPNNWESVFGGPAWTRVREPDGNPGQWYLHLFDTEQPDLNSDNPEILDDFEKTLRFWLDRGVDGFRIDVAHGMAKPPGLPDSPDLGIEVLHHRDDDPRFNHPNVHAIHRDIRTVIDEYPGAVTVGEVWVHDNARWAEYLRPDELHLGFNFRLARTEFDAAEIRDAVANSLAAAALQNATPTWTLANHDVGREVSRYGGGEIGLRRAKAMAVVMLALPGVVFLYNGQELGLPDVDLPDEVLQDPTWERSGRTERGRDGCRVPIPWSGNIPPFGFSTCPDTWLPMPPEWAALTAEKQRADAGSTLSFFRLALRLRRERNEFDGDVDWLAAPDDALIFRRHGGGLVCALNAAERPLALPAGEPILASAPLTDATLPPNAAAWLV

SEQ ID NO: 10940 - protein, 344 aa, Thanatephorus cucumeris
MTVKIGINGFGRIGRIVLRNAIEHGDVDVVAVNDPFIDLEYMVYMFKYDSTHGRFKGEVKADKDNKQLVINGKNIAVHSERNPGDINWDASGAEYVVESTGVFTTIEKASEHFKKSPSLKKVIISAPSADAPMHVVGVNLDAYDPKGPKVISNASCTTNCLAPLAKVIHDKFGIVEGLMTTVHATTATQKTVDGPSAKDWRGGRGASANIIPSSTGAAKAVGKVIPSLNGKLTGLAFRVPTSNVSFVDLVARLEKPATYDEIKAAIKEASEGPYKGIFGYTEDDVVSTDFVGDQHSSIFDSKAGISLNKKFVKLVSWYDNEWGYSRRVVDLIAYVAKKDKEAGC

SEQ ID NO: 10941 - protein, 343 aa, Thanatephorus cucumeris
MTVKIGINGFGRIGRIVLRNAIEHGEVDVVAVNDPFIDLDYMVYMFKYDSTHGRFKGEVKVDKEKKQLVINGKNIDVHSERNPGDINWDASGAEYVVESTGVFTTIEKASEHFKKSPSLKKVVISAPSADAPMHVVGVNLDAYDPKGPKISNASCTTNCLAPLAKIIHDEFGIVEGLMTTVHATTATQKTVDGPSAKDWRGGRGAAANIIPSSTGAAKAVGKVIPSLNGKLTGLAFRVPTADVSVVDLVVRLEKSATYDEIKATIKKASEGEYKGIMGYTEDDVVSTDFVGDEHSSIFDAKAGISLNKNFVKLVSWYDNEWGYSRRVVDLIAYVAKKDKEAGC

SEQ ID NO: 10942 - protein, 98 aa, Brassica napus
  misc_feature (74)..(74): Xaa can be any naturally occurring amino acid
  unsure (1)..(98): unsure at all Xaa locations
MEGRRITASPRPCSSGRRVVAKKRPRPDGFVNSVKKLQRREISSRKDRAFSINTAQERFRNMRLVEQYDTHDPXGHWLVALPFLMKRTKVIEIVAARD

SEQ ID NO: 10943 - protein, 337 aa, Thanatephorus cucumeris
MAVKIGINGFGRIGRIVLRNAILHGDIDVVAVNDPFIALDYMVYMFKYDSTHGRFKGQVEAKDGKLIIEGKPVAVHSERDPSTINWGDAEYVVESTGVFTTVEKASAHFKASPNLKKVVISAPSADAPMYVVGVNLDAYDPKGPKISNASCTTTCLGPLDKVINDEFGIVEGLMTTVHATTATQKTVDGPSAKDWRGGRGAAANIIPSSTGAAKAVGKVIPSLNGKLTGLAFRVPTSDVSVVDLVVRLEKSASYDEIKAALKKASEGEYKGIIGYTEDDVVSTDFVGDEHSSIFDAKAGISLNKNFVKLVSWYDNEWGYSRRVVDLIAHIAKKDAEA

SEQ ID NO: 10944 - protein, 67 aa, Arabidopsis thaliana
DEDTGPHFSPIVKLKEVPDTTGQEDEHPLLYLKSKLYRFNKDANQLKKRTASSKNFSKHNNTFTIGI

SEQ ID NO: 10945 - protein, 190 aa, Candida albicans SC5314
MSAKIELVTENVTNGHSGASETIQYTKSQMVGHGSFGVVFQIQLQPSNEIGAVKRVLQDKRFKNRELQIMKLVHHRNIADLKYYFYTNNEKNELYLNLILEFVPETLYKASHYYVSKRLNMPPLEVKLYTYQMFRALNYIHSQGICHRDIKPQNLLINPDTGELKLCDFGSAKILNPSEPNVLNLIWWWN

SEQ ID NO: 10946 - protein, 220 aa, Pseudomonas aeruginosa PAO1
MRDIIDGFLRFQRDAYPARSQLFKSLATRQAPKALFIACSDSRVVPELLTQREPGELFVIRNAGNIVPGYGPQPGGVSASVEYAVAVLGVGDIVVCGHSDCGAMGAIASCACLDQLPAVAGWLHHAEAARAMNSAHEHASEAARLDALVRHNVIAQLANLRTHPCVARALEQGRLNLHGWVYDIESGRIDALDGASRRFVSLAEHPEVRAVGGEPGQAVA

SEQ ID NO: 10947 - protein, 894 aa, Acinetobacter sp. ADP1
MIQQIDAPLREDVRLLGNLLGETLKQHAGQDLFNQIEQIRALAKGARDGQAETEKKLEQLFLDLKDEEILPLTRAFSYFLNFANIAEQYHVVRSRRRSEFDEQGPPPNPLIHLFEKFKQNQISSKQLFQQVSNLSIELVLTAHPTEVSRRTLIQKYDDINEGLSKLDQQKLTPRERQQVLDDLKQLICSAWQTDEIRQNKPTPLDEAKWGFTTIEQTLWNAVPKFVRELDTLVHQHCDAHLPLDISPIRFASWMGGDRDGNPNVTHNVTQEVLWLSRWQAADLYLRDIEDLRWELSIQACSEELSQTLGRRHPEPYREYLRSTRERLKATRQWLSLRLQGLDGDDSQIIRHKQELLDPLLLCHRSLMECNLPEIANGKLLDFIYRVNCFGIELLKLDIRQESGRHRQAISAITEYLGLGNFESWTEQARQNFLIQELQSKRPLLPKYLNEPEGSLIEHPDVKEVFATMRTLAEQPPESLGAYIISMAEYASDVLAVLLLQKEAGILQPLRVVPLFETLKDLDGAAKTMETLFNMHWYKQHIQGKHEVMIGYSDSAKDAGFMSANWAQYRAQEELTAVAKSHGVQLTLFHGRGGSISRGGAPTQQALFSQPPGSISGAIRVTEQGEMIRFKFGLEGVALQNLEIYTAATLEATLLPPPVPKQEWRDLMHQMTDISVRVYRETVRENPHFVQYLRTVTPELELQMLPLGSRPAKRKVSGGIESLRAIPWVFAWTQIRLMLPAWLGTGAAINQVIDENKKAVLDEMLAEWPYFQTLIDMLEMVLSKSDANIALYYESHLTDNEDLKILGEMLRQRLNDAVQTLLSMKGESKLLSKNDVLDQAMQVRKPYLLPLHLLQAELMKRRRLYTAQSNAERTPVDHALMVSIAGIAAGLRNTG

SEQ ID NO: 10948 - protein, 431 aa, Acinetobacter sp. ADP1
MSSWFPKWRPYSGQIDHRPVATNEYLPAAQSAVLGIQHAFAMFGATVLAPLLMGFNPNLAILMSGICTILFFLFTGGRVPSYLGSSFAFIGVVAAATGHVTGSGANPNLSIALGGIVACGVVYAAIGFLVMLTGTRWIEKIMPPVVTGAVVMIIGLNLAPVTVKGVAGNPFDMWMALLTVLCMGTIAVFTKGLLQRLLLLVGLLISYLIYAIVSNGLGFGKAIDFGQIATAPWFGLPAFSAPTFETNAMLIIAPVALILVAENLGHIKAVGAMTGENLTPQLGKAFVADGIATTLSGSVGAPGMTTYGENIGVMAVTRVYSTIVFVIAGLFAIFLGLSPKFGAVISTIPSAVLTGASIVVFGLITIAGAKIWIENKVDFSNNKNLIVAAVTIILGAGNFELTFGEFNLGGIGTATFAAILLHLFFSLKDKS

SEQ ID NO: 10949 - protein, 397 aa, Yarrowia lipolytica CLIB122
MQFSLAAVASFACLALAAPANPGFLAVPMSRAPAPDGQKGISFAAGGGINVEMINEVMAYNVDIKVGGQKVTVQIDTGSSDLWVFSSDSIYCENDPSLCTKYGSYNPKKSQNSKDTGEHFDIQYGIGDASGNYYKDDASLGEAKVTDFQFGVSTGDKSSGDVSVFGIGPLADEATRSHYPNFPALLKEQGVIKKNVYGMAFGLPGDKQNSEITFGAYNSGRYSGSLKTVPITTQGHFGIKCDKAKIGDKTILEGEDVVLDSGTSLTYLTKSNYDAVINQVQAAGIKLTDAGQGISALPCSDIGKLSMEYTFSGKTIKVSGKDMTIPATYLDSSDTSGLCIFGITESTGQLSNLNLFGDTFLRAIYSVYDLDNNQVSIAQAASGQEDKYVEITGPLPN

SEQ ID NO: 10950 - protein, 202 aa, Brassica napus
  misc_feature (51)..(51): Xaa can be any naturally occurring amino acid
  misc_feature (63)..(63): Xaa can be any naturally occurring amino acid
  misc_feature (119)..(119): Xaa can be any naturally occurring amino acid
  misc_feature (125)..(125): Xaa can be any naturally occurring amino acid
  misc_feature (159)..(159): Xaa can be any naturally occurring amino acid
  misc_feature (180)..(180): Xaa can be any naturally occurring amino acid
  unsure (1)..(202): unsure at all Xaa locations
SFDASLLSIDIATCSLNCAKDHTYTIWYDDTGERYGTLSEHNGDGKCWDVXRELWRGLINSEXCIMSVKIWEGITNQHNETRKLDSRTRCIHWGMVHKHDDYTTDGLMERTDALDYKRXVEIHNXYYSEVVLVHGRPYGMNRINKSAGEPLNRPLLVNXEYAMLKIYDAVTGKLLKESDXRAVYKNTVNLLTKSTEDFHYIT

SEQ ID NO: 10951 - protein, 323 aa, GIBBERELLA ZEAE PH-1
MDGKRHPSSFQQLEKLGEGTYATVFKGRNRQTGELVALKEIHLDSEEGTPSTAIREISLMKELKHENIVGLHDVIHTENKLMLVFEYMDGDLKRYMDTNGERGALKPTTIKSFMYQLLKGIDFCHQNRVLHRDLKPQNLLINNKGILKLGDFGLARAFGIPVNTFSNEVVTLWYRAPDVLLGSRTYNTSIDIWSAGCIMAEMFTGRPLFPGTTNEDQIVRIFRIMGTPTERTWPGITQFPEYKPTFHMYATQDLRNILQTIDPTGIDLLQRMLQLRPELRISAHDALQHAWFNDLLVHPQQQNLQSQARAYPQAVPSQAFDTY

SEQ ID NO: 10952 - protein, 122 aa, Arabidopsis thaliana
MQMLRSLSTRTRSRRGGYERVSDDSTFSLLGAKLRRSTSVPYYAPSIKLGAGGVPTILEELPRQKSKKVKPTGKFSHPIFSLFYGKKKKSTTTKPEFSRYLEYLKEGGMWDARANAPVIYYK

SEQ ID NO: 10953 - protein, 302 aa, Zymomonas mobilis
MATSSTLPAVVPALGGDQSLNHYLADIRKFPILKPEEEYMLAKRFQEHQDPKAASRLVTSHLRLVAKIAMGYRGYGLPVSELISEGNIGLMQGVKKFDPERGFRLATYAIWWIKASIQEYILRSWSLVKMGTTAAQKKLFFNLRRLKSNMNAFEDGDLKPDEVDSIATNLGVSNEEVVNMNRRMAMGGDSSLNITMREDGEGQMQDWLVDQEPLQDQQIEEEEESLVRHKLLIEAMDKLNDREKHILTERRLSDNPKTLEELSQVYGVSRERVRQIEVRAFDKLQKAIMELAGDRKLLPAMA

SEQ ID NO: 10954 - protein, 967 aa, Arabidopsis thaliana
MANRKLEKMASIDVHLRQLVPGKVSEDDKLVEYDALLLDRFLDILQDLHGEDLRETVQELYEHSAEYEGKHEPKKLEELGSVLTSLDPGDSIVIAKAFSHMLNLANLAEEVQIAYRRRIKKLKKGDFVDESSATTESDLEETFKKLVGDLNKSPEEIFDALKNQTVDLVLTAHPTQSVRRSLLQKHGRIRDCLAQLYAKDITPDDKQELDEALQREIQAAFRTDEIKRTPPTPQDEMRAGMSYFHETIWKGVPKFLRRVDTALKNIGIEERVPYNAPLIQFSSWMGGDRDGNPRVTPEVTRDVCLLARMMAATMYFNQIEDLMFEMSMWRCNDELRARADEVHANSRKDAAKHYIEFWKSIPTTEPYRVILGDVRDKLYHTRERAHQLLSNGHSDVPVEATFINLEQFLEPLELCYRSLCSCGDRPIADGSLLDFLRQVSTFGLSLVRLDIRQESDRHTDVLDAITTHLDIGSYREWSEERRQEWLLSELSGKRPLFGSDLPKTEEIADVLDTFHVIAELPADSFGAYIISMATAPSDVLAVELLQRECRVKQPLRVVPLFEKLADLEAAPAAVARLFSVDWYKNRINGKQEVMIGYSDSGKDAGRLSAAWQLYKAQEELVKVAKEYGVKLTMFHGRGGTVGRGGGPTHLAILSQPPDTINGSLRVTVQGEVIEQSFGEEHLCFRTLQRFTAATLEHGMRPPISPKPEWRALLDEMAVVATEEYRSVVFQEPRFVEYFRLATPELEYGRMNIGSRPSKRKPSGGIESLRAIPWIFAWTQTRFHLPVWLGFGSAIRHVIEKDVRNLHMLQDMYQHWPFFRVTIDLIEMVFAKGDPGIAALYDKLLVSEELWPFGEKLRANFEETKKLILQTAGHKDLLEGDPYLKQRLRLRDSYITTLNVCQAYTLKRIRDPSYHVTLRPHISKEIAESSKPAKELIELNPTSEYAPGLEDTLILTMKGIAAGLQNTG

SEQ ID NO: 10955 - protein, 709 aa, Synechococcus elongatus PCC 7942
MAAQNLYILHIQTHGLLRGQNLELGRDADTGGQTKYVLELAQAQAKSPQVQQVDIITRQITDPRVSVGYSQAIEPFAPKGRIVRLPFGPKRYLRKELLWPHLYTFADAILQYLAQQKRTPTWIQAHYADAGQVGSLLSRWLNVPLIFTGHSLGRIKLKKLLEQDWPLEEIEAQFNIQQRIDAEEMTLTHADWIVASTQQEVEEQYRVYDRYNPERKLVIPPGVDTDRFRFQPLGDRGVVLQQELSRFLRDPEKPQILCLCRPAPRKNVPALVRAFGEHPWLRKKANLVLVLGSRQDINQMDRGSRQVFQEIFHLVDRYDLYGSVAYPKQHQADDVPEFYRLAAHSGGVFVNPALTEPFGLTILEAGSCGVPVVATHDGGPQEILKHCDFGTLVDVSRPANIATALATLLSDRDLWQCYHRNGIEKVPAHYSWDQHVNTLFERMETVALPRRRAVSFVRSRKRLIDAKRLVVSDIDNTLLGDRQGLENLMTYLDQYRDHFAFGIATGRRLDSAQEVLKEWGVPSPNFWVTSVGSEIHYGTDAEPDISWEKHINRNWNPQRIRAVMAQLPFLELQPEEDQTPFKVSFFVRDRHETVLREVRQHLRRHRLRLKSIYSHQEFLDILPLAASKGDAIRHLSLRWRIPLENILVAGDSGNDEEMLKGHNLGVVVGNYSPELEPLRSYERVYFAEGHYANGILEALKHYRFFEAIA

SEQ ID NO: 10956 - protein, 396 aa, Arabidopsis thaliana
MAMAMDRIVFSPSSYVYRPCQARGSRSSRVSMASTIRSATTEVTNGRKLYIPPREVHVQVKHSMPPQKLEIFKSLEGWADETLLTYLKPVEKSWQPTDFLPEPESEGFYDQVKELRERCKELPDDYFVVLVGDMITEEALPTYQTMLNTLDGVRDETGASPTPWAIWTRAWTAEENRHGDLLNKYLYLSGRVDMRQIEKTIQYLIGSGMDPKTENNPYLGFIYTSFQERATFISHGNTARLAKDRGDLKLAQICGTIAADERRHETAYTKIVEKLFEIDPDGTILGLADMMKKKISMPAHLMYDGQDDNLFEHFSTVAQRLGVYTAKDYADILEFLVERWNVETLTDLSSEGHRAQDFVCGLPARIRKIEERAQGRAKEAAKNIPFSWIFGRNIRA

SEQ ID NO: 10957 - protein, 151 aa, Triticum aestivum
MSIVRRSNVFDPLADLWADPFDTFRSIVPAISGGNSETAAFANARMDWKETPEAHVFKADLPGVKKEEVKVEVEDGNVLVVSGERTKEKEDKNDKWHRVERSSGKFVRRFRLPEDAKVEDVKAGLENGVLTVTVPKAQVKKPEVKAIQISG

SEQ ID NO: 10958 - protein, 445 aa, Pseudomonas aeruginosa
MTQSVDAFLERLKRRDPDQPEFHQAVEEVLRSLWPFLEANPHYLEAGIIERIVEPERAILFRVPWVDDQGRVRVNRGYRVQMSSAIGPYKGGLRFHPSVNLGVLKFLAFEQVFKNSLTTLPMGGGKGGSDFDPKGKSDAEVMRFCQSFMSELYRHVGADLDVPAGDIGVGAREIGYLFGQYKRLSNQFTSVLTGKGLSYGGSLIRPEATGFGCVYFAQEMLKDRGRGFDGQRVAISGSGNVAQYAARKVMEMGGKVISLSDSEGTLYAEAGLSDEQWEYLMELKNARAGHPRDGVEQFSLQFLEGVPPWGLACDIALPCATQNELDAEDARRLLANGCVCVAEGANMPSTLEAVDLFLEAGILYAPGKASNAGGVAVSGLEMSQNAMRLRWSEGEVDTKLHGIMQSIHHACLLYGEEQGRVNYVKGANIAGFVKVADAMLAQGVV

SEQ ID NO: 10959 - protein, 558 aa, Arabidopsis thaliana
MADLSLPPDSLFLGFDSSTQSMKATVLDSNLNIIKTELVHFDSDLPQYKTKDGVYRDTTVNGRIVSPTLMWVEAFDLILQKLSNANFDFAKVIAVSGSGQQHGSVYWSKGSSEVLRSLDSKRSLKEQLENAFSVKESPIWMDSSTTLQCKEIENAVGGAMELSKITGSRAYERFTGPQIRKLFMTQGEVYKSTERISLVSSFMASLLVGDYACIDETDAAGMNLMDIEKRCWSKAALEATATGLEEKLGKLAPAYATAGSISQYFVQRFGFEKNCVVVQWSGDNPNSLAGLTLSTPGDLAISLGTSDTVFGITKELQPSLEGHVLPNPVDPESYMVMLVYKNASLTREEIRDRCAEGSWDVFNKYLQQTQPLNNGKLGFYYTENEILPPLPVGSHRYILENFSGESLEGVKEQEVGEFDPPSEVRALIEGQFLSKRAHTERFGMPSPPLRIIATGGASANENILSLISAIFGCDVYTVQRPDSASLGAALRAAHGWLCNKKGSFVPISNLYEGKLETTSLNCKLKVKAGDANIASTYGLLMKKRMEIENKLVEKLGHF

SEQ ID NO: 10960 - protein, 311 aa, Sulfolobus tokodaii str. 7
MAKLITLGEILIEFNALSPGPLRHVSYFEKHVAGSEANYCVAFIKQGNECGIIAKVGDDEFGYNAIEWLRGQGVDVSHMKIDPSAPTGIFFIQRHYPVPLKSESIYYRKGSAGSKLSPEDVDEEYVKSADLVHSSGITLAISSTAKEAVYKAFEIASNRSFDTNIRLKLWSAEEAKREILKLLSKFHLKFLITDTDDSKIILGESDPDKAAKAFSDYAEIIVMKLGPKGAIVYYDGKKYYSSGYQVPVEDVTGAGDALGGTFLSLYYKGFEMEKALDYAIVASTLNVMIRGDQENLPTTKDIETFLREMKK

SEQ ID NO: 10961 - protein, 239 aa, Agrobacterium tumefaciens str. C58
MPTEGRAMSETIHVFDTAAALATALAAEVAKRLDAATKERGTASIAVSGGSTPKLFFQALSRHDLDWPNISVTLVDERFVPPESDRSNHRLVADNLLQDKAKAAYFVPLFQPAASPEDAATLATVKTEAICDPFDVVILGMGTDGHTASFFPGGDNLYEALDLDEPRGVLTMAAENAGEERLTFNFSSLHDADFLVLHIEGAAKKATLEKAQSGEDEDEMPVRAVLNRAETPVDIYWAP

SEQ ID NO: 10962 - protein, 334 aa, Xylella fastidiosa Temecula1
MSIEQLAETAQAMVASGKGIIAIDESAGTIAKRFSSVGIENIEENRRAYRELLLTTPKLSDYISGAILFDETIRQSTKAGVPFPKYMAEHGIIPGIKVDKGAYPLAGCPGELVTEGLDGLRARLEEYYKLGARFAKWRAVINIGDDIPSGMCIDANVHALARYAALCQEQGLVPMVEPEVIMDGNHDISAAYEVTEATLRSLFNALYEQNVVLEGTILKASMVIPGTDCEEQASIDEVAESTVMCLKSTVPAILPGIVFLSGGQTDAQSTAHLNAMNQFDPLPWPLSFSYGRAMQQAALKLWSQDMKGNFAKAQQVVYERAKENGLAALGKWKG

SEQ ID NO: 10963 - protein, 488 aa, Xylella fastidiosa Temecula1
MSERQRRTRILATLGPATDPPGVLDALFKAGVNVVRLNFSHGDVSDQARRVAEVRAAAAHVGVEIGILADLPGPKIRIGRFTGGKVRLVAGARFDLLADSNASLGDTTQVGVSYLGLPQDVAAGDVLLLDDGLMQLQVVQVQGARIVTTVLNDGVLSDRKGLNKQGGGLSLGALTDRDRELIGIVARMGIDFIAVSFCRHAEEMHEARRIARECGCDAALVSKIERAEAIVNLAEIVAASDVVMVARGDLGVEIGDAQLPGLQKKIIKEALLQNKVVITATQMLQSMVESPIPTRAEVLDVANAVIDGTDAVMLSAETATGDYPVKAVEAMARICLGAEHQFEFDTDYEMAQRNLQRADHAIAMATMFLSEHICLGGVVALTESGTTPRFLSRFRSHVPIYAFTRHEDVRRRMVLMRGVFPMRFDSRGLTPREAARATIRLLVECGCMSPGDRVVFTSGEHMETLGATNTLRLLEVGADGCVSGLWEL

SEQ ID NO: 10964 - protein, 177 aa, Triticum aestivum
  misc_feature (155)..(155): Xaa can be any naturally occurring amino acid
  unsure (1)..(177): unsure at all Xaa locations
AAATISAHEFSDARIACAKAIALVLVTDDFFDVGASKEEQENLIALVEKWDHHHKVEFYSEQVEVVFSAFYTTVNQLGEMASAVQNCDVTKHLDETWLHYMRSVATEAKWQRNQYVPTVEEYMTDALTSYGMGPIMLTSLYFVQNKLMKHIIKDXEYSELLRLMGTCGRLLNDTKAW

SEQ ID NO: 10965 - protein, 328 aa, Geobacter sulfurreducens PCA
MKAVLLDGFGGLDVLKVGEAERPKPAEGQVLVKVVATSVNRPDLVQREGKYPPPPGDSEILGLEVSGTIEELGPGVTGWQVGDRVMSLVGGGGYAEYAVAYASHLMRIPESMSFEEAACVCESYITAFLNVFMIGGLKDNNSVILHGGGGGVNTAGIQLCKALVPNTKIVATAHPSKIDRVKALGADLVVDFTQTPDFSEAVKEFTNKKGVDVILDHVGAKYLAPNMNSLAYAGRLVIIGVISGIKAELNLALMMVKRQQIIGSVLRSRPVKDKGEIVAEFTRTALPKFADRTIVPIIEKVFPMDQVVEAHRMMEEDKHFGKIVLKIS

SEQ ID NO: 10966 - protein, 143 aa, Wolinella succinogenes
MFLTRFDPLRDLKEIERRFLTPFGEGGEGGAKSNLRGFAPVVNTREEEKGYFIEVDLPGVQKEDIHIDVKENTLSITGERKLKEEVKEENYYKVESFFGKFQRSFTLPENVDSDAITAQSKDGVLEIFIPKTAPKDAKRIAIS

SEQ ID NO: 10967 - protein, 411 aa, Wolinella succinogenes [sequence omitted]

SEQ ID NO: 10968 - protein, 169 aa, Wolbachia endosymbiont of Drosophila melanogaster
MTDTSFKYFMLKKLAWYWSFVELIKGFVITLKYMFKPKVTLRYPMEKGPLSPRFRGEHALRRYPNGEERCIACKLCEVICPAQAIVIEAEEREDGSRRTTRYDIDMIKCIYCGLCQEACPVDAIVEGPNFEFATETREELMYNKEKLLRNGEVWEDAIALRLKKNRPYY

SEQ ID NO: 10969 - protein, 332 aa, Synechococcus sp. CC9605
MTTVKVAAAQIRPVLFSLDGSLQKVLDAMAEAAAQGVELIVFPETFLPYYPYFSFVEPPVLMGRSHLALYEQAVVVPGPVTDAVAAAASQYGMQVLLGVNERDGGTLYNTQLLFNSCGELVLKRRKITPTYHERMVWGQGDGSGLKVVQTPLARVGALACWEHYNPLARYALMAQGEEIHCAQFPGSLVGPIFTEQTAVTMRHHALEAGCFVICSTGWLHPDDYASITSESGLHKAFQGGCHTAVISPEGRYLAGPLPDGEGLAIADLDLALITKRKRMMDSVGHYSRPELLSLQINSSPAVPVQNMSTASVPLEPATATDALSSMEALNHV

SEQ ID NO: 10970 - protein, 381 aa, Methanococcoides burtonii DSM 6242
MLTLIVGGFLGSGKTTTIINTGKYLVDKGYKVAIIVNEIGEIGIDGDIIKKFGFDTKEITNGCICCSLKMGLRSTVITLFNSYNPDVLIIEPTGIAFPNLIKREIELMDLGEGAEIAPLVTLIDGSRFKHILKEMKNFSTRQIEDAEILAINKIDLMDKIQIPIIEESVQQLNRKAKVIRISANNNDEKFYSFMDMIFPEELLNRSLDLKVQETKPKEMEKTSIAPANGLSFVSKKDMELIRDEQETESSIDASGVATYAAEYNIKGNTDIDRAKLIAKEIMKNIKAEVMEHSPEFIGHIKMFLDSNADTVKMNVTAYFEDPQLEVIETGNNDILKLKILSAISNMEKKELVKIVDTFATDVCKRYGIEIEKLGTHHEHNH

SEQ ID NO: 10971 - protein, 413 aa, Alkaliphilus metalliredigenes QYMF
MSDQEKKKGKKDLNEYSAGEDLSYHFNKGQQVLLGLQHTLAMFGACILVPILTGLSISVTLFSVGVGTLIFHYFTKGKIPGFLGSSFAFILPLQLAAERMDLQYAQGGIIGAGIVYLIVGYLVHIMGPEKVSRVFPAVVTGPIIMVIGLGLAPVGIGMSSEHWPVALITLGTAIVINIWGRGLIKVLPIVIGLAVGYVASLAFGIVDFSTVQDEARILAMPGFTMPKFSVAAILLVTPAAIVSVLEHFGDILAIGSTIGKDVKKDPGLPSTFYGGGVGTIISGFLGGPSLTTYGENIGVLALTRIYATFVVSMGAVWAIGLAFIPKVEAIILTIPVAVIGGISVLLYGMIAGIGVRTVVENRVNFVKSRNLIVASVILVLGVGGASFNVFGVEMSGMVVAALSGVALNLILPE

SEQ ID NO: 10972 - protein, 466 aa, Lycopersicon esculentum
HFFFFPDDAQGHMIPTLDMANVVACRGVKATIITTPLNESVFSKAIERNKHLGIEIDIRLLKFPAKENDLPEDCERLDLVPSDDKLPNFLKAAAMMKDEFEELIGECRPDCLVSDMFLPWTTDSAAKFSIPRIVFHGTSYFALCVGDTIRRNKPFKNVSSDTETFVVPDLPHEIRLTRTQLSPFEQSDEETGMAPMIKAVRESDAKSYGVIFNSFYELESDYVEHYTKVVGRKNWAIGPLSLCNRDIEDKAERGRKSSIDEHACLKWLDSKKSSSIVYVCFGSTADFTTAQMQELAMGLEASGQDFIWVIRTGNEDWLPEGFEERTKEKGLIIRGWAPQSVILDHEAIGAFVTHCGWNSTLEGISAGVPMVTWPVFAEQFFNEKLVTEVMRSGAGVGSKQWKRTASEGVKREAIAKAIKRVMASEETEGFRSRAKEYKEMAREAIEEGGSSYNGWATLIQDITSYR

SEQ ID NO: 10973 - protein, 581 aa, Thiomicrospira crunogena XCL-2
MFDRHTLSLYKRLLKYISGYKSAIFITLITIAIIAATEPLSAIILGNLVDESLIEKDPNSFLLLPLQLAAVFIVKGVAEYFSKVMSTWIAQKAIFNIRSELYDKMLCLPQAEHNQTSTGTLMSKVTYDVTQTGNALSEAWIVIARDSLTILALLATLIYYSWQLTLVMLIIGPIVAFFIDRAGKLMRTSSTDMQDNMGEMTHRLEEGLKGYQDIKIYGSEKYELDRFKASAESLRQNTMKVIKVSALNVPLVQVIAAIALSIVVYIAVQMVNAETMTAGNLITYVTAMGLIFEPIRRITNINATVQRGMAAAKSIFAILDTPSEANNGKIELSNVNGQIDFNNVSFSYLGTEKTALNNFSLSIPARKTTALVGQSGSGKTTLANLITRFYQVNHGTITIDGIALDEIELNNLRANIAFVSQNVVLFNDTIAANIAYGHEEYDEQAIMNAAKAAHAWEFIEKLPEGLNTIIGDNGTLLSGGQRQRLAIARAFLKNAPILIMDEATSALDNQSEKLIQEAMNSLRKNRTVIIIAHRLSTIENADKIVVLEEGSLKEQGTHAELMALNSIYSQLYKQGNLSEQV

SEQ ID NO: 10974 - protein, 140 aa, Emericella nidulans
MARTKQTARKSSKSTGGKAPRKQLASKAARKAAPSTGGVKKPHRYKPGGTVALREIRRYQKSTELLIRKLPFQRLVREIAQDFKSDLRFQSSAIGALQESVEAYLVSLFEDTNLCAIHAKRVTIQSKDIQLARRLRGERS

SEQ ID NO: 10975 - protein, 929 aa, Thiomicrospira crunogena XCL-2
MAKELRDKQLRSRVKLLGSLLGEVIETQVGKTTLDAVEKLRKGYIQLHEKENPELRKELKAFIEAQTPDNLILIIRAFNLYFSLVNLAEEEHQFHERQSQLKSDGPLWMGSVLNTISEFKQEGLLAAEVEKLINKLCYIPVFTAHPTESKRRAVMENLRRIFLTLGELNEAEAYNNPYAQEEVIKKLQYQIQVLWKTDEVRRMKPTVEDEIRNGIYYFRQSLFKAVPTVYRYMERALARHYPEDNIQTPNFLNFGSWIGGDRDGNPFVTHETTINALLMQSRAAIYEYQKRVYELSSHLTQSRYISEIKQEVINRATIIDADLQERVFHKRSERFRDEPYRRFLYLIHGRLQENLNYIEAQLNAETAEKPKFGYNSEQEFLDDLELIYDSLCSHGDQEVADANLKDLIRLVQTFGFYLMRLDIRQESTVHTDAVADLLSHLGIDYLSLSEAERLDLLAQQVSSPTVIDTQHLDLKEMTLEVLEVFNVMRRMREEISEKAFNNYVISMTHEASHVMEVLFLAHQAGLAGYNAGEPYCKIRVSPLFETIQDLEHIVPVTSALFDNPTYHALLKASGNQQEIMLGYSDSAKDGGNLSSAWTLYQAQQQIMKLADEYKIDCRLFHGRGGTVGRGGGPTHSAILSQPTGTVRGEIKFTEQGEVLSYKYSNAETAMYELSMGITGLMKASKCLVKPAQQDNPQHLEAMQKLAKEGEHAFRELTDHTEGFFKFFYEATPVNEIGLLNIGSRPSHRKKGNLSKSSIRAIPWIFGWAQARLTFPAWYGTGSALHNWMKTQTPEQLKEMYENWPFFKGLLSNIQMALFKTDLIIGKDYSELGQDQKQAQHIYNMIAEEHVRSVETCLEISGNEYLMADTPQVALSLARRTPYLEPLNHIQVAVLKRYKDETLSDEEREEWLTPLLNSINAIAAGMRNTG

SEQ ID NO: 10976 - protein, 401 aa, Brassica juncea
MALKLNPLASQPYNFPSSARPPISTFRSPKFLCLASSSSPALSSSTKEVESLKKPFTPPKEVHVQVLHSMPPQKIEIFKSMEDWAEQNLLTHLKDVEKSWQPQDFLPDPASDGFEDQVKELRERARELPDDYFVVLVGDMITEEALPTYQTMLNTLDGVRDETGASPTPWAVWTRAWTAEENRHGDLLNKYLYLSGRVDMRQIEKTIQYLIGSGMDPRTENNPYLGFIYTSFQERATFVSHGNTARQAKEHGDLKLAQICGTIAADEKRHETAYTKIVEKLLEIDPDGTVVAFADMMRKKISMPAHLMYDGRDDNLFDNFSSVAQRLGVYTAKDYADILEFLAGRWKIESLSGLSGEGNKAQEYLCGLTPRIRRLDERAQARAKKGPKIPFSWIHDREVQL

SEQ ID NO: 10977 - protein, 743 aa, Alkaliphilus metalliredigenes QYMF
MTKPKVYVTRPLPTEALRLLKERCDVEMKRDSENLSKKELLEKLKKYDAILVSGTKIDEEICEAIQFKCKILANYGVGYDNIDVDAATKYGIYVSNNPNAVTEATADLAWGLILATARRIVECDQYIRSGQKNWGPINLLGSQVSGKTIGIIGGGRIGTAVGQRAKGFNMNIIYTGPKPKATFEEATGGKYVDKETLLREADFVSIHVPLLSSTKHLIGTDELKLMKDTAILINTSRGSLIDEKALVKALHNNEIGGAGLDVFEQEPVVERDLLDIKKVVLTPHVGTSTLDTRIEMGETCARNIFSVLDGKAPPNCVVSIKTDEHSNSIREDALIIVEESIKAVLPEAAVIKALQKKDFTGNTVVVAIGKAAWNMANATKNTLGDRVSKGVVMTKYEHSKGPIEGFEIIEAGHPVPDENSIRGTNKALELVGNLTKEDDVIFLISGGGSSIFEKPMEGVDLEDIMDITNQLLGCGADIVEINTVRKRLSAVKGGKFASLCGDASIYAIVLSDVIGDRLDSIASGPAYPDSSTSKEALDIINRYKLEISDHLRGVLNIETPKTVDNCETVITGSVSALCQGAVIGAQKLGYKPMILSSTLDCEAKDAGKFMAAIAREIKLNNGNQTLFTPPCAIIVGGETVVRLLGNGKGGRNQELALSAALGIEGLEDVVIFSVGSDGTDGPTDAAGGIVEGTTAERMRKINISPEIYLDNNDSYHALKASGDLIITGSTGTNVNDIAVLLCR

SEQ ID NO: 10978 - protein, 632 aa, Pseudomonas aeruginosa PAO1
MHRTSRRTFVKGLAATGLLGGLGLWRAPAWALAGPGQQNLLAGDSFDLFIGETPVNLSGSPAAAMTINGSLPGPTLRWREGDNVTLRVRNRLAEDTSIHWHGIILPANMDGVPGLSFEGIAPGGLYEYRFKVRQNGTYWYHSHSGLQEQAGVYGALVIDAREPEPFSYDRDYVVLLSDWSDEKPQRILAKLKKQSDYYNFHKRTVGDFIDDVSANGWAATLADRKMWAEMKMSPTDLADVSGYTYTYLLNGQPPDGNWTGLFRPGEKLRLRFVNASAMSYFDVRIPGLKMTVVAADGQHVEPVSVDELRIAVAETYDVIVEPGGERAYTLFAQSMDRSGYARGTLALAEGLSAPVPTPDPRPLIGMDDMGMGGMDHGAMGHGAATRPASEMDHSKMSGMDVNGMDHSKMAGMDMSGMDHSKMAGMDMNGMDHSKMAGMDMNGMDHSRMGMGAMPMQSHPASEDGNPLVDMQTMTPTPKLADPGLGLRDNGRRVLTYADLRSRFADPDGREPGRTIELHLTGHMEKFAWSFDGIKFSDAEPLRLTYGERLRIVLVNDTMMTHPIHLHGMWSDLEDEQGNFLVRKHTIDMPPGTRRSYRVTADALGRWAYHCHLLFHMEMGMFREVRVDEGDNA

SEQ ID NO: 10979 - protein, 136 aa, Emericella nidulans
MPPKAAEKKPSTGGKAPAGKAPAEKKEAGKKTAAAASGEKKKRGKTRKETYSSYIYKVLKQVHPDTGISTRAMSILNSFVNRVATEASKLAAYNKKSTISSREIQTSVRLILPGELAKHAVSEGTKAVTKYSSSAK

SEQ ID NO: 10980 - protein, 197 aa, Lycopersicon esculentum
SVLCDAEVALVVFSNRGRLYEYANNSVKATIERYKKACSDSSNTGSVSEANAQYYQQEASKLRAQIGNLMNQNRNMMGEALAGMKLKELKNLEQRIEKGISKIRSKKNELLFAEIEYMQKREVDLHNNNQYLRAKIAETERAQHQHQQMNLMPGSSSNYHELVPPPQQFDTRNYLQVNGLQTNNHYPRQDQPPIQLV

SEQ ID NO: 10981 - protein, 123 aa, Glycine max
MLEEGEESYNLELEVPVTNRPYPHHHRRKKVLAKDIPKGFLPIKVGQGEEQQKIVMPIVYLNHPLFSQLLKEAEEEYGFDQQGTIIIPCHVKDFRYVQGLIDKEKSSQHQHHVISCFRPSSRY

SEQ ID NO: 10982 - protein, 288 aa, Glycine max
  misc_feature (105)..(105): Xaa can be any naturally occurring amino acid
  unsure (1)..(288): unsure at all Xaa locations
MEDGHKFQEVSKPKYDCLLFDLDDTLYPYSSGVSVQIAKNIDEYMIQKLGMEAAKVAELNYSLYKTYGTTMAGLRAIGYDFGYDDFNSFVHGRLPYDVLLKPDPXLRGILQSLPVRKLIFTNADSNHAIRALKTLGLEDCFESIISFDTLNPSNNTNPSYNKDGSESRSTTSEIFYFCEYIRPAESDMVLPRTPVVCKPFDDAFENAFKLADIDPQRTLFFDDSIRNLLTAKRLGLHTVAVGTSVRTTGVDHALESIHNIKEAFPELWDAADEKHEFVQYKVGIEVKA

SEQ ID NO: 10983 - protein, 379 aa, Antarctic bacterium DS2-3R
MTEPTIHKGLAGVTADVTAISKVNSDTNSLLYRGYPVQELAAKCSFEQVAYLLWNSELPNDSELKAFVNFERSHRKLDENVKGAIDLLSTACHPMDVARTAVSVLGANHARAQDSSPEANLEKAMSLLATFPSVVAYDQRRRRGEELIEPREDLDYSANFLWMTFGEEAAPEVVEAFNVSMILYAEHSFNASTFTARVITSTLADLHSAVTGAIGALKGPLHGGANEAVMHTFEEIGIRKDESLDEAATRSKAWMVDALAQKKKVMGFGHRVYKNGDSRVPTMKSALDAMIKHYDRPEMLGLYNGLEAAMEEAKQIKPNLDYPAGPTYNLMGFDTEMFTPLFIAARITGWTAHIMEQVADNALIRPLSEYNGPEQRQVP

SEQ ID NO: 10984 - protein, 91 aa, Brassica napus
HQDTMMMGADFYQTEAEIASLLAERKVPIGVCENTKIRNCVIDKNAKIGKNVVIANADGVEEGDMQEERFYTRSRITVVLKNATIRDGLVL

SEQ ID NO: 10985 - protein, 87 aa, Brassica napus
MESSEEEDDLPSIESITPQSKIDSVHQSLTEKGIRKLCCELLDLKDAVENMCGDMRTKYLAFLRISEEAVEMEHELVELPEHISSQG

SEQ ID NO: 10986 - protein, 498 aa, Cicer arietinum
MGIFSFFAYSLFYLSIFFIFRLLFQSRKFKNLPPGPPSLPIIGNFHHLKRPLHRTFKGLSKTYGDIISLWFGSRLVVVVSSLSEFQQCFTKNDVVLANRPRFLSGKYIFYNYTTLGSTSYSEHWRNLRRITSLDVLSNHRINNFSGVRRDETQRLITKLAEDSSTSFAEVELSFRFYDMTFNNIMRMISGKRYYGEDCDMSDLQEASQFRDMVTELLQLSGANNKTDFMPLLKFFDFENLEKRVKNIADKTDAFLRGLLQEQRNKKERTNTMIDHLLNLQESQPEYYTDQIIKGLALAMLLAGTDSSAVTLEWSMSNLLNHPEVLKKVRDELDTHVGQDRLVDESDLPKLTYLKNVIYETLRLCTPAPLLLPHSTSDDCIIGGYKVPRDTIVLINAWAIHRDPKSWSEATTFKPERFDKKGEIEKVIAFGMGRRVCPGEALALRTISMTLALLIQCFDWKRTSDDMIDMAERDGFVLTKLVPLKAMCKTRPVVNKIFK

SEQ ID NO: 10987 - protein, 348 aa, Synechococcus elongatus PCC 7942
MHKLPVTVITGFLGAGKTTLIRNLLLNNQGRRIAVLVNEFGEVGIDGELLRSCGVCDEDETADSNILELANGCLCCTVQEEFLPTMQTLLQRREQIDCIVIETSGLALPKPLVQAFRWPEIRTGATVDGVVTLVDAVAVAAGQFATDLDALEEQRQADDSLDHETPIEELFEDQLACADLVLLSKIDCLSPEESDRVRRWLSTQVRSGVPIVPVTNGQLDSDVLLGFNAAVEDNLEQRPSHHDHEEEHDHDDAIAAVHLNLDAEWQPEALAERLQALQQSQTLYRVKGFLAVPGKSMRLVFQGVGPRFDWFYDRPWRSPEERRSQLVVIGEDLNAEVLQSALNSVAVS

SEQ ID NO: 10988 - protein, 464 aa, Saccharomyces cerevisiae
MGQILSNPVIDKESHSGADSLTAFGLCAMQGWRMSMEDSHILEPNVLTKSDKDHIAFYGIFDGHGGAKVAEYCGNKIVEILQEQKSFHEGNLPRALIDTFINTDVKLLQDPVMKEDHSGCTATSILVSKSQNLLVCGNAGDSRTVLATDGNAKALSYDHKPTLASEKSRIVAADGFVEMDRVNGNLALSRAIGDFEFKSNPKLGPEEQIVTCVPDILEHSLDYDRDEFVILACDGIWDCLTSQDCVDLVHLGLREGKTLNEISSRIIDVCCAPTTEGTGIGCDNMSIVVVALLKEGEDVAQWSDRMKSKAHRTSVRSFADKRRRVFSYYDFSKCNDEQVFAITTKKPQDKFTRDHEAAVASVTAADNDDPMDIDDTDADTDAENLDPSSQSKSKTSGPIDLASLEALLGATGGVKTDSNGNKVTYTLPQSALAQLLQTMGHDPASSHPENDSNTDHKAGRSHLQ

SEQ ID NO: 10989 - protein, 478 aa, Haemophilus influenzae Rd KW20
MSKEIKTQVVVLGAGPAGYSAAFRCADLGLETVIVERYSTLGGVCLNVGCIPSKALLHVAKVIEEAKHANKNGIYFSEPRIELDEVRAGKEAVVAKLTGGLAGMAKARKVTVVEGLATFTDSHTLVARDRDGNPTTVKFDNAIIAAGSRPVQLPFIPHEDPRIWDSTDALKLKEVPKKLLIMGGGIIGLEMGTVYNALGSEVEVVEMFDQVIPAADKDVVGIYTKQVEKKFKLMLETKVTAVEAKDDGIYVSMEGKACNDTKRYDAVLVAIGRVPNGKLIDAGKAGVEVDDRGFIHVDKQMRTNVPHIYAIGDIVGQPMLAHKGVHEGHVAAEVIAGQKHYFDPKVIPSIAYTEPEVAWVGKTEKECKQEGLNYEVAKFPWAASGRAIASECSEGMTKLIFDKDTHRVLGGAIVGSNGGELLGEIGLAIEMGCDAEDIALTIHAHPTLHESVGLAAEVFEGSITDLPNAKAKEKIISI

SEQ ID NO: 10990 - protein, 258 aa, Arabidopsis thaliana
MQVLVVSPPLIAAASLSKPLNSLSKAALSFSRAKPICPFPQTSRRPISVYKSPMNNLFNRLGFGSRPQAQADPSSAAIAQGPDDDVPSSGQQFAQFGAGCFWGVELAYQRVPGVTKTEVGYSHGIVHNPSYEDVCTGTTGHNEVVRVQYDPKECSFESLLDVFWNRHDPTTLNRQGGDVGTQYRSGIYYYTDEQERIAREAVEKQQKILNKRIVTEILPATKFYRAENYHQQYLAKGGRMGLRQSAEKGCKDPIRCYG

SEQ ID NO: 10991 - protein, 767 aa, Saccharomyces cerevisiae
MVQSAVLGFPRIGPNRELKKATEGYWNGKITVDELFKVGKDLRTQNWKLQKEAGVDIIPSNDFSFYDQVLDLSLLFNVIPDRYTKYDLSPIDTLFAMGRGLQRKATETEKAVDVTALEMVKWFDSNYHYVRPTFSKTTQFKLNGQKPVDEFLEAKELGIHTRPVLLGPVSYLFLGKADKDSLDLEPLSLLEQLLPLYTEILSKLASAGATEVQIDEPVLVLDLPANAQAAIKKAYTYFGEQSNLPKITLATYFGTVVPNLDAIKGLPVAALHVDFVRAPEQFDEVVAAIGNKQTLSVGIVDGRNIWKNDFKKSSAIVNKAIEKLGADRVVVATSSSLLHTPVDLNNETKLDAEIKGFFSFATQKLDEVVVITKNVSGQDVAAALEANAKSVESRGKSKFIHDAAVKARVASIDEKMSTRAAPFEQRLPEQQKVFNLPLFPTTTIGSFPQTKDIRINRNKFNKGTISAEEYEKFINSEIEKVIRFQEEIGLDVLVHGEPERNDMVQYFGEQINGYAFTVNGWVQSYGSRYVRPPIIVGDLSRPKAMSVKESVYAQSITSKPVKGMLTGPITCLRWSFPRDDVDQKTQAMQLALALRDEVNDLEAAGIKVIQVDEPALREGLPLREGTERSAYYTWAAEAFRVATSGVANKTQIHSHFCYSDLDPNHIKALDADVVSIEFSKKDDANYIAEFKNYPNHIGLGLFDIHSPRIPSKDEFIAKISTILKSYPAEKFWVNPDCGLKTRGWEETRLSLTHMVEAAKYFREQYKN

SEQ ID NO: 10992 - protein, 417 aa, Haemophilus influenzae Rd KW20 [sequence omitted]

SEQ ID NO: 10993 - protein, 261 aa, Triticum sp.
MAPPRGGAAAAATAALDLTGVHILEASSVPPLPERGGNAVQRKGAVDPDKDRKKEKAAAPRITGWGLREYSKIVCEKVEAKGRTTYNEVADEIYSELKSMAHIGQGFDEKNIRRRVYDAFNVLIALRVIAKEKKEIRWMGLSNYRYEKIKKLEEVRKELVNKIRNKKALLQEIEKQFDDLQNIKLRNQTLESSAENVNGIRLPFVLVKTSRKARVEIEISDDSKFAHFEFNGAPFTLHDDLSILEGVRGNSIGKAGRATLH

SEQ ID NO: 10994 - protein, 231 aa, Brassica napus
  misc_feature (106)..(106): Xaa can be any naturally occurring amino acid
  unsure (1)..(231): unsure at all Xaa locations
MGRGKIEIKRIENSTNRQVTFCKRRNGLLKKAYELSVLCDAEVALIVFSTRGRLYEYANNNIRSTIERYKKASDNTNTHSVQEINAAYYQQESAKLRQQIQTIQNXSNRHLMGDSLSALSVKELKQVENRLEKAISRIRSKKHELLLAEIENLHKREIKLDNESIYLRTKIAEVERFQQHHHQMVSGTEMTAIEALASRNYFAHNIMTIGSGSGAGHGCSYFDPDKKTHLG

SEQ ID NO: 10995 - protein, 268 aa, Burkholderia sp. 383
MSKIPAFGLGTFRLKGQVVIDSVRNGLEVGYRAIDTAQIYGNEAEVGEAIAASGVAREDLFLTTKIWVDNYAPDKLVPSLEESLRKLRTDHVDLTLIHWPAPDNGVALDTFMTALADAKAQGLTRRIGISNFNIALTKQAIAAVGKDAIATNQIELSPYLQNRKLVEFLNAEGIHVTSYMTLAYGKVLGDPVIGAIAQRHDATPAQVALAWALQLGYSVIPSSTKRENLASNLLAQSLRLTDEDMAQIAALERNGREVDPAGLAPKWD

SEQ ID NO: 10996 - protein, 441 aa, Chlorobium tepidum TLS
MKSFLSKSGAIAAGLLLAAATFSPPIQAATPTPDAVNAFAIDNFFLFICAVLVLFMQAGFALVETGLNSAKNAVNILFKNLMDMAIGGIIYYFVGYGLMYPGEAFSGGFFGFGGPGISTAMPEIAGGTLYPAVDFLFQVAFAATAATIVSGAVAGRMQFRAYLIYSAVISAVVYPISGFWLWGGGWLKALGFHDFAGSLLVHALGGFAGLAGAIVLGPRIGRFNEDGTPNAMPGHNLALSTLGVFILLIGWYGFNPGSQLAIVGGDNTAAVMKIAVNTTLAACAGAVVAMIFAWGLFKKPDLTMALNGMLAGLVAITANCDVVSYNASLIIGAVGGILVVLGIMLLDKLRIDDPVGAWPVHGLNGIWGGVAAWIFGGQPMVAQLVGSLVVPFWGFVTMMVLFLILKAMGILRVHKDEEMKGLDISEHEEEAYYGFDIYTTQ

SEQ ID NO: 10997 - protein, 541 aa, Oenococcus oeni
MTDPVSILNDPFINKGTAFTEAEREELGLNGLLPAKVQALQEQVDQTYAQFQSKVSNLEKRLFLMEIFNTNHVLFYKLFSQHVVEFMPIVYDPTIADTIENYSELFVEPQGAAFLDINHPENIQSTLKNAANGRDIKLLVVSDAEGILGIGDWGVQGVDIAVGKLMVYTVAAGIDPSTVLAVVIDAGTNNEKLLKDPMYLGNKFNRVRGDKYYDFIDKFVNHAESLFPNLYLHWEDFGRSNASNILNSYKDKIATFNDDIQGTGIVVLAGVLGALKISGQKLTDQTYMSFGAGTAGMGIVKQLHEEMVEQGLSDEEAKKHFFLVDKQGLLFDDDPDLTPEQKPFAAKRSDFKNANQLTNLQAAVEAVHPTILVGTSTHPNSFTEEIVKDMSGYTERPIIFPISNPTKLAEAKAEDVLKWSNGKALIGTGVPVDDIEYEGNAYQIGQANNALIYPGLGFGAIAAQSKLLTPEMISAAAHSLGGIVDTTKVGAAVLPPVSKLADFSRTVAVAVAKKAVEQGLNRQPIDDVEKAVDDLKWDPKY

SEQ ID NO: 10998 - protein, 367 aa, Mycobacterium bovis AF2122/97
MGEGSRRPSGMLMSVDLEPVQLVGPDGTPTAERRYHRDLPEETLRWLYEMMVVTRELDTEFVNLQRQGELALYTPCRGQEAAQVGAAACLRKTDWLFPQYRELGVYLVRGIPPGHVGVAWRGTWHGGLQFTTKCCAPMSVPIGTQTLHAVGAAMAAQRLDEDSVTVAFLGDGATSEGDVHEALNFAAVFTTPCVFYVQNNQWAISMPVSRQTAAPSIAHKAIGYGMPGIRVDGNDVLACYAVMAEAAARARAGDGPTLIEAVTYRLGPHTTADDPTRYRSQEEVDRWATLDPIPRYRTYLQDQGLWSQRLEEQVTARAKHVRSELRDAVFDAPDFDVDEVFTTVYAEITPGLQAQREQLRAELARTD

SEQ ID NO: 10999 - protein, 515 aa, Magnaporthe grisea
MKNPISSLDVPTPPATTIPTLSSPAPLLRPAIPGARSAGARTPRLGLAIPPSPNVKPVGGAPGRPPLPTLHLATPMGSSVTPHEQPPGRPSIVTQQGQSASGGSESSAAHSRSGSFGPLDGRTSNPTSAGSQYSALSFASHFGIGSTRPQGTPDPASAVGSIYSERSDGGAGMDKDGNLKGLENFDKLTIDKARTADVEDLDVEGWKIASMEKRIVELGGLGEGAGGAVTRCKLTGGKTVFALKVITANPDPDVKKQIMRELDFNIQCASEHICRYYGAFEDPSTATISIAMEFCEGGSLDSIYKEVKRLGGRTGEKVLGKIAEGVLRGLTYLNSKKIIHRDIKPSNILLCRNGDVKLCDFGVSGDFGTKGEANTFIGTSYYMAPERITGQSYTITSDVWSTGVTLLEVAQHRFPFPADGTEMAPRAGLIDLLTYIVRQPIPKLKDEPSAQISWSENFKYFIECCLEKDPQRRASPWRMLEHPWMVDMKSKRVNMTRYLAQVWGWDDKGEAKPAE

SEQ ID NO: 11000 - protein, 264 aa, Alkaliphilus metalliredigenes QYMF
MIRDLIESSKKIVIKIGTNALANDDGTININRVYNLSQQISHLIKEGKQIVIISSGARIAGLATLGKWKLKDDMHYKQALCAIGQVELMNAYRKTFREHDIHIGQLLLNREDFYNYKRTINIGNTLFTLLDEGVIPIIDENDTVSVKEIKTEDNDTLAAYTSKLWNADLLIFLGDTDGIYNKNPKEYTDAKLLEEVENIDELDKMIQTGELDEIGTDDIISKMNAAKTLNDCNTPVIIANGKVENILLKLLEGKAKATVLRDIK

SEQ ID NO: 11001 - protein, 402 aa, Oryza sativa
MDQPAPAPEPMLLDAQPPAAVACDKKQQEGEAPYAEGNDAVTGHIISTTIGGKNGEPKRTISYMAERVVGTGSFGIVFQAKCLETGETVAIKKVLQDRRYKNRELQLMRAMDHPNVISLKHCFFSTTSRDELFLNLVMEYVPETLYRVLKHYSNANHRMPLIYVKLYMYQLFRGLAYIHTVPGVCHRDVKPQNVLVDPLTHQVKLCDFGSAKTLVPGEPNISYICSRYYRAPELIFGATEYTTSIDIWSAGCVLAELLLGQPLFPGESAVDQLVEIIKVLGTPTREEIRCMNPNYTEFRFPQIKAHPWHKVFHKRMPPEAIDLASRLLQYSPSLRCTALDACAHPFFDELREPNARLPNGRPFPPLFNFKHELANSSQELISRLIPEHVRRQATHNFFNTGS

SEQ ID NO: 11002 - protein, 309 aa, Bartonella henselae
DGNEGILLYRGYPIDQLAEKGDFLESCYLLLYGELPTKQEKIDFDRCIMQHTMVHEQFARFFHGFRRDSHPMAVMIACLGAMSAFYHDSIDITDPQQRMIASIRLISKVPTLAAMAYKYSIGQAFVYPRNDLSYAANFLRMCFSVPCEEYKINPVLTRAMDRIFTLHADHEQNASTSTVRLAGSSGANPFACIAAGVACLWGPAHGGANEACLKMLQEIGSVERIPEFIARAKDKNDSFRLMGFGHRVYKNYDPRAKIMQQTCHEVLKELNIQNDPLLDIAITLENIALNDEYFIEKKLYPNVDFYSGI

SEQ ID NO: 11003 - protein, 76 aa, Coprinellus congregatus
MQIFVKTLTGKTITLEVESSDTIDNVKAKIQDKEGIPPDQQRLIFAGKQLEDGRTLSDYNIQKESTLHLVLRLRGG

SEQ ID NO: 11004 - protein, 431 aa, Prochlorococcus marinus str. NATL2A
MKRVLAIILGGGKGSRLYPLTKMRAKPAVPLAGKYRLIDIPISNCINSDISKMYVLTQFNSASLNRHIAQTYNLSGPFGQGFVEVLAAQQTPETPSWFEGTADAVRKYQWLFQEWDVDEYLILSGDQLYRMDYSLFVEQHRNTGADLTVAALPVDPAQAEAFGLMRTDEIGNIKEFREKPTGDSLKAMAVDTSRFGLEANEAKEKPYLASMGIYVFSRSTLFDLLNKFPSYTDFGKEIIPEALGRGDKLKSYVFNDYWEDIGTIGAFFESNLALTQQPTPPFSFYDEKFPIYTRPRYLPPSKIVDTQITDSIVSEGSILKSCSIHHCVLGVRSRIESDVVLNETLVMGSDFYESYEERIALRNGGGIPLGVGQGTTVKRAILDKNARIGDNVTIVNKDNVEEADRADQGFYIRNGIVVIVKNATIPDGTII

SEQ ID NO: 11005 - protein, 665 aa, Haemophilus ducreyi 35000HP
MTERKVLANAIRFLSMDAVQKANSGHPGAPMGMADIAEVLWRDFLKHNPTNPKWADRDRFVLSNGHGSMLIYSLLHLSGYDLSIEDLKQFRQLHSKTPGHPEYGYAPGVETTTGPLGQGITNAVGMAIAEKTLAAQFNREGHKIVDHYTYAFLGDGCLMEGISHEACSLAGTLGLGKLIAFYDDNNISIDGHVDGWFADDTAQRFEAYGWQVIRNVDGHDATQIKIAIENAQAEKDRPTLIICKTIIGYGSPNKSASHDCHGAPLGNGEIALTRQALNWQYAPFEIPADIYADWDAKAKGCLIEKEWDAKFVAYQTAYPALAAEFKRRMAGDLPANWKTEASHFIETLQANPASIASRKASQNAIEAYAHLLPELLGGSADLASSNLTLWSGSKPIRADHNVDGNYINYGVREFGMSAIMNGIALHGGFIPYGATFLMFYEYAHNAVRMAALMKQRALFVYTHDSIGLGEDGPTHQPVEQTASLRYIPNLETWRPCDQVESAIAWKSAIERQDGPTALIFTRQNLAQQARMAEQLANVARGGYVLKEASGTPDLILIATGSEVELAIKAAEVLENEGKKVRVVSMPSTNIFDKQSEAYRESVLPRAITKRIAIEAQLSDFWYKYVGFEGRIIGMNSFGESAPADQLFKLFGFSVENVVAKAKEMW

SEQ ID NO: 11006 - protein, 238 aa, Prochlorococcus marinus str. NATL2A
MTKYEIQVLEDKSSLALAASDLITQIIESTLKNKTRAKIALCGGSTPKAAYSLLGKKNIDWMNVDLFLGDERWVDNKSQDSNCFLLNNSLFKEGNPSLEASFFAVSTVELSSPDESADNYETILKNNLAGDPPKFDLILLGLGDDGHTASLFPGSDALFERDRLITAGEGKGHKRITFTSKLLSAADNVVFLISGSSKQMALKHLLDPSESWERTPAKLVAPNSEIIVLADKDAYPSF

SEQ ID NO: 11007 - protein, 497 aa, Glycine max
  misc_feature (31)..(31): Xaa can be any naturally occurring amino acid
  unsure (1)..(497): unsure at all Xaa locations
IEFKDKVKNVGASLVKQVANATNDVAGDEYXGREHFNCLAGTTCATVLTRAIFTEGCKSIAAGMNAMDLRRGISMAVDAVVTNLKSRARMISTSEEIAQVGMISANGEREIGELIAKAMEKVGKEGVITISDGKTLYNELEVVEGMKLDRGYISPYFITNDKNQKCELEDPLILIHEKKISSINAIVKVLELALKRQRPLLIIAEDVESDALATLILNKLRAGIKVCAIKAPGFGENRKAGLQDLAVLTGGALITEELGLKLEKVDLDMLGTCKKITVSKDDTVILDGAGDKKALEERCEQIRSAIENSTSDYDKEKLQERLAKLSGGVAVLKIGGASEAEVGEKKDRVTDALNATKAAVEEGIVPGGGVALLYASRELDKLQTANFGQKIGVQIIQNALKTPVLTIASNAGVEGAVVVGKLLEQENHDLGYDAAKGEYVDMVKAGIIDPLKVIRTALVDAASVSSLMTTTEAVVSELPNDNKDTPAMAGGMGGMGY

SEQ ID NO: 11008 - protein, 240 aa, Papaver somniferum
VQLRRMENKINRQVTFSKRRSGLLRPCAEMSVLCDAEVALIVFSTKGKLFEYSTDSGMDRILERYERYSYAERELVTTEIDQGNWSLEYSKLKSKIEILQKNQRHFMGEDLQSMSLKELQNLEQQLDVALKQIRSRKNQLMYESISELQKKEKALQEQNNKLGKQLKEKEKEVAAQQQQASQFSQGQSSPSFLLSQSLPSLNIGSGSYQARGGDNGNEEGNRTQTTRTNTATLMPPWMLN

SEQ ID NO: 11009 - protein, 544 aa, Deinococcus radiodurans R1
MKYIFVTGGVVSSLGKGVASASLGALLRARGYKVTAVKIDPYINIDAGTMRPYEHGECFVTASGAETDLDIGNYERFLDLDIPAGSNITTGQVYQEVIRKERAGDYLSQTVQVIPHVTDEIKRRIRAAGESAGAEIVLIEVGGTVGDIESLPFLEAIRQFRFDEGDDNVLYLHLTLVPYLGTSNEFKTKPTQHSVAALRSYGISPDIVMVRSKDKLPAEITRKIAAFTSVRENRVFSSYDVEHVYQVPLALEEQGLGKAVEELLGLEGTHPRLGVWTDAVRTIKHPKQQVTIAIAGKYTAMPDAYLSLMESLTHAGIANDARVNIKWVNAEQLAEAGAGELEGQFADVDGILVPGGFGIRGIEGKVKAAEYARTHGVPYLGICLGMQIAVIEYARHVAGIEDANSAEFDEYAKNKVIDLMPEQLEVAGMGGTMRLGDWPMELRAGTKIAELYGVPQGGTVKERHRHRYEVNPAYVEQLEAAGLTISGVTPGVEGRGAGLVETVEIADHPFFVALQAHPEFKSRPMRPSPPFAGFVKAALEHQQQ

SEQ ID NO: 11010 - protein, 587 aa, GIBBERELLA ZEAE PH-1
MQRALNTRARASALSSAATKYRAGSLSQQVRFAHKELKFGVEGRAALLAGVDTLAKAVATTLGPKGRNVLIESSFGSPKITKDGVTVARAVSLKDKFENLGAKLLQDVASKTNEVAGDGTTTATVLARAIFSETVKNVAAGCNPMDLRRGIQAAVEAVVQFLQKNKRDITTSAEIAQVATISANGDVHIGQMIANAMEKVGKEGVITCKEGKTVADELEVTEGMRFDRGFVSPYFITDTKSQKVEFENPLILLSEKKISAVQDIIPALEVSTQQRRPLVIIAEDIEGEALAVCILNKLRGQLQVAAVKAPGFGDNRKSILGDLAILTDGTVFTDELDIKLDKATPDMLGSTGSITITKEDTIVLNGGGSKDAIAQRCEQIRGVIADPTTSEYEKEKLQERLAKLSGGVAVIKVGGSSEVEVGEKKDRFVDALNATRAAVEEGILPGGGTALIKASAQALNEVPTANFDQQLGVSIVKNAITRPARTIIENAGLESSVVVGKLTDEHAADFNKGFDSAKGEYVDMINAGILDPFKVVRTGLIDASGVASLLGTTEVAIVDAPEEKGAGGPPMGGMGGMGGMGGMGGMM

SEQ ID NO: 11011 - protein, 173 aa, Oryza sativa
HIFILLQLLYRRYSGNFLVNLLGKWKESEYSGHSVPVGGLAYYVTAPSSLADVLANPFHTLFYVVFMLSACALFSKTWIEVSGSSAKDVAKQLKEQQMVMPGHRESNLQKELNRYIPTAAAFGGVCIGALTVLADFMGAIGSGTGILLAVTIIYQYFETFEKERATELGFFGF

SEQ ID NO: 11012 - protein, 822 aa, Tropheryma whipplei TW08/27
MLFGTILGYPRLGPRRELRDYLYSYWQGKISEEVLEEKTRLLREETHRRLILLGLSAENYSIPESFSYYDHVLDAAVHVGAVPSRFSWLLNDGIVDLNAYFTLARGDRSLAPLESLRYFGSSYHYLVPEIDGNTHFALTSHRVITQFEQAKQAGVNVRPTILGPVSLLMMSRSHGPNAINPIERLQDLVPVYSELFEKLYNSGCKFVQVDEPAVTHNTFGIQKSQELLVDAYKFLSSRKLRPEILVAMSYGNAADQVDALATTGVEAMAFNLIDGAVPFANPSLADKALFGGVIDGRNIWRGDLAAAYYKLERLRELSGNVVASTSASLFHLPLSLDTEDLGDHLKEWLAFADEKVRQVMILARGLEYGVGCIYEHLDSAANSLSDRMTTPGVRVEEVRQALQDLGESDFCRPPREQQQGCNHASLPILPMVGIGEFSDGTPFVNNDGIPNNNPQAAISFQEDLDILAVQRLGDIDPIQRFASRMHGFAITHNGWVQSIGPHSVCPPILWGDVSRITPMSSWIEYTQTLTEKSVKPVLPGPLTLLMSCFVREDQPFQETAQQIAIAIRDDIADLQRSGIRAIQIDEPALEEFLSIYDNARYCAPQVFRLATSSAKPEVQIHLHLRPPNLVETIDIINDLDADVISAEIVPYTFGLPAQKCLMEIRRRIPLCLYFHDANFSRMPSVDECRYLIDTLVRDVDGATLAKQFDDMHIAGFTAGCAFTAINPRDICVPRADDAGIPSLGSGADHTLERQKATYIPGGIHNLWIGLIYSHSGYNAFVYDSAYMRDIYIGNELQFVKNMTQAVLLLRKEFTSPQKALSA

SEQ ID NO: 11013 - protein, 446 aa, Synechococcus elongatus PCC 7942
MSFDYDLLVIGAGSGGLAASKRAASYGAKVAIAETDLVGGTCVIRGCVPKKLMVYASSFASQYHYAEAYGWSAVQPQFSWPKLIAAIDAEVNRLSRLHISLLEKAGVDLILGHAQFVDEHRLQVGDRQVTAAKILIAAGGRPIKLPIPGGELAITSREMFHLPEQPQRFAVIGGGYIGCEFAGILRSLGSEVTQIIRRDRILQGFDQELREAVQTGMSQHGVQFRTGVTVERIDQTETGLQLSYSDGSQQIVDQVLMATGREPWLEGLNLDAAGVAIEGRRIAVDAWSRTNQPHIFAVGDCTDRVNLTPVAIAEGRAFADTEFGQKPRQISYENIASAVFSQPEACSVGLSEEAAKAEYGEERIRVYRSRFRPMFYTLPQAEERVLMKLVVETESDRVLGAHMVGKDAAEIIQSVAIAVTMGATKADFDATMALHPTSAEEFVTMP

SEQ ID NO: 11014 - protein, 199 aa, Zea mays
  misc_feature (35)..(35): Xaa can be any naturally occurring amino acid
  unsure (1)..(199): unsure at all Xaa locations
LVFLIVIYFQGFRVVFPVRSKNARAQQGSYPIKLXYTSNMPIIFHCALITTLYFISQLLYRKYSGNFLVTLLGKWKESEYSGHSIPVGGLAYYVTAPSSLADVLANPFHALFYVVFMLSACALFSKTWIEVSGSSAKGVAKQPKEQQMVMPGHRESNLQKELNRYIPTAAAFGGVCIGALTVLADFMGAIGSGTVAVEP

SEQ ID NO: 11015 - protein, 194 aa, Ranunculus acris
HEMSVLCDADVALIVFSIKGKLTEYSTNDSMESILERYERYSSSCKELPATDPESQECLFRDYNKLKSKVEALQKSQRHLKGEEIGGLGVKELQALEQQLDTSLRQIRSRKNQLMNGSITELHRSSKALHEENVNLKKQAKEMELALSVYKKHNQAPLNVSGTSTQSSETQGEGDVVQPLRAKTLMPPWMLNHL

SEQ ID NO: 11016 - protein, 216 aa, Ranunculus bulbosus
  misc_feature (214)..(214): Xaa can be any naturally occurring amino acid
  unsure (1)..(216): unsure at all Xaa locations
GLVKKAHEISVLCDAEVALIVFSTKGKLFEYSTDSGMDKILERYERYSYAERELVTNDTDSQGNWSLEYTKLKAKVEILQKNQRHFRGEEIGNLGLKELQNLEQQLDTALKLIRARKNQLLFESISEYQKKEKALNEQNNQLEKQLKEKEKELAKRPQWEQPPNQGQTSQSFTLQSHPCLNIGGNYQGGSSGREDEVPQTQARPTILMPPWMVXHL

SEQ ID NO: 11017 - protein, 526 aa, Bacillus halodurans C-125
MHKIISMPKRLLVKEQNVQTKTTGERLRLFLEELGPTFVKMGQMASTRPDLIPSELMEELEKLQDRVSPFSYEEVKAIVEHELGMAVDELFREFHETPLGAASIGQVHFAVLQSGEPVAVKVQRPNIEEIIKTDLEILQHLAEIAEHRLEWAANYQLVEIIEEFSKALLAELDYTVEGRNADRLAKLFEDDPTVQIPQVYWDYSTKKVLTMEYVEGTKLNEREELKQRGYDEKMLAQRITHAILKQILLEGFFHGDPHPGNISALPSEAIAFMDFGMVGRLSPQMKQHFASLVIAIMRRRSEGVLNAITKMGIVPDDVDMQLLQWDIDELREKFDDVPLSQVSLGEAVNDLFAIANRHRIQIPADLTLLGKTLLTMEQMVEKLDPELSIVKVAEPFGRQLLKERLSPKSVAEHVYNQWNEYGDVLTELPRTLKELTAITRKGKLPLELSLPKIERFLNKLDRISNRLSFSIVLLSFSIIMVGLIIGSALGGQSSLLWNIPAVEIGFVVALLMFIWLLYSILRSGRF

SEQ ID NO: 11018 - protein, 373 aa, Nicotiana tabacum
MAIEHNEQQELSQSFLLDALYCEEEEEKWGDLVDDETIITPLSSEVTTTTTTTTKPNSLLPLLLLEQDLFWEDEELLSLFSKEKETHCWFNSFQDDSLLCSARVDSVEWILKVNGYYGFSALTAVLAINYFDRFLTSLHYQKDKPWMIQLAAVTCLSLAAKVEETQVPLLLDFQVEDAKYVFEAKTIQRMELLVLSSLKWRMNPVTPLSFLDHIIRRLGLRNNIHWEFLRRCENLLLSIMADCRFVRYMPSVLATAIMLHVIHQVEPCNSVDYQNQLLGVLKINKEKVNNCFELISEVCSKPISHKRKYENPSHSPSGVIDPIYSSESSNDSWDLESTSSYFPVFKKSRVQEQQMKLASSISRVFVEAVGSPH

SEQ ID NO: 11019 - protein, 419 aa, Glycine max
MLPTGAKETQLRENNSQKVHPQPMEEAMNQNPEAMETLISKVFTNISSLKSAYIQLQAAHTPYDPDKIHTADKLVISELKNLSELKHFYRENNPKPVCVSPQDSRLAAEIQEQQSLLKTYEVMVKKFQSEIQNKDSEIHQLQQQIEEARQKRAKLEKNLKLRGLSTKESEDEIGFFPVDLTPDLFTSAVEAAAKAIHDFSKPLINMMKAAGWDLDAAANSIEPDVVYAKRAHKKYAFESYICQRMFSGFEQENFSVKSDNITVTKESFFHQFLALREMDPLDMLGQNPDSIFGKFCRSKYLVVVHPKMEASFFGNLDQRNYVMGGGHPRTPFYQAFLKLTKSIWLLHRLAYSFEPNVKVFQVKGGSEFSDVYMESVVKNLIMDDNDEKPKVGLMVMPGFWIGGSVIQSKVYLSGMKVAE

SEQ ID NO: 11020 - protein, 558 aa, Oryza sativa
MSAAAEEAAAAAAAEEVEGVEAGKKGVADAKGKGKEKVVVAEEDSAVAAGSGGSGGGRRTLVAYPARVAGYKDVVADAAVFRRALEGLHAQMGTKLKVPIIGGKDLDLHQLFKEVTSRGGIDKKYYMSLLYHFERLYLFEAQGWYQETADSRSISCIEMKAEGQASRKRKRGSNSCSSDPPINLEWTLCSTPLMKVPRYNILAPTIHFGSEKGQAGMKSTWSAQKVLALIGQKLTIKIREIKGKNSQLEHSNPGCRGNHEAIKPLDHLSACYLLYPTSLLSFLYGQRQELVPLTLSDLAASLDNDVQVIIDGKFEHGYIVTVIMGSKSTKAVLYNCTEEPAVPTAVPHVAIDSAEGIRPRRRRRRKKLSTTDPNHPKPNRSGYNFFFQDQHRKLKPEYPGQDRLISKMIGERWNNLGPEDKAVYQEKGVEDKARYQRQLALYREQRTGQPISNAVPIQQRLPQKEVTIDEVDSKVSEGDILLSNQGYSSSTSSSDETADSGEKNVEDDEEFNTETSPEPSMETTDSHGQPDPSADGERFELRRRENPKIDEKRDMPPN

SEQ ID NO: 11021 - protein, 352 aa, Geobacter sulfurreducens PCA
MPETTIQTFGVRRLEIIAADGTADEALLPDLSGDQLRRLHYLMLLTRTFDRRALALQREGRIGTYPSVLGQEAAQVGSAFALQPSDWVFPSFREMGAHLTLGYPVHQLFQYWGGDERGLRTPDGMNLFPICVSVGTHIPHAAGAALAARARGDRSAVAAYFGDGATSKGDFHEGFNLAGALKLPVVFICQNNQWAISVPLAAQTAAPTLAQKALAYGFEGIQVDGNDVLAVFRATGEALVRARDGGGPTFIECLTYRMADHTTADDASRYRPPADVEAWRDRDPLLRFERFLAKRGLWNGDYGAEVQAKAEGEIDEAVRRYESVPPPEPGEMFAFTCAELSPRQRRQQENIR

SEQ ID NO: 11022 - protein, 612 aa, ASPERGILLUS NIDULANS FGSC A4
MEGQGENDELYPIAVLIDELKHDDVLLRLNAIHRLSTIALALGPERTRDELVPFLDDSVEDEDEVLTALSEELGSFIEYVGGPEYGHVLLSPLENLAAIEEPLAVESLNKIGEQLSEKQIEEYFVPMVQRLSKADWFTSKVSATGLYCVPYRKSSSSLQQTLRQFFAGLVRDETPMVRRSAGNNLAKFVKEMTTPIVIDEMIPLFQYLASDDQDSVRLLTVDILIAIAEEIPKEQQPSHGVLLTSLRSLFEDKSWRVRYMVADRYEKIAKAVHEEVVTRDMVPSFVKLLKDTEAEVRTAVAGQIPGFCSLIDRETLLNEIMTSVEDLVSDPSQHVRAALGTQISGLAPILGKEETISHLLPMFLQMLKDEFPDVRLHIISKLELVNNVIGIELLSQSLLPAIVQLAEDKQWRVRLAIIEYIPLLASQLGVKFFDEQLSDLCMGWLGDTVFSIREAATQNLRKLTEVFGVDWAKESIIPKVMAMGQHPNYLYRMTTCFAISTLAPVVTLEIIENSVLPILERLTSDDIPNIRFNVAKSYAVLIDTLRRLPAQGTLTDLEKEGKTEAPSPRGQELIQQSVLPSLEKLQGDDDVDVRYFATTAAGGHEEVMQTSP

SEQ ID NO: 11023 - protein, 425 aa, Streptomyces roseofulvus
MNRQVAVTGIGVVAPGGIGRKPYWEQLTSGRTATRAISFFDASPFRSRIAAEVDFDPAAAGLSPREVRRMDRAAQFAVVSARESLADSGLDVADLDPHRIGVSIGSAVGGTTSLEPEYLALSDSGRQWELDLSYLSPHLYDAFTPSSLAREVAGVIGAEGPAAVVSTGCTSGIDSLGHARDLIAEGSADVVLAGGTDTPISPIAVACFDAIKATSPSNDDPAHASRPFDRERNGFVLAEGAAVLVLEELGHARARDAHVYALVSGYATRCNAYHMTGLTPHGREMAEAIRHALAESGTDPAAVDYVNAHGSGTKQNDRHETAAFKATLGERARSVPVSSIKSMIGHSLGAIGSLEIAAWALAMEYGVVPPTANLDTPDPECDLDYVPHEARETRVDRVLSVGSGFGGFQSAMVLTRDTGARLPTA

SEQ ID NO: 11024 - protein, 548 aa, Rhodobacter sphaeroides 2.4.1
MDISRTSDVWWKNAVFYCLDVETFQDSNGDGIGDFAGLTRRLDHLDRLGVSCIWLMPFYPSPNQDDGYDITDYYSVDPRLGTLGDFVEFLRAAHDRGMRVIADLVVNHTSREHPWFQASRADPDSPYRDWYVWRDEKPDEDAASLVFPGEENSSWTWDAKAGKYYLHRFYSHQPDLNVENRAVRDEIQRIVGFWLQLGLSGFRVDAVPFLLEQMSTVDTGFAPHRWLRDLRAFINRRSGDAVLLGEVNLDYPDVRRFFGDEDGDELHMCLDFNLNQAMALALAREDAGPIVHGLRHMPELAPDDGWAHFLRNHDEWSLDKLTEAERQEVFASFGPDPSMQLFGRGLRRRMPTMLKGNPDRLRMAYALMASMPGSPVIFYGEEIGMAENLEIPGRLAVRAPMQWDAGPHGGFSNASTEALHRPMVSDPQWGPGKVNAIDQQDRPDTMFHFMEHLLRRRRECPEIAFGEHAVLPFPEPEIFAIRHDWEGRTLIALANLGAKPQKVTLTLPKASGLGRLRPILGEGKVSLRKDELTVELGGYGLRWVRFES

SEQ ID NO: 11025 - protein, 1081 aa, Candida albicans SC5314
MNPTKKPRLSPMQPSVFEILNDPELYSQHCHSLRETLLDHFNHQATLIDTYEHELEKSKNANKAFQQALSEIGTVVISVAMGDLSKKVEIHTVENDPEILKVKITINTMMDQLQTFANEVTKVATEVANGELGGQAKNDGSVGIWRSLTDNVNIMALNLTNQVREIADVTRAVAKGDLSRKINVHAQGEILQLQRTINTMVDQLRTFAFEVSKVARDVGVLGILGGQALIENVEGIWEELTDNVNAMALNLTTQVRNIANVTTAVAKGDLSKKVTADCKGEILDLKLTINQMVDRLQNFALAVTTLSREVGTLGILGGQANVQDVEGAWKQVTENVNLMATNLTNQVRSIATVTTAVAHGDLSQKIDVHAQGEILQLKNTINKMVDSLQLFASEVSKVAQDVGINGKLGIQAQVSDVDGLWKEITSNVNTMASNLTSQVRAFAQITAAATDGDFTRFITVEASGEMDALKTKINQMVFNLRESLQRNTAAREAAELANSAKSEFLANMSHEIRTPLNGIIGMTQLSLDTELTQYQREMLSIVHNLANSLLTIIDDILDISKIEANRMTVEQIDFSLRGTVFGALKTLAVKAIEKNLDLTYQCDSSFPDNLIGDSFRLRQVILNLAGNAIKFTKEGKVSVSVKKSDKMVLDSKLLLEVCVSDTGIGIEKDKLGLIFDTFCQADGSTTRKFGGTGLGLSISKQLIHLMGGEIWVTSEYGSGSNFYFTVCVSPSNIRYTRQTEQLLPFSSHYVLFVSTEHTQEELDVLRDGIIELGLIPIIVRNIEDATLTEPVKYDIIMIDSIEIAKKLRLLSEVKYIPLVLVHHSIPQLNMRVCIDLGISSYANTPCSITDLASAIIPALESRSISQNSDESVRYKILLAEDNLVNQKLAVRILEKQGHSVEVVENGLEAYEAIKRNKYDVVLMDVQMPVMGGFEATEKIRQWEKKSNPIDSLTFRTPIIALTAHAMLGDREKSLAKGMDDYVSKPLKPKLLMQTINKCIHNINQLKELSRNSRGSDFAKKMTRNTPGSTTRQGSDEGSVEDMIGDTPRQGTVEGGGTSSRPVQRRSATEGSITTISEQIDR

SEQ ID NO: 11026 - protein, 939 aa, Saccharomyces cerevisiae
MSNDPSAVSELPDKDSLDSGISNDNERAMGGNGDGGDGLRLPRTTGTLNVNALQKGTNAAHEAGGYKSMDPAKNAETTNDDDNNVVSLDDPIQFTRVSSSSVISGMSSSMSPHSNIDETKSLEAVTPNINTSNMTPDHSADNTFSTINASESDHQFNDTLLSKLSLTDSTETIENNATVKHQQPVASSTVNSNKSSTDIRRATPVSTPVISKPSMTTTPRQINSASHSLSNPKHKQHKPKVKPSKPEAKSKPVSVKKSFPSKNPLKNSSPSKKQTEKSYYSSSSKKRKSGSNSGTLRMKDVFTSFVQNIKRNSQDDKRASSSSNNSSSSSITTALRISTPYNAKHIHHVGVDSKTGEYTGLPEEWEKLLTSSGISKREQQQNMQAVMDIVKFYQDVTETNGEDKMFKTFNTTTGLPGSPQVSTPPANSFNKFPPSTSDSHNYGSRTGTPMSNHVMSPTLNTDSSSANGKFIPSRPAPKPPSSASASAPIIKSPVMNSAANVSPLKQTHAPTTPNRTSPNRSSISRNATLKKEEQPLPPIPPTKSKTSPIISTAHTPQQVAQSPKAPAQETVTTPTSKPAQARSLSKELNEKKREERERRKKQLYAKLNEICSDGDPSTKYANLVKIGQGASGGVYTAYEIGTNVSVAIKQMNLEKQPKKELIINEILVMKGSKHPNIVNFIDSYVLKGDLWVIMEYMEGGSLTDVVTHCILTEGQIGAVCRETLSGLEFLHSKGVLHRDIKSDNILLSMEGDIKLTDFGFCAQINELNLKRTTMVGTPYWMAPEVVSRKEYGPKVDIWSLGIMIIEMIEGEPPYLNETPLRALYLIATNGTPKLKEPENLSSSLKKFLDWCLCVEPEDRASATELLHDEYITEIAEANSSLAPLVKLARLKKVAENMDADEDNDDDNDNEHINKTNNCDDNNDSKETVNLDVTEDDKQK

SEQ ID NO: 11027 - protein, 275 aa, Synechococcus sp. CC9605
MQVSDFLAAAVQLTSGQDPELNFNAAEEQIDLAARRGAELIGLPENFAFMGEDTRRLELAPTLAEQTSRFLVTMARRYQVALLGGGFPVPVGDGSRTLNRAELVDRDGMLLGCYDKIHLFDVDLPDGNTYRESATVNPGRDLPPVVEIPGLCKVGLSICYDVRFPELYRHLVGAGADLLMIPAAFTAFTGKDHWQVLLQARAIENTAYVLAPAQTGVHHGRRQSHGHALVIDPWGTVLADAGVQAGAAIAPVNTSHLGHVRGQMPSLRHRQPALF

SEQ ID NO: 11028 - protein, 445 aa, Saccharomyces cerevisiae
MNSAANVSPLKQTHAPTTPNRTSPNRSSISRNATLKKEEQPLPPIPPTKSKTSPIISTAHTPQQVAQSPKAPAQETVTTPTSKPAQARSLSKELNEKKREERERRKKQLYAKLNEICSDGDPSTKYANLVKIGQGASGGVYTAYEIGTNVSVAIKQMNLEKQPKKELIINEILVMKGSKHPNIVNFIDSYVLKGDLWVIMEYMEGGSLTDVVTHCILTEGQIGAVCRETLSGLEFLHSKGVLHRDIKSDNILLSMEGDIKLTDFGFCAQINELNLKRTTMVGTPYWMAPEVVSRKEYGPKVDIWSLGIMIIEMIEGEPPYLNETPLRALYLIATNGTPKLKEPENLSSSLKKFLDWCLCVEPEDRASATELLHDEYITEIAEANSSLAPLVKLARLKKVAENMDADEDNDDDNDNEHINKTNNCDDNNDSKETVNLDVTEDDKQK

SEQ ID NO: 11029 - protein, 743 aa, Bradyrhizobium japonicum USDA 110
MAMGRTFRIKVRMRRFRRQHPRIAFAIRSFMIFSATFGGAYGFVSGSRSENSGYDPHTFAIGASFLFALACLGLATLSMRLRFVNKRLRKLAAHNEALIDRNWELKEAEERARSLFEQQGDLIVLRDHQNRITFANDAYCALAGQARGALVGTRFDFDVLEQGDSARESSGTRVHDQKIATPLGARWIAWREGYVRLDAGQPAELQSVGRDVTDRTETERALSDARDQADAANRAKSRFLAMASHEIRTPLNGIIGMGGLLLDTTLTPEQATYAKAVKTSGEALMALIEELLDYSKIEAGKLDLEQRPFALSTLIEEITELLAPRAQAKTLEIAAYVDERLPLEVVGDAARLRQVLLNLAGNAIKFTASGGVALIVEPGIRPNEISFLVRDTGIGIAAEAQQRIFREFEQADERVARTYGGTGLGLAISERIVKRMGGRITLASEPGKGSTFEVAVPLAPSEARAGQTAFPSPDLTGKSILLIAEGIEASLIARRLERWGSQTCLVTDATVAEALLPERSWHAVLVDRAIGPAIADRLGGVARAHAPQRLVLLTSSSRHEKQSAAFTGFLVKPLRAASLAARLALTPEVASPELAPEPPVEATSAAPARGLSVLVAEDNEINALLMRSLLTKLGHRVVIAVHGEAALESWLAASSAGTPYDLVLMDIQMPQLDGIEATKRIRAHEAATGGHHTPILALTANTLVEDRYACFEAGMNGFLIKPLDRDKLDEALAGLAASRQLAG

SEQ ID NO: 11030 - protein, 468 aa, Pseudomonas aeruginosa PAO1
MNDPQGFEAISRREQGLQRRLSAAQMSMIAIGGAIGTGLFMGSAFAIGFAGPSVLLSYAIGALITLLLMGCLAEMTVAHATPGSFGAFAEHYVGPLAGFLVRYAYWAAIVLAVGTEVTAVAMYMKYWFAGIPEWVWIISFSTLLIGLNASSVKAFGNFEYCFSTLKIAAIVAFILLGAYLVFGSANPAYGVHNYSAHGGFFPHGLKGMWIAVVVSIFSYLSVEMIAVAAAEAEHPEQAVRSAFRSTIVRLVVFYLLTLALMLAIVPWDQAGQSQSPFVTVMQAIGLPGATGVMNFVVLVAALSAMNSQLYITTRMMFSLSRAGHAPKGLGELSRQGVPLNALLLSSVGIALATLLNLVYPEQSFTLMMAVSMFGALFTWLMIFFTHLCFRRHRARHGGAPLAFRMRLAPWSTLLGLALMAAILVTTFFTEAFRMTLVFGVPFLALLSALYLVFVRKPGRDCPIERATP

SEQ ID NO: 11031 - protein, 805 aa, Nostoc punctiforme PCC 73102
MYELVQAVFNGDEKTALHQLIYTLSASGKRYLLRNEILQAFADYCHESQKPAYFYHSSSIGKLIQYTHEIIIEEESTWFVIRPKIANQEVWRLTANLDSFEQMTQQALLDVRDRLVNRYQPGILEIDLHPFYEDSPRIDDPRNIGQGLAYLNRYLCNQLLTDPEYWVEMLFQALQGLQHDGIRLLLSDRIPSGIHLAKQIKLALKLVNERSPHEPYEKFSLDLQELGFEPGWGNTAARVSETLELLDRLIYSPEPGILEAFVARVPAVFRVVLISIHGWVGQEDVVGRDETLSQVIYVLEQARSLENELREQIKLAGLDQLGIKPHVIILTRLIPNCEGTFCYLPLEKVQDTENAWILRVPFGEFNPEITNNWISKFEIWPYLEQFAIDAEKELLTQFKGKPNLLVGNYSDGNLVASLLSRRMKVTQCNIAHSLEKPKYLFSNLYWQDLENQYHFSAQFTADLISMNAADFIITSSYQEIVGTPDTIGQYESYKCFTMPQLYHVVDGIDLFSPKFNLVPPGVNESIFFPYSQKENRDSNLCTEIHNLLFSREDPQILGHLDRPNKRPIFSVSSISSIKNLAGLAECFGQSQRLQEHCNLILLSSKLHPDEATNPEEAEEIQKLHNIIDRYHLHSKIRWLGMRIPSSSLGEAYRVVADCQGISVHFARFESFGRSILEAMISGLPTFATQFGGSLEIIENQEEEFNVNPTDLVETAKKILDFFEKCNTHPEHWQEVSEWMSQRVHNRYNWHLYSNQLLLLAKMFTFWNFVAPENNEARDRYMETLFHLIYKPRAEKILEKHMGANS

SEQ ID NO: 11032 - protein, 351 aa, Yarrowia lipolytica CLIB122
MLRIRPQFARQSLARLYSTQRQKILFLDNVVDAKDEFEKLKKKADVVTLKDGTDRESFLKDLKNTYKDINAIFRTFISVKKTGRFDEELAKALPESCKAVCHYGAGYDQIDVPFFSERGIQVSNVQSMADESTALTNLYLMIGTLRNFGDGALNLQKGQWLKGVALGNDISGKTLGILGMGGIGREIRDYVAPLGFSKVLYYNRNRLAPELEKDSVYCQSPEDLFSKADVISINVPLNAATKHLVNAESISKMKDGVIIVNTARGPVCDEKALVDGLNSGKIGGVGLDVFEREPAIEEGLLKHPRTLLLPHMGTWSHETHFKMEKAVLDNLESFVDTGKVISIVPEQKGKF

SEQ ID NO: 11033 - protein, 344 aa, Cryptococcus neoformans var. neoformans JEC21
MTVTVAPRRKILGIGYPRFAIPEWKELAEKYDIHYFIPDERKQVMREIKRLCDEQGPFDAAYVLFGTAAYSPFHPDLLGPLFEKPGYCGLFAQGGAGYDDVDYPWLAANGCYLSNTPNAVTEATADMGILLVLAAVRGLYEAEVSVRAGQWRKGIELTDDPTEMTIGFIGLGAIGKSMAKKTKPWNMKILYHNRKPLPKEEEETLGATFVSLDELLAQSDVISLNCPLTPETRGILSDKEFEKMKDGVYIVNTARGAVIDEPALIRALKSGKVRRAGLDVLTNEPCADSPLYSMKNVTLQPHLGAFTKGTMLRGEREVFANVKQYMEIGLPVNPVNTPAKVEKK

SEQ ID NO: 11034 - protein, 221 aa, Sulfolobus acidocaldarius
MKKVLADKESLIEALKLALSTEYNVKRNFTQSVEIILTFKGIDMKKGDLKLREIVPLPKQPSKAKRVLVVPSFEQLEYAKKASPNVVITREELQKLQGQKRPVKKLARQNEWFLINQESMALAGRILGPALGPRGKFPTPLPNTADISEYINRFKRSVLVKTKDQPQVQVFIGTEDMKPEDLAENAIAVLNAIENKAKVETNLRNIYVKTTMGKAVKVKRA

SEQ ID NO: 11035 - protein, 449 aa, Clostridium symbiosum
SKYVDRVIAEVEKKYADEPEFVQTVEEVLSSLGPVVDAHPEYEEVALLERMVIPERVIEFRVPWEDDNGKVHVNTGYRVQFNGAIGPYLGGLRFAPSVNLSIMKFLGFEQAFKDSLTTLPMGGAKGGSDFDPNGKSDREVMRFCQAFMTELYRHIGPDIDVPAGDLGVGARELGYMYGQYRKIVGGFYNGVLTGKARSFGGSLVRPEATGYGSVYYVEAVMKHENDTLVGKTVALAGFGNVAWGAAKKLAELGAKAVTLSGPDGYIYDPEGITTEEKINYMLEMRASGRNKVQDYADKFGVQFFPGEKPWGQKVDIIMPCATQNDVDLEQAKKIVANNVKYYIEVANMPTTNEALRFLMQQPNMVVAPSKAVNAGGVLVSGFEMSQNSERLSWTAEEVDSKLHQVMTDIHDGSAAAAERYGLGYNLVAGANIVGFQKIADAMMAQGIAW

SEQ ID NO: 11036 - protein, 349 aa, Cryptococcus neoformans var. neoformans JEC21
MVAKEMNALLYSEPRNFKITKVPVPEIGPEEILLKVDICGVCGTDQHIHEGEFIAKFPLVPGHEAVGRIVSMGDKVKGFDIGDRIAADVGETCGYCHYCRKGTDLFCENFAPAGVARDGGFADYIKYHFAKCYKIKNLTDEEATLLEPASCAIHGMDVLKMPFGARVLLIGAGPTGLILAQLMKMGGASHITIAANTGIKMEIARKVEAADEYIDLDRSNPGPQWAKLKEDNPYGFDVVAEATGVESLVNDAINYVTRGGTLLVYGVYEDKARLSGWSPTDIFVNEKRIIGSFSQTYCFPRAIDLLDSGKIKTTGMVTDVFPLSDYQGALDKMASRKALKIAIKPEHKD

SEQ ID NO: 11037 - protein, 610 aa, Pseudomonas aeruginosa PAO1
MCGITGWTDWSRDLGEQRSILERMTRTLAPRGPDAEGLWLSRHALLGHRRLAIIDLENGAQPMLAEAGGRVALTYSGEVYNFRELRAELETLGQVFRTRSDTEVVLRAYLQWGEASFVRLRGIYGFALWDEREQSLWLVRDRFGVKPLYYYPTAGGVLFASEPKAIFANPEANPVLDASGIAELFALTTAPTPGHGLYKGLRQVRPGQALRFDRNGVRELVYWALRAERHEEGAEDSAERAGQLLREAVAEQLVADVPLGSLLSGGLDSSAISAFAVAALDGDARRLPTFSVDFPGEGRGFVPTPWQSSWDEPYAQLAANFLGTPHRTVLVAPEEVLEQDEAVLQARDLPGWGELDASLYLLFRQVREHTTVALSGESADEVFGGYPFFHDPSALAHDGFPWLAGKSGPWQLLRREVAERVAAPEYIRARYREALAEVPRLDGEDAAQRRQREVAYLALSRWLPAMLERKDRMSMAVGLEVRVPFCDHRLVEYVWNLPWALKSVAGESKSLLRRALRGHLPQAILERRKSGFPANPDPRYLALLRERVGRLLDDGRSPLFELVDAGRVRQALEQGTPLPSPRASASPTAGLAYLLNLDRWLTRHGVDISL

SEQ ID NO: 11038 - protein, 355 aa, Prochlorococcus marinus str. NATL2A
MALSYYAEELKKTASAIAQPGKGILAVDESTKTVGKRLASIGVENSEENRKAYRGMLFTTEGLGNFISGAILFEETLFQNHPDGEPMVKKLEKLGIIPGIKVDKGLRPLAGGHDVETFCSGLDGLVERAADYYEQGARFAKWRAVLQITDDGCPSKLSIRENAWGLARYARSVQESGLVPIIEPEILMDGSHSIEKTAAVQEEVIKEVYLACQVNGVLLEGTLLKPSMTVQGADSSTKADPQQVAEMTIRTMERCVPASVPGITFLSGGLSEEAASVYLNLMNKIDRKAKWNVSFSYGRALQHSCLKAWKGSNTADGQKALIARAQANSEASKGLYVAGSQPSSDEQLFVAGYKY

SEQ ID NO: 11039 - protein, 149 aa, Cryptococcus neoformans var. neoformans JEC21
MAEQLTKEQIAEFKEAFSLFDKDGDGTITTKELGTVMRSLGQNPTQAELEDMINEVDADGNNSIDFAEFMTLMARKMHDTDSEEEIREAFKVFDKNNDGHISAAELKHVMTNLGEKLTDAEISEMIREADKDGDGMIDYNEFVTMMIAK

SEQ ID NO: 11040 - protein, 366 aa, Prochlorococcus marinus str. NATL2A
MINTDHPIRIAIAGLGFGESVHIPASLSNKNIELVGLWHPRPERLKEACNKHNLRAYETWEDLVNDSKVDGIIIATPPAPRYELALEAIKGGKHLLLEKPTCLNAYEVMELQRNALKRNLKIAVDYEYRAVPLFMQAKRIITEKKLDEPYFVKLDWLMSSRANPDRPWNWYSDENSGGGVLGALGTHAFDMIHWLIGPTHSLSAINSTSIEERECPQSKTIKKVTSEDVSISQLQIKSINNNLIPAQVNLSAVTKQSRGFSLEIYGSNGTLVLSSENQNDYVHGFGLWYSNKGDVLKNIQPDSDLSFSKIWTDGRIAPVARIQNWWAQSIADGTPVIPGLVEGLASQIVCDKVKESNSIGMKIEIN

SEQ ID NO: 11041 - protein, 215 aa, Ranunculus bulbosus
ALRHEMSVLCDAEVGLIIFSARGKLYEFASAGGMSRTLERYHKNSFSNQDSNLAIDRETQSWYQEVSKLKAKYESLQRSQRHLLGEDLGPLNVKELQNLEKQLEGALAQARSRKTQIMLEQMEALRRKERELGDMNKQLKNKYQLEAEGQGSLRAMQGSWESNALNNYSGHPSHSSSMDCEPTLQIGYHQYVSADGGPIQRNNAGENNFIQGWEL

SEQ ID NO: 11042 - protein, 970 aa, Zea mays
MASTKAPGPGEKHHSIDAQLRQLVPGKVSEDDKLIEYDALLVDRFLNILQDLHGPSLREFVQECYEVSADYEGKGDTTKLGELGAKLTGLAPADAILVASSILHMLNLANLAEEVQIAHRRRNSKLKKGGFADEGSATTESDIEETLKRLVSEVGKSPEEVFEALKNQTVDLVFTAHPTQSARRSLLQKNARIRNCLTQLNAKDITDDDKQELDEALQREIQAAFRTDEIRRAQPTPQDEMRYGMSYIHETVWKGVPKFLRRVDTALKNIGINERLPYNVSLIRFSSWMGGDRDGNPRVTPEVTRDVCLLARMMAANLYIDQIEELMFELSMWRCNDELRVRAEELHSSSGSKVTKYYIEFWKQIPPNEPYRVILGHVRDKLYNTRERARHLLASGVSEISAESSFTSIEEFLEPLELCYKSLCDCGDKAIADGSLLDLLRQVFTFGLSLVKLDIRQESERHTDVIDAITTHLGIGSYREWSEDKRQEWLLSELRGKRPLLPPDLPQTEEIADVIGAFHVLAELPPDSFGPYIISMATAPSDVLAVELLQRECGVRQPLPVVPLFERLADLQSAPASVERLFSVDWYMDRIKGKQQVMVGYSDSGKDAGRLSAAWQLYRAQEEMAQVAKRYGVKLTLFHGRGGTVGRGGGPTHLAILSQPPDTINGSIRVTVQGEVIEFCFGEEHLCFQTLQRFTAATLEHGMHPPVSPKPEWRKLMDEMAVVATEEYRSVVVKEARFVEYFRSATPETEYGRMNIGSRPAKRRPGGGITTLRAIPWIFSWTQTRFHLPVWLGVGAAFKFAIDKDVRNFQVLKEMYNEWPFFRVTLDLLEMVFAKGDPGIAGLYDELLVAEELKPFGKQLRDKYVETQQLLLQIAGHKDILEGDPFLKQGLVLRNPYITTLNVFQAYTLKRIRDPNFKVTPQPPLSKEFADENKPAGLVKLNPASEYPPGLEDTLILTMKGIAAGMQNTG

SEQ ID NO: 11043 - protein, 444 aa, Glycine max
TDTIIITHIIRISSYTEGSAIDSFCVFDFDQSVGYRIEDCVALRGNSVFDSLKVSSQTISRGPVEVDSFDKLPTSLNKNPLTSQTERQRLQLQKVQLSNLVSGDTEHQEESAMADASPRTDISTDVDTDDKNPRFDRSQSLVAVVSDSSDRSKDKSDQKTLRRLAQNREAARKSRLRKKAYVQQLESSRLKLTQLEQELQRARQQGIFISNSGDQAHSMSGNGAMAFDVEYARWLEEQNRQINELRAAVNSHAGDTELRMIIDGIMAHYDEIFRLKADAAKADVFHLLSGMWKTPAERCFLWLGGFRSSELLKLLVNQLEPLTEQQLMGITNLQQSSQQAEDALSQGMEALQQSLSETLSTGSLGSSGSSGNVANYMGQMAMAMGKLGTLEGFIKQADNLRQQTLHQIHRILTTRQSARALLAIHDYFSRLRALSSLWLARPRD

SEQ ID NO: 11044 - protein, 619 aa, Glycine max
MEQYEILEQIGKGAFGSALLVRHKHEKKKYVLKKIRLARQTERSRRSAHLEMELISKLRNPFIVEYKDSWVEKGCYVCIIIGYCEGGDMAEAIKKANGVLFPEEKLCKWLVQLLMALDYLHMNHILHRDVKCSNIFLTKDHDIRLGDFGLAKMLTSDDLASSVVGTPSYMCPELLADIPYGSKSDIWSLGCCIYEMTSLKPAFKAFDIQALINKINKSIVAPLPTKYSSSFRGLVKSMLRKNPELRPRASELLGHPHLQPYVLKVHLKINSPRRSTLPVHWPESNYMKKTRFLVPEDDPVSIYRDKRHSFTNDRTLNPSVSGADQDSVCSTLEIDCTPDHLNQRLAELRIGDSHQVKSIQKPVVSRTSSIVKTPKFASSKVSATNKKSMKSSKNCKTLPLSQNTTKSANTNRRASFPLPTRGGNRQPPCRSVSLLSHVSSPDISVNSPRIDKMAEFPLTSYEDSLFPINKTSSSARGSSGFPSHSNHSTVIDKCTVEVYGRASNKPGSMDAWQGIKQSVLKEIDEDKSGSSDQNATAGASSHTSSDLRRRQFDPSSFQQRAEALEGLLEFSARLLQQARYDELGVLLKPFGPGKVSPRETAIWLSKSFKENTFNPEESM

SEQ ID NO: 11045 - protein, 565 aa, Candida glabrata CBS138
MSSPFRAAAEQVLAKFLSPHSNETTTVDSELVDVFNKVNTFMSTNQSQLNKVFDRWVDRTTFSFTQLISTHPSLYACVGMLAFALTVVTLGSFTSIKSIPHTALPPTKYDPLFDPTDFDLDTESIIVHKNETDAQKKKDGHKLANYDKIDVRHSLLIPLSCGAVLMTLYFFIKRLQVRWLSIIVKGLTYQSILSHTFAATFVYNYLIQSFIRNLSYLFKFNPLKILPRCRLTVSDDNVEIHQTGAVSNLCYKNQISGKIQEAKRVEKIKKTSWESHMYRRELKAPSSVKSDSQILNVYMSDATIYSFIFACIISALYFWFPRNWMLTNIVSLNLSVWTISQLNLKNLKSGTMILLVLFFYDIYFVFYNDVMVTVATQLELPFKLSIPVKFNPASKKFDFSFLGLGDMIIPGMFIAMCYKFDIWKWHLKNVDREFHLLNWGYIGTYFKVALISYALSMVTCMLCLNIFNVAQPALLYIVPFLLISISVVAKFNNDFKDMWNLQFDVIEIDDEKLSSGRLEKEDQLTYSELLESDYIEDSDTDVNSDFTPESDDDLSLSDDDDEAED

SEQ ID NO: 11046 - protein, 232 aa, Syringa vulgaris
  misc_feature (231)..(231): Xaa can be any naturally occurring amino acid
  unsure (1)..(232): unsure at all Xaa locations
RMENKINRQVTFAKRRNGLLKKAYELSVLCDAEVALIIFSNRGKLYEFCSSSSMLRTLERYEKCNYGAPEPHVSSREALELSSQQEYLKLKARYEALQRSQRNLLGEDLGPLNSKELESLERQLDMSLKQIRSTRTQAMLDTLTDLQRKEHALNEANQSLKQRLMEGNHISLQWNQDPEEVGYGREPTQHQPHGFFHPLECEPTLQIGYQNDPMAAAGPSLNNFMSGWLPXI

SEQ ID NO: 11047 - protein, 701 aa, Kluyveromyces lactis NRRL Y-1140
MVVQYSVPVGPAANEHETAPRRNALAKKAPITRPAGMKCSTVYEFAVECFEKNADLKSVGWRDIIDIHREKKMVTKKIDGKDKEVEKEWFFYELSSYKYTTYKELNELVHDYGRGLVKLGLQPASEDKLHIFASTSHRWMKTFLATQSQAIPVVTAYDTLGEKGLIHSMVQTASKGMFVDNALLCRLHNAVQEATNLKYLIISEELNPEDKRDEGKLYKDAADALAKIKEVRPDIKILSMDEVIELGKKARDEIEPHPPAPEDLSAIMYTSGSTGDPKGVILKHSNIVAGLGGISSIISNRPEHVCHTDRVIAFLPLAHIFELAFELITFYWGATLGYANVKTLTDASVRNCQGDIKEFQPTIMVGVAAVWESVRKGILAQINKLPALTQKVFWTGYYAKLKMKKFHIPGGDTLGNILFKKVREATGGHLRFVLNGGSPLSREAQEFITNLICPMLIGYGLTETMANTTILQPEHFEYGVAGDIVGSITVKLVDVEELGYFAKNSQGEVWIKGEPVTREYYKNEEETKGSITDDGWFKTGDIAEWTPKGQLKIIDRKKNLVKTQNGEYIALEKLESVYRSCPFVQNICVYADQTKVKPVGIIVPNEAAITEKAIKMDLLKKGEDVTHLYHNDTLKHEILQEMWKVGKSQGLSGIELLQGIVIFEEEWTPQNGFVTSAQKLQRKKILAAVQDDVDEVYSKSN

SEQ ID NO: 11048 - protein, 1489 aa, Candida glabrata CBS138
MSVLIPHQQQRLRASSAAKKAAWNAMNKTVNIVSPHNNVNYVKKPSPKTNSNHLDRVIKSVNDATKRLSEAESINSNNTKSSKRKSRDTVGPWKLGKTLGKGSSGRVRLAKNIENGTLAAIKIVPKRTYNRRMRDQKMKTAGGVSSGTDSKDSSNREDPIKNGTDSALNPYGIEREIVIMKLISHPNVMGLLEVWENKSELYLVLEYVDGGELFDYLVSKGKLSEPEAVHYFTQIIQGVSYCHSFNICHRDLKPENLLLDKKNKVIKIADFGMAALELPNKLLETSCGSPHYASPEIVMGKPYHGGPSDVWSCGIILFALLTGHLPFNDDNIKKLLLKVQAGRFQLPPYLTNDAKDLITRILVTNPEKRLTINEILNHPLIKKYRNPPAHIRKLNLLGRGKSNSDLHVLEYNTPATVCLNSEEDIDQSILKSLQILWHGTPRQRLVERLLVEGATEEKLFYSLLFQYKLKHSKPISATKLQKKIEDVVLENESTKTESKDSSNEPGIDNNNDTSDFTQDGNSSEMVNELHTSAPMLEQKSQFSQHSLKSKETVPISDLPPLPPVIPTFAASSSKAFRRSKSNLSSYLKRPKLENARSRTSLFNSSSNTSITSSSISELNTRPRGNIPLSPSNITLTSLVSSRSLHNSASKKSLKNLQKRTLQNSESKRSLYSQTSISKRSLNLNDYLIGGPSNSAELPPLPKLDSNNEFEMLCDKILNTSALDNILEEEEEDITPSKNTTQTNDVHNEDTIIRKEMHDFEINVNNHQPEFKRQPSDFSVNGPDTSIFSIEPMPEGLGISKKPVRVQPTFNFIIDEDKVDDSIKVKQVSGTGPSNNVLKDISNQINNGKGIENSKLHPTSNNNYKNIRNVTAPEGNFTSKTFSLDPRRNVSQPPKESLFHSLLNNKSSKNAEENTQFESKSKQYNFMNKTAHSEFEKERLNAHRDADRSNDQNVYNETSVLAQSSTIHESPLLSIPSTLLNTSMTFKNLVDMLQENKLDDINETVAKESSAPLRKKSTKLSLAPHSNLVSDLNKRTSGYNTLASVDRSSSDLSYAIDLPTNTNIAEIVYLSGNNKQSSEKNIFMLSNDNNETELFHTDENKTSIKSAVNIFEDPPSDSTSLQTSSSESDSIPKVQRKAVSIETLNASNIITPAADVRVSLYGNNVSNSNTMPRETTEELISRFKLTPEKPQHQVQKRFSSLTQTGRNTDSIALSQSMISMFKDAEENGNNKSVKVLDQVEEENASKLTPTSPKNRVTMLFDDYEAQQNITSDQSNKSSKVIEIPNDSPIKVKVQKASTIFEKEIISAAEADENDHLRIPYESKSKKEIAQVHQQEQKEQQVRKPTESQEKAVQKTTKPSWFSKLIHGFKTTGGSGHTKLIREHSTKMTFEEVHMITVKEFGNNGIDYQLRTLDKKGDREKVEYDCKFVKGNFEFKIKIFNSGFPHQNTIITVKKKGKINSKETTDLFQRFNANIENLIKSAERNIESNPK

SEQ ID NO: 11049 - protein, 524 aa, Gentiana triflora
MEMNPSPFIVHTAVFGLFVVFIFIFLKLVSRKKGHGRSLPLPPGPRPWPILGNIPHLGSKPHQTLAEMAKTYGPLMHLKFGLKDAVVASSASVAEQFLKKHDVNFSNRPPNSGAKHIAYNYQDLVFAPYGPRWRLLRKICSVHLFSSKALDDFQHVRHEEICILIRAIASGGHAPVNLGKLLGVCTTNALARVMLGRRVFEGDGGENPHADEFKSMVVEIMVLAGAFNLGDFIPVLDWFDLQGIAGKMKKLHARFDKFLNGILEDRKSNGSNGAEQYVDLLSVLISLQDSNIDGGDEGTKLTDTEIKALLLNLFIAGTDTSSSTVEWAMAELIRNPKLLVQAQEELDRVVGPNRFVTESDLPQLTFLQAVIKETFRLHPSTPLSLPRMAAEDCEINGYYVSEGSTLLVNVWAIARDPNAWANPLDFNPTRFLAGGEKPNVDVKGNDFEVIPFGAGRRICAGMSLGIRMVQLVTASLVHSFDWALLDGLKPEKLDMEEGYGLTLQRASPLIVHPKPRLSAQVYCM

SEQ ID NO: 11050 - protein, 207 aa, Syringa vulgaris
ALVQLRRMENKINRQVTFAKRRNGLLKKAYELSVLCDAEVALIIFSNRGKLYEFCSTSNMLKTLERYQKCSYGSLEVNNSTRDLEESSNREYLKLKSKYESLQRHQRHLLGDELGPLNINDLEHLEHQLETSLKHIRSTRTQVMVDQLSDLQAKEKMMVETNTALERKLEEIYAANQLQQSWAGGEQSCAYSQQHLNLRTFFNLWMQ

SEQ ID NO: 11051 - protein, 430 aa, Bacillus halodurans C-125
MTILKEPQRTQVDEIKEITELSLLQSTQSVIKEALDLLGYSEATYELLKEPIRMLTVRIPVRMDDGNVNIFTGYRAQHNDAVGPTKGGVRFHPDVNENEVKALSLWMSLKCGIADLPYGGGKGGIICDPRTMSFGELERLSRGYVRAISQIVGPTKDIPAPDVFTNSQVMAWMMDEYSRIREFDSPGFITGKPIVLGGSLGRESATAKGVIICIEEAAKRNQLDLKGARVIIQGFGNAGSFLAKFLHDAGALIVGISDAYGALYDQAGLDIEYLLDKRDSFGTVTNLFKKTISNQELLISDCDILVPAAISNQITKENAHDIKAKVVVEAANGPTTLEATRILTERGIFLVPDVLASSGGVTVSYFEWVQNNQGYYWNEEEIDQKFRNMIVGSFEKVCTFSNQHQVDMRLAAYTVGVKRMAEASHFRGWV

SEQ ID NO: 11052 - protein, 393 aa, Sinorhizobium meliloti
MTKARKALENYRRVVIKIGSALLVDRRTGLKKSWLDALCADIAALRAKGVEVLVVSSGAIALGRTVLDLPAGALKLEESQAAAAVGQIVLARAWSESLSTHAIVAGQILLTLGDTEERRRYLNARATIGQLLKLGSVPIINENDTVATTEIRYGDNDRLAARVATMVGADLLVLLSDIDGLYTAPPHLDPNARFLETVAEITPEIEAMAGGAASELSRGGMRTKIDAGKIATTAGCAMIIASGKPDHPLAAIEAGARSSWFAPSGSPVTARKTWIAGQLLPAGSLSIDAGAETALRSGKSLLPAGVRQVTGSFSRGDTIAIIGASGREIARGLAGYDADEARQIAGKKSAEIAAILGYAGRTAMVHRDDLVMTAPSGARLVEESDEGKGKLHA

SEQ ID NO: 11053 - protein, 427 aa, Sinorhizobium meliloti [sequence omitted]

SEQ ID NO: 11054 - protein, 348 aa, Brassica napus
  misc_feature (218)..(218): Xaa can be any naturally occurring amino acid
  misc_feature (239)..(239): Xaa can be any naturally occurring amino acid
  misc_feature (255)..(255): Xaa can be any naturally occurring amino acid
  unsure (1)..(348): unsure at all Xaa locations
MKTNDFSSSSSSSPSDRRIGALLRHLTAGTDADRVSSVFASPTSGGAGGSVFAHLVQAPEDAILGVTIAYNKDPSPIKLNLGVGAYRTEEGKPLVLNVVRKAEQQLINDRSRIKEYLPIVGLVEFNKLSAKLILGADSPAIRENRVTTVECLSGTGSLRVGGEFLARHYHQKTLYLPQPPWGNHPKIFTLAGLSVKTYRYYDPSTRGLNFQGLLEELXGAAPQGSIVLLHACAHNPTGXVDPNPGQWEQIRKLMXRSKGLMPFFDSAYQGFASGSLDTDAKPIRMFVADGGELLVAQSYAKNMGLYGERVGALSIVCKAADVAGRVESQLKLVIRPMYSNPPIHGASI

SEQ ID NO: 11055 - protein, 264 aa, Arabidopsis thaliana
  misc_feature (127)..(127): Xaa can be any naturally occurring amino acid
  unsure (1)..(264): unsure at all Xaa locations
MIVYFPSELTVWQKLEEENREFFKAYYLRLMVKHQIMEYDELLEQQINHMRQMHPTAGASVRDRNGSHVPPMNQQQLLYERKEPDQSSPNLSSPYLNGGSAINTNIPSYVDFSSHSRRVDPSPNSLXLQATNMPLMQGMIKSETAYQNCAPYMYGGEAQSTVGDVTIASFSNDSSNQSLNDPLVDPDAPTFGSLGQIPQNFSLSDLTADFSQSSDILESYEGSPFLLADAENFLDSSERVEHQGDHERLRTISSGFSYENFRSN

SEQ ID NO: 11056 - protein, 293 aa, Triticum aestivum
  misc_feature (270)..(270): Xaa can be any naturally occurring amino acid
  unsure (1)..(293): unsure at all Xaa locations
LLYPQNPGTPTRKVKAGIVPATCFSLVRARVAPRWAQVCLPDRPAELYVGPVRGNWARPPPPNPPYTEDMPRLDHPNFYYDLEDVLFHHVSGRDGAVTWSVHRPTVIFGFSPRSAMNVMGSLCVYAAICRKEGTTLRWPGCKVAWEGFTDASDADLVAEHEIWAAVDPFAKNEAFNCSNGDVFKWKQLWPMLAERFGVEWAGYEGEDSRFSLADAMAGKEAVWTEILQENELVTTELEEITSWWFVDAMFSIDIEHLDNMNKSKEHGFLXGFRNTVNSFNAWIDKMKASKVVP

SEQ ID NO: 11057 - protein, 460 aa, Rhodobacter sphaeroides 2.4.1
MMEGLAQANDLSEVIEADRAHMWHHLSQHKQYETVDPRIIVEGKGMRVWDAAGKEHLDAVSGGVWTVNVGYGRESIANAVRDQLIKMNYFAHSAGSIPASRFSKRLIEKMPGLSRVYYSNSGSEANEKVFKMVRQISHRHHGGKKGKILFRERDYHGTTITALATSGQPQRAEQYGPLTPGFVMVPHCLEYRKQWDVENYGERAADAIEEVILREGPDTIGALCLEPVTAGGGVIVPPAGYWERVQEICRKYDILLHIDEVVCGLGRTGTWFGYQNFGVKPDFVTMAKGVASGYAAISCTVTTEAVFDMFKDDPSDPMSYFRDISTFGGCTAGPVAALENMRIIEDEGLLENTLKMGARVVENLSALQEKHAVIGDVRGKGLFCGAELVADRATKEPMDEKRVAAVVADVMAQGVIIGMTNRSLPGFNNTLCLSPALIATPDDIDQITDAIDRALTRVFG

SEQ ID NO: 11058 - protein, 673 aa, Arabidopsis thaliana
MMNPSHGRGLGSAGGSSSGRNQGGGGETVVEMFPSGLRVLVVDDDPTCLMILERMLRTCLYEVTKCNRAEMALSLLRKNKHGFDIVISDVHMPDMDVMSADDSKSVVLKGVTHGAVDYLIKPVRMEALKNIWQHVVRKRRSEWSVPEHSGSIEETGERQQQQHRGGGGGAAVSGGEDAVDDNSSSVNEGNNWRSSSRKRKDEEGEEQGDDKDEDASNLKKPRVVWSVELHQQFVAAVNQLGVEKAVPKKILELMNVPGLTRENVASHLQKYRIYLRRLGGVSQHQGNLNNSFMTGQDASFGPLSTLNGFDLQALAVTGQLPAQSLAQLQAAGLGRPAMVSKSGLPVSSIVDERSIFSFDNTKTRFGEGLGHHGQQPQQQPQMNLLHGVPTGLQQQLPMGNRMSIQQQIAAVRAGNSVQNNGMLMPLAGQQSLPRGPPPMLTSSQSSIRQPMLSNRISERSGFSGRNNIPESSRVLPTSYTNLTTQHSSSSMPYNNFQPELPVNSFPLASAPGISVPVRKATSYQEEVNSSEAGFTTPSYDMFTTRQNDWDLRNIGIAFDSHQDSESAAFSASEAYSSSSMSRHNTTVAATEHGRNHQQPPSGMVQHHQVYADGNGGSVRVKSERVATDTATMAFHEQYSNQEDLMSALLKQEGIAPVDGEFDFDAYSIDNIPV

SEQ ID NO: 11059 - protein, 325 aa, Oryza sativa
MARSALDEVTDAGAFDRSPSTFRSSISRDSSARFPAVPGRYHLYVSYACPWASRCLAYLKLKGLDHAIGFTSVKPIFERTRETDDHLGWVFPATGDEEPGADPDPFNGAKTIRELYEIASPNYIGKPTVPVLWDKQLKTVVNNESSEIIRMLNTEFNEIAKNPDLDLYPAHLQTSVNEINELVYDAINNGVYKCGFAKKQGPYDEAVTRLYEALDKCEEILSKQRYICGNQLTEADVRLFVTLIRFDEVYAVHFKCNKRLLREYPNLFNYTKDIYQIPGISSTVNMEHIRKHYYGSHPSINPYGIIPAGPNIDYNAPHDRERFSA

SEQ ID NO: 11060 - protein, 466 aa, Haemophilus influenzae Rd KW20
MKKTRFVLNSIALGLSVLSTSFVAHVAQATLPSFVSEQNSLAPMLEKVQPAVVTLSVEGKAKVDSRSPFLDDIPEEFKFFFGDRFAEQFGGRGESKRNFRGLGSGVIINASKGYVLTNNHVIDGADKITVQLQDGREFKAKLVGKDEQSDIALVQLEKPSNLTEIKFADSDKLRVGDFTVAIGNPFGLGQTVTSGIVSALGRSTGSDSGTYENYIQTDAAVNRGNSGGALVNLNGELIGINTAIISPSGGNAGIAFAIPSNQASNLVQQILEFGQVRRGLLGIKGGELNADLAKAFNVSAQQGAFVSEVLPKSAAEKAGLKAGDIITAMNGQKISSFAEIRAKIATTGAGKEISLTYLRDGKSHDVKMKLQADDSSQLSSKTELPALDGATLKDYDAKGVKGIEITKIQPNSLAAQRGLKSGDIIIGINRQMIENIRELNKVLETEPSAVALNILRGDSNFYLLVQ

SEQ ID NO: 11061 - protein, 438 aa, Solibacter usitatus Ellin6076
MLPGWKCQINWNFLQRKGKPLCEHPDCLSRYLYKTVQAWYREINRAQWRTLIAAQLGWMLDAMDVMLYSFALTAIRTEFHLTAAAAGALGAAPLVTSALGGMLFGWLSDRYGRSRALVWSILTFSAFTAFTATARTIPELIFWRSIVGIGLGGEWAAGAVLVAETWPERHRGKAIGLMQSAWAIGYLLAALLAGFMLPRFGWRPLFLAGIVPALITLWIRRNIPEPPKWQQPSHSLWGALGALFRAPLLRNVMLFTALCSSVLFGYWGMFTWLPAYLSMPVSQGGAGLSILRSSAWIIPLQIGAFFGYMSFGFYADRVGRRAAFLTFVLTTAVLVPVYGLFGRNAALLLALGPLVGFFGHGYFSALGAMAAELFPAAVRTTAQGFGYNAGRALSGLAPVTVGALADRHGIGAALAFTSIFFILGAGLMMLVPAETPPV

SEQ ID NO: 11062 - protein, 267 aa, Leifsonia aquatica
MTATSSPTTRFTDRVVLITGGGSGLGRATAVRLAAEGAKLSLVDVSSEGLEASKAAVLETAPDAEVLTTVADVSDEAQVEAYVTATTERFGRIDGFFNNAGIEGKQNPTESFTAAEFDKVVSINLRGVFLGLEKVLKIMREQGSGMVVNTASVGGIRGIGNQSGYAAAKHGVVGLTRNSAVEYGRYGIRINAIAPGAIWTPMVENSMKQLDPENPRKAAEEFIQVNPSKRYGEAPEIAAVVAFLLSDDASYVNATVVPIDGGQSAAY

SEQ ID NO: 11063 - protein, 239 aa, Methanococcus maripaludis S2
MSMIKKLIAECLGTGILVFFGPGAAAMTLMIANNTGTAGIGLLGGLGDWFAIGFSFAIAIAAVIYTMGRISGAHINPAVTIGLWAVKKFPTKDTVLYIIAQLIGAAIGSLLFFACIGIDSVTIGGLGATAPFAGISYFQAILAEFIGTFLLMFVIMGVAVDKRAPDGFAGLVIGLTVGAIITTTGNIAGASLNPARTFGPYLIDSIYGLNLWYYFPIYIIGPVLGAIVAAFTYEYLNRE

SEQ ID NO: 11064 - protein, 1236 aa, Cryptococcus neoformans var. neoformans B-3501A
MSASETQIPALPSSGGRPSHPSSSSSAASISNTSIPSVVEQQNGIPIPPTNIPEEAVSGTVTASTSDTPQASRNSQVPTEENTKSIGLQEPTVPEKNASVEEPSGVESSEVGGEDQEIEEGPKFIQPDHFSPLTNNPNGSRPARGIPNIGDGWLSPEDDPHALRGIPVFKPSMEEFLDFEGYARKTTAWGQYSGIVKVIPPAEWIESVPPITKSSLASVRVTDPIQQNLIGSSGLFRIANVVRNKRRPLTVEEWFKKCKDKKFSGPGPKDVGSTTNRDSKEAEERRQRVRDDMRKEKEKRREKRLAAEANRARKATGIEDIKEEEEVNGQAPSVLDRKDEASTEFVNNPQECQPASLEPDSRTKGIMVEKSINSWYESFDPKEDWLPENTRREDYSLEACVALERRFWKNMGLGEPSWYGADMEGSLFMDEKTPWNVAHLPNLLNRWDLRHLPGVNAPYLYFGMWGASFAWHVEDMDLFSINYIHFGAPKFWYAIPQQQAERFERILQGYFPEDARNCDQFLRHKSFAVSPYRLASDGMRVNMLVHNQGEFVITYPRGYHAGFNMGFNCAESVNFALDSWVELGRRAKACNCVNHSVRIDVDEMLAKDAVRFQGEEELLSAIAEERNKKRQHRRPSAGDNHTPRKRAKPDSQTPSGGLVSSHTPIVIEATDQSKPVKVPGKRTPKAVIDISSNQQRAKANSIKDPNSFPCLFCPGFARDDLLPVFDPSDAVKARWKPRHGEVMAHHSCALAIPGVGIEDREVPGGLGTFVVGVENVESARWKLKCLLCKDKKLQKTGAKIQCTKGKCPRAFHVSCARESDVANLKIWEVETPMLPREGEPPLPEGAEVPTMIDIKVELLCPQHNPEVKEKLEQRKAETFRDKVMSIPSGSKIKIKVRTGASLEYTLVEARETTQQVYVHDAQGVGGIFPWSSIDLRPAQGPLLENEYARTHLFANNRRHDQTNGAPSQDDPSEAQRHLTSQEFKQPAQSAHSRPLRMDEILNPSPKKSKKLNPGAGLPQRESMPEPASQFPTPIPPLQVSHRMSYDLGLHRQTHQSVPQQVFYPQPPSQEHQPLHSIPHPPISRRPHHPIPPSDTSQRVANHQAPHDSYYPRPASVPMLHRYHHQPLQPSYPPRYPTPPQTHYPSHPYPRHEPHIQPPAPSAHPMNNQATDASHFHGQMYEPYRRHSAPHPVYPTHFMSSVNSVTAEQTRVWDRKASAPNGAVHPSIPDGYRQGYY

SEQ ID NO: 11065 - protein, 287 aa, Zea mays
VAIARGARRPRPTMLARAPPPRPCSSGVCIARAHPRAAAVAARPGTTRTTTTVAAAAAEAASNGSAAAAVAGISSSSSALVTSTVGKSTNILWHECAIGQKERQGLLNQKGCVVWITGLSGSGETLACALSRELHGRGHLTYVLDGDNLRHGLNRDLSFGAEDRAENIRRVGEVAKLFADAGLVCIASLISPYRSDRSACRDLLPKHSFIEVFLDVPLQVCEARDPKGLYKLARAGKIKGFTGIDDPYEPPSDCEIVIQCKVGDCPSPESMAGHVVSYLETNGFLQD

SEQ ID NO: 11066 - protein, 275 aa, Erwinia carotovora subsp. atroseptica SCRI1043
MTQPKVKLADGNIMPQLGLGVWRASSEDTVIAVNEALSIGYRAIDTAAIYKNEEAVGQALSSANLPREEVFITTKLWNGDHTDPQKALEESLRKLRLDYIDLYLIHWPLPQQNTFVDAWRGLIKLQEQGLAKSIGVSNFHIHHLQRLKEETGVLPVIDQVELHPLLQQKQLHAWNATHHIQTESWSPLAQGGEGVFDHPIIRKLAMKYGKTPAQIVIRWHLDSGLVVIPKSVTPARIKENFEVFDFRLDKDELSEITKLDCGKRLGSDPDEPRND

SEQ ID NO: 11067 - protein, 470 aa, Rhodobacter sphaeroides 2.4.1
MSRLVVVSNRVPLPDENGNPPPGGLAVAVHAALRKNGGIWMGWSGRSTGEEEPQGLTTLEQDKISYVLTDLSQADLDEYYNGFANRVLWPIFHCRLDLAEYARQEMAGYFRVNRLFADRLVPMLEPDDVIWVHDYHLIPLAQELRKRGVRNRIGFFLHIPWPPADILTALPVYEIIMRGLAAYDLVGFQTDYDLDNFVGCLRREGWGDWSTPGWLRAFDKEVAAAAFPIGIETGDFARLAAKTDGLDLVTDMQQSLHGSSLIIGVDRLDYSKGIAARIDAFERYLMRNPDQAGKVTLLQVAPHSRSDVPEYLEMQGQVESHCGRVNGAHGTIEWVPIRYVNQSLTRPVLAGLYRLAKVGLVTPLRDGMNLVAKEYVASQDPADPGVLILSRFAGAARELDGAIFINPYDTEQTAGAIGRALSMPLDERIARWRRMMDHLESHDVLWWCRTFLAALNEAPEDNGALTRESD

SEQ ID NO: 11068 - protein, 442 aa, Chromobacterium violaceum ATCC 12472
MSARQLDVGDLINRQRFSARQWRILMLCFLIVLCDGFDTAAIGYIAPAVIRDWGVARTQLGPVMSAALWGLAAGALLAGPLADRIGRKRVLLGAVLLFGAMSVATSAAADLAALAWLRFATGLGLGAAMANAVTLTSEYSPEPRRAFIVSAMFCGFPLGAACGGLLASWLVPHAGWRSVLLLGGIAPLLLLPPMWLSLPESLRFLILRGREGEARRILRRLLPDAPLRDGDRLVLREAERMPGLRLVWSADYRTGTLLLALAYFMGLLIFYLLTSWLPILISDSGMDLRQAALLTALFPFGGLLGSTLTGWLMDRCDAHRVLALAYLLTGALVFCIGQALNNHGLLAAVICLAGIAMNGAQASMPSLAAGYYPTAGRASGVAWMMGMGRFGGIAGAMLGATLLKLQLGLPLFFALLSLPALLAAAALLLKRRSIAMARRAWA

SEQ ID NO: 11069 - protein, 246 aa, Griffithsia japonica
GTRNSSHLHPKHTLFIVMQIFVKTLTGKTITLEVESSDTIENVKTKIQDKEGIPPDQQRLIFAGKQLEDGRTLSDYNIQKESTLHLVLRLRGGMQIFVKTLTGKTITLEVESSDTIENVKTKIQDKEGIPPDQQRLIFAGKQLEDGRTLSDYNIQKESTLHLVLRLRGGMQIFVKTLTGKTITLEVESSDTIENVKTKIQDKEGIPPDQQRLIFAGKQLEDGRTLSDYNIQKESTLHLVLRLRGGQ

SEQ ID NO: 11070 - protein, 182 aa, Arabidopsis thaliana; identical to SEQ ID NO: 1365

SEQ ID NO: 11071 - protein, 309 aa, Yarrowia lipolytica CLIB122
MTSIDFTMNNGKTIPAIGLGTWKSTTEEVAGAVECALTEGGYRHIDTAFNYRNEDAVGLGIKRAMEKGVKREDIFVTTKIWVTYHDRVEENLNMSLERLGLDYVDMLLIHWPVPLNPNGNDPVYPLREDGSRDIDESGSQPKTWKQMEAVLKTGKTKSIGVSNFSIPYLEELLKEAEVVPAVNQVELHPLLPQLELMEFCKKNNIIMTAFSPFGSVGGPLLKNELVLKLADKYKTSPGGILTSYHIGNGTVVIPKSVTNSRIIENGKSAVTLSQEDLKALNDLHKTEGIHRTSKPKWGVDLGFPDFDFC

SEQ ID NO: 11072 - protein, 195 aa, Griffithsia japonica
ARGAPLFKPRLRPISSYLSTFYSSLPTHNSSHLHPKHTLFIVMQIFVKTLTGKTITLEVESSDTIENVKTKIQDKEGIPPDQQRLIFAGKQLEDGRTLSDYNIQKESTLHLVLRLRGGMQIFVKTLTGKTITLEVESSDTIENVKTKIQDKEGIPPDQQRLIFAGKQLEDGRTLSDYNIQKESTLHLVLRLRGGQ

SEQ ID NO: 11073 - protein, 561 aa, Triticum aestivum
  misc_feature (122)..(122): Xaa can be any naturally occurring amino acid
  misc_feature (178)..(178): Xaa can be any naturally occurring amino acid
  misc_feature (184)..(184): Xaa can be any naturally occurring amino acid
  unsure (1)..(561): unsure at all Xaa locations
MRRRGEEVSGTNTKRRCRLWTKLLTWRGGRIWRPQKRGVEKTLKEVTKRLAQIARDVFKRAYGWGPAFRPSSSFDTKTTTTNAGQPVWNDNEALTVGPRGPILLEDYHLLEKIAHFARERIXPERVVHARGASAKGFFECTHDVTGLTWRRLPPPRRGAAHAPSSSRFSTVIHERGSXPETIRXDPRGFAVKFYTREGNWDLLGNNFPVFFIRDGIKFPDVIHAFKPNPKSHVQEYWRVFDFLSHHPESLHTFFFLFDDVGIPTDYRHMDGFGVNTYTFVSRAGKAHYVKFHWRPTCGVSCLMDDEATLVGGKNHSHATQDLYDSIDAGNFPEWKLFVQVIDPDDEDRFDFDPLDDTKTWPEDLVPLQPVGRLVLDRNVDNFFNENEQLAFGPGLVVPGIYYSDDKMLQCRVFAYADTQRYRLGPNYLMLPVNAPKCGFKNNHYDGAMNFMHRDEEVDYYPSRHAPLRHAEPASFPVPTRPVVGKREKTRIKKENDFVQPGERYRSWAPDRQDRFVRRFADALARPKVSHELRVIWIDFLSKCDKSCGMKVANRLNVKPSM

SEQ ID NO: 11074 - protein, 760 aa, Chromobacterium violaceum ATCC 12472
MSHATHLLGFPRIGAKRELKTLLERYWKQELDEAALSQGAKELRQKHWLLQKGAGVELSPVGDFSLYDHVLDAQLLVGAAPARFGFDAAALTTGQYFELARGNAVQPAMEMTKWFDTNYHYLVPEWHADTAFSAQPERLLSQLREARALGVAAKPVLLGPLSLLWLGKAKGRPFDRLALLPGLVAAYRELLSSLRAAGAEWAQIDEPILALDLEPSWLDAFAPAYAQLSRHAPKLLLATYFGDVSEHAARLKSLPVAGLHLDLVRAPEQISAFLPDYPADKVLSAGIVDGRNIWRADLSALLDRLAPLAQQLGDRLWLAPSCSLLHSPFDAAAETGLDPELKNWLAFAVQKLNELKTLKRGLEHGRSAIAGELSGSDFAREQRRASPRIHDPAVARRLAALPEGTDRRASPYPIRAERQQAWLKLPPLPTTTIGSFPQTPAIRASRAAFKKGELSAAGYRQAMEKEIELAIRRQEALGLDVLVHGEAERNDMVEYFGEQLAGFAFTAGGWVQSYGSRCVKPPIIFGDVARPKPMTVDWARYAQSLTAKPVKGMLTGPVTILQWSFVRDDLPRREVCRQIALALNDEVLDLEAAGIRVIQIDEPAIREGLPLKRAGRDVYLAWAGEAFRLSSRGVDDATQIHTHMCYSEFGDILPAIAALDADVITIETSRSDMALLADFGRFRYPNAIGPGVYDIHSPRVPSAAEIRALLDKALRVIPAERLWVNPDCGLKTRGWPEVEAALAAMVAVGRELREKLAQAA

SEQ ID NO: 11075 - protein, 237 aa, Synechococcus sp. CC9605
MLPSWLSPRGGAESSAPATHAVLGTPLKAPLMADQEEAIFACGCFWGAEKGFWRLPGVVSTAVGYAGGQTEQPTYNQVCSGRTGHTEVVRVVWSRPALDFSDLLKLFWECHDPTQGNRQGNDTGSQYRSAIYTFNPEHLQLALASRDAYQVALSAKGYGAITTEILADQTFYFAEDYHQQYLAKPGSRPYCSAMPTQTLLGEFEGSNYKLPKQVWDKYDWSINHCVLRSDNSPIAIG

SEQ ID NO: 11076 - protein, 444 aa, Pediococcus pentosaceus ATCC 25745
MKKYDVVIIGAGPGGLGLAYPLKEAGLEVAVVEENLWGGTCPNRGCDPKKVLLAAIEAKKQNQYLLGNGIKNETQIDWPALMQFEKTFTDPVSRSSRSGLTDAQIDVYDGHAEFIDHHTLKIDQTTITSEKFVIATGQRPSRLTNIENQEMMQTSTDFLKMDHLPNELALVGGGYIAFELAMIASGAGAKVHIIHHNQRPLKAFPKAYVDDLVDQLKTQGVEVHLGIDLKRVEPKDERFELSDGQGFKQIVDQVFVTAGRKPNDDSLNLEKIGVQTDRGGIVVNEYLETSVDNIYAMGDVVSKALPKLTPVSGFEARYLAKKLTNATQAAIDYPAIPTVVYGMPKLAKVGVELDEAQQHPEQYEIKTAEMTEWFTYRRLQDPFAKISVIHEKSSGKIVGAITMSSEAEHLINDLTMIINQGGLVDQINNQILAYPTEASDLGYM

SEQ ID NO: 11077 - protein, 360 aa, Prochlorococcus marinus str. NATL2A
MTTWVIKIGTSLLRGNDKYTTFDVINDYCSYISKAQRNGDKIILVSSGAVGLGCHQMRFKTRPKEIISLQASAAIGQLHLMALYEKAMSSFGYKVAQILLTRSELGSRNSYNSASQTLKRLLEWDVIPIVNENDITSDEELKYGDNDTLSALVATAISADQLILLTDIDHLYSSDPKINSKAKPIKDINNSKELNNLELANEQTSWGTGGIKTKLTAAKIATESGIKVQLADGRDPKILGELLDGKKIGTVFHPNPNPIGNRKSWLAHAIKPVGEIHLDDGASEAIKNKGASLLLVGVKKVSGDFIANQPVKVINTEGEEFAKGICSMSSDAIKIGINSRSETTGSPLVIHRDVLVLTSE

SEQ ID NO: 11078 - protein, 743 aa, Frankia sp. EAN1pec
MSENHETVVSELNEESGGGCPVAHERAPHPTQGGGNRGWWPNRLNLKILAKNPAVANPLGEEFDYAAAFRTLDLPAVKRDIAQVLTTSQDWWPADYGHYGPFMIRMAWHSAGTYRISDGRGGGGAGQQRFAPLNSWPDNGNLDKARRLLWPVKKKYGQALSWADLMILAGNVALESMGFTTFGFAGGREDVWEPDEDVYWGPETTWLGDERYTGDRELENPLGAVQMGLIYVNPEGPNGTPDPLAAARDIRETFRRMAMDDEETVALIAGGHTFGKTHGAGDPDNVGPEPEGAPLETQGLGWKNAFGTGKGADAITSGLEGAWTPTPVSWDNSFFETLFGYEWALTKSPAGAYQWKPKGGAGAGTVPDAHDAAKSHAPTMLTTDLALRFDPVYEPISRRFLEHPDELADAFARAWFKLTHRDMGPVARYLGPEVPAETLLWQDPVPAVDHELVDAADVAALKVRVLASGLSVSELVATAWASASTFRGGDKRGGANGARIRLEPQRGWEVNEPDRLAAVLGTLTGIQEEFHAARTDGRRVSLADLIVLAGGAAVEQAAREAGFDVEVPFTPGRTDASQELTDVESFAALEPAADGFRNYLGKGQRLPAEYLLLDRANLLTLSAPELTVLVGGLRVLGANFRQSSLGVLTATPGVLTNDFFANLLDLGTTWRPSGEDDNVFEGRDAATGELTWTGSRVDLVFGSNSELRAFAEVYASDDAREKFVRDFVAAWAKVMNLDRYDLA

SEQ ID NO: 11079 - protein, 492 aa, ASPERGILLUS NIDULANS FGSC A4
MSLASLKRKDLFQQHGLIGDKWVSSSGGGTFTVTNPATLETLATLPEMNGADTESAITAAHTAFQSFRKTTARQRATWLRKWHALCVENIDDLALILTVENGKTLAEAKGEVLYAASFLEWFAGEAERVHGEVVPASNANQRILTVKQPLGVAACLAPWNFPIAMITRKVGAALAAGCTTVWKPAGETPLSALAQAVLAREAGFPSGTINVITTLNSVAEVGAALCNSKLVRKLSFTGSTRIGKLLASQCSQNLTKLSLELGGNSPFIVFDDAKVETAVEACILAKFRNSGQTCVTANRIFVQEGIYDRFSAALVEKVKALKVGNGVEEGVIIGPLTHERAVEKAVAHIKDAQEKGASLLLGGSPCQPNNLPGYFLEPTVLGKMSTEALTTREEVFAPVVALYPFKTEEEVLAKANDCDVGLGSYVITESMPRMWRVAESLEVGMVGINMGTLSAAESPFGGVKESGYGREGGRQGIEEYMTVKSILMNVAA

SEQ ID NO: 11080 - protein, 479 aa, Vibrio parahaemolyticus RIMD 2210633
MTNKKLTTAAGCPVAHNQNVMTAGPRGPQLLQDVWFLEKLAHFDREVIPERRMHAKGSGAYGTFTVTHDITKYTRAKIFSEVGKKTELFARFTTVAGERGAADAERDIRGFALKFYTEEGNWDLVGNNTPVFFLRDPLKFPDLNHAVKRDPRTNMRSSTNNWDFWTSLPEAFHQVTIVMSDRGIPASYRHMHGFGSHTFSFINAENERYWVKFHFKTQQGIKNIGDEEAQLLAGKDRESHHRDLYESIERQDFPKWKMYVQIMPELEADEVNFNPFDLTRVWSQKDYPLIPVGEFELNRNPENFYAEVEQSAFNPAAIVPGIGFSPDKMLQGRLFAYGDAQRYRLGVNHHQIPVNAPRCPVHSYHRDGAMRVDGNFGSTLGYEPNYKQEWAEQPDYSEPPLRISGHADHYDHRVDEDYFSQAGDLFRLMNEEQRQALFDNTARAMDGVPDFIKERHVTHAYQADEAYGKGLELALGLAK

SEQ ID NO: 11081 - protein, 453 aa, Candida glabrata CBS138
MTLNYASVQCVLRMRSAVMLGRRRLSRKALKQSTLFDIPMAPPDGVLGLTETFNADENPNKINLTVGVYKDGWGQVTTFPSVAQAQKIIDMDVGMNTDLSYLPISGCEDFKKHTINFLYRDSCPQDGPALIKNDRISFIQTLSGTGALAVASRLLSSFISRKIWIPKPSWPNHTNIFTQNGFTNPRFYSYYDRGDLTIGRWLQELRHEVGKDSNTKTPHCIVLHACCHNPTGLDPTKKQWEDIMDTIYELGMIPIIDMAYQGLESGKLIDDAYLLRLCLDTSRYRSWDNGLYLCQSFAKNMGLYGERVGSLSIVAPEHVPGVKEVLDSQLKQIIRSMYSSPPGYGSRVAKLVLSNDKLKYQWYSDVETMVNRLKSVREMIHERLQWEEIVNFEQQHGMFYFTKLGPDIVKKLREQYSIYLTNDGRMSLSGVNKSNVDYLCNSIKAVTSSKTLL

SEQ ID NO: 11082 - protein, 457 aa, Zea mays
MQIFVKTLTGKTITLEVESSDTIDNVKAKIQDKEGIPPDQQRLIFAGKQLEDGRTLADYNIQKESTLHLVLRLRGGMQIFVKTLTGKTITLEVESSDTIDNVKAKIQDKEGIPPDQQRLIFAGKQLEDGRTLADYNIQKESTLHLVLRLRGGMQIFVKTLTGKTITLEVESSDTIDNVKAKIQDKEGIPPDQQRLIFAGKQLEDGRTLADYNIQKESTLHLVLRLRGGMQIFVKTLTGKTITLEVESSDTIDNVKAKIQDKEGIPPDQQRLIFAGKQLEDGRTLADYNIQKESTLHLVLRLRGGMQIFVKTLTGKTITLEVESSDTIDNVKAKIQDKEGIPPDQQRLIFAGKQLEDGRTLADYNIQKESTLHLVLRLRGGMQIFVKTLTGKTITLEVESSDTIDNVKAKIQDKEGIPPDQQRLIFAGKQLEDGRTLADYNIQKESTLHLVLRLRGGY

SEQ ID NO: 11083 - protein, 212 aa, Zea mays
HASVLPVRSKNARGQQGSYPIKLFYTSNMPIILHSALITNLYFISQLLYRKYSGNFLVNLLGKWKESEYSGHSIPVGGLAYYVTAPSSLADVLANPFHALFYVVFMLSACALFSKTWIEVSGSSAKDVAKQLKEQQMVMPGHRESNLQKELNRYIPTAAAFGGVCIGALTVLADFMGAIGSGTGILLAVTIIYQYFETFEKERATELGFFGF

SEQ ID NO: 11084 - protein, 448 aa, Saccharomyces cerevisiae
MVASIRSGVLTLLHTACGAGILAMPYAFKPFGLIPGVIMIVLCGACAMQSLFIQARVAKYVPQGRASFSALTRLINPNLGIVFDLAIAIKCFGVGVSYMIVVGDLMPQIMSVWTRNAWLLNRNVQISLIMLFFVAPLSFLKKLNSLRYASMVAISSVAYLCVLVLLHYVAPSDEILRLKGRISYLLPPQSHDLNVLNTLPIFVFAYTCHHNMFSIINEQRSSRFEHVMKIPLIAISLALILYIAIGCAGYLTFGDNIIGNIIMLYPQAVSSTIGRIAIVLLVMLAFPLQCHPARASIHQILQHFAEENVSISATSADEPTVATESSPLIRDSSLDLNEVIEEESIYQPKETPLRGKSFIVITCSILVASYLVAISVSSLARVLAIVGATGSTSISFILPGLFGYKLIGTEHKTAVPLTTKIFKYTGLLLFIWGLIIMITCLTAALKLN

SEQ ID NO: 11085 - protein, 585 aa, Arabidopsis thaliana
MKPFVIRNLPRFQSTLRSSLLYTNHRPSSRFSLSTRRFTTGATYIRRWKATAAQTLKLSAVNSTVMMKPAKIALDQFIASLFTFLLLYILRRSSNKNKKNRGLVVSQNDTVSKNLETEVDSGTDVIIVGAGVAGSALAHTLGKEGRRVHVIERDFSEQDRIVGELLQPGGYLKLIELGLEDCVKKIDAQRVLGYVLFKDGKHTKLAYPLETFDSDVAGRSFHNGRFVQRMREKALTLSNVRLEQGTVTSLLEEHGTIKGVRYRTKEGNEFRSFAPLTIVCDGCFSNLRRSLCKPKVDVPSTFVGLVLENCELPFANHGHVVLGDPSPILMYPISSSEVRCLVDVPGQKLPPIANGEMAKYLKTRVAPQVPTKVREAFITAVEKGNIRTMPNRSMPADPIPTPGALLLGDAFNMRHPLTGGGMTVALADIVVLRDLLRPIRNLNDKEALSKYIESFYTLRKPVASTINTLADALYKVFLASSDEARTEMREACFDYLSLGGVFSSGPVALLSGLNPRPLSLVLHFFAVAIYAVCRLMLPFPSIESFWLGARIISSASSIIFPIIKAEGVRQMFFPRTIPAIYRAPP

SEQ ID NO: 11086 - protein, 437 aa, Triticum aestivum
  misc_feature (208)..(208): Xaa can be any naturally occurring amino acid
  misc_feature (233)..(233): Xaa can be any naturally occurring amino acid
  misc_feature (291)..(291): Xaa can be any naturally occurring amino acid
  misc_feature (394)..(394): Xaa can be any naturally occurring amino acid
  unsure (1)..(437): unsure at all Xaa locations
MTFAGSGDGQSGSARAHFVLVPMMAQGRTIPMTDMACLLAEHGAQVSFITTPVNAARLEGFAAKVEAAGLVVQLVELHFPSVEFGLPDGCENLDMIQSKNLFFNFMKACAALHEPLMAYLREQQRSPPSCIISDMAHWWTGDIARELGIPRLTFSGFCGFSSLVRYIAFSQQCIGRMSPDDNELITIPGSPTPLELTKAKLPGTLCVXPGMEQIPGKRCLEEDLKCPGEITQXAFKELETLDIESYEQITRKKVWTIGPMCLCHRNSNRTGRRGNQASMDEGQCLQWLDSXKPGSVIFVSFGSLACTTPQQLVELGLGLEASKKPFVWVIKAGAKLPEVEEWLADGFEERVKDRGLIIRGWAPQLMILQHQAVGGFVTHCGWNSTIEGICAGVXMITWPHFGEQFLNEKLLVDVLQIGMEVGVKGVTQWGSENQEVM

SEQ ID NO: 11087 - protein, 384 aa, Kryptoperidinium foliaceum
LFCLEHGIQPDGQMPSDKTIGGGDDAFNTFFSETGAGKHVPRCVFVDLEPTVVDEVRTGTYRQLFHPEQLISGKEDAANNFARGHYTIGKEIVDLVLDRIRKLADNCTGLQGFMVYNACGGGTGSGLGCLMLERLSVDYGKKSKLSFTVRACPQVATAVVEPYNTVLCVHSLLEHTDVTIMYDNEALYDICRRNLDIERPTYTNLNRLLAQIISSLTASLRFDGALNVDITEFQTNLVPYPRIHFMLSSYAPVISAEKAYHEQLSVAEITMSVFEPASMYVKCDPRHGKYMACCMMYRGDVVPKDVNAAVATIKTKRTIQFVDWCPTGFKCGINYQPPTVVPGGDLAKVMRACCMISNSTAIAEVFSRIDHKFDLMYSKRAFVH

SEQ ID NO: 11088 - protein, 384 aa, Kryptoperidinium foliaceum
LYCLEHGITPDGDMAADSSVGVADDSFNTFFSETQSGKHVPRAVYVDLEPTVCDEVRAGAYSKLYHPEQIINGKEDAANNYARGHYTIGKEIVDLVLDRIRKLADNCTGLQGFLVFHATGGGTGSGLGSLLLERLSVDYGRKSKLSFAVSPSPQVSTAVVEPYNSVLSTHALLEHTDCTFCLDNEALYDVCRRNLDIERPTYTNLNRLIAQVISSLTASLRFDGALNVDVTEFQTNLVPYPRIHFMLTSYAPVISAEKAFHESLSVAEITSSVFEPTHMMTKCDPRHGKYMACCLMYRGDVVPKDVNAAVATIKTKRTIQFVDWCPTGFKCGINYQAPKCVPGGDLAEVKRAVCMVANTTAIAEALSRIDHKFDLMYAKRAFVH

SEQ ID NO: 11089 - protein, 151 aa, Geobacter sulfurreducens PCA
MPMSSTVTNPFREMERWFEESLNRPFFGMNWVPFRNLINDLGNTGELMPAVDMFEEGEHLVVKAELPGISRDDLNLRIVDGNLIISGEKRSGETVERSNYLRLERHHGSFTRTLRLPDGLDTEHIKASFRDGILDVRIPKTESTVRQITVE

SEQ ID NO: 11090 - protein, 451 aa, Oryza sativa (japonica cultivar-group)
MGQTGGRPGGGGGPALQRLRRHAAGKVASRSLARCREGARRRGRQAAGQRHSGRQGSNESTTQSQPTVTVIEDLKLEIDCQHVKKNIAHSPGQQCSPSERFDEWKSSSRRRPKCDVATNLHWCHLHPFQMSTLSNKVSLSSNLLNLQTGLAEEPEELTYMYHQEEHARMQEQFAGTPLVEQPVRFDQFYPASMAPNQFHPSHCSSFPAFGGSSALPSLAFGAVATTKKEQVQQPSPSSSNVLSFAGQVQGSTTTLDFSGRGWQQDDGVGVFQQPPERRSRPPANAQEHVIAERKRREKLQQQFVALATIVPGLKKTDKISLLGSTIDYVKQLEEKVKALEEGSRRTAEPTTAFESKCRITVDDDDGGSASSGTDDGSSSSSSPTVEASIHGNTVLLKICCKERRGLLVMILSELEKQGLSIINTSVVPFTDSCLNITITAKARLALPVYYS

SEQ ID NO: 11091 - protein, 389 aa, Kryptoperidinium foliaceum
VIADEHGIDPTGTYHGDSDLQLERINVYYNEATGGRYVPRAILMDLEPGTMDSVRAGPFGQLFRPDNFVFGHTGAGNNWAKGHYTEGAELIDSVLDVVRKEAEGCDCLQGFQMTHSLGGGTGSGMGTLLISKVREEYPDRIMETFSVIPSPKVSDTVVEPYNAVLSFHQLVENADECFLLDNEALYDICFRTLKLATPTYGDLNHLVSAAISGVTTCLRFPGQLNCDLRKIAVNLIPFPRLHFFMTGFAPLTSRGSQQYRALTVPELTQQMFDAKNMMCAADPRHGRYLTAAALFRGRMSTKEVDEQMLNVQNKNSSYFVEWIPNNIKASVCDIPPKGLKMAVAFAGNSTAIQEMFKRVAEYFTAMFRRKAFLHWYTGEGMDEMEFTEA

SEQ ID NO: 11092 - protein, 389 aa, Kryptoperidinium foliaceum
VISDEHGIDPTGTYHGDSDLQLERINVYYNEATGGRYVPRAILMDLEPGTMDSVRAGPFGQLFRPDNFVFGQTGAGNNWAKGHYTEGAELIDSVLDVVRKEAEGCDCLQGFQMTHSLGGGTGSGMGMLLISKVREEYPDRIMETFSVIPSPKVSDTVVEPYNAVLSFHQLVENADECFLLDNEALYDICFRTLKLTTPTYGDLNHLVSAAISGVTTCLRFPGQLNCDLRKIAVNLIPFPRLHFFMTGFAPLTSRGSQQYRALTVPELTQQMFDAKNMMCAADPRHGRYLTAAALFRGRMSTKEVDEQMLNVQNKNSSYFVEWIPNNIKVSVCDIPPKGLKMAVAFAGNSTAIQEMFKRVAEYFTAMFRRKAFLHWYTGEGMDEMEFTEA

SEQ ID NO: 11093 - protein, 545 aa, Helicobacter pylori
MAKEIKFSDSARNLLFEGVRQLHDAVKVTMGPRGRNVLIQKSYGAPSITKDGVSVAKEIELSCPVANMGAQLVKEDASKTADAAGDGTTTATVLAYSIFKEGLRNITAGANPIEVKRGMDKAPEAIINELKKASKKVGGKEEITQVATISANSDHNIGKLIADAMEKVGKDGVITVEEAKGIEDELDVVEGMQFDRGYLSPYFVTNAEKMTAQLDNAYILLTDKKISSMKDILPLLEKTMKEGKPLLIIAEDIEGEALTTLVVNKLRGVLNIAAVKAPGFGDRRKEMLKDIAVLTGGQVISEELGLSLENAEVEFLGKAKIVIDKDNTTIVDGKGHSHDVKDRVAQIKTQIASTTSDYDKEKLQERLAKLSGGVAVIKVGAASEVEMKEKKDRVDDALSATKAAVEEGIVIGGGAALIRAAQKVHLNLHDDEKVGYEIIMRAIKAPLAQIAINAGYDGGVVVNEVEKHEGHFGFNASNGKYVDMFKEGIIDPLKVERIALQNAVSVSSLLLTTEATVHEIKEEKAAPAMPDMGGMGGMGGMGGMM

SEQ ID NO: 11094 - protein, 164 aa, Triticum aestivum
HYRTSLYKKAGWYRSGIPGISSTHASGFTLQGSLSHYYYNLCESVFPCMDWWAVPVKAAFDQTAWSGLWNTIYFVALGFLRWESPSTIFSELKSTFFPMLTAGWKLWPFAHLITYGVVPVEHRLLWVDCVEIIWVTILSTYSNEKSEARILDDSSTTDTRDNSR

SEQ ID NO: 11095 - protein, 311 aa, Erwinia carotovora subsp. atroseptica SCRI1043
MANKIWVMGDAVVDLIPEDTERYLKCPGGAPANVAVGIARLGGNSAFVGRVGDDVFGHFLKTVLEEENVDTHYMAYDRHHRTSTVVVSLDDAGERTFTFMVRPSADLFLQPEDLPVFNRREWLHLCSIALSQEPSRSTAFEAMRQIKAALGRVCFDPNIRDDLWQSEQELRDCLTQALMLADVVKLSCEELTFLCPTSDVEEGIQQFMLRYPTRLLLVTLGSEGVWLHDRHQLQHFAAPSVTPVDTTGAGDAFVAGLLHGLAEYDDLSQPLSWDPIIEQAQRCGALATTAKGAMTALPYAQQLYTLPLAKV

SEQ ID NO: 11096 - protein, 337 aa, Cochliobolus heterostrophus
MVVKVGINGFGRIGRIVFRNAIEHNDVDIVAVNDPFIEPHYAAYMLKYDSTHGQFKGDIKVDGNNLTVNGKTIRFHMEKDPANIPWSETGAYYVVESTGVFTTTEKAKAHLKGGAKKVVISAPSPDAPMFVMGVNHETYKPDIEALSNASCTTNCLAPLAKVIHDKYTIIEGLMTTIHSYTATQKVVDGPSAKDWRGGRTAAQNIIPSSTGAAKAVGKVIPELNGKLTGMAMRVPTANVSVVDLTVRIEKGASYDEIKQAVKEASEGSLNGILGYTEDDIVSTDLNGDNRSSIFDAKAGISLNKNFVKLVSWYDNEWGYSRRVLDLLVYIAKIDGNA

SEQ ID NO: 11097 - protein, 207 aa, Bradyrhizobium japonicum USDA 110
MSERLLVLVRHGQSEWNLKNLFTGWKDPDLTEQGVAEAREAGRKLKAQGLVFDVAYTSVLTRAQHTLDLILGELGQKGLPTEKNLALNERDYGDLSGLNKDDARKKWGEDQVLIWRRSYDVPPPGGESLKDTLARALPYYVQEILPSVLNGKRTLVAAHGNSLRALIMVLEKLSPEGILKRELATGVPIIYRLNADSTVASKLDLAG

SEQ ID NO: 11098 - protein, 730 aa, Kluyveromyces lactis NRRL Y-1140
MSSDVSSPISEVPFVEKFLGEVECEEYLPTFEKFRLFDEDRLYYLDREILEELGVKKIGDKIKILKQSRQLRRDASGFNPKKELVEITAKINALNSNPLSINEELVTDKHSVIFILNDGSAKKVNVNGCFNAHSIKKKLIKRLPSEFISIDPVTKEATHSSQDYDVFVVDYVKNVLHLLYDVELVTICHSSDRLEKNRLIFVSKDQTPSEKAIFTSKKVYLKTLSVMQQMGSQPGAGRPLLSGPGTNALRIENRSDNIREIFTQRPPTELISTNLPEYFPHTDINRLKKTLRNSMRQSIRASMIRGKNGSLVSLAGSNKIGDILVNQSHAVDRALLESIQNDGSASNSADHAVPMHNTSTNGSDASTASLTPLMKRTSISSNSRNSKSSVRGRSGSESGTSESNDKIELYSTDTDTEGEEDDAEDTISLPTKVEAPKSWLKGARIGSGSFGSVYLGMNAETGELMAVKQVELKPTAVTAGVVSIADESKKAHSPGGGNTAVKNTSQIHRKMIDALQHEMNILKELHHENIVTYYGSSQEGGNLNIFLEYVPGGSVSSMLNNYGPFDEPLVKNFTRQILIGLAYLHKRNIIHRDIKGANILIDIKGGVKITDFGISKKLSPLNKQQNKRASLQGSVYWMAPEVVKQVVTTEKADIWSVGCVIVEMFTGKHPFPDFSQMQAIFKIGTNIIPEIPSWVSEEAKAFLFKSFELDYRKRPSSLGLLQEPWLNTVL

SEQ ID NO: 11099 - protein, 216 aa, Vibrio parahaemolyticus RIMD 2210633
MKYQAAIFDMDGLLLDTERVCMRIFQEACEVQNLPFYEDVYLSIIGRNAAGIETIFRKAYGENLDRLHLEWRTRYNAVVKHQAIPVKDGVVELLEWLKAQGLPIAVATSTAKEVAKIKLELAGLSKYFDNLTTGCEVSHGKPDPEIYFLAANRLDVEPSQCLAFEDSNNGVRAAVAANMVTYQIPDLVEPCDEVKQFGHAIVPSLHEVLAELKQTR

SEQ ID NO: 11100 - protein, 625 aa, Ustilago maydis 521
MARPRTFTGWIHLVLNLLISQTWSRHNTRRRAGYSNRAFIHTARQYQAQQIQYDLGAEQSKVYDSSAGWLEDTKKNSKKKSKVVKKIGLANTHMNAKQSPETKWGKQSEDFWTNDRAHERVTRKLDACSFALTRSQVGRAKPKQEPSTLCYSEQRRAFLLVSAWRASPLSHEQLPLLYGLGFCPVDFAESFRLFACPLVRLHTNPPLKLLFRTNTKITMNANVARTALRAATRSNTRRGVAGAARSLSIAATARPSLNKMVSAAAKPSLARGLKTIEFSEGIPEKVYEREDWPLEKLQDYFKNETFAILGYGSQGHGQGLNLRDNGLNVIVGVRKDGASWKEAIEDGWQPGKNLFSIEEAAEKATIAMLLLSDAACAQVYASVKDKMPNTHTLYFSHGFQITYQKETGFEAPKDKDIILCAPKGSGRTVRSLFLESRGINGSIAVFQDVSGKALEKVSAMGVAVGCGYLYETTFEREVYSDLYGERACLMGGIQGLFKAQYDVLRANGHSPSEAFNETCEEALQSLYPLVGANGMDYMYKACSTTARRGALDWAPEFEKACKPVLEKLYESVRNGSETRRALEFGNRKTYREDFDKETDAIAAQEMWKVGHKVRALRPENAAKGL

SEQ ID NO: 11101 - protein, 420 aa, Tropheryma whipplei TW08/27
MGDELENVTGSDATDEVLATARRIAVSSGKGNFKAPKLRQKLKLAAKKMKPKCILHKYVWFALVIVAVAFLSGFTSSVVTYRLLSSDQQKESPLLPLTPPIYSSGTKELDLPSATAKRVISSVVTIQVSAGNGMSGSGSGVVFNDNGDIVTNAHVVTLDGRVDKPDLRVLARDGRRYKAVLVGVDRMLDIAVVRIKPRALPAITFGDSSAVTVGSSVIAVGAPLGYDFSVTRGIISSVLRSINLTSFGLAGQVNAVPVIQTDAAINPGNSGGPLVDLNGRLIGINVAIASAGLFSSGNVGVGFAIPSNLVHRVATALAANRPVSHGYLGVSVSDGSDRDESYEGAIVKSVTPRSPADTAGLKPGDLLLSIGGNKISNMIDLVAFVRSRPGGTPVPIRVERNGKEISLTVTLSSLEEIKGT

SEQ ID NO: 11102 - protein, 285 aa, Triticum aestivum
  misc_feature (87)..(87): Xaa can be any naturally occurring amino acid
  misc_feature (143)..(143): Xaa can be any naturally occurring amino acid
  misc_feature (174)..(174): Xaa can be any naturally occurring amino acid
  misc_feature (220)..(220): Xaa can be any naturally occurring amino acid
  misc_feature (232)..(232): Xaa can be any naturally occurring amino acid
  misc_feature (240)..(240): Xaa can be any naturally occurring amino acid
  misc_feature (242)..(242): Xaa can be any naturally occurring amino acid
  misc_feature (276)..(276): Xaa can be any naturally occurring amino acid
  misc_feature (280)..(280): Xaa can be any naturally occurring amino acid
  unsure (1)..(285): unsure at all Xaa locations
MQIFVKTLTGKTITLEVESSDTIDNVKAKIQDKEGIPPDQQRLIFAGKQLEDGRTLADYNIQKESTLHLVLRLRGGMQIFVKTLTGXKTITLEVESSDTIDNVKAKIQDKEGIPPDQQRLIFAGKQLEDGRTLADYNIQKESXLHLVLRLRGGMQIFVKTLTGKTITLEVESSXDTIDNVKAKIQDKEGIPPDQQRLIFAGKQLEDGRTLADYNIQKESXPFHLVLRLRGGXCRFFVKTXLXGKTITLEGGGPRDTIGQRQGPRFRTREGIPPGPXAPLXFAGKQ

SEQ ID NO: 11103 - protein, 308 aa, Populus trichocarpa
MADKSKILIIGGTGYIGKFIVEASAKAGHPTFALVRESTVSDPVKRELVEKFKNLGVTLIHGDVDGHDNLVKAIKQVDVVISVIGSMQIADQTKIIAAIKEAGNVKRFFPSEFGMDVDHVNAVEPAKTAFAMKAQIRRAIEAAGIPYTYVPSNFFAAYYLPTLAQFGLTAPPRDKITILGDGNAKLVFNKEDDIGTYTIKAVDDARTLNKTVLIKPPKNTYSFNELIDLWEKKIGKTLEKTFVPEEKLLKDIQESPIPINIVLSINHSALVNGDMTNFEIDPSWGLEASELYPDVKYTTVEEYLDQFV

SEQ ID NO: 11104 - protein, 299 aa, Zea mays
MMRETYMDVLPPVDHIAARSNWFPAAARLWTAAENKQFERALAGLDLCRPDWEEVARAIPGRTVREVVSHFKHLEVDVQQIESGQVPLPAYGGGASSFTLQWDGYGPGPGDFRHGYRFAGGCGRRHHGRTPEQERKKGVPWTEEEHRLFLLGLKKYGKGDWRNISRNFVQTRTPTQVASHAQKYFIRLNSGGKDKRRSSIHDITTVNLTDDQPPSPSQSSLITSQSNAPAPAPGPAPAAGICQVPLAADAKRHGARTLPFSSPNRTSAAPAYRMEFHDQQGLQCGPLHDQLLASQSVLF

SEQ ID NO: 11105 - protein, 308 aa, Populus trichocarpa
MADKSKILIIGGTGYIGKFIVEASAKAGHPTFALVRESTVSDPVKRELVEKFKNLGVTLIHGDVDGHDNLVKAIKQVDVVISAIGSMQIADQTKIIAAIKEAGNVKRFFPSEFGMDVDHVNAVEPAKTAFAMKAQIRRAIEAAGIPYTYVPSNFFAAYYLPTLAQFGLTAPPRDKITILGDGNAKLVFNKEDDIGTYTIKAVDDARTLNKTVLIKPPKNTYSFNELIDLWEKKIGKTLEKTFVPEEKLLKDIQESPIPINIVLSINHSALVNGDMTNFEIDPSWGLEASELYPDVKYTTVEEYLDQFV

SEQ ID NO: 11106 - protein, 193 aa, Zea mays
KAELRTIYGQLCQDDMPMVRRAAASNLGKFAATVEQSHLKTEIMSMFDDLTQDDQDSVRLLAVEGCAALGKLLEPQDCAAHILPVIVNFSQDKSWRVRYMVANQLYELCEAVGTEPTRGDLVSAYVRLLCDNEAEVRIAAAGKVTKFCKILNPQIAIEHILPCIKELSSDSSQHVRSALASVIMGMAPVLGKV

SEQ ID NO: 11107 - protein, 341 aa, Glycine max
MEYRLLPIFTLLNIALVATHAALPPEVYWKSVLPTTPMPKAITDILYSDWVEEKSSSVHVGGGGVNVHTGKGGGSGTTVNVGGKGGGGVNVHAGHKGKPVHVSVGSKSPFDYVYAATETQLHDDPNVALFFLEKDLHSGTKLDLHFTRSTSNQATFLSRQVADSIPFSSNKVDFIFNKFSVKPGSEEAQIMKNTISECEEGGIKGEEKYCATSLESMVDFSTSKLGNNVEVVSTEVDKETGLQKYTVAPGVKKLSGDKAVVCHKQNYPYAVFYCHKTETTRAYSVPLEGTNGVRVKAVAVCHTDTSEWNPKHLAFQVLKVKPGTIPVCHFLPEDHVVWVPK

SEQ ID NO: 11108 - protein, 324 aa, Arabidopsis thaliana
MANTPLIVSFGEMLIDFVPDTSGVSLAESTGFLKAPGGAPANVACAITKLGGKSAFIGKFGDDEFGHMLVNILKKNGVNSEGVCFDTNARTALAFVTLKKDGEREFMFYRNPSADMLLKESELNKDLIKKAKIFHYGSISLISEPCRTAHMAAMKTAKDAGVLLSYDPNVRLPLWPSTEAAIEGIKSIWNEADIIKVSDDEVTFLTRGDAEKDDVVLSLMHDKLKLLIVTDGEKGCRYYTKKFKGRVPGYAVKAVDTTGAGDSFVGAFLVSLGKDGSILDDEGKLKEALAFANACGAVCTTQKGAIPALPTPADAQKLMKSKSK

SEQ ID NO: 11109 - protein, 177 aa, Euglypha rotunda
LTGKTITLDVEASDTIENVKQKIQDKEGIPPDQQRLIFAGKQLEDGRTLSDYNVTKEATLHLVLRLRGGSGMQIFVKTLTGKTITLDVEASDTIENVKQKIQDKEGIPPDQQRLIFAGKQLEDGRTLSDYNVTKEATLHLVLRLRGGSGMQIFVKTLTGKTITLDVEASDTIENVKQ

SEQ ID NO: 11110 - protein, 462 aa, Rhodobacter sphaeroides 2.4.1
MATFDVIIIGAGPGGYVSAIRCAQLGLKTAVVEGREALGGTCLNVGCIPSKALLHATHNLHEVHENFEKMGLMGAHPTVDWSKMQGYKQEVVDGNTKGIEFLFKKNKITWLKGWGSIPEPGKVKVGEEIHEAKSIVIATGSEPASLPGVEADESVIVTSTGALSLGRIPETMVVIGAGVIGLELGSVYARLGTKVTVVEYMEAILPGMDAEVVKTTQRILAKQGLSFVLGAAVKGATVSDGKATVTWAAKKDGKETSLTVDTVLVATGRKPFTEGLGLEALGVEMLPRGVVKIDDHFRTSVPGIYAIGDCVPGMMLAHKAEDEGVALAEILAGKHGHVNYGVIPGVIYTTPEVASVGRTEESLKEEGRAYKVGKFPFMGNARAKAVFQAEGFVKMIADKETDRILGCHIIGPAAGDLIHEVCVAMEFGASAQDLAMTCHAHPTWSEAVREAALACGDGAIHA

SEQ ID NO: 11111 - protein, 414 aa, Thermus caldophilus
MVKVEVLGMILAGGQGSRLYPLTAKRAKPAVPFGAKYRIIDFVLNNFVNSGIYAIYVLTQYKAQSLTEHIQRYWRFGAFLEDHFILLVPAQMYRYEELGPVWYRGTADAIYQNLHLVHNHAPKAVAVFGGDHIFKMNIRHMVEYHYDTRADITIAAYPVPVAEATRFGVLQVDEEWRITEFQEKPEEPKPIPGRPDMALASMGNYIFRTEALFELLEADARDETSAHDFGKGVIPRAIRVGYRVYAYDFHRNPIPGQEGPNLYWRDVGTLDAYYEASMDLVKVDPVFGLCSPVWPLRTANLFSPPAKFVHETGERVGRALNSLLAGGVIVSGGTVRESVLFRRVRVNSYSLVERSVLFDDVEVGRYCRIRNAIIDKNVKIPPHTEIGYDLELDRARGFTVTPEGVVVVPKGYRF

SEQ ID NO: 11112 - protein, 177 aa, Euglypha rotunda
LTGKTITLDVESSDTIENVKQKIQDKEGIPPDQQRLIFAGKQLEDGRTLSDYNVTKEATLHLVLRLRGGSGMQIFVKTLTGKTITLDVEASDTIENVKQKIQDKEGIPPDQQRLIFAGKQLEDGRTLSDYNVTKEATLHLVLRLRGGSGMQIFVKTLTGKTITLDVEASDTIENVKQ

SEQ ID NO: 11113 - protein, 515 aa, Daucus carota
MENGTKELNKPQPPSSAAMQLQTPVQKIPTATWKLVLVAAIAAGVQFGWALQLSLLTPYVQLLGIPHKWAAYIWLCGPISGMLVQPIVGYYSDHCQSSFGRRRPFIASGAGCVAISVILIGFAADIGYKAGDDMSKTLKPRAVTVFVIGFWILDVANNMLQGPCRALLADLCSGDTRRMRSANAFYSFFMAVGNILGYAAGSYNNLYKLFPFSKTHACDLYCANLKSCFIISIALLIIITVVALSVVREKQWSPDDADAADEPPSSGKIPVFGELLGALKDLPRPMLLLLIVTCLNWIAWFPFILFDTDWMGREIYGGTAGKGKLYDQGVRAGSLGLLLNSVVLGLTSIAVEYLVRGVGGVKILWGVVNFILAIGLVMTVVVSKVAQHQREHSANGQLLPPSAGVKAGALSLFSILGIPLSITYSIPFALASIYSSGSGAGQGLSLGVLNLAIVVPQMIVSVLAGPFDSLFGGGNLPAFVVGAISAAISGVLAIVLLPKPSKDAASKLSLSGTYH

SEQ ID NO: 11114 - protein, 395 aa, Nitzschia thermalis
SRPQVGNACWELYCLEHGITPDGAMESDKPIGVADDSFNTFFSETQSGKHVPRAVYVDLEPSVCDEVRSGTYAKLYHPEQIINGKEDAANNYARGHYTIGKEIVDLVLDRIRKLADNCTGLQGFLVFHATGGGTGSGLGSLLLERLSVDYGRKSKLSFAVSPSPQVSTAVVEPYNSVLSTHALLEHTDCTFCLDNEALYDVCRRNLDIERPTYTNLNRLIAQVISSLTASLRFDGALNVDVTEFQTNLVPYPRIHFMLTSYAPVISAEKAFHESLSVAEITSSVFEPAHMMTKCDPRHGKYMACCLMYRGDVVPKDVNAAVASIKTKRTIQFVDWCPTGFKCGINYEPPKNVPGGDLAEVKRAVCMVANTTAIAEAPSRIDHKFDLMYAKRAFVH

SEQ ID NO: 11115 - protein, 346 aa, uncultured bacterium 560
MPDLDRSALIENRINSGILGQWYPVAKSVEVKSISPLGIEVLGEKLVLWRGDNGKVHCIKDQCPHRGAPLSFGRLHEGHISCRYHGIVVSGEGVVVRVPAMQNCKFEGQKIVRAFEVTEIYDAIFIYMPSAENEKAPRMVFPKEFLSDSWSGFLCTAVWKTNYRYALDNLADPMHGSYLHAESFTLAYGAKEDLFKVDHTENGFIVSRTGQLGKNFDWAEFEMHDGTMFCFLDIPYPKAAGPGGNMRIVGFVLPINENSCKVFFWRMREVSGIQRDCWRFLYRTELESKHWTVLEQDREILEAMSDDVRGNEKLYQHDVGVNRIRQTLLKQAKSNVDFELNIEGKS

SEQ ID NO: 11116 - protein, 589 aa, Arabidopsis thaliana
MAPTNVQVTDYHLNQSKTDTTNLWSTDDDASVMEAFIGGGSDHSSLFPPLPPPPLPQVNEDNLQQRLQALIEGANENWTYAVFWQSSHGFAGEDNNNNNTVLLGWGDGYYKGEEEKSRKKKSNPASAAEQEHRKRVIRELNSLISGGVGGGDEAGDEEVTDTEWFFLVSMTQSFVKGTGLPGQAFSNSDTIWLSGSNALAGSSCERARQGQIYGLQTMVCVATENGVVELGSSEIIHQSSDLVDKVDTFFNFNNGGGEFGSWAFNLNPDQGENDPGLWISEPNGVDSGLVAAPVMNNGGNDSTSNSDSQPISKLCNGSSVENPNPKVLKSCEMVNFKNGIENGQEEDSSNKKRSPVSNNEEGMLSFTSVLPCDSNHSDLEASVAKEAESNRVVVEPEKKPRKRGRKPANGREEPLNHVEAERQRREKLNQRFYSLRAVVPNVSKMDKASLLGDAISYISELKSKLQKAESDKEELQKQIDVMNKEAGNAKSSVKDRKCLNQESSVLIEMEVDVKIIGWDAMIRIQCSKRNHPGAKFMEALKELDLEVNHASLSVVNDLMIQQATVKMGNQFFTQDQLKVALTEKVGECP

SEQ ID NO: 11117 - protein, 395 aa, Nitzschia thermalis
SRPQVGNACWELYCLEHGITPDGAMESDKSLGVADDSFNTFFSETQSGKHVPRAVYVDLEPSVCDEVRSGTYAKLYHPEQIINGKEDAANNYARGHYTIGKEIVDLVLDRIRKLADNCTGLQGFLVFHATGGGTGSGLGSLLLERLSVDYGRKSKLAFAISPSPQVSTAVVEPYNSVLSTHALLEHTDCTFCLDNEALYDVCRRNLDIERPTYTNLNRLIAQVISSLTASLRFDGALNVDVTEFQTNLVPYPRIHFMLTSCAPVISAEKAFHESLSVAEITSSVFEPTHMMTKCDPRHGKYMACCLMYRGDVVPKDVNAAVASIKTKRTIQFVDWCPTGFKCGINYESPKTVPDGDLANAKRAVCMVANTTAIAEALSRIDHKFDLMYAKRAFVH

SEQ ID NO: 11118 - protein, 342 aa, Arabidopsis thaliana
MASSSPTQLAHVPIPPEPGGRSPTQEANEPPVPIYIVTDPFQLPADFLNPSPEKKLVIGFDCEGVDLCRHGKLCIMQIAFSNAIYLVDVIEGGEVIMKACKPALESNYITKVIHDCKRDSEALYFQFGIRLHNVVDTQIAYSLIEEQEGRRRPLDDYISFVSLLADPRYCGISYEEKEEVRVLMRQDPKFWTYRPMTELMIRAAADDVRFLLYLYHKMMGKLNQRSLWHLAVRGALYCRCLCCMNDADFADWPTVPPIPDNLKSEDQCLEEEILSVLDVPPGKMGRVIGRKGASILAIKEACNSAEILIGGAKGPPDKIFVIGPVREVRKAEAILRGRMIDY

SEQ ID NO: 11119 - protein, 406 aa, Thiobacillus denitrificans ATCC 25259
MRPDRRPAVIPLHLSHFTASSCLGAGLDPTLAALRAGRSGLAPCRFETVHDLDTHIGEVAGVDETPLPADFAEHDCRNNRLAWLGLQQDGFDAAVRAAIARHGRRRVGVFLGTSTAGILQTEQAYRRRDAASGALPADFVYRTTHNTYSLAGFVRALYGIEGPAAVASTACSSGAKVFASAQRMIATGLIDAAIVGGVDSLCLTTLYGFNSLELLSPEPCRPFDAGRRGLSIGEAAAFALLEAVPASLDADAVLLLGAGESSDAHHMSSPHPEGAGARQAMAATLAAAGLAPDQIDYVNLHGTATPSNDAAEGRAVAALFGDRVACSSTKGATGHTLGAAGGLEAVIAALALQHGFMPGGVNTRTPDPAIPVRYLRTNTDVAPRRVLSNSFGFGGTNCSLVLGRAG

SEQ ID NO: 11120 - protein, 473 aa, Bacillus cereus G9241
MAKEYDLVIVGGGTGGYVAAIRASQLGLKTALVEKENLGGTCLHKGCIPSKALLRSAEVYATAKKSEEFGVIASNVELNFAKVQERKEKIVTQLHKGVQHLMKQGKIDVFEGIGRILGPSIFSPMPGTISVELASGEENEMLIPKNVLVATGSRPNSLPGLELDGEYVMSSDHALKMETLPSSIIIVGGGVIGIEWASMLADFGVEVTVLEYAKTILPLEDQDVSKEMQRLFKKKGIKVVTGAKVLPETLVKDNGVTIQAEHNGENKEFKAEKMLVSVGRQANTQNIGLENTDIVVEKGYIQTNEFYQTKESHIYAIGDVIGGLQLAHVASHEGIVAVEHIAGKEVTPIDYSMVSKCVYSSPEVASVGLTEQEAKEKGYKLKVGKFSFRAIGKALVYGESDGFVKLVVDEETNDILGVHMIGPHVTDMISEAGLARVLDATPWEVAHTIHPHPSLSEAIGEAALAVDGKALHA

SEQ ID NO: 11121 - protein, 413 aa, Chromobacterium violaceum ATCC 12472
MQQLKLAVSGAQILFVAFGALVLVPLLTGLNPAMALLGAGLGTLLFQACTGRQVPIFLGSSFAFIGPIIYSMHTWGPGATMFGLFAAGFMYFVFAAIVRWRGMALVNKLLPPVVIGPVIMIIGLSVATAASGMAMGQAGGKQVLPYETSLLLAAISLATTIVVSIYARGMFKLVPILAGVTVGYIAAAFLGAVDFAKLAAAPWFAAPTFHSPEVNWAAAAFMLPVAIAPAIEHIGGVMAIGGVTGKDYTKTPGLHRTLAGDGLGVCVAGLIGGPPVTTYAEVTGAVMITRNFNPVTMTWAAVFAICMAFFGKFNALLQSIPMPVMGGIMVLLFGTIASIGLKTLIEAKVDLMEPRNLVIISVVLTAGIGGLTLKLGDFALSGVGLCSLLAIILNLILPRRAASHDGIVEGQDI

SEQ ID NO: 11122 - protein, 298 aa, Synechococcus elongatus PCC 7942
MLKAVWLQQNRGELVAIAEQKQTVGSLEWFYREAEPTQADPAKLPVVCLHGLVSQSYGWRQVLPAIADAGFRAIAPDWIGAGFSSQPERREFAYTPEAFVSALEAWRAELGIERLHLVVQGYLGAVGLLWAAQHPDRVERIALFNTPFYAGASVPWKIRQLGLPLAGEMLCQDPLTVDRVLEGGGGYRVEDADLDVYRRPYLSSSAAGRALLATVRQLDQARVSTEIASALAQWSQPILVGWGDRDPWLTWVEAEAAAAKLPSAEFVRFEETGHYPQEDWPEKLCQALLLFLRRADLR

SEQ ID NO: 11123 - protein, 279 aa, Pediococcus pentosaceus ATCC 25745
MINSLNDRIMLNNGTAIPGLGLGVFQIPDADTAQVVANGIKNGYRLIDTAQIYGNEAGTGAGIKAGLTATGLKRADLFVTSKVWNDHLSYDETIAAFESSLKKLGLDYLDLYLIHWPGDNAFQDAWRALETLYKQGKIKAIGVSNFQIHHLQALAEFAEITPVINQIETHPQLSQLEMREYAAKHDIKVQAWSPLMQGKILDNAVLAKIAQKYNKSVAQIVLRWDVQQNILLVVKSVRAERMLSNAQIFDFELAPEDMDQINALNENLRVGPNPDEFDF

SEQ ID NO: 11124 - protein, 444 aa, Prochlorococcus marinus str. NATL2A
MNEENGKNNKPFEYETNNLIRSNFNEKESVQDLENIAPKPSNQLTNGLLGWYSVSSSESIKEGKLNHFTIYNEPLVLYRDREGIVRCVKDVCPHRGASFLGGEVINGQLVCPYHGARFSSQGSCTNLDRITCQHIIDSNYDSYAKSIKLFQYPCVEKEGYIYIYYTGTPLANIEDFQIKSSINSLLPDSYGFPSLEYEYEEVYVDFKADWARIIENHLDILHVFWMHGDTIPDKNVNRETITSFNQKIKRDNRQIESIYSYKTNGQEEFIRIKFVPPGRIFIYKGSPESTRYIQVLDHIPLGNNKARVIVRHYRKFLKNKLFTNLVLFSHLQRRTFYKIFTEDYLVLKTQTFNDQMGYIQKDNVKLLGEDKMVQYYWDWLQNALNKEKPWDIHPTNSLTNTVHEDRGMQYPPENPNMAIKNNRQIIIKLLTRLLFPISFILLLI

SEQ ID NO: 11125 - protein, 499 aa, Yarrowia lipolytica CLIB122
MEFEELELIGRGSFGQIRKVRRINDGQILARKEISYRRMTPKEKEQLIAEFRILKGLHHTNIVGYLHHEHLPDKHLVHLYMDYCGGGDLAGLIQQCKETDERVPERIVWSIFTQLLLALYRCHFGQDAPPLTDLFTNQGEEDEVYPSNVILHRDIKPDNIFLDGDHCVKLGDFGLAKMLDQSHMMANTFVGTPYYMSPEVLLNDVSSPASDIWSLGCVIYELCQLHPPFQAKNHVQLTQRVQDGMYPELPPRYSSTLKRTIQACLDINPHNRPSTATLLRLDIIKLVRKDRMLSEQHQHLLEYQENLKREVEIFEERREEVLQISQNLEQYRETVEQEYFNNIQSELESVVEQEVERRVRQALADLPAPTPPPPISPTAHRSSPRDISMSFSPSQLTPIKHVKGPRGLAISTPLKRTPLKPLEELPLTNASNPSLTSSGSSHDSDKSASKQRAAPHFHAVYAGFKTPAAVKRPAKRTYIDQWDEAPSPFLRRQAAASYD

SEQ ID NO: 11126 - protein, 317 aa, Brassica napus
MATLKVSSSVPSPSEDAEQLKSAFDGWGTNEELIISILAHRSAEQRKLIRQTYHESFGEDLPKSLEKELTSDFERAILLWTLEPGERDALLGNEATKRWTSSNQVLMEVACTRTSTQLLHARQAYHARFKKSIEEDVAHHTTGDFRKLLVSLVSSYRYEGEEVNMTLAKQEAKLIHEKIKDKHYNDEEFIRILSTRSKAQINATFNRYQDNHGEEILKSLEEGDEDDKFLGLLRSTIQCLTRPELYFVDVLRSAINKTGTDEGALTRIVTTRAEIDLKVIGQEYQRRNSIPLEKAITKDTRGDYEKMLIALLGEDDA

SEQ ID NO: 11127 - protein, 697 aa, Neurospora crassa
MANTGPGNVPLHFIQKPPFTVEDPNAQPIPGETIPRRHPKAKNGLATRPAPGVNTTLDLLTRTVELYGDERAIGSRKLIKLHKDIKKVPKVVDGETVMVDKEWQCFELTPYSYITYGEYFTIVKQIGAGLRKLGLEPKDKLHIFATTSPQWLGMSHAASSQSLTIVTAYDTLGESGVQHSLVQSKASAMFTDPHLLKTATNPLKEATSVKVVIYNNHTTQPVSQDKIDAFKAEHPDLTVLSFEELRALGEENPVPLTPPNPDDTYCIMYTSGSTGPPKGVPVSHAGFVAAVAGLYAVMEESVTHRDRVLAYLPLAHIFELVLENLGVFVGGTLGYSNARTLSDTSMRNCPGDMRAFKPTIMVGVPQVWETVKKGIEGKVNSAGALTKALFWGAYNIKSFLVSNNLPGKTIFDDLVFGQVRTMTGGELRFIVNGASGIAASTQHFMSMVVAPMLNGYGLTETCGNGALGSPMQWTSNAIGAMPAAVEMKLVSLPELNYHTDTVPPQGEILFRGACVIKEYYENPEETAKAITPDGWFKSGDIGEIDANGHLRVIDRVKNLVKLQGGEYIALEKLEAVYRGAVFVHNIMVHGDNSAPRPIAVVVPNEKALAEKAEELGLGAEAPGEMHRNRKLRDAVLKELQSVGRRAGLSGMETVAGVVLVDDEWTPANGFVTATQKINRRAVKERYSKEISDCLDGK

SEQ ID NO: 11128 - protein, 554 aa, Shewanella sp. MR-7
MCSIFSILDIQSDAKELRQVALEMSKLMRHRGPDWSGIYASDKAILAHERLAIVDIEHGAQPLLTEDGSLILAVNGEIYNHKELKAQLGDKYSYQTNSDCEVILALYQEYGTEFLDKLNGIFAFVLYDKAKDAYLIGRDHMGIIPLYTGRDAAGNFYVASEMKALMPVCKTVAEFQPGQYLYSTTGEPVQYYTRDWQSFDAVKDNAASQEELREALEAAVKRQLMSDVPYGVLLSGGLDSSVISAITQTFAKRRIEDDDQSGAWWPQLHSFAVGLKGAPDLAAAKKVADAIGTIHHEINFTFQEGLDAIKEVIYHLETYDVTTIRAATPMYLMARKIKAMGIKMVLSGEGADELFGGYLYFHKAPNAQAFHEELVRKLDKLHLFDCLRANKAMAAWGLEARVPFLDKEFMDVAMRINPEAKMSKDGRIEKHILRQAFEHKLPKEVAWRQKEQFSDGVGYSWIDGLKAHAAEQVDDLQLANAKFRFPYNTPETKEAYFYRCFFEEHYPLASAAETVPGGKSVACSTPEALAWDESLRGIIDPSGRAVRSVHAASY

SEQ ID NO: 11129 - protein, 426 aa, Clostridium thermocellum ATCC 27405
MHKKEIIALLLAGGQGSRLGVLTKNIAKPAVLYGGKYRIIDFSLSNCVNSDIDTVGVLTQYQPLELNAHIGIGKPWDMDRINGGVTILSPYLKAEIGEWYKGTANAVFQNIHYVDKYSPKYVIILSGDHVYKMNYSQMLDFHKENNADATISVINVPWEEASRYGIMNTYENGKIYEFEEKPQNPKSNLASMGVYIFNWEVLKEYLIRDDQNEESAHDFGKNIIPMMLKEGRSMWAYKFNGYWRDVGTIQAYWESNMDLISRVPEFNLFDPAWKIYTPNPVKPAHYIGPTGSVKKSIVAEGCMIYGSVRNSVLFPGVYVSEGAEIVDSIVMSDSVIGENTQIYKCIIGEEVKVGKNVRMGIGENIPNELKPHLYDSGITVVGEKAVVPDGCQIGKNVVIDPYITAEEFPSLNIESAKSVLKGGETE

SEQ ID NO: 11130 - protein, 373 aa, Clostridium thermocellum ATCC 27405
MKSTMGIILTGGKNDRLKELAEMRSSTAVPIGGKYRVIDFVLSNMVNSGIKNIGVLTQYSFRSLMDHLGSGKEWDLDRRNEGLFIFPPYLAGEHSGWYQGSADAMYHNITFLKRSYEEYVLVAQGNCVYKMLFDDMLDYHIKKNADITIAYRDMSDFPREELSFMGVMTMDENRRVVDFKEKHKNPESTICSMGIYILKRELLIALLEECNSHGKYDFVKDVIINKLPTLNIYGYKFEGYWRNLNSINAYYRINMEMLNPEIRYQLFEQHGKVYTKVKDEPPAKYNEEAEVRNSIIADGCIIEGTVINSVLFRGVTIKRNAVVKDCIIMQDSVIEEDVDIESLIIDKNVYLSKGIRLKGMVNFPITIGKNAVI

SEQ ID NO: 11131 - protein, 528 aa, Triticum aestivum
MATEGLRMLLADASRSPWGVAGAAAAVALLWFAAWVLEWAWWTPRRLGRALRAQGIRGTRYRLFTGDIPENARCNAVARSRPMPLGSHDITPRVLPMFSNAIKEHGKVSFTWFGPTPRVMIPDPELVREILSNKFGHFGKQRSTRIGKLLANGLANHEGEKWAKHRRILNPAFHHEKIKRMLPVFSACCEEMVARWENSMSTEGLSEIDTCPEFQNFTGDVIARTSFGSNYQEGKKIFELQGELAKRLMQAFQTFFIPGYWFLPTKNNRRMRAIDHEIRMIMRGIIGKKERAIKNGEASSNDLLGLLLESNMQQSNGKAGQGMSIDDIIEECKLFYFAGMETTSVLLTWTLIVLSMHPEWQEQAREEVLHHFGRTTPDYEHLSRLKIVTMILYEVLRLYPPVTYLTRRTYKATELGGIKYPTGVTLILPLLFIHHDPDIWGEDASEFNPQRFADGISSAAKHPSAFFPLGGGPRICMGQNFALLEAKMALSTILQRFSFALSPSYTHAPYTVMTLQPQPGAPHASEKI

SEQ ID NO: 11132 - protein, 383 aa, Allium cepa
MMKEIGAAGGAVVVTGAGGYVGSWLVMKLLHYGYTVRATLRDSSDEAKTKPLLELPGADTRLSLWEADLLQDGSFDHVISGSIAVFHVATPMDFDSIDPENEVIKPAVNGMLSIMKSCKKAGTVKRVIFTSSAGTVNVEEHQKPEYDENSWSDIDFCRRVKMTGWMYFVSKSLAEKAAWEFAKANGIDLVTIIPTLVVGAFITTAMPPSMITALSLITGNEAHYSIIKQAQLVHLDDLCEAHILLLNHPKAEGRYICSSHDVTIYDMAKMIRQNYPQYYIPQQFEGIDKGIQPVRFSSKKLVDLGFRYKYSMESMFDEAIKTCVERKFIPLQTAVELQLKPYELLEHNNKNGVVTNTIKIVGQMVNTKAMITEHEENEPIATH

SEQ ID NO: 11133 - protein, 412 aa, Shewanella sp. MR-7
MSKRRVVVTGLGLVTPVGNTVDTTWKALLSGKSGIAPITKFDASEFTTRFSGSVKDFDVEQYLTKKDARKMDLFIQYGMAAGIQAVQDSGLDMSKLNPGRVGTAIGAGMGGMWLIEQNHSALLSGGPRKISPFFVPSTIINMIAGHLSIMYGMTGPNFAVTTACTTGVHNIGFAARTIAYGDADVMVAGGAEDVTCPLGVGGFGAAKALSTRNDDPTAASRPWDKDRDGFVIGDGAGVMVMEEYEHAKARGATIYGELVGFGMSGDAFHMTSPPSDGAGAAAAMVNAVNDAKLPFEKIGYINAHGTSTPAGDKAEAAAVKSVFGDHAYNLLVSSTKSMTGHLLGAAGAVEAIFTLLALRDQAVPPTINLDNPDEGCDLDFVAHTARDVKLEYALCNSFGFGGTNGSLLFKKV

SEQ ID NO: 11134 - protein, 198 aa, Kluyveromyces lactis NRRL Y-1140
MATNITWHQNLTYDERKELRKQSGCTIWLTGLSASGKSTIACALEQLLLNKGLSAYRLDGDNIRFGLNKDLGFSEQDRNENIRRISEVSKLFADSCSIAITSFISPYRIDRDKARELHKEGALKFIEVFVDVPLEVAEQRDPKGLYKKAREGIIKEFTGISAPYETPLSPELHLRTDQQSVEECALKIYEYLVKEKLI

SEQ ID NO: 11135 - protein, 339 aa, Arabidopsis thaliana
MEKYEMVKDLGFGNFGLARLMRNKQTNELVAVKFIDRGYKIDENVAREIINHRALNHPNIVRFKEVVLTPTHLGIVMEYAAGGELFERISSVGRFSEAEARYFFQQLICGVHYLHALQICHRDLKLENTLLDGSPAPRLKICDFGYSKSSVLHSNPKSTVGTPAYIAPEVFCRSEYDGKSVDVWSCGVALYVMLVGAYPFEDPKDPRNFRKTVQKIMAVNYKIPGYVHISEDCRKLLSRIFVANPLHRSTLKEIKSHAWFLKNLPRELKEPAQAIYYQRNVNLINFSPQRVEEIMKIVGEARTIPNLSRPVESLGSDKKDDDEEEYLDANDEEWYDDYA

SEQ ID NO: 11136 - protein, 670 aa, Vibrio sp. Ex25
MYSGADMSSRKHLANAIRALSMDGVQQANSGHPGAPMGMADIAEVLWRSHLNHNPSNPEWADRDRFVLSNGHGSMLIYSLLHLSGYELSIDDLKNFRQLHSKTPGHPEYGYAPGIETTTGPLGQGITNAVGMAIAEKALAAQFNKEGHDIVDHFTYVFMGDGCLMEGISHEACSLAGTLGLGKLIAFWDDNGISIDGHVEGWFSDDTPKRFEAYGWHVIPAVDGHDPEAINAAIEAAKADPRPTLICTKTIIGFGSPNKSGSHDCHGAPLGHDEIQAAREYLGWEYGPFEIPADVYAEWDAKEAGAAKEAAWNEKFEAYAAAYPAEAAELKRRLNGELPAEWEEKANQIIADLQANPANIASRKASQNALEAFGQMLPEFMGGSADLAPSNLTMWSGSKSLETDDFSGNYIHYGVREFGMTAIINGIALHGGFVPYGATFLMFMEYARNAMRMAALMKIQNIQVYTHDSIGLGEDGPTHQPVEQMASLRVTPNMSTWRPCDQVESAVAWKLAIERKDAPTALIFSRQNLAQQDRTAEQVANIAKGAYILKDCEGKPELILIATGSEVELAVEAATQLTAEGKKVRVVSMPSTDAFDKQDAAYREAVLPSDVTARIAIEAGIADFWYKYVGFDGRIIGMTTFGESAPAGQLFEMFGFTTENVVNTAKELLA

SEQ ID NO: 11137 - protein, 718 aa, Arabidopsis thaliana
MDGKIVIITGGASGTGAESARLFTDHGAQVVVVDLQEEQGKTSPFQSAKTEQVFTVVMLQTRRNQPGVLETPGSILDLNLERFHRTMAVNVRGAAVSIKHAARAMVEKGTRGSIVCTTSVTSEIVVRDLMNTRRRSMGSHDEETAKQTEEYCEARGIFKGVVLKARHVAEAALFLASDDSVYISGQNLAVDGGTSVTIMVHNSEVKPILEPLKKLDGKIVIITGGASGIGAESVRLFTEHGARVVIVDVQDELGQNVAVSIGEDKASYYHCDVTNETEVENAVKFTVEKYGKLDVLFSNAGVIEPFVSILDLNLNELDRTIAINLRGTAAFIKHAARAMVEKGIRGSIVCTTSVAAEIAGTAPHGYTTSKHGLLGLIKSASGGLGKYGIRVNGVAPFGVATPLVCNGFKMEPNVVEQNTSASANLKGIVLKARHVAEAALFLASDESAYVSGQNLAVDGGYSVVKPLDGKIAIITGGASGIGAEAVRLFTDHGAKVVIVDFQEELGQNVAVSVGKDKASFYRCDVTNEKEVENAVKFTVEKYGKLDVLFSNAGVMEQPGSFLDLNLEQFDRTMAVNVRGAAAFIKHAARAMVEKGTRGSIVCTTSVASEIGGPGPHAYTASKHALLGLVKSACGGLGKYGIRVNGVAPYAVATAINSRDEETVRMVEEYSAATGILKGVVLKARHVAEAALFLASDDSAYVSGQNLAVDGGYSVVKPI

SEQ ID NO: 11138 - protein, 194 aa, Triticum aestivum
MAPTVMASSATSVAPFQGLKSTVGLPVSRRSNGASLGSVSNGGRIRCMQVWPIEGIKKFETLSYLPPLSTEALLKQVDYLIRSKWVPCLEFSKVGFIFREHNASPGYYNGRYWTMCKLPMFGCTDATQVINEVEEVKKEYPDAYVRIIGFDNMRQVQCVSFIAFKPPGCQESGKAYTAHSRQAIYKVPLQYGQL

SEQ ID NO: 11139 - protein, 520 aa, Brassica napus
MESSISQTLSQVIDPTTGILIVVSLFIFIGLITRRRRPPYPPGPRGWPIIGNMSMMDQLTHRGLANLAKKYGGLCHLRMGFLHMYAVSSPDVAKQVLQVQDSVFSNRPATIAISYLTYDRADMAFAHYGPFWRQMRKVCVMKVFSRKRAESWASVRDEVDKMIRSVSSNVGKSINVGEQIFALTRNITYRAAFGSACEKGQDEFIRILQEFSKLFGAFNVADFIPYFGWIDPQGINKRLVKARNDLDGFIDDIIDEHMKKKENQNSVDAGDVVDTDMVDDLLAFYSEEAKLVSETADLQNSIKLTRDNIKAIIMDVMFGGTETVASAIEWALTELLRSPEDLNRVQQELAEVVGLDRRVEESDIEKLTFLKCTLKETLRLHPPIPLLLHETAEDTEIDGYFVPKKSRVMINAFAIGRDKNSWVDPETFRPSRFLEPGVPDFKGSNFEFIPFGSGRRSCPGMQLGLYALELAVAHILHCFTWKLPDGMKPSELDMSDVFGLTAPKATRLYAVPSTRLICSV

SEQ ID NO: 11140 - protein, 600 aa, Rhodobacter sphaeroides 2.4.1
MAAYTYETHDYDVVVVGAGGAGLRATLGMAEQGLRTACVTKVFPTRSHTVAAQGGIAASLANMGPDNWQWHMYDTVKGSDWLGDTDAMEYLAREAPKAVYELEHYGVPFSRTEEGKIYQRPFGGHTTQFGEGPPVQRTCAAADRTGHAILHTLYGQSVKNNAEFFIEYFALDLIIQDGRCTGVVAWKLEDGTIHVFNAKLTVLATGGYGRAYFSATSAHTCTGDGGGMVARAGLPLQDMEFVQFHPTGIYGSGCLITEGARGEGGYLTNSNGERFMERYAPTYKDLASRDVVSRCMTLEIREGRGVGEHGDHIHLHLNHLPPETLALRLPGISESAKIFAGVDLHKEPIPVLPTVHYNMGGIPTNYWGEVLAPTEGDPDRVFPGLMAVGEAGCASVHGANRLGSNSLIDLVVFGRAAAIRAGQIVKPHEFHPDVPKVQVDEILGRFDDLRHANGAVPTAELRLEMQRTMQADAAVFRTDKTLAEGVEKMKGIAAKLGDLKVTDRSLIWNSDLMETLELTNLMPNALATIVAAEARKESRGAHAHEDWPNRDDENWRVHSLAVVKGNEVTLTTRPVHLDPLTKQTEGGIDLKKIAPKARVY

SEQ ID NO: 11141 - protein, 364 aa, Vitis vinifera
MEFHLLPILALISLVVAAGHAALPTKVYWNSVLPNTPMPKAIRDILRPDLMEEKGTSVSVGKGGVNVHAGKGKSGGGTTVGVGKGTGVNVHAGKGKPGGGTTVGVGKGGVSVNAGHKGKHVYVGVGKGKSKSPFDYKYAATEDQLHDDPNVALFFFEKNMQPGTKMELHFIRDANLATFLPRQVANSIPFSSKKFPEILNEFSIKPESEEAETIKNTIRECEEPGIKGEEKYCATSLESMVDFSTSKLGKGVQMISTEVEKETPEQQYTITTGVKKLAGDKAVVCHKQSYPYAVFYCHKTQTTRAYMVPLVGADGSKVKAVAVCHTDTSAWNPKHLAFQVLKVKPGTVPICHFLPEDHVVWVPK

SEQ ID NO: 11142 - protein, 589 aa, Lactobacillus gasseri
MKKTKIVSTLGPASNDVETITKLAEAGANVFRFNFSHGDHEEHRARMNMVREIEKKTGKLLGIALDTKGAEIRTTEQEGGKFTINTGDTIRISMDDTKKGNKDMIHVTYDGLYDDTHVGGHVLIDDGLVDLLIKEKDDAKRELVCEAQNTGLIGSKKGVNAPGVEIRLPGITEKDTNDIKFGLKEGINFIFASFVRKAQDVLDIRQLLEEAHCEYVKIFPKIESQEGIDNIDEILKVSDGLMVARGDMGVEIPFINVPFVQKELIRRCNALGKPVITATQMLDSMQENPRPTRAEVTDVANAVLDGTDATMLSGESANGLYPVKAVKAMAEIDMRTEKQLAKRNKLALQRFEEYKGSNVTEAIGESVVRTAEELGVKTIIAATESGYTARMISKYRPNADIIAMTFDEKIEHSLGVVWGVKPMLVEKPKTTEEMFDKAAELAKETGLAKDGDLVIIVAGVPLGETGTTNLMKLQLIGTQLVKGLGVGEQSVIGKAVVATSAEEANSKVQDGDILVAKTTDKDYLPAIKKASGMVVEASGLTSHAAVVGLSLGIPVVVGATDAVEKIKDGSKITVDARRGAVYQGEATNL

SEQ ID NO: 11143 - protein, 243 aa, Solibacter usitatus Ellin6076
MPYGAEAGYAWPAYVKIGVKLGGHTVKFFLDTANLDELKKGASWGIVDGVTTNPSLIAKEGRPIEEQVAEICKIVDGDVSAEVVSTEANAMIAEGLKLAKIHKNIVVKCPLTRDGIKATSALAKQGIRVNVTLCFSAGQALIAAKAGAYIISPFVGRLDDIGWTGMELIKSITQIYRNYGYKTQVLAASLRSPTHVIDSAMAGAHIGTMPFKVLDMLFNHPLTDKGLDQFLKDYNKAFAPAAV

SEQ ID NO: 11144 - protein, 214 aa, Zea mays
MASSASRFIKCVTVGDGAVGKTCMLICYTSNKFPTDYIPTVFDNFSANVVVDGTTVNLGLWDTAGQEDYNRLRPLSYRGADVFVLAFSLVSRASYENIMKKWIPELQHYAPGVPVVLAGTKLDLREDKHYLMDHPGLVPVTTAQGEELRRQIGAMYYIECSSKTQQNVKAVFDAAIKVVIQPPTKIREKKKKKSRKGCSMMNIFGGRKMICFKS

SEQ ID NO: 11145 - protein, 255 aa, uncultured bacterium 560
MKVATISLNIAWQDVEKNLERAEKFVLQAKADGCDVVVLPEVFNTGFIADVGKYAELPNCKTHHALQQFALNNLINIVAGASEKKPNEKAHNIALVFDSHGNEVAKYSKLHPFNYANEGKYFASGNETIKFELDGVACSVFICYDLRFPEIFRQIAKEVEVIFVVANWPHTREMHWQNLLIARAIENQCFIVGVNRIGNDGVGLKYNGSSMVINPLGEVLLQTDKETEYASCDIDTSMVSKTRKDFPFLEDIRFI

SEQ ID NO: 11146 - protein, 347 aa, Prochlorococcus marinus str. NATL2A
MRVLLTGGSGFIGSHVALLLIERGLDVLILDSFANSSSNVINRINTYLDDKLLKYRLEIINGDIRDKKLLESIFSDSINSHKPIDIVIHLAGLKSVAESLTNPIHYWDVNVHGTLNLLLTMKEYECYSFVFSSSATIYGLSDSVPMAEDHRISPINPYGKTKVAIENMFYDLYNSNNLWKICSLRYFNPVGAHPSGLIGEDPIGIPNNLFPFLTQVAIGKRKFLNVFGDNWDTYDGSGIRDYIHIMDLAEGHLASLDYISSSDSCLEFINLGSGNGYSVFQIIRQFELTTGCQIPFSIQNRRDGDVAISYADISKAKKLLGWTPKRTLEQICLDGWNWQIRNPNGYN

SEQ ID NO: 11147 - protein, 466 aa, Lactobacillus brevis
MENTRMKQMRRSNQSSGPALNCHDLPKYKLAKHALEPRPREADRLVRDQLLDEGNSRLNLATFCQTYMEPEAVELMKDTLEKNAIDKSEYPRTAEIENRCVNIIANLWHAPEAESFTGTSTIGSSEACMLAGLAMKFAWRKRAKANGLDLTAHQPNIVISAGYQVCWEKFCVYWDIDMHVVPMDDDHMSLNVDHVLDYVDDYTIGIVGIMGITYTGQYDDLARLDAVVERYNRTTKFPVYIHVDAASGGFYTPFIEPELKWDFRLNNVISINASGHKYGLVYPGVGWVIWRDQQYLPKELVFKVSYLGGELPTMAINFSHSASQLIGQYYNFIRFGFDGYREIQEKTHDVARYLAKSLTKLGGFSLINDGHELPLICYELTADSDREWTLYDLSDRLLMKGWQVPTYPLPKNMTDRVIQRIVVRADFGMSMAHDFIDDLTQAIHDLDQAHIVFHSDPQPKKYGFTH

SEQ ID NO: 11148 - protein, 1040 aa, Cryptococcus neoformans var. grubii
MSRVPSGSQQPQYTQQPLYHPSSVHSQSASVQQTHQQYHPHAGQPMAFQGDPHAYSYDRQSQINTWQANPGAAGSMEYHSAVAGSSRGADPYQPYSQPHRSSPSQPVTAGRTQPASAQQYTPWAPVQASATTTPSSRGGGVKLEDLMSNDSRADGKSQPLSSIPLSVSASFDTRSQFSAGPQGASTEKEKDKERDKATQQQGPSEFIKKLYKMLEEEQAQYGSSRAKKGEKGKRGSVGWGANGTSFVVWDMNDFTTKILPQTFRHSNFSSFVRQLNKYGFSKIKHVDAGTGSIKENIWEFQHPNFQAGGKSDLESIKRKPVAPKKTNNQEGDENSPRYVGLSNEDQSRMHLMEDRINILEDALAKSRSEADEARMREMAMMGLVRDMIGHIAASESEAIGSPAATTGHSPRVLHLLKSLDNLARAYPPEMYHSNIARQPTTMPYTPAQPQSHQSFLNAAYNPAFSGSSVGGAAQAQASPHTDGTGSRGSLSGPSTGEIKPPASSSRLRAASNAGVVPPGSVNASVPVASQPSGNPPAGPVAHVEDPAEDVIEIPNQMQDMYGGESVSIAPLFVETPAWLTEGTTIPLTMYRKQSDGQALKAVYQAFAAGGKLPAGEGQDEDGNAIASGSSTSAAEIMAGSSQMGLQQSYDAGPSTSTGIPLPMDGSPSSESSSRKGKGKKSRGTSLKEQRESKLKPHWAQTPRILVVEDDIVYRTLSKKFLQKFGCETETVENAQGAVDKMNGTKYDLVLMDIFFGPNMDGRKATSLIRQFNNYTPIISMTSNAQPQDVDSYYQSGMNDILAKPFTKNHLFTILDKHLVHLRHAQLYERLIPLGVGVPPLSDQHVQEALAVSAATLQNTNGQLQLENGQTAEAQNEQQDSNGELELGIRNPLAGSGWSDEAYQLVLAQFLQTGVMPDITTISAVSSSPNPNGFDGTIGTSIVFGESSGFSRKRSIEAINDDNWDGQAQTPASAQAQVQAQTQNTIMQGDQQQGMSLQMPTNVGMGMDVNMGNMPESGMMNQDMSNDSDGRETKRARGMAG

SEQ ID NO: 11149 - protein, 393 aa, Bordetella pertussis Tohama I
MSSALANIYARLPVSFTHGRGVWLWDTGERRYLDALAGIGVSCLGHGHPGLVAAISEQAARLIHTSNIYEVPQQAALARRLAELSGMSEVLFNNSGSEANEAAIKLARYYGYKQGNTHAHIITMDSSWHGRTLATLAATGSDKARQGFGPMPSGFIQVPYNDLPAIRAAGEAEPRVTAVLLEVLQGEGGIRPSDMAFLQGVRQLCTERGWLLMIDEVQSGIGRTGKWFAHQWADIRPDVMTLAKGLAGGVPIGAMLAAGPAAGVFAPGSHGTTFGGGPLACAAGLAVIDAIEQEGLLGNAHEVGAHLHAALASELAGAPGVIEVRGRGLMLGIELDRPCGILATRAMEAGLLINVTRERVVRLLPPLILSGEEADQIVRILVPLIKQFLAQQQ

SEQ ID NO: 11150 - protein, 183 aa, Arabidopsis thaliana
MGFISSSSPVEESHYHTHKIFLFSNYILLGAASSCIFLTLSLRLIPSICGFLLILLHATTIAAAVSGCAAASCGRNRWYAAHMVATVLTAIFQGSVSVLIFTNTSKFLGSLKSYVRDEDAAVILKLGGGLCIVIFCLDWIVLVCAFFLKYYAYVDGGDGVAMKRTGKVQSEENPKDWPWPFQV

SEQ ID NO: 11151 - protein, 260 aa, Mesorhizobium loti MAFF303099
MEVIMTKTPFKTLEDKVALITGASSGIGRATAVELARRGAKVIASARRAFEIETLVADIKNEGFEATAVVADVNVEHSVIDLVAKTISTYGRIDIAFNNAGTEGMFSPFVDQTNETYDTIFNANVRGVFWSMKHEAKAMLAQGGGAIINNASMGGVIGFANAGLYIASKHAVLGLTKTASIELFKQGVRVNAINPGIIDTPFQDRIWPSAEAKDAFAASTVPGRAGSPEEMAAVVAFLASDDASFVSGHGLLADGGYSIA

SEQ ID NO: 11152 - protein, 182 aa, Gossypium hirsutum
MASSMISSATIATVNCSSPAQANMVAPFTGLKSASAFPVTRKANNDITSLASNGGRVQCMQVWPPLGKKKFETLSYLPDLTPVQLAKEVDYLLRSKWIPCLEFELEEGFVHRKYSSLPTYYDGRYWTMWKLPMFGCTDSAQVLEELENCKKEYPNAFIRIIGFDNVRQVQCISFIAYKPKGY

SEQ ID NO: 11153 - protein, 317 aa, Bordetella pertussis Tohama I
MTTKHRIIQVGSLAGSPTANRRLADEYDVLELWQQADRAAALARHGKGVTALVTSANFGADAALIDALPDLKAICSWGVGYETIDVDAARKRGVLVSNTPDVLTDCVADLAWGLLISGARRMAQGDRFVRAGQWGQVHGSIPLGTRVSGKNLGIIGLGRIGEAIARRGDGFDMQVRYHNRRRRDDVSYGYESSLADLARWADFLVVATVGGPSTRHLVNQEVLEALGPKGLIINIARGPVIDEAALVAALQAGKLGGAALDVFEHEPLVPDALKASDDTVLLPHISSATFETRMAMENLMLDNLASFFKTGDVITPV

SEQ ID NO: 11154 - protein, 74 aa, Triticum aestivum
  misc_feature (7)..(7): Xaa can be any naturally occurring amino acid
  misc_feature (17)..(17): Xaa can be any naturally occurring amino acid
  unsure (1)..(74): unsure at all Xaa locations
FFRKEDXLDKSLHRASXDQQKPIPAVRIGDTQVSSLEDIITSMKDSSSSKWDDAVFIPPGFDIAIGSEPSHLNK

SEQ ID NO: 11155 - protein, 368 aa, Prochlorococcus marinus str. NATL2A
MTATASSSPKLRVDTRGTNELPPHLDENLLTPRFYVTEFKKAAKTELTDAREEFEAMLSEMKADYNCTHFDRKASLDRLQELPQKAKETYESYLVRSVISEFSGFLLFKEISNRLKKEGNRDLGKLFQFLARDEARHAGFLSRALVAEGIEVDLPHLGGKRAATWFPISWVIYSVYLSEKIGYWRYILMDRHLKANPDQAFAPLFDFFEPWCQDENRHGDCFTVMMRCWPGITKGFRGKLLSRFFLWSVFLTHTLTVCERGEFYELLGIDPKEFDEEVIKRTNHTSKNAFPWVFNLDDNKFWDLRNKIIESFRAFVGAKGLTKPVKFVKFATLIFKQFALPMEKTDALRYDKNVNFTGQDILNFWTDK

SEQ ID NO: 11156 - protein, 386 aa, Ashbya gossypii ATCC 10895
MVETADVTHFVQPRVATEEIVPQQDASSTMPGLSMESRSLCKNIMRAEWAQESGRQLRGRKLEGRTTKGKYTLYDFQILRTLGTGSFGRVHLVRSNHNGRFYAMKVLKKHVVVKLKQVEHTNDERKMLSVVSHPFIIRMWGTFQDAHQVFMIMDYIEGGELFSLLRKSQRFPNPVAKFYAAEVCLALEYLHSKDIIYRDLKPENILLDKNGHIKLTDFGFAKYVPDVTYTLCGTPDYIAPEVVSTKPYNKSVDWWSFGILIYEMLAGYTPFYDQNTMGTYENILNAEVKFPPFFNAKVRDLLSQLITRDLSKRLGNLQNGSQDVKAHPWFSEVIWDKLLCRNIETPYEPPIHAGQGDTSQYDRYPEEDANYGALGEDQYQALFSDF

SEQ ID NO: 11157 - protein, 212 aa, Zea mays
VTRSTTSAPPLARFCSLPPGSRLLLHATVNAPLPDPASSPLRPSMAASSTATSVHDFIVKDASGKDVDLSTYKGKVLLIVNVASQCGLTNSNYTELAQLYEKYKDQGFEILAFPCNQFGGQEPGTNEEIVQFACTRFKAEYPIFDKVDVNGNNAAPIYKFLKSSKGGLFGDSIKWNFSKFLVDKEGRVVDRYAPTTSPLSIEKDIKKLLGSS

SEQ ID NO: 11158 - protein, 547 aa, Haemophilus ducreyi 35000HP
MAIKDVKFGNDARVKMLKGVNILADAVKVTLGPKGRNVVLDKAYGAPTITKDGVSVAREIELEDKFENMGAQMVKEVASKANDVAGDGTTTATVLAQSIVSEGLRAVAAGMNPMDLKRGIDKAVAAVVEELKAISKPCETSKEIEQVGTISANSDETVGKLIAQAMEKVGKEGVITVEDGTGLDDALDVVEGMQFDRGYLSPYFINKPEAGTVELDNPYIILVDKKISNIREILPVLEAVAKAGKPLLIIAEDVEGEALATLVVNTMRGIVKVAAVKAPGFGDRRKAMLQDIAILTAGTVISEEIGMELEKATLEELGQAKRVVITKDNTTIIDGIGDEAQIKARVVQIRQQIEDSTSDYDKEKLQERVAKLAGGVAVIKVGAATEVAMKEKKDRVDDALHATRAAVEEGIVPGGGVALVRAANKVSATLTGDNEEQNVGIKLALRAMEAPLRQIVENSGEDASVVARDVKDGSGNFGYNATTEEYGDMLEMGILDPTKVTRSALQFAVSIAGLMITTECMITDLPKEDKLDAQAAMGGMGGMGGMM

SEQ ID NO: 11159 - protein, 412 aa, Klebsiella pneumoniae
MIALTFSGIRLDAMKRTPLIILNGFLGAGKTTLLKNLLTQAHKRRMAVSVIVNDMSELDVDGVLIANTEIVDAASNNFVSISADSISSRSGIQKLDSALKNLLEKRSPDFILLETSGSSHPLPLVRYLREHPQVSLKAFLSLVDTVMLNDDYDGGKKLIPVFQEHLNRGTRGVESLLAEQIMFCNKLLLTKNDRLPFYVVTEVARAIHPLNPQVAIMAVPWGNLQLDELLSMPDYDFHRVALLIDELQDAIDAVLSDEPDKKYDISWRVIEDDRPFHPQRLWDTCHRFMGAGVYRSKGFFWLPGRDDLALLWNQAAGSINLEFISYWKAGVLTHTDNSLTKEERAAIRQQLAKMPGRFGDRRCRLTVIGESGEIDDFALALRQCLLTEEEILWWQQGGIFHDPWPTKVARLA

SEQ ID NO: 11160 - protein, 96 aa, Haemophilus ducreyi 35000HP
MSIRPLHDKVILKREEVETCSAGGIVLTGSATVKSTRGKVIAVGTGRLLENGSIQPLSVKEGDMVIFNEGYGAKVEKIDGEEILILSENDILAIVE

SEQ ID NO: 11161 - protein, 213 aa, Zea mays
  misc_feature (194)..(194): Xaa can be any naturally occurring amino acid
  unsure (1)..(213): unsure at all Xaa locations
KAAATSSSTYLAIGRKTLNPAPSVSLAGHEEYIVRGGRDLFPLLPEAFKGIKQIGVIGWGSQGPAQAQNLRDSLVEAKSDIVVKIGLRKGSKSFEEARAAGFTEESGTLGDIWETVSNSDLVLLLISDSAQADNYEKIFSHMKPNSILGLSHGFLLGHLQSLGFDFPKSISVIAVCPKGMGPSVRRLYVQGKEXNGAGINASFAVHQDVDGRA

SEQ ID NO: 11162 - protein, 324 aa, Rhodospirillum rubrum
MAKAIRFREVGGPEVLTLETVDLPDLGPGDVLLRQTAVGVNYIDTYQRSGLYALPLPSGLGLEAAGVVEAVGPGVSLVAVGQRVCYGTGPLGAYADRRVMPENTLLAIPDTITDTQAAGMMLRGMTVRYLIRQTFPVQSGMTVLLHAAAGGVGLIACQWLKHLGVTTIGTVGSDEKAALARAHGCSHVINYSTENFVERVREITGGQGVPVVYDGVGAAVFEGSLDCLQRRGMMVTFGNASGPVPPIAPALLSQKGSLFLTRPTLAHYTADRRELVDTANDLFAVVGNGAVKIDIGQTYALADAVKAHQDLAGRRTTGSTVLIP

SEQ ID NO: 11163 - protein, 480 aa, Aspergillus niger
MPSLGGLLKKRRTKDSQTLSKELEAGSAQTQTSPNAAEDHHNHNHHQHHHHLFHHHHQPQPATNSGSAANTPPQPQDSVPQQSNRSSGAEKSSDGQVASMQSAVTQASPSAHHTSGLPQPNANAASIQNIINPSQQGAMHSASSGHTQSHHAGRSDARTTKGKYSLDDFSLQRTLGTGSFGRVHLVQSKHNHRFYAVKVLKKAQVVKMKQIEHTNDERRMLNRVRHPFLITLWGTWQDSRNLYMVMDFVEGGELFSLLRKSQRFPNPVAKFYAAEVTLALEYLHTQNIIYRDLKPENLLLDRHGHLKITDFGFAKEVPDITWTLCGTPDYLAPEVVSSKGYNKSVDWWSLGILIFEMLCGFTPFWDSGSPVKIYENILRGRVKYPPYLHPDAVDLLSQLITADLTKRLGNLHGGSDDVKNHPWFAEVTWDRLARKDIDAPYVPPIRGGQGDASQYDRYPEETEQYGMAGEDPHGHLFPDF

SEQ ID NO: 11164 - protein, 205 aa, Oryza sativa (japonica cultivar-group)
MVQPKKKFRGVRQRHWGSWVSEIRHPLLKRRVWLGTFETAEEAARAYDEAAVLMSGRNAKTNFPVQRNSTGDLATAADQDARSNGGSRNSSAGNLSQILSAKLRKCCKAPSPSLTCLRLDPEKSHIGVWQKRAGARADSNWVMTVELNKEVEPTEPAAQPTSTATASQVTMDDEEKIALQMIEELLSRSSPASPSHGEGEGSFVI

SEQ ID NO: 11165 - protein, 278 aa, Corynebacterium sp.
MTVPSIVLNDGNSIPQLGYGVYKVPPADTQRAVEEALEVGYRHIDTAAIYGNEEGVGAAIAASGIARDDLFITTKLWNDRHDGDEPAAAIAESLAKLALDQVDLYLVHWPTPAADNYVHAWEKMIELRAAGLTRSIGVSNHLVPHLERIVAATGVVPAVNQIELHPAYQQREITDWAAAHDVKIESWGPLGQGKYDLFGAEPVTAAAAAHGKTPAQAVLRWHLQKGFVVFPGSVRREHLEENLDVFDFDLTDTEIAAIDAMDPGDGSGRVSGHPDEVD

SEQ ID NO: 11166 - protein, 364 aa, Zea mays
MDRAAVTVGPGMDMPIMHDGDRYELVRDIGSGNFGVARLMRNRADGQLVAVKYIDRGEKIDENVQREIINHRSLRHPNIIRFKEVILTPTHLAIVMEYASGGELFERICNAGRFSEDEARFFFQQLISGVSYCHSMQVCHRDLKLENTLLDGSTAPRVKICDFGYSKSSVLHSQPKSTVGTPAYIAPEVLLKKEYDGKVADVWSCGVTLYVMLVGAYPFEDPDEPKNFRKTIQRILGVQYSVPDYVHISPECQDLISRIFVANPSTRITMPEIRSHPWFLKNLPADLVDDSATTTSKQYEEPEQPMQGMDEIMQILGEATIPAAGSRGLNQFLNDGLDLDDDMEDLDSDADLDLESSGEIVYAM

SEQ ID NO: 11167 - protein, 505 aa, Escherichia coli O157:H7
MCLDSFINVNGCFLLWRAKGETLMSAIDSQLPSSSGQDRPTDEVDRILSPGKLIILGLQHVLVMYAGAVAVPLMIGDRLGLSKEAIAMLISSDLFCCGIVTLLQCIGIGRFMGIRLPVIMSVTFAAVTPMIAIGMNPDIGLLGIFGATIAAGFITTLLAQLIGRLMPLFPPLVTGVVITSIGLSIIQVGIDWAAGGKGNPQYGNPVYLGISFAVLIFILLITRYAKGFMSNVAVLLGIVFGFLLSWMMNEVNLSGLHDASWFAIVTPMSFGMPIFDPVSILTMTAVLIIVFIESMGMFLALGEIVGRKLSSHDIIRGLRVDGVGTMIGGTFNSFPHTSFSQNVGLVSVTRVHSRWVCISSGIILILFGMVPKMAVLVASIPQFVLGGAGLVMFGMVLATGIRILSRCNYTTNRYNLYIVAISLGVGMTPTLSHDFFSKLPAVLQPLLHSGIMLATLSAVVLNVFFNGYQHHADLVKESVSDKDLKVRTVRMWLLMRKLKKNEHGE

SEQ ID NO: 11168 - protein, 620 aa, Magnaporthe grisea 70-15
MPSEGDIEMHSLAAKEDIMLAQQGSSSNHSMRREPIYDDNTRGPSALRRWADSFRRDPGIRITPKEVPLYLDRDQVHHHHIHHEQYHHPPPPLPPQVPMREHDGERYYDLRSATLATVNTGLSRELKGRHLQMIAIGGSIGTGLFVASGKALATGGPASVLLAYCIIGVMLYCTVHALGELAVVFPVAGSFSAFSTRFLDPSWGFAMGWNSLHDYTILGSQREKSRVCGNILDGHIGLNLFGVKGYGEAEFIFAIVKVTAVIGFILLGIVINVGGTTTEGYIGTKYWHNPGAFNNGFKGLCSVFVQAAFAFAGTELVGLAAAETANPRKSLPTAIKQVFWRITLFYIVALTIVGFLVPYDSKRLLARNIADAAASPFVIAIESAGIEVLPSIMNSVILIAVLSVGNSAVFGSSRTLAALADQGQAPRILAYVDRRGRPLVAILLSMSIGLLAFVADSDIQQELLDWLLAISALSSIFTWGSICLSHIRFRRAWSKKGRSLGDLAFRAQPGLAGSWIGFLLNAIFLVAQFWVGGWPLPPVTGEEMTPLSIAGEFFLQCMAIPIVLIMWLGHKLYYRTSLVRTDDMDIDTGRRDFNLPILMAQEYEEKLNWPRWKRLYRFFC

SEQ ID NO: 11169 - protein, 543 aa, Arabidopsis thaliana
MITPKLELLFFIIMFHVNSRFRYKLSYNFELPCSVQHIYKFFDLMETHFLILSLAFLFFISLKLLFGKRHSKFNLPPSPARPLPFIGHLHLLKQPLHRTFLSFSQSLGDAPIFSLRLGNHLTVVVSSYSIAEECFTKNDIVLANRPKFILGKHIEYNFTTMTSAPYGDHWRNLRRIGTLEIFSSHKLNGFLSVRKDEIRHLLLRLSKNSQHGFAKVEMRQLFYDLTINNILRMVAGKRFYGEGTEQDEVARRVTQLIDEIVYRAGVGNAADYIPILRWITDFEKGVKELASRVDEFLQSLVDERRVHKQKGNTMMDHLLSLQETQPDYYTDVTLKGIIIVMILAGTETLAGTLEWAMLNLLNHPEVLEKARTEIDTEVGFDRLMDEADTKNLPYLQWIVLETLRLYPVAPTNIPHMTSDDCILAGYDVPRGSMLLVNVWSMHRDPSIWEAPEMFKPERFKNEKLNQKLLSFGFGRRACPGVGLAHRLMSLALGSMVQCFEWQRIGEEYVDTREEPMAMMRPATPLLAMCKARPIVHKFLDAFA

SEQ ID NO: 11170 - protein, 538 aa, Staphylococcus aureus subsp. aureus MSSA476
MVKQLKFSEDARQAMLRGVDQLANAVKVTIGPKGRNVVLDKEFTAPLITNDGVTIAKEIELEDPYENMGAKLVQEVANKTNEIAGDGTTTATVLAQAMIQEGLKNVTSGANPVGLRQGIDKAVKVAVEALHENSQKVENKNEIAQVGAISAADEEIGRYISEAMEKVGNDGVITIEESNGLNTELEVVEGMQFDRGYQSPYMVTDSDKMVAELERPYILVTDKKISSFQDILPLLEQVVQSNRPILIVADEVEGDALTNIVLNRMRGTFTAVAVKAPGFGDRRKAMLEDLAILTGAQVITDDLGLDLKDASIDMLGTASKVEVTKDNTTVVDGDGDENSIDARVSQLKSQIEETESDFDREKLQERLAKLAGGVAVIKVGAASETELKERKLRIEDALNSTRAAVEEGIVAGGGTALVNVYQKVSEIEAEGDIETGVNIVLKALTAPVRQIAENAGLEGSVIVERLKNAEPGVGFNAATNEWVNMLEAGIVDPTKVTRSALQHAASVAAMFLTTEAVVASIPEKNNDQPNMGGMPGMM

SEQ ID NO: 11171 - protein, 543 aa, Pseudomonas fluorescens PfO-1
MTRYIFVTGGVVSSLGKGIASASLAAILEARGLKVTMLKLDPYINVDPGTMSPFQHGEVFVTHDGAETDLDLGHYERFIRTTMTQNNNFTTGRVYEHVLRKERRGDYLGATIQVIPHITDEIKRRIIKGAGDADVALVEIGGTVGDIESQPFLEAIRQLRVEVGSKRAMLMHLTLVPYIATAGETKTKPTQHSVKELRSIGLQPDVLICRSDHPVDVSSRRKIALFTNVEERAVISLEDVDTIYKIPAVLHAQGLDDFVVERFGLQCNGADLSEWEKVVDAKLNPEHEVTIAMVGKYMELLDAYKSLIEAMSHAGITNRTKVNLRYIDSEDIENQGTALLEGVDAILVPGGFGLRGVEGKITAVQYARENKVPYLGICLGMQVAVIEFARNVLGWKDANSTEFDRASGHPVVGLITEWEDATGAVEVRTEASDLGGTMRLGAQECLLEAGSKVHDCYGKDVIVERHRHRYEVNNNLLPQIIEAGLKISGRSSDAALVEVVEAPDHPWFVACQFHPEFTSTPRDGHPLFSGFVKAALAQHQKKA

SEQ ID NO: 11172 - protein, 291 aa, Brassica napus
MESSRYDCSCNGHFWSLLIPKHKKKMDKRWSLQGMTALVTGGASGIGYAIVEELASFGAKIHVCDISETLLNQSLSEWEKKGFQVSGSVCDVTSRPERETLIQTVSSLFDGKLNIFVNNVGVLRGKPTTEYDADDFDFHISTNLEPAFHFCQLSHPLLKASGYGSIIFIIVFTSSVAGVVSFSCGSLYGLAKGALNQLARNLACEWAKDGIRANAVAPNSIRTPLSQQFLDDVSFKEALFSRTPLGRIGEPNEVASLVAFLCLPAASYITGQTICVDGGLTVNGFSYQPHA

SEQ ID NO: 11173 - protein, 258 aa, Methanococcus maripaludis S2
MNKPVLVSFLVSGDPNPDATLKFMKTLDKYSGVIELGIPFSDPVADGPTIQAADVRSLSNNFKIAKSFEVLKEFRKESDTPVILMTYYNPVYKRGIENFVIQAKEAGANGLIIVDLPLQEATEYRKICKKHEMGTVFLAAPNTPEERLKISDEASTEFLYLISTFGITGARDTFEQMTFDFIKRARTTCKGKICVGFGISKGSHAESLIEQGADGVIVGSAFVDIIKNYGDSKEALVKLEELAKELSEGIDKGYEKRK

SEQ ID NO: 11174 - protein, 265 aa, Viscum album subsp. album
IAAGVQFGWALQLSLLTPYVQELGIPHKWASIIWLCGPLSGLFVQPLVGVMSDRCTSRFGRRRPFIFAGSLLIAISVLIIGHSADIGWWLGDRGGVRPRAIGAFVFGFWILDVANNMTQGPCRALLADLTGKDHRRTRVANAYFSLFMAIGNILGFATGSYNGWYKVFPFTVTSACNIDCANLKSAFYLDVVFMAITACISISAAQESPLDLPARSMLADEEMLGQSNSVQEAFLWELFGTFRCFPSTVWIILLVTALNWIAWFP

SEQ ID NO: 11175 - protein, 417 aa, Thermococcus profundus
MKKLEKKLSAEPINFDSFFSEKAMLMKASEVRELLKLVETSDVISLAGGLPAPETFPVETIKKIAVEVLEEHADKALQYGTTKGFTPLRLALARWMEKRYDIPMSKVEIMTVAGSQQALDLIGRVFLNPGDPIVVEAPTYLAAIQAFKYYDPEFISIPLDDKGMRVDLLEEKLEELRKQGKRVKIVYTVSTFQNPAGVTMSVDRRKKLLELANEYDFLIVEDGPYSELRYSGEPTPPIKHFDDYGRVIYLGTFSKILAPGFRIGWVAAHPHLIRKMEIAKQSIDLCTNTFGQAIAWKYVENGYLDEHIPKIIEFYKPRRDAMLEALEEYMPEGVEWTKPEGGMFVWVTLPEGIDTKLMMERAVAKGVAYVPGEAFFVHRDKKNTMRLNFTYVPEETIREGVRRLAETIKEEMKRVKG

SEQ ID NO: 11176 - protein, 218 aa, Ochrobactrum anthropi
MSFLDSYRKKTLMPSTDEALPGRAQPIPTSATHFVNSRPLKEPWPEGYKQVLFGMGCFWGAERLFWQVPGVYVTAVGYAGGVTPNPTYEETCTGLTGHAEVVLVVYDPKVVSLDELLTLFWEEHDPTQGMRQGNDIGTTYRSVIYTFDKADRDVAEKSREAYSQALAGRGLGPITTEIEDAPELYYAEDYHQQYLAKNPNGYCGLRGTGVSCPIPLAQ

SEQ ID NO: 11177 - protein, 534 aa, Yarrowia lipolytica CLIB122
MVHLGPRKPPSRKGSMADVPRDLLEQISQLETIFTVSPEKLRQITDHFVSELAKGLTKEGGDIPMNPTWILGWPTGKESGCYLALDMGGTNLRVVKVTLDGDRGFDVMQSKYHMPPNIKVGKQEELWEYIAECLGKFLADNYPEALDAHERGRDVDRTAAQSFTRDKSPPPHNQHISCSPGFDIHKIPLGFTFSYPCSQPAVNRGVLQRWTKGFDIEGVEGEDVVPMLEAALERKNIPISITALINDTTGTMVASNYHDPQIKLGNIFGTGVNAAYYEKVKDIPKLKGLIPDSIDPETPMAVNCEYGAFDNEHKVLPRTKWDIIIDEESPRPGQQTFEKMSAGYYLGELLRLVLLDLYKDGFVFENQGKNGQELGNGNINKSYFFDTSFLSLIEEDPWENLTDVEILFKEKLGINTTEPERKLIRRLAELIGTRSARISACGVAAICKKAGYKEAHAGADGSVFNKYPGFKERGAQALNEIFEWNLPNPKDHPIKIVPAEDGSGVGAALCAALTIKRVKQGLPVGVKPGVKYDI

SEQ ID NO: 11178 - protein, 406 aa, Chlorobium tepidum TLS
MHNEAFSTIAARVREAAHNLYPEVAALRRHLHQHPELSYQEFQTTAFIKKYLSGLGIEAEPPLMETGVIALLRGEGAPPSGERRTVALRADIDALPLQEENGHDFCSTVERCMHACGHDMHTAMLLGAATVLSGMKDALNGDVLLIFQPAEEKAPGGAKPLIEAGLLKKYKPSAIFAQHCFPSVKSGSIAMCKGGFMAAADELYVTIHGQGGHASAPHKTRDPILASAHIITALQHLVSRVAPPHESAVLSIASISGGHATNIIPGNVTMMGTMRTMNEELRALLHKKFEKTVRQVADAFDVEAEVEIRRGYPVLYNDPAMTDLAWEAGKEYLGDGNVRQSEPVMTAEDFAYYLQECPGSFWQLGTGLPDSAPGNLLHSPTFDPDEHALETGMGMMSYLALRFLAG

SEQ ID NO: 11179 - protein, 155 aa, Anaplasma phagocytophilum
MYCCVLTYLVEYKGGTRVQERTLSILKPDVVERGIIGNVISYIEAAGLKVVAQRMCRLTVSQAEEFYDVHRDRPFFPELVKFMTSGPVVVQVLEGESAIAVYRDVMGATNPKEAAKGTIRADFAESIDANCVHGSDNADNAKREIMFFFGECEIF

SEQ ID NO: 11180 - protein, 102 aa, Glycine max
  misc_feature (95)..(95): Xaa can be any naturally occurring amino acid
  unsure (1)..(102): unsure at all Xaa locations
MVEAGEEEVIEFKWGTRKGLGGKKKDVQFYESFTYDGVEYSLFDSVFLYKEGEPEHYIGKILKIWENSDKSKKVKILWYFRPSEILNFLEGSETXENELFLA

SEQ ID NO: 11181 - protein, 523 aa, Candida glabrata CBS138
MLFNKGLLALAATAALGVSAQDAVAPADSAVVKLEQDNFQDFLKENSLVMAEFFAPWCGHCKKLAPEYVKAAEELKSKNVSLVQIDCDDNRDLCMQLQIPGFPSIKLIKDGDIAHAKDYNGARTAEAIVKFMIKQTQPAVQVVEDKAALDALVANSTVPVVVDFGVNDFNATFYQFAHALSDDYVFISLPSKENKISVFLPVEGSSAEEIVFKGDHKTLAKDRSVFEEWLKVESLPFFGEINGEVFNAYLESGLPLAYFFFNEPSEVEENRKFFTDLAKKYRGKMAFVSLDAKQFGRHAENLNMKQQFPLFAIHNMTSNQKFGLPQMAEEEFAKLNKAIKLKTKDITKLVENVLSGKAEAIVKSEEVPSVQESNVFKIVGKTHDKIVADPKKDVLVKYYAPWCGHCKKMAPTYEELADTYASDSSSKDKVVIAEVDATANDIFNVEIAGYPTILLYPAGKNAEPVVYEGDRSLDSFLTFIKENGANGIDGSSLHKKFLETKKAAEQAEIEDDNEDEDGFDDEL

SEQ ID NO: 11182 - protein, 433 aa, Neisseria meningitidis MC58
MPSEHQHISSLLDFDRTHLLHPYTSMTDPLPVYPVKRAEGVFIELADGTRLIDGMSSWWCAIHGYNHPVLNQAVETQMKQMAHVMFGGLTHEPAVELGKLLVGILPQGLNRIFYADSGSISVEVALKMAVQYQQARGLTAKQNIATVRRGYHGDTWNAMSVCDPETGMHHIFGSALPQRYFVDNPKSRFDDEWDGADLQPVRALFEVHHADIAAFILEPVVQGAGGMYFYHPQYLRGLHDLCDEFDIMLIFDEIATGFGRTGKMFACEHAEVVPDIMCIGKGLSGGYMTLAAAITSQKVTETISRGEAGVFMHGPTFMANPLACAVACASVKLLLSQDWQANIRRIESILKGRLKAAWDIRGVKDVRVLGAIGVIELEKGVDMARFQADCVAQGIWVRPFGRLVYLMPPYIISDGVLTKLADKTVQILKEHSK

SEQ ID NO: 11183 - protein, 330 aa, Bacillus halodurans C-125
MTEPRHKQLGLSDETVVHMYETMLLARKIDERMWLLNRAGKIPFVISCQGQEAAQVGAAFALDRTKDYILPYYRDMGVVLTFGMTAKDLMLSGFAKAEDPNSGGRQMPGHFGSKKLRIVTGSSPVTTQVPHAVGIALAGKMKGEDFITFTTFGEGSSNQGDFHEGANFAGVHKLPVIFMCENNKYAISVPIEKQLACEKVSDRAIGYGMPGVTVDGNDPLAVYEAVKQAADRARRGEGPSLIETVSYRLTPHSSDDDDRAYRSREEVEEAKKYDALITFAEYLLETGALTEEGKEAMDKRVSDMVNEATEYAERAPYADPEQALGHVYAE

SEQ ID NO: 11184 - protein, 285 aa, Ashbya gossypii ATCC 10895
MSFERPQDPSSALEQATQDVSNLKSESRFLLEEIRASDLEFYESKKRFLNKDTQIHKFIKQHGSLVDNPKEAEFQERIKEDLERCHQLQVDKCTVANSLLYMVTKHLKKVQANIEALEEDGLLAPLEDDAVELANELSRESSVLSSGTSLERRKRTVAAGTLSAGSSLRKRVKKERGRSTQRDGMLSEPPSDEASSHGANFADDLQDFNDELFSLNQQEEDDKQLYCFCQSVSYGEMVACDGPNCKYEWFHYGCVNLDEPPKGQWYCPECRQEMANLKLKKKKRV

SEQ ID NO: 11185 - protein, 474 aa, Bacillus halodurans C-125
MAEEYDLVILGGGTGGYVAAIRATQLDLKVALVEKGKLGGTCLHKGCIPSKALLRSAEVFSTVQKADQFGVKIDGAALDFTSVQNRKEQIVTQLHRGVEMLMKKGKIDVYKGHGRILGPSIFSPTPGTISVEMNNGEDNMMLIPRNVIIATGSSPRVLPGMEIDGEAVLTSDEALKMEQLPKSMLIVGGGVIGIEWASMLNDFGVDVTVIEYGPRILPTEDADIAKEAERLLKKRGVTFKTNAKVLAETLEKGDNSVVIEAEVGGVSERFTAEKMLVSVGRTPNVNDIGLENTDIEVIDGAIAVNEWYQTKESHIYAIGDVIGGMQLAHVASHEGILAVEHMTDHKPEPLNYLTVARCVYSHPEMASIGLSEAEAKEKGYEVKVGTFPFQAIGKALVYGESDGFVKILSDKKTDDLLGVHMIGPHVTDMISEAALAKVLDAAHWEVAHTIHPHPTLSEVVGEAALAVDGKAIHF

SEQ ID NO: 11186 - protein, 406 aa, Kluyveromyces lactis NRRL Y-1140
MSVRYCTKNLVGRAPFALRSGAVRLQSSSSKASSSDESNAIKGENGEELQSVDVAAARQSEFNGSISQLLHQAMNTPIEELGDLETKLKSPLTEKEQQLDEKLTAFLRKYSKYNKVLDLPEDTNKFDFSSKVLSQPLHTREFPYLSHTSKEKPYSEQELYVRQLKHAAHTSKLGANIQDVYFPHKDVFNPPSLQQVSIEKLMAAGVHLGQSTALWRASTQPYIYGEYKGIHIIDLNQTLSHLKRAAQVVEGVAENGGLILFLGTREGQKRTLIKAAERVNGYYVASKWVPGTLTNPTEISSSWERHEVDYFGNPTGRELTLNESMSIIKPDLLVVLNPTENRNALKEAMKARVPTIGIIDTDSEPSLVTYPIPANDDSLRSVSLLTSILAKAGERGVQTRLNRASV

SEQ ID NO: 11187 - protein, 515 aa, Arabidopsis thaliana
MHVSIQHIYKFLDLNMETYFLLLSLAFFLFISVKLLFGKRLSKFNLPPSPARPLPLIGHLHLLKLPLHRTFLSFSQSLGGAPIFCLRLGNRLTVVVSSYSIAEECFTKNDIVFANRPELILGKHIEYNSTTMTSAPYGDHWRNLRRIATLEIFASHKLNGFLSVRKDEIRQLLLRLSKNSRHGFAKVEMRHLLFELTINNVFRMVAGKRFYGEGTEQDEVAQQVRHLMDEIVTSAGAGNAADYLPIMRWFTNFEKRVKNLAIRIDKFLQSLVDEKRADKEKGTTMIDHLLSLQESQPDYYTDVTLKGIIIVMIIAGSETIAWTLEWAMLNVLNHPEVLKKARTEIDTKIGFDRLMDEADTKNLPYLQWIVLETLRLHPAAPTNVPHSTSEDCMLAGYDVPRGSMLLVNIWSMHRDPSIWEDPEMFKPERFKNEKLNQKLLSFGMGRRACPGYGLAHRVVSLTLGSMVQCFEWQRIGQEYVDNSEDKTVVLMRPTTPLLAMCKARPIVHEILDAFA

SEQ ID NO: 11188 - protein, 360 aa, Brucella melitensis 16M
MCRKLSGRPFGHCGGVLKAFSNDGVEMSNKKKPMVVLTRKLPDPVETRMRELFDARLNIDDHRMSQPEIIAALKEADVLVPCITDVIDAAVIEQAGPNLKLIANFGNGVDNIDVAAAARRGITVTNTPNVLTEDTADMTLALLLSVPRRLVEGANVINERHGQWPGWSPTWMLGRRIWGKRLGIVGMGRIGTAVARRAKAFGLSIHYHNRKRVSPQVEEELEATYWDSLDQMLARMDIISVNCPSTPATFHLLSARHIALMQPTAYLVNTARGQIIDENALIDLIEEGRLAGAGLDVFEHEPAVNPRLLALAEKGKVVLLPHMGSATIEGRIDMGDKVIINIRAFVDGHRSPDRVLPNRV

SEQ ID NO: 11189 - protein, 459 aa, Sulfolobus tokodaii str. 7
MVKRLDNAEVIRLHILATIIGALGGFLFGYDTGIIGSVLVYVTPLFHLTPPEVAILTSGTSLLAGIGALAAGPITDKYGRKSLLVTDGIMYAVFALLSAIAINSFLLILWRSLVGFAIGADTAIATAYISEFSPKRWRGRLAITQQLMIFSGITASFWAGYLLSFSANWRLMLGLGVIPAVILVALRAFLPESPRWLLLNGMEEKAKNILRKFGVNIAENEHIAAPSKELSFKEMFNNKAIRTAIILVGLWLAFQQITGINVILYYGPTIYKYLGLTGPRAILNTAISESLGAIEYAISFYLIDKWGRRKLGIFGYAGLVGSLAIMLIGLRAFTSGIVFAGVALVFTAMTLFLLFFHVGVGGVGWVLQGETIPTEVRGRGAGLLAAIDWFANFVIIFIFPYWKAAFGVYSFFALELVLSILAIAIVYLFMPETKGVSLEDMLKVFERGLSVQRQKQYAK

SEQ ID NO: 11190 - protein, 261 aa, Staphylococcus aureus subsp. aureus MSSA476
MKVQIYQLPIIFGDSSKNEAQITQWFEKNMNAEVDVVVLPEMWNNGYDLEHLNEKADNNLGQSFSFIKHLAEKYKVDIVAGSVSNIRNYQIFNTAFSVNKSGQLINEYDKVHLVPMLREHEFLTAGENVAEPFQLSDGTYVTQLICYDLRFPELLRYPARSGAKIAFYVAQWPMSRLQHWHSLLKARAIENNMFVIGTNSTGFDGNTEYAGHSIVINPNGDLVGELNESADILTVDLNLNEVEQQRENIPIFKSIKLDLYK

SEQ ID NO: 11191 - protein, 862 aa, Taxus baccata
MAQLSFNAALKMNALGNKAIHDPTNCRAKSEGQMMWVCSKSGRTRVKMSRGSGGPGPVVMMSSSTGTSKVVSETSSTIVDDIPRLSANYHGDLWHHNVIQTLETPFRESSTFQERADELVVKIKDMFNALGDGDISPSAYDTAWVARVATVSSDGSEKPRFPQALNWVLNNQLQDGSWGIESHFSLCDRLLNTVNSVIALSVWKTGHSQVEQGTEFIAENLRLLNEEDELSPDFEIIFPALLQKAKALGINLPYDLPFIKSLSTTREARLTDVSAAADNIPANMLNALEGLEEVIDWNKIMRFQSKDGSFLSSPASTACVLMNTGDEKCFTLLNNLLDKFGGCVPCMYSIDLLERLSLVDNIEHLGIGRHFKQEIKVALDYVYRHWSERGIGWGRDSLVPDLNTTALGLRTLRTHGYDVSSDVLNNFKDENGRFFSSAGQTHVELRSVVNLFRASDLAFPDEGAMDDARKFAEPYLRDALATKISTNTKLYKEIEYVVEYPWHMSIPRLEARSYIDSYDDDYVWQRKTLYRMPSLSNSKCLELAKLDFNIVQSLHQEELKLLTRWWKESGMADINFTRHRVAEVYFSSATFEPEYSATRIAFTKIGCLQVLFDDMADIFATLDELKSFTEGVKRWDTSLLHEIPECMQTCFKVWFKLMEEVNNDVVKVQGRDMLAHIRKPWELYFNCYVQEREWLEAGYIPTFEEYLKTYAISVGLGPCTLQPILLMGELVKDDVVEKVHYPSNMFELVSLSWRLTNDTKTYQAEKARGQQASGIACYMKDNPGATEEDAIKHICRVVDRALKEASFEYFKPSNDIPMGCKSFIFNLRLCVQIFYKFIDGYGIANEEIKDYIRKVYIDPIQV

SEQ ID NO: 11192 - protein, 511 aa, Solanum tuberosum
MAVAKSNSNTESSFYTSCCYKVANLSGTILDASHTANLHDRYILGEQLGWGQFGIIRTCSDKFTGEVLACKSVAKNRLVTQEDVRSVKLEIEIMTRLSGHPNVVDLKAVYEEEDCVHLVMELCAGGELFHQLERHGRFSEAEARVLFHDLMEVVMYCHHKGIVHRDLKPENILLATKGSSSPIKLADFGLATYIKPGQSLHGTVGSPFYIAPEVLAGGYNEAADIWSTGVILYILLSGIPPFWGKTKSKIFDAVRAADLRFPSDRWDTISSSAKELIKGMLCTDPSQRLTPQQILDHAWVRDISPHFNEPCLKVHSDEGSCCSSLMTRNQDISFGTGSAVLIDAQSPKFTCKSSFSTLLTEQSTTSYGSAVFSFSSTNGSNGHDFASPVLTLPSFTFFGSSLVVDQGSYEVDLSVRASDVDLLHKDASVGKVFMLSESPVSLEQVVRDKTAEVRKSGSNGSRTLGIQSRRNHTIGLGEFEQIDIVVTETVIRWASCTCLPTATSLRSSLVC

SEQ ID NO: 11193 - protein, 378 aa, Phanerochaete chrysosporium
MAFKSLIAFVALAAAVRAAPTAVCPDGTRVSHAACCAFIPLAQDLQETIFQNECGEDAHEVIRLTFHDAIAISRSQGPKAGGGADGSMLLFPTVEPNFSANNGIDDSVNNLIPFMQKHNTISAADLVQFAGAVALSNCPGAPRLEFLAGRPNKTIAAVDGLIPEPQDSVTKILQRFEDAGGFTPFEVVSLLASHSVARADKVDQTIDAAPFDSTPFTFDTQVFLEVLLKGVGFPGSANNTGEVASPLPLGSGSDTGEMRLQSDFALAHDPRTACIWQGFVNEQAFMAASFRAAMSKLAVLGHNRNSLIDCSDVVPVPKPATGQPAMFPASTGPQDLELSCPSERFPTLTTQPGASQSLIAHCPDGSMSCPGVQFNGPA

SEQ ID NO: 11194 - protein, 407 aa, Brucella melitensis 16M
MRRVVVTGMGIVSSIGSNTEEVTASVREAKSGISRAEEYAKLGFRCQVHGAPDIDIESLVDRRAMRFHGRGTAWNHIAMDQAIADAGLTEEEVSNERTGIIMGSGGPSTRTIVDSADITREKGPKRVGPFAVPKAMSSTASATLATFFKIKGINYSISSACATSNHCIGNAYEMIQYGKQDRMFAGGCEDLDWTLSVLFDAMGAMSSKYNDTPSTASRAYDKNRDGFVIAGGAGVLVLEDLETALARGAKIYGEIVGYGATSDGYDMVAPSGEGAIRCMKMALSTVTSKIDYINPHATSTPAGDAPEIEAIRQIFGAGDVCPPIAATKSLTGHSLGATGVQEAIYSLLMMQNNFICESAHIEELDPAFADMPIVRKRIDNVQLNTVLSNSFGFGGTNATLVFQRYQG

SEQ ID NO: 11195 - protein, 319 aa, Staphylococcus aureus subsp. aureus MSSA476
MRRLFSIGEALIDFIPNITNANLKDVQTFTKQIGGAPCNVACTVQKLGQQAYMITQLGNDAFGDSIIETISSIGVDVSKVYRTNEANTALAFVSLTEAGERDFSFYRKPSADMLFEPSFVNDIDVNENDVVHFCSVDLVDSPMRDAHYQLITKTLNANGTVVFDPNVRLPLWDNAEDLRQTIHTFLPLAHIVKVSDEELEFITGIHDENEAIQSLFTGNVTVVIYTKGADGAAVYLKNGINHYHSGYKVKPVDTTGAGDAFIGAVISRILATDVLNLTQLFENEGEEILAFSNRVAAIVTTKYGAINSLPTLQEVEQAF

SEQ ID NO: 11196 - protein, 464 aa, Pasteurella multocida subsp. multocida str. Pm70
MKFIDFSAYKVEAKKLLLIALPILLAQIAQNSMGLVDTIMSGRVSSADMAAISVGASIWFPLVLFGHGLLLALPPTISYLNGSGKRDQIAHQVRQGIWIILFSCLPLGILIYYSNLVFDYMQVEDHLKEITIGYLHAMIWGLPAYLLMINFRCLNDGIAKTKPAMVITFLGLGLNIPLNYIFIYGKLGIPAFGAVGCGIATAIVNWFMCILMIAYCKNARNQRDLKVFAKILEKPNFTTLKKLLNLGFPIAVALFCEVALFALTALLLSPLGTDIVASHQIALNTSSFLFMLPMSLGMAATILVGQRLGEGAADKAKQVSYSALIVGLLIAVITATLTVIFRVEIAEIFVKDRDVIAMAGTLLLIAALYQFSDTVQVVAGGALRGYKDTKAILYITLFCYWVVGMPMGYTLARTDLLMPALGAEGFWIGFVVSLTIAATLLMIRMRKIQAQPDAILFAKLEKLK

SEQ ID NO: 11197 - protein, 434 aa, Cryptococcus neoformans var. neoformans B-3501A
MSQYNTIWATYVSLGVQALIPIAIGSFKSLKTPEDTRRRLRESKKGQISEEYDDEDEEPAGETLTWKESAMFPIMGSVMLLGLWAVLKYFGKKWITIILGVYFGLAGMLAVQSTFSSIIGYLLRVFGISMTTYHVRISAGFRQIFHLPTTLPTMCLIPVSIVLPLLYVYFDRHYILSNILALAFSIETLALLKLDSFFTAFLMLGLLLVYDIFWVFATPVMVTVAKGIDAPIKILAPKTSPFASPTDFAMLGLGDIIVPGLVIALCLRYDLHRYAAFYKGQNVTPRSKFGKPYFWCGVVSYVLGLGVTIGVMHHFQRAQPALLYLSPACTLGPVLLAFSRGEIKNLWTYDESPEEENKQVLDDTIEAASEAAIRARAEAKAAAEETVSKGEDTVDEAQDAGEQKEQMDDDSWMNNTGVIAPEGKPRKKKGGKKK

SEQ ID NO: 11198 - protein, 350 aa, Pasteurella multocida subsp. multocida str. Pm70
MSKIIHVGIAGFGMSAKTFHTPFLHQDPRFCIHKVFERQSDKAKSIYPYITTVRDFTQLLEEDIDLVLITTPNQTHYDFAKKAILAGKHVIVEKPLAITAQQAEELDVLAQKHHVMLSVYQNRRWDSGALTVKKLIAENTLGEIVEYEIRYERYSPSKNKKAWKETGELGTGLVYDLGVHLIDEVLDLFGMPKALFADVTKQNPESGSDDSFRITFYYADHKKVTLSSTKYAREPAPHIILQGKLGSYIKPKLDNQEALLMAGVQPKGDWNKESEQDWGILHTEIDGLIVRQKLEPISGNYQAYYDNIYAVLTKNAPLLVTAKQATTVLKLIEKVYESAALGQKIYLVNQ

SEQ ID NO: 11199 - protein, 479 aa, Pasteurella multocida subsp. multocida str. Pm70
MSRRLRRTKIVCTMGPSTERGNNLEKIIMAGANVVRMNFSHGTPEDHIGRAEKVREVAKKLGKTVAILGDLQGPKIRVSTFKDGKIFLNIGDKFVLDADLPKGEGTQEGVGLDYKTLPQDVVPGDILLLDDGRVQLKVLSTEGNKVFTEVTVGGPLSNNKGINKLGGGLSADALTEKDKNDILLAAKIGVDYLAVSFPRSSADLNYARELAEAAGLKAKIVAKVERAETVATTEAMDDIILASDVIMVARGDLGVEIGDPELVGVQKKLIRRARQLNRVVITATQMMESMISNPMPTRAEVMDVANAVLDGTDAVMLSAETAAGQYPAETVATMAKVCLGAEKMPSINVSRHRMDITFDSIEESVAMSAMYAANHMKGVAAIIAMTHTGRTALLMSRISSGLPIFALSRNQDALNLCALYRGVTPVHFDEVSRNSKGAAAAIRLLKEKGFLVSGDLVLLTQGDELLASGTNTCRTLVVE

SEQ ID NO: 11200 - protein, 226 aa, Triticum aestivum
  misc_feature (182)..(182): Xaa can be any naturally occurring amino acid
  unsure (1)..(226): unsure at all Xaa locations
MAATFNVNAEAGLKKLDGYLLSRSYISGYQASKDDLAVYSEFSVAPPSTCTNVARWYNHIDALLKLSGVTAPGQGVKVLSSVVPETSTTDVAEAPAADDDDDSDVDLFGEETEEEKKAAEERAAKAKASTKKKESGKSSVLLDVKPWDDETDMVKLEEAVRSIKMEGLLWGASKLMPVGYGXKKLQIMMTIIDDLVSVDTLIEDHLCVEPANEYIQSCDIVAFNKI

SEQ ID NO: 11201 - protein, 335 aa, Pseudomonas fluorescens PfO-1
MALSKEVPEFDIDDEVLLMETGIDSDSMSNDEGAAPPSVRAKSKHSASLKQHKYIDYTRALDATQLYLNEIGFSPLLSPEEEVHFARLSQSGDPAGRKRMIESNLRLVVKIARRYVNRGLSLLDLIEEGNLGLIRAVEKFDPERGFRFSTYATWWIRQTIERAIMNQTRTIRLPIHVVKELNVYLRAARELTQKLDHEPSPEEIANLLEKPVGEVKRMLGLNERVSSVDVSLGPDSDKTLLDTLTDDRPTDPCELLQDDDLSQSIDQWLSELTDKQREVVVRRFGLRGHESSTLEDVGLEIGLTRERVRQIQVEGLKRLREILEKNGLSSESLFQ

SEQ ID NO: 11202 - protein, 666 aa, uncultured bacterium 560
MEFDANLIAPALGVLGLLIVFFIYQWIKKQPGGSGSVQKIGEQIHIGSIVFMKREYKMLSIFAFVLLVLLYIFLGPASALCFLVGAVASATAGYIGMNTATIANVRTAQAAHEEGSAAALTVAFFGGSVMGLSVAALGLLGLGGLYYFFGETHSEALHGFAMGASVVALFSRVGGGIFTKSADVGADLVGKLEAGIPEDDPRNPAVIADNVGDNVGDIAGMGSDIFESYCGSMIATIAIASTLSAVALDKLGNQSELMFLPLALASLGFVCSVIGIVFVKMSSNKSPESALRIGTIGSALLFIIASYFLINQLEVSNSIWAAVLMGSVGGIIIGLVTEYYTAGKPIRDIAESGKTGAATVMIKGLAIGMQSVVIPVLMICLIIYVANLFVGLYGVGIAAIGMLATVGMTMAIDAYGPIADNAGGIAEMSGLGEDTRKITDSLDELGNTTAAIGKGFAIGAAALAALAIITAYTETVSANSTDFILKLNSAEVLIGLFIGGTIPFLIAALTMTAVGDAAFEMIEEVRRQFKEIKGLLEGKAEPDTAKCIDIATTAALKKMILPGVIAISAPVLVGFLISPEALGGMLAGALLGCVLMALMMANAGGAWDNAKKHVEKGNFGGKGTDVHTATVVGDTVGDPFKDTSGPSMNILINVMAIVSLVIAPLL

SEQ ID NO: 11203 - protein, 280 aa, Oryza sativa
MEREISALYEPKRNNEIRIFESSDEMSTDLAEYISQVSEISVKERGYFAIALSGGPLVSFLGKLCEAPYNKTLDWSKWYIFWSDERAVAKNHAESNYRITKEGFLSKVPILNGHVYSINDNATVEDAATDYEFVIRQLVKVRTIGVSESNDCPKFDLILLSMGSDGHVASLFPNHPSLELKDDWITYITDSPQPPPERITFTLPVINSASNIAIVTTGDDKSEAVHLAISDNADGPEAPSSLPARMVQPTDGKLVWFLDKSAASSLDAENDDAFEQHREY

SEQ ID NO: 11204 - protein, 191 aa, uncultured bacterium 560
MVEETSFGKILIIDDEKDNTEIIKDVLEDVNYETILARSASEAKTIVSANTFDLVLLDVWMPGQDGISLLAEWTSEGFDTPIVMMSGHAEPSDIVRAMKLGAIDFLKKPLHDFLPILRNIMTRPEPEKSDQEVKGIDFSLRLKEARNLFESQYLLHHLALNDNNIAIVAEKAGLERTTLYRKLKDLGIDKK

SEQ ID NO: 11205 - protein, 415 aa, Pyrobaculum aerophilum str. IM2
MQSESGFLAYVLAQLKRSVELGGFPEDFYAMISRPKRILHVYIPVKMDSGRIEVFEGYRVQHNDALGPFKGGIRFHPEVTLADDVALAILMTLKNSLAGLPYGGAKGAVRVDPKRLSQRELEELSRGYARAIAPLIGDLVDIPAPDVGTNSQIMAWMVDEYSKIAGRNAPAVFTSKPPELWGNPVREYATGFGVAVVAREMAKRLWDGIEGKTAAIHGAGNTGAWAAYWLEKMGVKIVAVSSTKGTVYNKAGIPAAEILRYYKREIPFEKIPGEFIKDPEASLNVEADLLVPAAIENVIRSDNAGQVKARLVVEGANGPTTPEAERVLYQRGVVVVPDILANAGGVIMSYLEWVENLQWLSWDEEETRKRLEAIMVNNVARVYQRWQKEKWTMRDAAIVTALERIYKAMKLRGWI

SEQ ID NO: 11206 - protein, 667 aa, Ashbya gossypii ATCC 10895
MVGLTETISKAFNDVRPTLRSVGVANNHRHISLGLLPPNRKNPLVRKYRKKARLRETDRGSFYSLDEDFGSVMGADPSMLDVTAEEEGVLDGGELSRTVSLPSTLASEAGPSSALNVDWILEEHERRYSTVNGSAEDIVAVDVEGAAPDMVHYTHFMHRVKQQLPSDKAEVRVLRPRKLSYYSIGSKGGPSSAFRGSEDLDDEPATVKSESLVLLCYSVPLIFTFLLEQMFPVVCALVVGHLGKNELAAVSLASMTTNITFAIFEGISTSLDTLCPQAYGARNYYGVGLHMQRCVLFSLAFFVPFAALFWFSEGILPYLIKEKSLVPLTSQFLRVMIVGGPGFILFENLKRYLQAQGIFDAGIYVLLICCPLNIVMSYLLVWNPVIGLGFIGAPIAVALNFWCMFLLLLLYCIYFNGSKCWGGLSRKAFDHWKDLSKLAVPGIIMLEAEDMSSEILTLFSSYLGTEYLAAQSAVSTTVAMLYMIPYAVGISVSTRIAQYIGARNPDNARLASRVGIASSAVVGIVNCTMLILGRDLIPRIYSSDAEVIRLMREILPLLGLVEIFDALNAIAGSCLRGQGMQYVGSVVNLVVYYLFAIPLGMLLSWTFDMKLSGLWVGIGSGMLVIGLIEGYYVLFADWDMLIDRAEMLKETEDDSDEEVDEFSALLP

SEQ ID NO: 11207 - protein, 133 aa, Bordetella pertussis Tohama I
MEKIRKTDAEWRTQLAPEEYAVARQKGTERAFSGRYWDTSTPGIYRCIGCGTPLFASDTKFDAGCGWPSYFEPLAPERVREELDTSHGMVRTEVLCNICDAHLGHVFPDGPEPTGLRYCINSLSLKFEPLEDE

SEQ ID NO: 11208 - protein, 257 aa, Clostridium thermocellum ATCC 27405
MRAALYQMEIAWEDKEKNYKKLEGVSEEVKKHGADLLLLPEMSFTGFSMNTKLTKEYNDESKDRVKMICKSHQISIGFGWVKAAGEKAENHYTIINEKGDEISDYVKIHPFSMAGEEKYFVKGNKLSTCKLQGREIATFICYDLRFPAVFQALGDETEIVVVAANWPKKRREHWKCLLQARAIENQVYILGVNCVGNMGGLEYSGDSCVINPNGEIIEIIEDKEGVIYADIEQDVKKIRDSFPLRLDRRTELYKTLF

SEQ ID NO: 11209 - protein, 583 aa, Prochlorococcus marinus str. NATL2A
MSELDSELDELRLSLREIYPGHSEQEINSVWSQLLQILDPFCVNKGKDELEIESIWDSSSVVLITYPDSIYRKDESTLKTLTEFVKNRLGGLSSVIHVLPFLPSTSDGGFAVSNHEKIDDSFGNWNDLKDLSGKHKIMADLVLNHVSSSHPWVHQFIKSEDSGPSYIVSPSETNVWENVIRPRNTSLFTNINTKQGFKSVWTTFGPDQIDVDWRNPNIFLEFLKLLVRYITNGADWIRLDAIAFIWKEPHTTCLHLDPVHSIVKLLNKCLKIIKPSAVLITETNVPEKENLSYLIEGNEANLAYNFTLPPLLLEAIYTGKTDLLKSWLSTWKELPRHTSLLNFTSSHDGIGLRALEGIMDDQRIHNLLVESEKRGGLVSHRRLSNGDDQPYELNISWWSAMSNEGSDNTVFQFERFLLSQLFTLSIKGVPAFYLPSVLASPNDIDSFRKTGQRRDLNREKFEANQLLDVLKNFDSPASKNISYLTHIVKVRSRLKAFHPEASMKCISTNIANCIILQRGLDEDSVYVICNMSSNFLCISPLNQINSLELTPEKRLLDNITGSYFNTDTFKLNPYQVVWLTLDD

SEQ ID NO: 11210 - protein, 259 aa, Mesorhizobium loti MAFF303099
MQKMLALANKIAIVTGASSGIGRATAKLFAEEGARVVVAARRQAELDTLVAEISDAEGTAVALAGDVRDEAYAKALVDLAVESFGGLDVAFNNAGAVGQMGPISGLSLEGWRETLDTNLTSAFLGAKYQVPAMIERGGGSLIFTSTFVGHTIGMPGMTSYAASKAGLIGLTQVLAAEHGPQGVRVNALLPGGTDTPASITNAPDAGPEVLAFVQALHALKRMAQPEEIARSALYLASDASSFTTGTALFADGGVSINRT

SEQ ID NO: 11211 - protein, 329 aa, Burkholderia sp. DBT1
MARTIRIRQVGGPEVLQFEELDVGKPGPDELCIRVEAIGLNRAEAIFRAGRYIEPTNLPARLGYEASGVVERVGSGVGGVLPGDAICVIPAFSMNQYGVYAHKAIVPASAVIKRPEGLGAVEAAAVWMAYLTAYGALIDVGKLGKGDAVVIQAASSSVGLAAIQIANSVGAVPIATTRTSTKRSALLDAGAAHVIASLEQDLATEVMRITNGKGARIVFDPVGGPHVEILAQAMSRGGTFFVYGNLSGQPTPFPRWMLKHGQSMRGYLLFEITKDQSRLERACAFISDGLRSGQFKPFIAKTFSFDQMVEAHRYQALNQHIGKIIVTVP

SEQ ID NO: 11212 - protein, 243 aa, Nocardioides sp. JS614
MTTSEIEVPAGPHESEPHIRGFNNRLNWLRAAVLGANDGIVSTAGIVIGAIGATSDRNAIVIAGVAGLAAGAMSMAAGEYVSVSTQRDSELALLEKERRELLEEPEEELAELAGLYAAKGLPDDLALEVATVLTAQDALAAHAEVELGIDPDDIASPLHAAWASMLAFTIGALLPLLSITLASAETRVPLTVGVVVLALAITGWASARLGYSSPARAVARNVAGGLFAMAVTFAIGSALGTQI

SEQ ID NO: 11213 - protein, 989 aa, Kluyveromyces lactis NRRL Y-1140
MTDTGYTEELLPGTFDALSVRENGGNTESDTSSIRKSQNQDSKQEDVHRENLSVQTLEDHTEVTETREQSVSKDLFDLPRAPASLDVKGLQESDEDHYVKDLSDYKSMDPGKPGTVPTNVSEIFNSNQPTLDEPIQFTRVSSSSVLSESISEGDADLISHLEGKVEEGNNLTSKETPGTIESIVGDKTMSTIEGSSQNIGRISTGGRMTPDLSLMGGALETSSDFLNSTQTSNSPKITTPITEVDANDVYESPLNEILSSTDSFNKASTASADHSKHVSVHEVIPEEEPHPETTNEDPPIKTPVMVNNFFENQTPVSESRSPFRTISSPFSSLRKNVKSQHGTPDHSQRNSNSSTSSNDVKRKTGTKKKGVFSTFVQNIKRNSHSEKRISSGSGNGSGNNAFKISTPYNAKHVYHVGVDSKTGEYTGLPNEWEKLLTSSGISMKEQQQHPQAVMDIVKFYQDVTENSGEEKVFKTFKVGGGSGANIASTPSFRTPSTASVQKFETPQMQTDATFPNENNDTPYSSNLQGPLLTNDFSETVNNEKFIPTRPAPKPQGSSTVSRRVEIPSPINSLGHGTPKVQRSDTQSSSIFSFKKMPTLKSEQPLPPIPKAAEKPANLLPARAAPTPPKPAIPTTPEQSSIPAIPSGLAVEVKEESNTSNVQTRKAQEKKREERKRKNQQIQSKLTEICTTGDPSKLYKNLIKIGQGASGGVYTAYELGTNASVAIKQMNLEKQPKKELIVNEILVMKGSKHNNIVNFIDSYLFRGDLWVVMEYMEGGSLTDVVTHCILTEGQIGAVSRETLKGLQFLHSKGVIHRDIKSDNILLSMNGDIKLTDFGFCAQINEVNLKRTTMVGTPYWMAPEVVSRKEYGPKVDIWSLGIMIIEMIEGEPPYLNETPLRALYLIATNGTPKLKDPGNLSHKMAMFLNWCLMVDPEDRGTAADLLEDPFITEIAEENTSLAPLVKLARMKKLAESMEDDENDEDKYDEQS

SEQ ID NO: 11214 - protein, 497 aa, Zea mays
  misc_feature (280)..(280): Xaa can be any naturally occurring amino acid
  unsure (1)..(497): unsure at all Xaa locations
ITMDPTKFRPSSSHDTTVTTTNAGAPVWNDNEALTVGPRGPILLEDYHLIEKVAHFARERIPERVVHARGASAKGFFECTHDVTSLTCADFLRAPGVRTPVIVRFSTVIHERGSPETIRDPRGFAVKFYTREGNWDLLGNNFPVFFIRDGIKFPDVIHAFKPNPRSHVQEYWRVFDFLSHLPESLHTFFFLFDDVGVPSDYRHMEGFGVNTYTFVSAAGKAQYVKFHWKPTCGVRCILTDEEAALVGGRNHSHATQDLYDSIAAGSFPEWTLYVQVMDPXDTEEQYDFDPLDDTKTWPEDLLPLRPVGRLVLDRNVDNFFNENEQLAFGPGLVVPGIYYSDDKMLQCRVFAYADTQRYRLGPNYLMLPVNAPRCAHHNNHYDGAMNFMHRDEEVDYYPSRHAPLRQAAPPTPLPPRPVAGRREKATIRKPNDFKQPGERYRSWDADRQDRFVRRFADSLGHPKVSQELRSIWIDLLAKCDASLGMKIATRLNMKPNM

SEQ ID NO: 11215 - protein, 1019 aa, Adiantum capillus-veneris
MDPYQQDAASSSGTGYSLHRPPPPDASSSTSGVPTVPRDTHGSLEVFSPAGYIPSGPTSSMFARGSDKQFKPGVHIADRQPVIDFGKFPSPLRPYEEDVASEDFSIEPAEAEKAEESGKEDLHTDWPTEAEKASPAPAEKGDHKILSDDGVAERAAQWGLVVKGRAGVGARTSNEEKRTDSFQQQRGTSLSVRSSEDSEHGGLYIPRVSKDLKDALETFQQTFVVSDATRPDYPILYASAGFFKMTGYSSKEVIGRNCRFLQGADTDPDDVERIRESLAEGKNYCGRLLNYKKDGTAFWNLLTIAPIKDEEGNVLKFIGMQVEVSKHTEGHKVKALRPNGLPESLIKYDARQKDRAVMDVSELIQAVKHPHHNGHAPQHHPPSSVKSTIAEVPSVATVPPMTDRRSSLGPGKSDSMSDGIPKRHRSSGFRSLIGLDKFGKSAQQEPIEFIEPEILMTRDEETDSLDELDDKERLQEIRRGIDLATTLERIEKNFVITDPRLPDNPIIFASDSFLELTEYTREEIIGRNCRFLQGQDTDQKTVQKIRDAIREQREITVQLLNYTKTGKRFWNLFHLQPMRDQKGELQYFIGVQLDGSEQLEPIQKRLSEKTEKEGAKIVRATALNVEEAVGELPDANLTPDDLWANHSKSVSAKPHKVHSDLWKALQKIRERGEKIGLKHFRPVKPLGFGDTGSVHLVELRGSGELFAIKAMEKSVMLNRNKVHRACAEREILAVLDHPFLPALYASFQTQTHVCLVTDFCPGGELFLLLDRQPRKVFSEETARFYLAEIIIALEYLHCQGIIYRDLKPENVLLQRDGHVVLTDFDLSFITSCNPQLVRPPSPPGRRRKYKQMPPPFFMAEPVTTSNSFVGTEEYIAPEVITGAGHSSAVDWWAVGILLYEMIYGRTPFRGKNRQKTFANVLHKDLTFPSSIPASLAARQLINGLLHRDPANRLGSATGAYEIKNHAFFRGINWPLIRDMVPPPLEAPLELVGKDPDFDSREALEWDELEASSTFVSDVF

SEQ ID NO: 11216 - protein, 415 aa, Thermotoga maritima
PEKSLYEMAVEQFNRAASLMDLESDLAEVLRRPKRVLIVEFPVRMDDGHVEVFTGYRVQHNVARGPAKGGIRYHPDVTLDEVKALAFWMTWKTAVMDLPFGGGKGGVRVDPKKLSRNELERLSRRFFSEIQVIIGPYNDIPAPDVNTNADVIAWYMDTYSMNVGHTVLGIVTGKPVELGGSKGREEATGRGVKVCAGLAMDVLGIDPKKATVAVQGFGNVGQFAALLISQELGSKVVAVSDSRGGIYNPEGFDVEELIRYKKEHGTVVTYPKGERITNEELLELDVDILVPAALEGAIHAGNAERIKAKAVVEGANGPTTPEADEILSRRGILVVPDILANAGGVTVSYFEWVQDLQSFFWDLDQVRNALEKMMKKAFNDVMKVKEKYNVDMRTAAYILAIDRVAYATKKRGIYP

SEQ ID NO: 11217 - protein, 223 aa, Kluyveromyces lactis NRRL Y-1140
MLTPRIELTILVLVNRLEGNSSRTMEDVRYGFLSTLDHLPCDVIRTLWTIQSLDIGDTNRDGCHSEEMLRQAQHLLELVRQEHSRLNFEKQELERFSQIKARYDSHLKKQPKLKPLPHHKPIKIKITMKSRYPEAEREQKLIQQEHVNHDKTHKPETETYCFCRDVSYGPMVACDNESCAIEWFHYPCVGLSAAPKPNEKWFCSDMCRKQYSNHRKKSKRRKR

SEQ ID NO: 11218 - protein, 416 aa, Staphylococcus aureus subsp. aureus MSSA476
MNLNDTIFMFLCTLLVWLMTPGLSLFYGGLVQSKNALNTVMQSMAAIVLVTFVWITVGFTISFGNGNLWFGNWEYTFLNHVGFATQEDISPHIPFALFMLFQMMFCTIAISILSGSIAEKMKFIPYLLFVVIWTALVYSPVAHWVWGGGWINKLGVLDFAGGTVVHITSGVSGLVLAIMIGKGNKHSESTPHNLIITLIGGIFVWIGWYGFNVGSAFTFDKIAMLAFTNTVISASAGSIGWLILEYIFKKTTSLLGLLLGALAGLVVITPAAGYVTYLSATIMALIGGICCYIVINYIKVKLKYHDALDAFGIHGVGGIIGAALTAVFQSKKANPDIENGFIYTGDIHIILVQILCVTAVVIFSIVMTFIIAKVIKLITPLSVTEQETNIGLDKIVHGEHAYFEGELNRFNKHIRY

SEQ ID NO: 11219 - protein, 119 aa, Brassica napus
MAISSFKQEHPLEKRQAEASRIRDKYPDRIPVIVERAEKSDVPDIDKKKYLVPADLTVGQFVYVVRKRIKLSPEKAIFIFVKNVLPPTAAIMSAIYDEHKDEDGFLYMSYSGENTFGIF

SEQ ID NO: 11220 - protein, 144 aa, Saccharomyces cerevisiae
MSDVEEVVEVQEETVVEQTAEVTIEDALKVVLRTALVHDGLARGLRESTKALTRGEALLVVLVSSVTEANIIKLVEGLANDPENKVPLIEGLPDAKQLGEWAGLGKIDREGNARKVVGASVVVVKNWGAETDELSMIMEHFSQQ

SEQ ID NO: 11221 - protein, 428 aa, Treponema pallidum subsp. pallidum str. Nichols [sequence omitted]

SEQ ID NO: 11222 - protein, 296 aa, Treponema pallidum subsp. pallidum str. Nichols
MIRALFAAAKKIVIKIGSNTLAQADGTPDEEFLAECARACAALMRDGKQIVVVSSGAQVAGISALHCLSSPPQGAGLERHESRGVIPGDGASCKQALCAVGQAELISRWRSAFAAHQQCVGQFLCTKEDFTDSDRAAQVRYTLSFLLERRVVPILNENDALCCSDVPSVPADRRVSLSPQKRIGDNDSLSAFVALLWQADLLLLLSDIDGVYDKDPKAHTDAQHVPLVTDVSALVGKTSMGSSNVFGTGGIATKLDAARLVTRAGIPLVLANGRHLDPILSLMRGDARGTLFVPVS

SEQ ID NO: 11223 - protein, 193 aa, Glycine max
MAPRDSRATALIGPGPSLSPAHKEIRYRGVRKRPWGRYAAEIRDPGKKTRVWLGTFDTAEEAARAYDTAAREFRGAKAKTNFPTPSELILNNNNINARSPSQTSTLDSSSPPPPPPLDLTLTPLSSAVFPVARPVLFFDAFARADTMVAVSRRETCGFERPAADFRRGDSDSDYNRRILLDLDLNVPPLPEVA

SEQ ID NO: 11224 - protein, 233 aa, Triticum aestivum
  misc_feature (199)..(199): Xaa can be any naturally occurring amino acid
  unsure (1)..(233): unsure at all Xaa locations
MASTPPQADYGKEAVLDVSENQDVETGEVKNGGLQRDLKNRHMQMIAIGGAIGAGLFVGSGGALQKGGPAALLIGYLIIGIMLLCTCLALAEMAVLYPVNGAFFTYICRFVDPSWGFAMGWQYALAWLTVLPFELIAASITIKFWREDINMAVWVSVFLVTLIGIQFFGVRGYGEVEFVLSIIKICAWCGFIILGIVIXVGGVGDQGYIGVKYWQDPGAFTSFKGFCAVFVVA

SEQ ID NO: 11225 - protein, 249 aa, Prochlorococcus marinus str. NATL2A
MIKKIIKYLTLIIDKLYSVKSIEKTNKKLQHTILKNDLTAKLKDNEQEILFGCGCFWGAEKGFWRLPGVITTSVGYAGGEKENPNYREVCSGLTGHTEVVRVVWNNNEIDLSDLLKLFWECHDPTQGNRQGNDSGSQYRSAIYTTSKEQLSKAIESKNSYQIELKNNGFGIITTEIENDIKFYFAEDYHQQYLAKPGSRPYCSAMPTKVTFKNFSGANFKLNEKIWSNYNWDITHCILRGENTPIESNL

SEQ ID NO: 11226 - protein, 313 aa, Sinorhizobium meliloti 1021
MHKILTIGEILVEIIATEKGDGFRKATPLIGPFPSGAPAIFIDQAGKLGQPCAIISRVGGDDFGTVNLERLKRDGVDISGIEVDPLATTGSAFVRYRPDGSRAFVFNIRDSACGKITLDERMTRLVGECSHVHVMGSSLYAPSVVESILAAIGIVKAGGGTVSFDPNLRPEILKSPGMREALLTVLAETDLFLPSGDELFLFTEAKTESQAVAELLASGIKAVVVKRGAAGASYFDAGAALSLPGFPVEEIDPTGAGDCFGATFVSFWLNGASPREALEFAAASGARAVMHFGPMEGASTRAELERFISEQQA

SEQ ID NO: 11227 - protein, 237 aa, Streptomyces avermitilis MA-4680
MHAVILAGGKGVRLRPYTTALPKPLVPIGDQHAILEIVLRQLAAAGFTGCTIAIGHLGEIIRAYVGDGSQWGMAVDYATEESPLGTMGPLLTMRERLPESFLVMNGDILTDLDYADVLRQHRDSGAPLTIATYARKVHIDFGVLTTQAGRVVGFTEKPSMDYRVSMGVYGLSRKTLDGYTPGLPLGFDELVLDLLKTPNLPHAYDFDGYWLDIGRPDDYDRANAEFTTRKSLLLKGA

SEQ ID NO: 11228 - protein, 150 aa, Mycoplasma genitalium
CNYLTMIDHLKRTKIIATCGPALTKSLVSLKMLDDNEYAAIKKVAYANIEAIIKSGVSVIRLNFSHGTHEEQQVRIKIVRDVANNWNIPVSIMLDTNGPEIRIVETKKEGLKITKDSEVIINTMSKMIASDTSLLSVMLVAKYNMVNDVI

SEQ ID NO: 11229 - protein, 241 aa, Triticum aestivum
VKYVRGVAVPLGKTKSLVERFEKRESSSIDCSSPTGSCGDHTVKADSPPTSSAEASSTYRRDLPTVDEMTTPIDLVRNHDEFINVVKSRLTKLEMVRHVFNLNGIKGAIAAVAKLPDIAVQADVVSTLKGKLGLFNLDIFSSLLPVLAGLLNSKTERHAIVALEMLLDLIKIFGPVIHSTLSSSSPVGVDLQAEQRLQRCTRCFNHLQKIVQALQPLMMRSGQSAQLAQELNMSLQDLVVF

SEQ ID NO: 11230 - protein, 507 aa, Triticum aestivum
MGKAAAVGTAVVVCAAVGTAVVLGRRRRRRDAELLGAAEAERKKKVAAVIEDVERTLATPTALLRGISDALVVEMERGLRGDSHSQLKMLISYVDNLPTGDEHGLFYALDLGGTNFRVLRVQLGGREKRVAKQQYQEVSIPPHLMVGTSLELFDFIAAVLAKFVETEGDEFHLPVGRQRELGFTFSFPVNQLSISSGTLIKWTKGFSINGAVGEDVVAELSKAMERQGLDMKVTALVNDTVGTLAGGRYMDNDVVAAVILGTGTNAAYVEHANAIPKWTGLLPKSGNMVINTEWGSFKSDKLPLSEYDKALDFESLNPGEQIYEKLISGMYLGEIVRRILLKLAHDAALFGDVVPAKLELPFVLRTPDMSAMHHDASHDLKILGSKLKDIVGVADTSLEVRYITRHICDIVAERGARLAAAGIYGILKKLGRDKVPTDGSPMPRTVVALDGGLYEHYKKFSSCLEATLSDLLGDEASSSLVAKLANDGSGIGAALLAATHSQYADIY

SEQ ID NO: 11231 - protein, 101 aa, Thermus sp. TB1
MAAEVKTVIKPLGDRVVVKRIEEEPKTKGGIVLPDTAKEKPQKGKVIAVGSGRILDNGQKVPLEVKEGGIVVFAKYGGTEIEIDGEEYVILSERDLLAVLQ

SEQ ID NO: 11232 - protein, 543 aa, Thermus sp. TB1
MAKILVFDEAARRALERGVNAVADAVKVTLGPRGRNVVLEKKFGSPTITKDGVTVAKEIELENHLENIGAQLLKEVASKTNDVAGDGTTTATVLAQAIVREGPKNVAAGANPLALKRGIEKAVEAAVEKIRSLAIPVEDRKAIEEVATISANDPDVGKLIADAMEKVGKEGIITVEESKSLETELKFVEGYQFDKGYISPYFITNPDAMEAVLEDAFILIVEKKVSNVRELLPILEQVAQTGKPLLLIAEDVEGEALATLVVNKLRGTLNVAAVKAPGFGDRRKEMLKDIAAVTGGTVISEELGFKLENATLSMLGRAERVKITKDETTIVGGKGKKEDIEARINGIKKELETTDSKYAKEKLQERLAKLAGGVAVIRVGAATETELKEKKHRFEDALNATRAAVEEGIVPGGGVALLRAISAVDELLKKLEGDEATGAKIVRRALEEPARQIAENAGYEGSVVVQKILSETKNLRLGFNAATGEYVDMVEAGIVDPAKVTRSALQNAASIGSLILITEAVVAEKPEKKETTPASHGAGDMDF

SEQ ID NO: 11233 - protein, 263 aa, Zea mays
  misc_feature (101)..(101): Xaa can be any naturally occurring amino acid
  misc_feature (121)..(122): Xaa can be any naturally occurring amino acid
  misc_feature (125)..(125): Xaa can be any naturally occurring amino acid
  misc_feature (132)..(134): Xaa can be any naturally occurring amino acid
  misc_feature (181)..(181): Xaa can be any naturally occurring amino acid
  misc_feature (187)..(187): Xaa can be any naturally occurring amino acid
  unsure (1)..(263): unsure at all Xaa locations
MSKPRLDGKVAIVTGGASGIGEAAARLFASSGATVVIADVQDALGEAVAASVGPRCAYARCDVTDEAQVEATVARAVSAHGRLDVMLSNAGVLLPTGSVMXMDLAELDRVMAVNFRGAAAXXKHXARAMASXXXGAIVCTASVASLQGGFGPASYTASKHALLGLVRAAAGELGRHGVRVXCVSPGXVATPLSCALMGVGPRELEAMTVPHNVLQGKVLRAEDVAEAALFLASDQAAFISGHNLVVDGATTAVNPAVLHTVGL

SEQ ID NO: 11234 - protein, 432 aa, Candida glabrata CBS138
MGNNPSLDYQRTVKNSPRKHKEMVQVDDIEARVADIDLQNSEQPPAERVLNRKKSTLLFDDESNNEEEYSEENEEEKVRYRAESISSTSSCSSHASDDIQQDEVCDRTEEATKLERQSREDHSDEHIRTATQSESDLARTTTNTTEVGIDESRHEEKEKQESSSSASNGMVPVEIRWEQGGEKVYVTGSFTNWRKMIGLIPVESEPGHFKIKLQLAPGTHRFRFIVDNQLRFSDNLPTATDQMGNFVNYLEVSAVPKSDSTSSRTGKERKDKNKKSVSKVSKDRSTVGPLSARSCIALEIEKEPDDFGDGYTRYHEELPQEPKYEFSSEIPAIFVDQSIIEQLTMERQRKKSNNMSWLTPPQLPPQLENVILNKFGEPLSQSTENNAGALPIPNHSVLNHLVTTSIKHNTLCVATNNRYRQKYVSQIYYVPL

SEQ ID NO: 11235 - protein, 622 aa, Xanthomonas axonopodis pv. vesicatoria
MSHDDFRGPHGGPLLPSRRRFVQGLALGGAVAGLGFWPKASWALKGPGQANVLSGTEFDLTIGETPMNFTGKTRTAITVNGSVPAPLLRWREGTTVNLRVSNALPANSLHGTDTSIHWHGIILPANMDGVPGLSFDGIGRGETYHYRFTLHQGGTYWYHSHSGFQEQAGLYGPIVIDPLEPEPFSFDRDYVVMLSDWTDLDPTALFDRLKKMPGHDNYYKRTVGDFARDVKRNGLSATLEDRKMWGVMRMTPTDLSDVNANTYTYLMNGTTSLGNWTGLFRSGEKVRLRFINGSAMTYFDVRIPGLKMTVVAADGLYVHPVSVDEFRIAVAETFDVIVEPSGQDAFTIFAQDSGRTGYVSGTLAVREGLRAPLPSVDPRPLLTMADMGMDHGSMDMSGGSKGMEGGCGAAMGMPGMTPPASGNEASAHAGHAMPAAGDGAMAGMQHGGMQSHPASETNNPLLDNQAMSVTSRLDDPGNGLRDNGRHVLTYSMLKSTFEDPDGRDPGREIELHLTGHMEKFSWGFNGQKFSDVEPLRLNYGERMRIVLVNDTMMTHPIHLHGMWSDVEDDSGNFMVRKHTVDMPPGSRRTYRVRADALGSWAFHCHLLYHMEAGMMRTVRVDE

SEQ ID NO: 11236 - protein, 334 aa, Staphylococcus aureus subsp. aureus MSSA476
MTTVYYDQDVKTDALQGKKIAVVGYGSQGHAHAQNLKDNGYDVVIGIRPGRSFDKAKEDGFDVFPVAEAVKQADVIMVLLPDEIQGDVYKNEIEPNLEKHNALAFAHGFNIHFGVIQPPADVDVFLVAPKGPGHLVRRTFVEGSAVPSLFGIQQDASGQARNIALSYAKGIGATRAGVIETTFKEETETDLFGEQAVLCGGVSKLIQSGFETLVEAGYQPELAYFEVLHEMKLIVDLMYEGGTENVRYSISNTAEFGDYVSGPRVITPDVKENMKAVLTDIQNGNFSNRFIEDNKNGFKEFYKLREEQHGHQIEKVGRELREMMPFIKSKSIEK

SEQ ID NO: 11237 - protein, 216 aa, Triticum aestivum
VDHLEQQRAMAMAVASSTMEVDQDLPGFRFHPTEEELLGFYLSRVALGKKLHFDIIGTLNIYRHDPWDLPGMAKIGEREWYFFVPRDRKAGSGGRPNRTTERGFWKATGSDRAIRSTGDHKRVIGLKKTLVFYQGRAPRGTKTDWVMNEYRLPDNGAAPPQEDTVLCKVYRKATPLKELEQRAFQDGGDEARVRRQRWVRLQWRNKVPVRKPDFTF

SEQ ID NO: 11238 - protein, 511 aa, Rhodobacter sphaeroides 2.4.1
MHSARPSGQPQIHCPREDQMLDSVTDLRSLLKDPSLLETRAFVAGEWVDADDGATFEVTNPARGDVICTVPDLGRAETARAIAAAEEAMKEWAARTGKERAQVMRKWFDLMMANQDDLGAILTAEMGKPLAEAKGEIAYGASFIEWFGEEAKRIYGETIPGHMRDKRITVLKQPIGVVGSITPWNFPNAMITRKCGPALAAGCGFVARPAAETPLSALALAVLGERAGLPKGILSVITSSRSSDIGKEMCENPIVRKLTFTGSTEVGRILLRQAADQVMKCSMELGGNAPFIVFDDADLDAAVQGAMASKFRNNGQTCVCANRIYVQSGVYDAFAEKLAAAVKKLKVGDGLVEGTEAGPLINEKAVAKVEEHIRDVLDGGGQVLTGGKRHALGGTFFEPTVVTGVKQEMKVSTEETFGPLAPLFRFETEDEAVGYANDTIFGLASYFYARDVGRITRVQEALEYGIVGVNTGIISTEVAPFGGVKQSGLGREGSRHGIEDYLEMKYICLSI

SEQ ID NO: 11239 - protein, 262 aa, Triticum aestivum
  misc_feature (92)..(92): Xaa can be any naturally occurring amino acid
  unsure (1)..(262): unsure at all Xaa locations
VSQRHTYLFSAGDDKQVKCWDLEQNKVIRSYHGHLSGVYCLALHPTIDVLLTGGRDSVCRVWDIRTKAHVSALTGHDNTVCSVFARPTDPQXVSLASHDTTIKFWDLVAGKTMCTLTHHKKSVRAMALHPKEKSFASASADNIKKWSLPKGEFLHNMLSQQKTILNAMAVNEDGVLATAGDNGSMWFWDWKSGHNFQQEQTIVQPGSLESEACIYALSYDNSGSRLVTCEADKTIKMWKEDLTATPETHPVNFKPPKDIRRY

SEQ ID NO: 11240 - protein, 331 aa, Triticum aestivum
  misc_feature (122)..(122): Xaa can be any naturally occurring amino acid
  misc_feature (239)..(239): Xaa can be any naturally occurring amino acid
  misc_feature (259)..(259): Xaa can be any naturally occurring amino acid
  misc_feature (261)..(262): Xaa can be any naturally occurring amino acid
  misc_feature (271)..(271): Xaa can be any naturally occurring amino acid
  misc_feature (281)..(281): Xaa can be any naturally occurring amino acid
  unsure (1)..(331): unsure at all Xaa locations
MDYMNGPGRNHLFVPGPVNIPDQVIRAMSRQNEDYRSPAIPALTKTLLEDVKKIFKTTTGTPFLFPTTGTGAWESALTNTLSPGDRIVSFSLGQFSLLWIDQQQRLGFSVDVVESDWGYGAXDLGALESKLRTDSQHTIKAICIVHNETATGVTNDLHAVRKLLDAYRHPALLLVDGVSSICALDFRMDEWGVDVALTGSQKALSLPTGLGIVCASPKALEAAKTAKSVRVFFDWEDYXSSTRMGTYWPYTPSIPALYXAXXAGLDLLFEXGLDNVIKRHXRLGPQQARRGAWGLKTAPGGENFATVTPSGPRNRRSRSSAPGAVTSPRPG

SEQ ID NO: 11241 - protein, 208 aa, Nicotiana tabacum
MADQYEKKVEEGSANVEATDRGLFDFLGKKEEEKPTHAQEEHAISSEFVEKVKVSEEVAEYKEEEKKEEHNKEEKKLHRSSSSSSSSSDEEEEIGEDGQKIKKKKKKGLKDKIKDKISGEHKEEEKAGEDTAVPVEKYEETEEKKGFLDKIKEKLPGGGQKKTEEVAPPPPPAAEHEAEGKEKKGFLDKIKEKLPGYHSKTEEKKKKK

SEQ ID NO: 11242 - protein, 98 aa, Nicotiana tabacum
GTREEEKAGEDTAVPVEKYEETEEKKGFLDKIKEKLPGGGQKKTEEVAPPPPPAAEHEAEGKEKKGFLDKIKEKLPGYHSKTEEEKEKEKEKEVAASH

SEQ ID NO: 11243 - protein, 218 aa, Arabidopsis thaliana
WCSKLQSEAVREAISSIITHCKETKPRNFTETIELQIGLKNYDPQKDKRFSGSVKLPHVPRPKMKICMLGDAQHVEEAEKIGLESMDVEALKKLNKNKKLVKKLAKKFHAFLASESVIKQIPRLLGPGLNKAGKFPTLVSHQESLESKVNETKATVKFQLKKVLCMGVAVGNLSMEEKQIFQNVQMSVNFLVSLLKKNWQNVRCLYLKSTMGPPNRVF

SEQ ID NO: 11244 - protein, 220 aa, Richadella dulcifica
MKELTMLSLSFFFVSALLAAAANPLLSAADSAPNPVLDIDGEKLRTGTNYYIVPVLRDHGGGLTVSATTPNGTFVCPPRVVQTRKEVDHDRPLAFFPENPKEDVVRVSTDLNINFSAFMPCRWTSSTVWRLDKYDESTGQYFVTIGGVKGNPGPETISSWFKIEEFCGSGFYKLVFCPTVCGSCKVKCGDVGIYIDQKGRRRLALSDKPFAFEFNKTVYF

SEQ ID NO: 11245 - protein, 221 aa, Candida glabrata CBS138
MNSSEDYGYDYDYLFKIVLIGDSGVGKSNLLSRFTTNEFNLESKSTIGVEFATRTIKVEDKKIKAQIWDTAGQERYRAITSAYYRGAVGALIVYDISKSGTYENCNHWLTELKENADDNVAIGLIGNKSDLEHLRAVPTEEARGFASENQLFFTETSALNSENVDLAFRELIEQIYKMVNKHQVDLGENAKGSSGAPKGPTISLAPVPGEKKKKSKSNSCC

SEQ ID NO: 11246 - protein, 139 aa, Klebsiella pneumoniae
MKVLVTGGSGYIGSHTCVQLLQRGHEVVILDNLCNSKRRILPVIERLGGKEATFIEGDIRNEARMTEILHDHAIEAVIHFAGLKAVGESVAKPLEYYDNNVTGTLKLVSAMRAAGVKNFIFSSSATVYGDQPKIPYVES

SEQ ID NO: 11247 - protein, 285 aa, Bordetella pertussis Tohama I
MTTTDRIAAAFARVSEAGRAAALIPYIAAGDPSPQATVPLMHALVRAGADLVELGVPFSDPMADGPVVQRAAERAIAQGVGLRRVLELVADFRRDDSVTPVVLMGYANPIERMGQRAFAQAAQAAGVDGVLVVDYPPEEVDEFAVMLAEAGVAPIFLLAPTSTEARIEAIGRVARGYVYYVSLKGVTGAGSLDTDDVARKLALIRRHVHIPVGVGFGIRDAASAQRIAAHADAVVIGSKLIETMEQAGAQAGADQKNEAAIAAAQQWLHTIRLALDDVKRENAPA

SEQ ID NO: 11248 - protein, 935 aa, Shewanella sp. MR-7
MNPVNNMTKYSLRSWVLVLALAPTILVGILLGSYFTINRFYELEDTLIEQGSNIIEPLAIASEVGLVANDREATKRLLAAAQLNKSTLVKSIAIFDIQNQLFVTSHYHKDFEIMRYKEALSNLHKTEIEHVGDSLILRTPIFATAPPAPGATINFDIQTDNGELLGYISVIINKERALLEQHRAAVAAFIIVLIGVQLNLLFTFRLVKNVTQPITEMVRVVAKIREGKLDARLEGNLIGELDLLKRGINAMAGSLSEYHDEMQQNIDQATSDLRETLEQIEIQNVELDLAKKRALEASRIKSEFLANMSHELRTPLNGVIGFARQLVKTPLHSSQVDYINTIERSATNLLAIINDILDFSKLEAGKMVLEKMPFGLRETLGETITLISGSAQAKGLELVVDIAPNVPDNVNGDAMRVCQIINNLVGNAIKFTDSGSVLVKLELQNQTDEQVVLRCDVIDTGIGIDDNQQDFLFQAFGQADSSISRRFGGTGLGLVITKRLVNQMGGQIGFTSAVDKGSNFWFTLPLGLGQFQIGDSLPFEKLKDKTVLFYEPRVLTHSVISRQLKQWDTKVTHHQHIPSLQTTLSTTDHQFDYVLLSCHGFSNPNQLVSTLNQAKTKTDCLIVLFDCQEQEVLSQFIRPNADVVLSLPVSEHQLARNMLYPPMEYDISPPASITVPAARQSLTVLAVDDNFANLKLIDTLLNELVTTVIAVNSGEEAVKQAKSRTFDLIFMDIQMPGTDGISATKQIRQGSMNRNTPIIAVTAHAIAEERELILGSGMDGYLPKPIDEAALKAEINRWITRPKFTHFDLHTLNWDLCLTQANHKSDLALDMLRMLLDSLPQTVSAIETALSQDDQATMLSTIHKLHGASCYCGVPTTQRLCQEIESALKRDARVEDLEPEILELLDELTKVESAAKQVLSQLSAEITDDQKNGLL

SEQ ID NO: 11249 - protein, 454 aa, Triticum aestivum
  misc_feature (193)..(193): Xaa can be any naturally occurring amino acid
  misc_feature (224)..(224): Xaa can be any naturally occurring amino acid
  misc_feature (240)..(240): Xaa can be any naturally occurring amino acid
  misc_feature (367)..(367): Xaa can be any naturally occurring amino acid
  misc_feature (387)..(387): Xaa can be any naturally occurring amino acid
  unsure (1)..(454): unsure at all Xaa locations
PLEQVCTKKHSRTGPEFPGYRRPTRPESNHERFVHTMRATQGALIVASILNMILGYSRAWGAFAKKFSPVIMTPVVCVVGLGLFQIGFPQVGKCVEIGLPMLILAIVVQQYAPLYFRHIHDRTTFLFERYSLLLCIGIVWAFAAILTAAGAYNHVSLKTQQHCRTDKSFLISSAPWIKISYPFHWGPPIFTAXHSFGMMGAVLVSSFESTGAHFATARLAGATXPPAHVLTRNIGLQGIXGIFLAGLCGAPAGSSVSAENIGLLGLTKVGSRRVIQISTGFMIFFSIFGKFGAFFASIPLPIFAAIYCILFGIVAAVGVSFMQFANKNSMRNIYIIGLSLFLGISVPQYFNGYTSSAGRHGPARTNXGWFNDIINTVFASGPTVALXVAPSWTHAGVGLQGDRGGQAFLPAIRISPQSFQVMSIQTIRKDAYTVSPDLYQPFVRGMEGICLEKV

SEQ ID NO: 11250 - protein, 491 aa, Synechococcus elongatus PCC 7942
MPRGVAPAFAGRKPKGWAWASTAVPDFQGGFKRLINRFQGSKLWLACVPLAATIAVFWGVAANAQGSADPVPSAQFLVNNLWLMVATVLVIFMNAGFAMVETGLCRQKNAVNVLAKNLIVFTLAATAYWFIGYSLMYGSPVVDGFLYFGKGGPLGFFFDPTVSAETIKNDGLISSLDFLFQAAFAGTAATIVSGSVAERIKFVDFIIFSLILTAVIYPIAGSWQWNVGSGWLNKAGFIDFAGSTVVHSVGGWAALIGAITLGPRMGKFQDGPPGALTGHNLAIATLGALILWIGWYGFNGGSVLAFNTAVPYVAVTTTLGGAAGGISATITSWSTSGKPDLSMVINGILAGLVGVTAGCDGFGMGGSFIVGLIAGVLVVFSVYTFENLKIDDPVGACSVHLVCGIWGTLAVGLFNLEKGLFYGGGFGQLGSQILGIISYGVWTVVASVIIWNILKALLGLRVSLKKSYKAWILANTGWKPTLALPRMHLTP

SEQ ID NO: 11251 - protein, 534 aa, Lemna paucicostata
METCSSGEELVIKPRKPYTITKQREKWTEEEHNRFLEALKLYGRAWQRIEEHIGTKTAVQIRSHAQKFFTKLEKEAVSKGVPLGQVHDIDIPPPRPKRKPNNPYPRKLGVGPTCPSGSEREDNKTLTHLPSLNSKGKAEDSPESSHENQAGIKPDKKTPESPVILSLFHVAPPPSTPSSSKSPVSSLGKGMAEENNPKICHVDRVNPKLPSPSAISSVHQSHPFSWPHIPPAFSTHLTSALVQNPAAHAAANLAASYWLSADVEAASSVDSASSASPTMAAAAAATVAAASAWWATQGLLPFCYPSFNGCFAAFAPPPTPITLTESTGVKVNPNVEEQEEQGRSKGSPLSSTDSNPSEKREVNGEGEVKVQGQSLTQREEKSTLEGKNQLDRSSSGSNTPGSEVENEGVEPTEDEMPKEEAVDPTRRGVDPRKEVSKEGRLAFQALFSREVLPQSFSPTETEDQKEQKSTEVNPHPEVNPVDRIPAELSQHRLKPHCTGFKPYKRCSVEAKQTEPPPEEDKCSKRICLEREASI

SEQ ID NO: 11252 - protein, 279 aa, Klebsiella pneumoniae
MTTDSILLNDGYYMPRPGCGLWLIDNRDVDSLIRQALKAGFRHFDTAQAYFNEDGVGRALRYTEVPREQLFITSKIRGRDMGYARTLVSFNETLERLGVEYLELFLIHWPIPAKNLYVETWEASIELEASGLIRSIGVSNFTCQHIERLIEDTGVVPAVNQLELHPHFQQCDVRDYHHEAGIAIQSYSPFGSNGAAVLRNAVVMVLARRHDHSPAQIVLRWHLQQGLTPLPRTTNGARFSENVDVWDFELSEEEMKLLASLNTRTGNTQPLPDAMNMSF

SEQ ID NO: 11253 - protein, 147 aa, Oryza sativa
  misc_feature (13)..(13): Xaa can be any naturally occurring amino acid
  unsure (1)..(147): unsure at all Xaa locations
MARLHLVVVAMAXALFAAAAVAQGPSASPTPAPKAQPPVATPPTRPPAVAPVSPPAAQPPVTTPPPVSAPAPVPAPSAAATPSPQASAPTAEPPVLSPPAPAPGSISQSPTEAPTSPPPPSAASGVSPSAAAVVAAWAAVAAVAAFY

SEQ ID NO: 11254 - protein, 447 aa, Oryza sativa
MPPQEPAPAANGAAPAPAPAAAAAAAGGKRRKRGRWAAAAGVGALLVALLAVAVSSRSFPAASSSSRGGDCGCPGTRKYTGMVEDCCCDYETVDAINEEVLHPILQELVTLPFFRYFKVKLWCDCPFWPDDGMCRLRDCSVCECPENEFPEPFKKPYSGLSPDSMICQEGKPQATVDRTLDAKVFKGWIETDNPWTYDDETDNVAEKNIISAEMTYVNLQLNPERYTGYTGDSARRIWDSVYKENCPKYPSEEMCQEKKALYKLISGLHSSISVHIAYDYLLDESANLAADYLEQAEYNTGNPEEDLKTQSLVKQLLYNPKLRSACPLPFDEAKLWQGENGPELKQEIQKQFRNISAIMDCVGCEKCRLWGKLQVLGLGTALKILFSVDGENHLNQSLQLQRNEVIALVNLLNRLSESVNFVHEKGPSIEDVIKQQSSSTVKPVFPI

SEQ ID NO: 11255 - protein, 302 aa, Zea mays
MASPALGAGTPPFLTKTYAMVDDPETDDTISWNESGTAFVVWRRAEFERDLLPKNFKHSNFASFVRQLNTYGFRKIGLDRWEFANECFRKGEKRLLGAIQRRKGSGAGAPPPAMMATPIATAIPISPTPTSSGGDAAVSSSPPPGLALVATGAMAELEEENARLRRENARLARELARARRVCDSVRHLVWRYDHGGDEVGEEDERHGAAGAKPMLFGVAIGRKRSREDGHGGGDEENGAEEDGEDEEEEQEHDDDDERHAARREQGKAMKTERSDLNVLSLSVRAAAAARPDGGSRDRSGNH

SEQ ID NO: 11256 - protein, 551 aa, Kluyveromyces lactis NRRL Y-1140
MSVPMPDLSNAIVAQDEMGRPFIIVRDQGNKKRQHGIDAKKSHILASRSVASIIKTSLGPRGLDKILISPDGEITITNDGATILSRMELDNEIAKLLVQLSRSQDDEIGDGTTGVVVLACALLDQALDLIEKGVHPIKIANGFDKASQIAIAHLDSQADDISASATQEEFKSYLFKAAKTSLGSKIVSKDHDLFAQMAVDAITTVMDSNRRDVDFDLIKLEGRVGGSLKDSKLIKGVVIDKDFSHPQMPKSLEGDLKLAILTCPFEPPKPKTKHKLDISNVKEFELLQKYELDKFKEMIDLVKKSGANVVICQWGFDDEANHLLLQNELPAVRWVGGQELELIAIATNGRIVPRFQDLSEDKLGTCGKIYEMEFGTTKDRMLVIEECANSKTVTCFLRGSNRMIVDEAKRALHDSLCVVRNLIRDSRVVYGGGAAEVTMSLAVSDEADKQRGIDQYAFRAFSNALDQIPMILAENSGLDPIETLSLLKSKQLKEKSANIGVDALGRGSNDMKELFVVDPLIGKKQQILLATQLCRMILKIDNVITSGKDEY

SEQ ID NO: 11257 - protein, 208 aa, Arabidopsis thaliana
MATRRRTLLKVIVLGDSGVGKTSLMNHFRYVHKKFSMQYKATIGADFVTKELQIGEKLVTLQIWDTAGQERFQSLGAAFYRGADCCALVYDVNVLRSFDNLETWHEEFLKQASPSDPKTFPFIVLGNKIDVDGGSSRVVSDKKAADWCASNGNIPYFETSAKDDFNVDEAFLTIAKTALANEHEQDIYFQGIPDAVTENEPKGGGCAC

SEQ ID NO: 11258 - protein, 1296 aa, Arabidopsis thaliana
MVFKNKLFFSSKKSGSSSPDSSNSPRSVGSNSPIRSDKKKSKSASKDEPPIPIPGFVGVGCKQTQIKDGLKKKDGSSKGKQLSSEVQAHSIGKSNLSPSSEVKKPPPPEVKEGPAFVSPIMASSLGLNRIKTRSGPLPQERVFNYRNDPATSNLSKMGADGGDLGSGSATSGSGSGNRRKEAGSSKLGLEENMDRTRPSDNKSDRDSLSPDTGPPRSLSPTLPPSGSRLQNVASSSGTGRSEMSSGRSGPLRNSDFCTPENSYEWENPKESESPRYQALLRMTSAPRKRFPGDIKSFSHELNSKGVRPFPLWKPRRSNNVEEVLNLIRAKFEKAKEEVNSDLAVFAADLVGVLEKNAESHPEWEETFEDLLILARSCAMTTPGDFWLQCEGIVQDLDDRRQELPPGVLKQLHTRMLFILTRCTRLLQFHKESWGEEEQVVQLRQSRVLHSIEKIPPSGAGRSYSAAKVPSTKKAYSQEQHGLDWKEDAVVRSVPPLAPPENYAIKESESPANIDRMSSWKKLPSPALKTVKEAPASEEQNDSKVEPPNIVGSRQGRDDAAVAILNFPPAKDSHEHSSKHRHNISWGYWGEQPLISEESSIMCRICEEEVPTTHVEDHSRVCTLADKYDQKGLSVDERLMAVAGTLDKIAETFRHKDSLAAAESPDGMKVSNSHLTEESDVLSPRLSDWSRKGSEDMLDCFPEADNSIFMDDLRGLPLMSCRTRFGPKSDQGMTTSSASSMTPRSPIPTPRPDPIEQILGGKGTFHDQDDIPQMSELADIAKCAADAIPGDDQSIPFLLSCLEDLRVVIDRRKFDALTVETFGTRIEKLIREKYVHMCELMDDEKVDLLSTVIDEDAPLEDDVVRSLRTSPVHPRDRTSIDDFEIIKPISRGAFGRVFLAKKRTTGDLFAIKVLKKADMIRKNAVESILAERDILINVRNPFVVRFFYSFTCRDNLYLVMEYLNGGDLYSLLRNLGCLEEDIVRVYIAEVVLALEYLHSEGVVHRDLKPDNLLIAHDGHIKLTDFGLSKVGLINSTDDLAGPAVSGTSLLDEEESRLAASEEQLERRKKRSAVGTPDYLAPEILLGTGHGATADWWSVGIILFELIVGIPPFNAEHPQQIFDNILNRKIPWHHVPEEMSAEAHDIIDRFLTEDPHQRLGARGAAEVKQHIFFKDINWDTLARQKAAFVPASESAIDTSYFRSRYSWNTSDEQFFPSGEVPDYSDADSMTNSSGCSSNHHEEGEAEECEGHAEFESGIPVDYSFSNFSFKNLSQLASINYDLLSKGWKDEPQQIPHHK

SEQ ID NO: 11259 - protein, 302 aa, Lactobacillus sakei subsp. sakei 23K
MKKVIVLGSTNVDTILNVQRFPQPGETLAMDGRAVAGGGKGANQAIAAVRSGAQTAFISKVGKEGAADFMIDTFKKDGMNVDHVRCSETAGTGQAYIMVDAHGQNSILIYGGANQDVTVEDVHEAETAIKAADRIVAQFEVPIPAIIEAFKIARANGVQTILNPAPAIKNIPTELLAVTDMIVPNETEAEIITGIKVTDEASMQANAEAMFKLGIKVVIITVGSKGSFYATPTATGFVPAFKVNAVDTTAAGDTFIGALSTKLELDYSNIEAAMTYANKASSIAVQTKGAQNSIPYEKDIQL

SEQ ID NO: 11260 - protein, 176 aa, Triticum aestivum
  misc_feature (164)..(164): Xaa can be any naturally occurring amino acid
  unsure (1)..(176): unsure at all Xaa locations
MAPTVMASSATSVVPYQGLKSTAGLPVSRRSNGASLGSVSNGGRIRCMQVWPIEGIKKLETLSYLPPLSTEALLKQVEYLIRSKWVPCLEFSKVGFIFREHNTSPGYYDGRYWTMWKLPMYGCTDSTQVINEVEEVMKEYPDAYVRIIGFDNMRQVQCVSFIAXFKPPGCEESGKA

SEQ ID NO: 11261 - protein, 149 aa, Clostridium thermocellum ATCC 27405
MMYSEKVMDHFMNPRNVGEIENADGVGEVGNAKCGDIMKMYLKIENDVIVDAKFKTFGCGAAVATSSMATELVKGKTIEEALKITNKAVAEALDGLPPVKMHCSNLAEEAIRAAIDDYRRKNGLLPEGSENNACGRRCDDIHHGIDDED

SEQ ID NO: 11262 - protein, 228 aa, Hyacinthus orientalis
MGRGKIEIKRIENTTSRQVTFCKRRNGLLKKAYELSVLCDAEVALIVFSTRGRLYEYSNSNSVKTTIERYKKACTDTTNTGTVSEANSQYYQQEATKLRQQITNLQNTNRTLMGESLSTMSLRELKQLEGRLERGINKIRTKKNELLSAEIEYMQKREAEMHNDNMYLRNKIAENERAQQQMNMLPSTATEYEGIPQFDSRNFLQVSLMEPNNHHYSRQQQQTALQLG

SEQ ID NO: 11263 - protein, 180 aa, Glycine max
SSVPAPFSFFHFLHFFSSSDQDSLQLQGKEWRKRQIRKITDRVFDRVKNPAQNNLRFGDLYIAILLVYNDINKYIPGPHFDPPSKDRIKQVITFCDDNEDGQINRDEFFGFFEQMAPETFNVVRRKLVATLVATPTVAAVTKKATERVPVVGKLVQWLPKAVYAFLMTIAAVLYQEDSAH

SEQ ID NO: 11264 - protein, 453 aa, Lactobacillus gasseri
MMREKTMNENDKVAGLPELAKSVIWMINFGYLGIQIAFTLETSQMSRIFQTLGADPTKLGWFFILPPLAGLVVQPAIGSLSDKTWAPKLGGRRLPYLLIGMIFAVIMMLLLPNIGNFGLGYGSVEALVFGAIAIAILDVSANMAMQPFKMMIGDMVNDEQKSYAYGIQSMLSNSGAVIAAFFPFLLTILGVANTAKKGVVPQSVVISFYVGAAILVITSLLTVTKVHEYDPQTYARYHGINEEDNKKDGNWFVLLKKAPKVFWEVSLVQLFCWFSFQYLSTYATGAIAANVWKAFDPASVGYQLAGNWFGVLTAVQSIAAVIWSYILAKVPNDHHKLGYGISLLLGAVGYGSIFFIQSQNLLILSFILIGISWAAMNTYPLTLVSNALSGKHMGTYLGLFNCSICLPQIIASLLSFVLFPLLKCSMPAMMLTAGISGVLGAISVLFIKETYGN

SEQ ID NO: 11265 - protein, 380 aa, Neisseria gonorrhoeae FA 1090
MKVFRQQLEQLGAQNQYRSIPDLIHQGRYITRENRKMLNMSSNDYLGLASDENLRRSFLQQYGGNFPSFTSSSSRLLTGNFPIYTDLEELVAQRFQRESALLFNSGYHANLGILPALTTTKSLILADKFVHASMIDGIRLSRCAFFRYRHNDYEHLKNLLEKNVGKFDRTFIVTESVFSMDGDVADLKQLVQLKKQFPNTYLYVDEAHAIGVYGQNGLGIAERDNLIAEIDLLVGTFGKALASVGAYAVCNQVLKECLINQMRPLIFSTALPPFNVAWTYFIFERLPQFSKERSHLEQLSAFLRREVAHRTQIMPSETCIVPYILGGNEATLAKAEYLQGQGYYCLPIGPPTVPKNTSRIRLSLTADMTTDEVRQFAACL

SEQ ID NO: 11266 - protein, 518 aa, Dianthus caryophyllus
MGSYKGVYDREILSKIATNDGHGENLEYFDGWKAYDRDPYHSTKNSNGVIQMGLAENQLCFDLVTEWLLKNPQASICTNEGVNKFMDIAIFQDYHGLPEFRSAVAKFMGKARDEKVIFNPDRIVMSGGATGASETLLFCLANPGDAFLIPSPYYPAFNRDLRWRTGVNLIPFTCSSSNNFKITKEALQSAYEDALKKNIKVKGIIVTNPSNPLGTVLDKDTLKMLLTFVNAKNIHLVCDEIYATTVFNSPSFISVAEVIKDMPHVNQDLVHILYSLSKDMGMPGFRVGIIYSYNDRVVSTARRMSSFGLVSSQTQFMIAALLSDDDFVRRFLVESRDRLFRRHQHFTSELAKIGIGCLQGNAALFVWMDLRHLLDEATVEGELKLWRVIINEVKINVSPGSSFLCSEPGWFRVCFANMDNATLDVALNRIRSFVTRGRVDNSTMTTTSARAAATTTTTTTTTTTTTTTTTTIKKKRGQMELRLSFNNRRFEDGLMSPHSSLLSPHSPMPQSPLVKART

SEQ ID NO: 11267 - protein, 579 aa, Arabidopsis thaliana
MASTTREKFVSFINNRWLVFVAAMWIQSCAGIGYLFGSISPVIKSSLNYNQKELSRLGVAKDLGDSVGFIAGTLSEILPLWAALLVGAVQNLIGYGWVWLIVTGRAPILPLWAMCVLIFVGNNGETYFNTGALVSGVQNFPKSRGPVVGILKGFAGLGGAIISQIYTMIHSSNPASLILMVAVTPAVVVVCLMFFIRPVGGHKQIRPTDGASFTFIYGVCLLLAAYLMSVMLIQDLVVVSHNVITVFTIVLFVILVVPILVPIMTSFFTETNEPDDTIEEPLVPKREDQEPGLQTPDLILSEVEDEKPKDVDLLPASERHKRIAHLQAQLMQAAAEGAVRVNRRRGPHRGEDFTLTQALVKADFWLIFFSLLLGSGSGLTVIDNLGQMSQSLGYDNTHVLVSMISIWNFLGRIGGGYFSELVVRDYAYPRPVAMAVAQLIMSVGHIFFAYGWPGAMYIGTLLIGLGYGAHWAIVPATASELFGLKKFGALYNFLTLANPAGSLVFSGMIASSIYDREAERQAHGSVFDPDDALRCNGSICFFLTSLIMSGFCIIACMLSMILVRRTKSVYTHLYGKTRT

SEQ ID NO: 11268 - protein, 630 aa, Neisseria gonorrhoeae FA 1090
MPILTIREVCNINHWSIGYYDVDDSGEIIVRPNPSQHNQTVSLQKLTEAVQQKHQARLPVLFCFPQILEHRLRDINRAFQTAREECGYKGGYCLVYPIKVNQHRRVIESLMSSGQPHGLEAGSKAELMAVLAHAGTRQTLIVCNGYKDREYIRFALMGEKLGHQVYLVIEKLSEIQMVLEEAEKLGIKPRLGVRARLASQGSGKWQSSGGEKSKFGLSASQVLQLVDILKQKNRLDCLQLLHFHLGSQLGNIRDVATGVHESARFYVELHKLGVNIRCFDVGGGLGVDYEGNRTQSDCSVNYSLNEYAATVVWGISQACLEHGLPHPTIITESGRGITAHHAVLVANVIGVERYKPRRLDAPSPEAPRVLHSMWETWTDISASREKRSLRSWIHEGQFDLADVHNQYNVGLLSLAQRAWAEQLYLNICHEVGELFNEKHRSHRTIIDELQERFADKLYVNFSLFQSLPDAWGIDQLFPVCPITGLNEPIARRAVLLDITCDSDGTIDHYIDGDGIAGTMPMPDYPEEEPPFLGFFMVGAYQEILGNMHNLFGDTATADVVVREDGQFTVIDYDEGNTVADMLEYVYQDPKELMKRYREQIEHSDLPASQAMSFLKELEAGLNGYTYLEDE

SEQ ID NO: 11269 - protein, 485 aa, Cryptococcus neoformans var. neoformans B-3501A
MMHASKHKMGFSDFRDAILIQPPSFKKKKEYVLEELLGRGGFGKVVKALWTPPEREPKEVALKIINKKLVKGNEQAVLDEISVLKHLDHPNIVHVWDDFESRDKYYIAFELAVGGELFDRISERGKFTERDAVECIRQVLQATAYLHEHNVAHRDLKPENILYKTRDADSPLVIADFGIAKHLETPDQECSEAAGSFGYAAPEVLLGKPHGMKVDCWSIGIIAYTLLCGYPPFRSDDRNGLLQEMTRGRIMFHDRYWSKVSRTAKDFVKDMLETDPKKRSTAADALNHPWLTSGQATETDLSAAIRDNFDAKRKWKSALRIIQASNRIRSASRSRSPSLSTSPPSTANTANPSPNSALFVPEVPHVLTPLSMTDEDPMSDEHYYFSADDQGHTEEEEEAKVMTRGGKKKAGSMPVGSGSGVTTGTVTPYTTGNEGSNTPKPTIKVIDGNGELRPEETDMQTPPATAPVGAGMMGSIRGMMGKLSL

SEQ ID NO: 11270 - protein, 329 aa, Streptomyces lividans
MSGKYLVTGGAGYVGSVVAQHLVEAGNEVVVLHNLSTGFRAGVPAGASFYRGDIRDQDFMRKVFRGRLSFDGVLHFAAFSQVGESVVKPEKYWDNNVGGTMALLEAMRGAGVRRLVFSSTAATYGEPEQVPIVESAPTRPTNPYGASKLAVDHMITGEAAAHGLGAVSVPYFNVAGANRGVRLVHDPESHLIPLVLQVAQGRREAISVYGDDYPTPDTCVRDYIHVADLAEAHLLAVRRRPGNEHLICNLGNGNGFSVREVVETVRRVTGHPIPEIMAPRRGRDPAVLVASAGTAREKLGWNPSRADLAIVSDAWEWHSSHPKGYDDRG

SEQ ID NO: 11271 - protein, 230 aa, Arabidopsis thaliana
MESISPVSNQLLQPTTTSSNSDRSRRKRKKKSSPSSVEKSPSPSISLEKWRSEKQQQIYSTKLVHALRELRISQQPSSSSSSSIPRGGRAVREVADRALAVAARGKTLWSRAILSKAVKLKFRKHKRQRISNPTTTTLTTGSIRSKKQRATVLRLKAKGLPAVQRKVKVLSRLVPGCRKQSLPVVLEETTDYIAAMEMQIRTMTAILSAVSSSPPPPTPGHEGGQTHMLG

SEQ ID NO: 11272 - protein, 371 aa, Streptococcus mutans UA159
MVNNKKKTSSTFNVQVADFIRNHKKEGVAVDDEVTEKLVIPFELEAEQIDDLLERLTDGGISITDREGNPSTKYAVEEIKPEELTDEELLGSNSAKVNDPVRMYLKEIGVVPLLTNEEEKELAIAVENGDLEAKQRLAEANLRLVVSIAKRYVGRGMQFLDLIQEGNMGLMKAVDKFDYSKGFKFSTYATWWIRQAITRAIADQARTIRIPVHMVETINKLVREQRNLLQELGQDPTPEQIAERMDMTPDKVREILKIAQEPVSLETPIGEEDDSHLGDFIEDEVIENPVDYTTRVVLREQLDEVLDTLTDREENVLRLRFGLDDGKMRTLEDVGKVFDVTRERIRQIEAKALRKLRHPSRSKQLRDFVED

SEQ ID NO: 11273 - protein, 374 aa, Oryza sativa
VDTIEPYPASRRFSPPLISSLCLVVLASPLAMGKIKIGINGFGRIGRLVARVALQSEDVELVAVNDPFITTDYMTYMFKYDTVHGQWKHSDIKIKDSKTLLLGEKPVTVFGIRNPDEIPWAEAGAEYVVESTGVFTDKEKASSHLKGGAKKVFISAPSKDAPMFVCGVNEDKYTSDIDIVSNASCTTNCLAPLAKVIHDNFGIIEGLMTTVHAITATQKTVDGPSSKDWRGGRAASFNIIPSSTGAAKAVGKVLPDLNGKLTGMSFRVPTVDVSVVDLTVRIEKAASYDAIKSAIKGYRSVMSASEGKLKGIIGYVEEDLVSTDFVGDSRSSIFDAKAGIALNDNFVKLVAWYDNEWGYSNRVIDLIRHMAKTQ

SEQ ID NO: 11274 - protein, 161 aa, Pseudotsuga menziesii
MSIIPSFFGRRSSSAFDPFSLDVWDPFRAFTDLSGGGPSGQFVNEASAVANTQIDWKETPEAHIFKADLPGLKKEEVKIELEEGQRILQISGERSKEEEQKNDKWHRIERSRGKFLRRFRLPDNAKVEEIKAAMENGVLTVTVPKQPEPQPPQPKSIEISG

SEQ ID NO: 11275 - protein, 161 aa, Pseudotsuga menziesii
MSIIPSFFGRRSSSAFDPFSLDVWDPFRAFTDLAAGGPSGQFVNEASAIANTQIDWKETPEAHIFKADLPGLKKEEVKIELEEGQRILQISGERSKEEEQKNNKWHRIERSRGKFLRRFRLPDNAKVEEIKAAMENGVLTVTVPKQPEPQPPQPKSIEISG

SEQ ID NO: 11276 - protein, 443 aa, Lemna paucicostata
MDVNSSGEDFVLKARKPYTITKQREKWTEEEHNKFLQALKLYGRSWQRIEEHIGSKTAVQIGSHAQKFFSKLEKEALIKGVPLGQGQGIEIPPPRPKRKPNNPYPLKTSISNGIGGLHQKKASSDEDLLGLSLFHDPSCKTKPSPDVELGRFEGLRIDTSLKKGDSKPKSISGTTSGTTTDQNAEKSMQLTASAFPPFFNMSAEFSSLVVSTLLQNPAAYATAMLAASFWPPADVDTSSDPGSDGRINPTPSIAAIAAATVAAASAWWAMHGLLPFCPPAGLFPGVFPLAPSLTVEEAGQRSKSIPSSSESDERNPANETNREPDEPRGEKKKADRSSCGSNTPSSSDMETNAVLDLEKEDLHLGPAHSPSWKEVSHQGRKAFQALFSREVLPQSFSPPKEEEGRSKPRRTGFKPYKRSSASPVHASSENDVKRLRLQNESFP

SEQ ID NO: 11277 - protein, 140 aa, Methanocaldococcus jannaschii DSM 2661
MKERTFVALKPDAVKRKLIGKIIERFENKGFEIVAMKMIKLDREMAEKYYEEHKGKEFYERLINFMTSGRMIVMVVEGENAISVVRKMIGKTNPAEAEPGTIRGDFALTTPDNIIHASDSKESAEREIKLFFKEDEIFDK

SEQ ID NO: 11278 - protein, 581 aa, Lemna gibba
METCSSGEELIVKPRKPYTITKQREKWTEEEHNRFLEALKLYGRAWQRIEEHIGTKTAVQIRSHAQKFFTKLEKEAVSKGVPLGQVHDIEIPPPRPKRKPTNPYPRKIGVGPSYPSGGERDDNRQLTHLPSSSLHSKGKAEDFFVDSSPEKQAGMNSEKITKEAPVALSLFHVAPSSPTPSSSKSTVPLPDDEKNPSINFDLNKKNRPCGVNADPNTVKFPSPSAISSVHQSTAAFPHPFSWPHVPPAFSSHLTSALLQNPAAHAAANMAASFWLTADVETSSSVDSGNAASSSSPSVAAAAIATVAAASAWWATHGLLPFCYPSFNGCFAAVPPPPTTTPTLTEATRVKVNPRNGKEEEEKDLRQGFDPGTSLTAKGSPLSSTDSNPSEKREVNGEGEVNVHGQPQNQQKSTPDEESFRRKGKNQLDRSSSGSNTPGSEVDNDGAGPTEEEKPKDDDLSVDPNRRGVDPRKEVSKEGRLAFQALFSRGVLPQSFSPTEGEAEKDEVLAPASAPSEVNALQPPQVNSVDQTSVDIGQLRPKPHCIGFKPYKRCSVEAKETEPPPEDDKCSKRMCLEREAST

SEQ ID NO: 11279 - protein, 444 aa, Lemna gibba
MDAISSGEDFILKTRKPYTITKQREKWTEEEHRKFLEALKLYGRSWQRIEEHIGTKTAVQIRSHAQKFFSKLEKEAVIKGVPLGQAHGIEIPPPRPKRKPNIPYPRKISSDIDGSHQKVASDEDKCFMGLALFQDSPCTTKPSSDVDLGRFEGLSIDSCVRKGDAKSTSHGGSMSGVTRDQHKAKSMPFAASDFSAFFNLSAQFSNLVISTLLQNPAAHAAATLAASFWPAAGMKTSTGTTPDNQTNPTPSMEAIVAATVAAASAWWAAHGLLPLCPLAGLFPGISAFSPGPKVEEAANPRSKSMPSSSDSDELNPTKQVSCSKPDESGREKKKADRSSCGSNTPSSSDVETDVVLDLEKEDLHLGLAYSASWKEVSHQGREAFQALFNREVLPQSFSPPKEEEGRAKPRRTGFKPYKRCSATPTHASGENDRKRIRLQNEPSL

SEQ ID NO: 11280 - protein, 344 aa, Cicer arietinum
GFREFKDDSDFDEDEEDDDDDEGLLVGGKGFTFSSNNTKSFKTFSRGSTAAKSVSPKSNEQAEKACKRKRKNQYRGIRQRPWGKWAAEIRDPRKGVRVWLGTFNTAEEAARAYDAEARRIRGKKAKVNFPEEAPVTSSKRFKPNLENKLVNKNLNSFNPNGNKMFNFGENVENYYSPMDQVEQKPLVNNNNQYANMGPFSGNGVQHSQISPSADVTAYFSSEHSSNSFDYSDLGWGEQGPKTPEISSMLSAAAPLESESQYVQNNMQSNNNQNMLPVEDNSAKTLSEELADIESQLKFFETPYDDNWGDASLASFLGGDATQDGGNPMNLWSFDDLPSISGGVF

SEQ ID NO: 11281 - protein, 571 aa, Arabidopsis thaliana
MGVWWIVLVVAVLTHTASAAVREYHWEVEYKYWSPDCKEGAVMTVNGEFPGPTIKAFAGDTIVVNLTNKLTTEGLVIHWHGIRQFGSPWADGAAGVTQCAINPGETFTYNFTVEKPGTHFYHGHYGMQRSAGLYGSLIVDVAKGKSERLRYDGEFNLLLSDWWHEAIPSQELGLSSKPMRWIGEAQILINGRGQFNCSLAAQFSNNTSLPMCTFKEGDQCAPQILHVEPNKTYRIRLSSTTALASLNLAVQGHKLVVVEADGNYITPFTTDDIDIYSGESYSVLLTTDQDPSQNYYISVGVRGRKPNTTQALTILNYVTAPASKLPSSPPPVTPRWDDFERSKNFSKKIFSAMGSPSPPKKYRKRLILLNTQNLIDGYTKWAINNVSLVTPATPYLGSVKYNLKLGFNRKSPPRSYRMDYDIMNPPPFPNTTTGNGIYVFPFNVTVDVIIQNANVLKGIVSEIHPWHLHGHDFWVLGYGDGKFKPGIDEKTYNLKNPPLRNTAILYPYGWTAIRFVTDNPGVWFFHCHIEPHLHMGMGVVFAEGLNRIGKVPDEALGCGLTKQFLMNRNRN

SEQ ID NO: 11282 - protein, 269 aa, Glycine max
  misc_feature (29)..(29): Xaa can be any naturally occurring amino acid
  unsure (1)..(269): unsure at all Xaa locations
TRPDNSPIFVAINVSPIEYGHVLLIPRIXECLPQRIDRESFLLALHMAVEADNPYFRLGYNSLGAFATINHLHFQAYYLALPFPIEKAPTKKIASLNGGVKISELLKYPVRGLVFEGGDTLEDLSNVVSDACICLQNNNIPFNVLISDCGKQVYLLPQCYAEKQALGEVDAELLDTQVNPAVWEISGHMVLKRKKDYDEASEGNAWRLLAEVSLSQERFQEVNDLIFEAIGCGELEDVNVESVKEVDAVSTSEHPTVVVAGSQECVILH

SEQ ID NO: 11283 - protein, 405 aa, Arabidopsis thaliana
MDSVFSNVARAPEDPILGVTVAYNNDPSPVKINLGVGAYRTEEGKPLVLDVVRKAEQQLVNDPSRVKEYIPIVGISDFNKLSAKLILGADSPAITESRVTTVQCLSGTGSLRVGAEFLKTHYHQSVIYIPKPTWGNHPKVFNLAGLSVEYFRYYDPATRGLDFKGLLEDLGAAPSGAIVLLHACAHNPTGVDPTSEQWEQIRQLMRSKSLLPFFDSAYQGFASGSLDTDAQSVRTFVADGGECLIAQSYTKNMGLYGERVGALSIVCKSADVASKVESQVKLVVRPMYSSPPIHGASIVATILKSSDMYNNWTIELKEMADRIKSMRQQLFEAIQARGTPGDWSHIIKQIGMFTFTGLNKEQVEFMTKEFHIYMTSDGRISMAGLSSKTVPHLADAMHAAVTRLG

SEQ ID NO: 11284 - protein, 512 aa, Glycine max
TTTREREREMEDLEEEENGAEEVLGSSLTMEKVAAAKKFIENHYRAQMKNIQERKERRWVLERKLASSDVPNEERINLIKDLERKETEYMRLKRHKICVNDFELLTIIGRGAFGEVRLCREKKSGNIYAMKKLKKSEMLRRGQVEHVRAERNLLAEVASHCIVKLYYSFQDAEYLYLIMEYLPGGDVMTLLMREDTLSENVARFYIAQSVLAIESIHKHNYIHRDIKPDNLLLDKNGHMKLSDFGLCKPLDCIALSTLHENQTIDDETLAEPMDVDDADNRSSWRSPREQLQHWQMNRRKLAFSTVGTPDYIAPEVLLKKGYGMECDWWSLGAIMYEMLVGYPPFYSDDPITTCRKIVHWRNHLRFPDDAQLTLEAKDLIYRLLCDVDHRLGTRGAIEIKAHPWFKGVDWDKLYEMEAAFKPQVNGELDTQNFMKFDEVDPPTAARTGSGSSRKMLTTKDLSFVGYTYKNFDAVKEGLRQSFGDSMQEYASKRAAEETSLQMLASSGDPMVP

SEQ ID NO: 11285 - protein, 461 aa, Nicotiana tabacum
MGISWFYVVAILLFITNTATLCRGGITSSYVRKVESSEDMPLDSDVFRVPHGYNAPQQVHLTQGDHVGKGVIVSWVTMDEPGSNKVLYWEFNSKIKQIAKGTVSTYKYHTYNSGYIHHCTIQNLKYNTKYYYMVGTGHSRRTFWFVTPPPVGPDVSYTFGLIGDLGQTYDPNMTLTHYEMNPTQGQTVLFVGDLSYADKYPNHDNNGWDTWGRFVERSNAYQPWIWTAGNHDVDFAPEIGEPEPFRPYTNRYPVPYQASGSSSPLWYSIKRASAYIIVLSTYSATSKYTPQYRWLEAELKKVNRKETPWLIVLMHCPWYNSYGYHYMEGETMRVIYEPWFVKYKVDMVFAGHVHAYERSKRISNIDYKIVSGECTPASNPSAPVYITVGDGGNIEGLTTKMTEPQPKYSAYRESSFGHAILEIKNRTHAYYSWHRNQDGFSAKADSFLFFNRYWHPVDESY

SEQ ID NO: 11286 - protein, 470 aa, Nicotiana tabacum
MGVSKMEFFGRCIVLVLGLLLNESLLCNGGVTSSFIRKVEKTVDMPLDSDVFRAPPGYNAPQQVHITQGDHEGKTVIVSWVTMDEPGSSTVLYWSEKSKQKNTAKGKVTTYKFYNYTSGYIHHSTIRHLEFNTKYYYKIGVGHTARTFWFVTPPPVGPDVPYTFGLIGDLGQSFDSNKTLTHYELNPTKGQAVLFVGDLSYADNYPNHDNVRWDTWGRFVERSTAYQPWIWTAGNHEIDFAPEIGETKPFKPYTHRYHVPYRASNSTSPLWYSVKRASAYIIVLSSYSAYGKYTPQYKWLEEELPKVNRTETPWLIVLVHSPWYNSYNYHYMEGETMRVMYEPWFVKYKVDIVFAGHVHAYERTERISNVAYNVVNGECTPIRDQSAPIYVTIGDGGNLEGLATNMTEPQPAYSAFREASFGHATLAIKNRTHAYYSWHRNQDGYAVEADKIWVNNRIWNPVDESMVTKS

SEQ ID NO: 11287 - protein, 370 aa, Oryza sativa
  misc_feature (315)..(315): Xaa can be any naturally occurring amino acid
  unsure (1)..(370): unsure at all Xaa locations
TKEYSHQRKFIQMFFLAPQEKGYFVLNDYFHFVDEEQVQPAPVIAQDNFETNMASNSVVEPVPEYIHEEENQSAVPITSEESDAVENYTYSEPPQQVVSQSDNWGDEPLPEEPISSFTNGMAMAPEEPVQSPPVPPPHVEEPVGEPVKKTYASILRTAKAPLVFPVAQPAPTRPHQATETNQAAQHSVMTSSVATEKPKTDVYGEFAVQDDEESKSVYVGNVPSSVSEADLENEFKKFGRLIPDGVAIRSRKETGGYYAFVEFEELSGVHNALKASPIEINGRQIYVEERKPNSGIRGGNYTQLHGVVDGGIYLXEGEAEVVSVEEGEGMLEGEATTNMRATVVVAGHQMATSVFLTMRGAFWGATTQET

SEQ ID NO: 11288 - protein, 427 aa, uncultured bacterium 561
MNLFTRIATISFAVLLTPISAADLAESVERRVEAVMPEVVSWRRDLHEHPELGNREFRTAGIIAEHLRGLGMEVRTEVAHTGVIGVLKGGDGPVVALRADMDGLPVTELVDLPFASKARGEYLGQDVGVMHACGHDNHVAILMGVAEVLAGLGDELPGTVLFLFQPAEEGTPDGTVGGAELMLQEGAFEGMLPDAVFGLHVFPYPAGVIATRPGGLMASSDSYKITVTGKQTHGAVPWAGVDPIVTASQIVLGLQTIVSRQLDATLTPSIVTVGKIDGGVRSNIIPESVDLIGTIRTFDADTRLDIHDRIRRTATHIAEAAGATAQVDIDLGYGVTRNDPELFQQMVPTLRGVTGGQFVEAQQTTTAEDFSYFANEAPGLFLFLGVAPDDPTLVYPNHSPRFYADERALPVGVRALTALTLDFMAAN

SEQ ID NO: 11289 - protein, 395 aa, Oryza sativa (japonica cultivar-group)
MEGAEAEERRLAASLTARYSDWVVEALDELPGSFILTDPAMPGHPIVYASRGLASLTGYPPREVLGRNARLFQGADTDRAAVAGVREAVRGQRPHQVSILNYRRDGEAHWVLLHLAPVFHASDGRVLHFLAVQVPIAPPASRRRTPPCRAARPFVVFAACREEARVEEECPCASHAGEVFVDVDKRGQDAEEPRVASEHEKEKALSTANSIFSALNRYSKLTGLVVCGKRCDSVGIPALSSSLNLSLGRIKQSFVLTDPHLPDMPIIYASDAFLSLTGYSREEILGCNCRFLNGPGTSVEVLEQINQHICSEQACTVHLLNYRKGGSSFRDLLHISPIRNASGKVAFHVWVHLDEGAKYDFNGLTPEVWQLGAVGAVRVAVRSLSASGSLLRPSQ

SEQ ID NO: 11290 - protein, 549 aa, Methanococcoides burtonii DSM 6242
MQYIVLMFKKLRRYFSILKVFIRYNLFSLLYREIQNNYVSNKKITCSVDREAQKNARKLRLAFEDLGVTFIKFGQIMSKRPDLIPFSYVQELSQLQNKVGSISFEEMTASFEGFNCDCQTKDVCDISSGSTTSFISQFDEFNKKPIASASIAQVYEAVLNGQKVAVKIARPNLIDLINVDLSIINDLKPLLVRMGGFGSNFDIDSFLDEFKELLNKEVDLRNEARNIMRFGEIFRSSKDIHIPNVHEALCTESVLVMDYMEGVLVKDLDDKNQKLRSKYAHIISSSYLEQVYVHGFYHADPHSGNILLREDGIAFIDFGEVGIIDSELKRNMLNLFYGIYKKNVDIAFEAFLKIANINKDDIDVHKFKVDLDSLISLQNFALGERQNDSYANLALKYDLALPSDFSTLERSLVLVEGVCLELDPKFNLIEDAKTLISMVMMKRYSPINAAEYFLLEGDRYLEIFKNLPQGINDVIETIRGYRFEKLEEKTKEIKHDKIIDSLSKYVFLSIILVSSAYLATQQDTNLANLGIVGFVVALFLFGVLFLKHQ

SEQ ID NO: 11291 - protein, 218 aa, Oryza sativa (japonica cultivar-group)
MWIRELAVAGQDAEEPRVASEHEKEKALSTANSIFSALNRYSKLTGLVVCGKRCDSVGIPALSSSLNLSLGRIKQSFVLTDPHLPDMPIIYASDAFLSLTGYSREEILGCNCRFLNGPGTSVEVLEQINQHICSEQACTVHLLNYRKGGSSFRDLLHISPIRNASGKVAFHVWVHLDEGAKYDFNGLTPEVWQLGAVGAVRVAVRSLSASGSLLRPSQ

SEQ ID NO: 11292 - protein, 525 aa, Streptococcus thermophilus
MASKRLRHVLKVFSSVGLLFYREKHLPQDQQTTPVKLRQAFEQLGPSFVKIGQILSTRSDLLPEAYIRELSKLQSSVPPLNKEEVMTAIRQELPTDLSEVFVDFSKEPLASGSVAQTHRTRLLSGQEVIIKIQRPGIDDIVKEDIQLLIKLARHIPKHFISMVDVQEVLENLRETLIKELDFRNEAEAMKRFRANNKRVVCLGVPEVYDEFTTPHLIVEEYINGIPLNHYSQLLEAGYDLEDVGKKLMLSFIKQVFKDGYFHGDPHPGNLLVRDGKIYFIDFGIMGELEVGMRSSLNDILYSFTAQDVDGMTKAILSITQFDNGLNSAVLSQDVEKMLGRYSGVDIGSLSMTDLLEDLLTVFQKNHLKASSQITILEKASLEIEGIFREFAPNIDLMTLAKDYFLENMGPDMLKQALNKETILIELFYLLRNGKNIPRHLHQLLEQILNGRIVLNHDFINFSGRVKVFEKVLNNMVLALLTLAFLLSGALLSNKSDFQNLAWLFLGLGTVLALVTVGRIIFKKKG

SEQ ID NO: 11293 - protein, 524 aa, Mesorhizobium loti MAFF303099
MSSVGAGFRLARAGWVLVREGVIAALPGEELSGLPKFGWQLARLFTRRRALAYQRSDRLAKAVVRLGPSYVKLGQFLATRPDVVGNDMALDLAMLQDKMHTFPKAEAVAAIEASLGRKVRDLYAEFGDPVAAASIAQVHAAEAIHDGVATKVAVKVIRPGVRRRFFQDLESYFLAARLQEKYIPSSRRLRPVEVTETLAQTTKIEMDLRLEAAALSELGENTKDDPGFRVPSVDWERTGRDVLTMEWVDGVKMNNIAGLEEAGHDLKAIAANLIQSFLRHTLRDGFFHADMHPGNLFVEANGTIVAVDLGIAGRLGKKERRFLAEILYGFITRDYLRVAEVHFEAGYVPRQHNVAAFAQAIRAIGEPIHGQPAETISMAKLLTLLFEVTELFDMATRPELILLQKTMVVVEGVARTLDPAFNMWKTAEPVVGGWIAGNLGPRIMMIDARDGAKALLTLARQAPELAARTDRLSREIDLMAEHGLRFDETTARAIGKAEARYSRSGRVALWVIALTLVYIAWKIL

SEQ ID NO: 11294 - protein, 449 aa, Daucus carota
MGKEKVHINIVVIGHVDSGKSTTTGHLIYKLGGIDKRVIERFEKEAAEMNKRSFKYAWVLDKLKAERERGITIDIALWKFETNKYYCTVIDAPGHRDFIKNMITGTSQADCAVLIIDPTTGGFEAGISKDGQTREHALLAFTLGVKQMICCCNKMDATTPKYSKARYDEIVKEVSSYLKKVGYNPEKIAFVPISGFEGDNMIERSTNLDWYKGPTLLDALDQINEPKRPSDKPLRLPLQDVYKIGGIGTVPVGRVETGTIKPGMVVTFGPSGLTTEVKSVEMHHESLLEALPGDNVGFNVKNVSVKDLKRGYVASNSKDDPAKGAASFTSQVIIMNHPGQIGNGYAPVLDCHTSHIAVKFAELLTKIDRRSGKELEKEPKFLKNGDAGMVKMLPTKPMVVETFAEYPPLGRFAVRVMRQTVAVGVIKAVEKKDPTGAKVTKAAAKKGAK

SEQ ID NO: 11295 - protein, 342 aa, Sinorhizobium meliloti
MRALQLLDDRKLEITDVPEPEAPGPGEVTLRVKAVALNHIDVWGWRGMAFAKRKMPLVIGAEASGVVESIGPGVANVLPGQLVSIYGARTCGLCRPCREGRDNLCEHVGGVHGFHLDGFAQEKVNLPARLLVPAPPGVDEIGAALAPVTFGTVEHMLFDNAKLEPGETILVHAGGSGIGTAAIQLAKKIGCTVITTVGSDDKIDRAKALGADHVINYRIDRFEGVVRKLTKKKGVDVVFEHVGKDTWAGSMLSMKRGGRLVTCGSTSGVSTDMNLMMLFQQQLKLLGSFGCRMENMANAMQKMGRGLIHPVIDTEVGLNDIDRALERMESRQIFGKIVLRMD

SEQ ID NO: 11296 - protein, 427 aa, Sinorhizobium meliloti
MSKAYKDHLGRPIVAVTGMGVITSLGQGLDDNWAALTGGVSGIHKITRFPTDALSTRISGTVDFIEIPAENAVERSYAMARETTLEALAQAGLSGDFNGPLFLAAPPIEPEWNARFELADRSPPSSQPGDAYNRFLAAMRQKADPTFHEAVLFGSISERLADRFGTRGLPVTLSTACASGATAIQLGVEAIRQGRTDRALTVATDGSVSAEALIRFSLLSALSTQNEPPEKASKPFTKDRDGFVIAEGAATLVLESLEAAVARGARIYGILKGCGEKADLFHRTRSSPDGGPAIATIRAALADAGIDEAGIGYINAHGTSTPENDKMEYLSMSAVFGERLPSIPVSSNKSMIGHTLTAAGAVEAVFSLQTMLSGTLPPTINYQNPDPAIVLDVVPNVKRSQQVTAVLSNSFGFGGQNASLVMTAEPA

SEQ ID NO: 11297 - protein, 141 aa, Brassica napus
PRVRIKEGPDTIGAFIAEPVMGAGGVIPPPATYFEKIQAVVKKYDILFIADEVICAFGRLGTMFGCDKYNIKPDLVSLAKALSSAYMPIGAILMSQEVADVIYSQSNKLGAFSHGFTYSGHPISCAVAIEALKIYKERNIP

SEQ ID NO: 11298 - protein, 415 aa, Listeria monocytogenes str. 4b H7858
MTELIKKGSGAKEAAQFLAQATTKHKNAALLNLSNDLLIHTATLLQENEKDILRAKQKGTPETMIDRLRLTEERIKEISEAVKQVVALKDPIGEVTNMWKNEAELTIGKTRVPLGVIGIIYESRPNVTVDASVLCFKTGNAVILRGGSDAIDSNKALMSVIQDSLEASGFPRSSVQLIEDTSRETARDMMRLNRFLDVLIPRGGARLIQTVLENATVPVIETGTGNCHIYVDKAAEKQMAIDILVNAKCSRPSVCNAAETLLIHRDVAEDYLPAMETALKEYDVELRADERAKEILQEAKAATESDWEDEFLDFILAIKVVDSAEEAIDHINKYGTKHSEAIISNDYATGQAFHQKVDAAAVYINASTRFTDGFAMGFGAEIGISTQKLHARGPMGLTELTSTKYIIFGDGQIRN

SEQ ID NO: 11299 - protein, 158 aa, Mesorhizobium loti MAFF303099
MAATKKKAVRKAKKGERIRQVAAIPFRLTAGGNFEVMLVTSRTTRRFIVPKGWPMKGKSGRKAATIEAMEEAGVLGKTLKQPAGTYSYWKRLTNRFIRVDVIVYLLEVTEELANWQEAKRRQRAWLAPADAAMLIDEPDLSTLVETLTLPQSAPTGAA

SEQ ID NO: 11300 - protein, 417 aa, Frankia sp. CcI3
MNVVRDPELITGGPMRRLEPDSVDGLAPHRFPGAFGENTSPAAGELNDGGIRLLAPDGSLVADSRFSVLADHELRMEFYTSMVLARRLDEEATALQRQGELVLWIPLRGQEAAQVGSAAAARPRDYLFPSYREHAVAWHRGVPAVEVIRLLRGVSHDGWDTHRHNMANYTIVLAAQTLHAVGFGMGVLLDGAAGTGTGTGGTGGTGTGGTDTDTDMAVMVYLGDGAMSQGDANEAFVWAASFGAPVVFFCQNNQWAISTPSRRQSPVRLARRADGFGFPGLRVDGNDVLAVHAVTTWALDRARSGRGPVLIEANTYRMAPHTTSDDATRYQPPDEITAWQARDPIERLRRLLAAEVEAGWFDEVRRRADVAAADLRRDTLALDPPDPSSMLDHVAAEETADQRRQREWFAAYRDSFL

SEQ ID NO: 11301 - protein, 178 aa, Bacillus thuringiensis serovar konkukian str. 97-27
MSEKTYELATFAGGCFWCMVKPFDELPGIHKVLSGYAGGHVENPTYEQVKAGTSGHLEVVQITFDPSIFPYEKLLNLYWPQIDPTDDGGQFFDRGPSYRTAIFYHNEMQKELAEKSKQTLAESGMFKDPIVTEIRPAAPFYEAEEYHQHFYKKNPEKYATEQKESGREDFIKENWQKK

SEQ ID NO: 11302 - protein, 502 aa, Zea mays
MYKEPKDQETITGPVAWSPQAVHADVDLDNHNEPINPPIDGTQSMFGEVPGREKGKSKSVSFALSDVSGIASPIDTNSEMGNIGDSCSDKLTDENLSNSSRHIAEKHSITKDQYSNEQDHEREPLDHAVQQQPKSDVGERASSMKRRCRKKVQKVGTPNHTVDDYFGEDCVEPSLAEEDNDTGDHYTTGNKHKARKKSRGGVEESQQQKAQKNKSKVSSRGRKRTLKDESTEKPEKKLTHRIRQRIPKEVKALLETPREQIKPMKLCASHLRLLQEARERVDPKGIPSGPSSNTRNFQLDDMDDLGYRDEEARFFDNDITEEHVQNATKLNYHSYMNKPARGKWSKSDTDLFYEGLRQFGIDFAMIQQLFPDKTRHQVRQKFKSEERKNPLLVHDAIVHRSGDNLYFKKVIKQLNIEDVVLPDIKSTQKQDGASSERGPGNENVLDDLNEEENSSNWLNEEHDVQMADVEEEHGEQMDDVEEERDLGNDGGDDDLGDVFDWY

SEQ ID NO: 11303 - protein, 459 aa, Nocardioides sp. JS614
MTTFGVEDPASLEIIAQVPDQGPDEARVAVDRAAAAFADWSRTSPRHRSDVLRRAFDLMMRDSEELTGLITSENGKSLVDAAAEVGYAAEFFRWFSEEAVRPSGEYGEAPTGGVRTIVTHRPVGVAALVTPWNFPAAMVTRKIAPALAAGCTVVLKPAAETPLTALAVGRILSEAGVPDGAVEIVTTTDAPGVVTAWLSDDRVRKVSFTGSTGVGRALLHQAADRVLNASMELGGNAPVVVTDDADLGAAVAGTMIAKFRNSGQACTAANRIFVHNDVAFDFVARLGAAVEKLSVGPAIDGAAIGPLITQAALQRVTEAVDFAVREGARISHQAQLPEAPGYFFPPTVLAGLAPDATILREEIFGPVAPVVVWHDEDELLELVNDTEYGLAAYVFAGDIGRAVRLGERIDAGMVGINRGLVSDPSAPFGGVKQSGLGREGAREGLREFQETQYLSVDWS

SEQ ID NO: 11304 - protein, 280 aa, Hordeum lechleri
GTRAPVPVPVAAGDRGLSVSQAMSKVMEKGKTAFIPYITAGDPDLATTAAALRLLDALGADVVELGMPFSDASADGAVIKASAARALAAGATVDAIMAMLKEVTPELSCPVVIFSYFSPIAQRGTASFAAAVKEAGVKGLIVPDLPYAETSAFRDEAIKNELELVLLTTPSTPPERMKEITEASGGFVYLVSVDGVRGARATVNPRVESLLKKIKQVTDKAVAVGFGISTPDHVKQIAEWGADGVIIGSAMVKQLGEAASPEEGLKRLEVYARSLKDALP

SEQ ID NO: 11305 - protein, 527 aa, Hordeum lechleri
MAHVHVDEMLHGAAAAPRSLLIATAVLFSLVVLPLLLRIITKQGAASDAKLLSLLPSPPSKLPIIGHLHLMGDLPYVSLAGLAAKYGPELMLVRLGAVPTAVVSSPRTAEAVLRTHDHVFASRPRSMVFDIIMYGQTDSCFAPYGDHFRKARKLVTVHMLNARKIRSQRPAREEEVRLVIGKIAKAAAAREAVDMSELLHSYVNDLVCRAVSGKFSQEEGRNKLFRELTDINAALLGGFNILDYFPSLGRFELVCKVACAKARRVRKRWDLLLDKLIDDHAARMVSREDEAQGEQEEDKDFIDVSLSLQQEYGLTRDHIKAILIDMFEAGTDTSYMTLEFAMAELIRKPHLLNKLQEEVRRNVPNGQEMVAEDDLPNMTYLKAVIKETLRLHPPVPLMIPHFSLDACTVDGYTIPANTRVVINAWALGRHSSYWENENEFQPERFMNGAGVDLKPNEFHYLPFGFGRRMCPGVHSASATVETMLANLMYRFDWKLPPGLKEEDIDMTEVFGITVSRKEKLILVPVTV

SEQ ID NO: 11306 - protein, 89 aa, Cicer arietinum
STLHLVLRLRGGMQIFVKTLTGKTITLEVESSDTIDNVKAKIQDKEGIPPDQQRLIFAGKQLEDGRTLADYNIQKESTLHLVLRLRGGF

SEQ ID NO: 11307 - protein, 250 aa, Polaromonas sp. JS666
MADRAFHLDPGAFDAAIVDLDGTMVDTVGDFVAALNLMLADLPVPGGETRRVDAATVGSMVGKGSEHLIRSVLNHLQAQDSGMSPPVNSAENCDRAYAGYQGHYDRINGLHSAVYPGVPEGLRVLQRAGLKLACVTNKPAAFARALIELKGLDGFFTEVFGGDSFERKKPDPLPLLKTCEALGTRPDRTLVIGDSSNDAQAARAAGCPVVLVTYGYNHGEPVRAVDADGFIDSLAQLQFAMAAVAGAASA

SEQ ID NO: 11308 - protein, 146 aa, Brassica napus
MTNYGAIPTSSHPSPPVDLEYISHVKHRLKAGLATRRPWRSMFDLESMTLPHGFFDAISRMKTNLVYFRANYAIAVLFMLFVSLLYHPTSLLVLAILVVFWIFLYFLRDEPLVVFGHQVDDRTVMISLSVLTIVMLLFTHATGNIL

SEQ ID NO: 11309 - protein, 570 aa, Zea mays
MTSTTPGTFGTLANSGPVALSFPTTTSFASFLGGGSSPSRIMDSGGGVGLSKFKAMTPPSLPLSSSYPPPAQSYLHAFSGLLDSPILLTPSLFPSPTTGAIPSEPFNWMGTPENDLSGSGGVEAEQRQQYTDFAFQTAAAETSTIITGAAHTASFPQSSVLMPPSGRVGDSYSGEMLQQQPPWTYQEPTAQFEAPAAQAGNMFGTGGGYGAAPGFREQRQSHRPSSDDGYNWRKYGQKQMKGSENPRSYYKCSFPGCPTKKKVEQSPDGQVTEIVYKGTHNHPKPQSTRRGASSAPASYVVQSASDAVMPEHSWGALSGTPVVTPENSSGSFGGDGDEVNGMSSRLGGSFGADDLDDDEPDSKRWRKDGGDGDAAGCSVSVASNNRTVREPRVVVQTMSDIDVLDDGYRWRKYGQKVVKGNPNPRSYYKCTGAGCLVRKHVERACHDTRAVVTTYEGKHNHDVPPARGSASLYRAALAAQMPHQQAASYQGGLVRTDGLGVGASSQGGPMPAAERGSFALSGFGDPVGTAYSYYTNHHQEQEQQQPNQAMRYAKDEPQDCMSFFEQQLLF

SEQ ID NO: 11310 - protein, 251 aa, Arabidopsis thaliana
MVKKSYPEVKEEYKKAVQRCKRKLRGLIAEKHCAPIVLRLAWHSAGTFDVKTKTGGPFGTIRHPQELAHDANNGLDIAVRLLDPIKELFPILSYADFYQLAGVVAVEITGGPEIPFHPGRLDKVEPPPEGRLPQATKGVDHLRDVFGRMGLNDKDIVALSGGHTLGRCHKERSGFEGAWTPNPLIFDNSYFKEILSGEKEGLLQLPTDKALLDDPLFLPFVEKYAADEDAFFEDYTEAHLKLSELGFADKE

SEQ ID NO: 11311 - protein, 468 aa, Nicotiana tabacum
MGMKRVYTGFLCLLTVLILSSRAQLSDGGITSNYVRKYNSNVDMPLNSDVFRVPPGYNAPQQVYITQGDHEGKGVIASWTTPDEPGSNSVLYWAENSNVKSSAEGFVVSYRYYNYTSGYIHHCTIKDLEFDTKYYYEVGLENTTRKFWFVTPPKPGPDVPYTFGLIGDLGQTYDSNSTLTHYELNPLKGQTMLFVGDLSYADNYPFHNNIRWDTWGRFIERSAAYQPWIWTAGNHELDFVPEIGESKPFLPYKHRFSTPYRVSDSTSPLWYSIKRASAYIIVMSSYSAFGTYTPQWKWLKNELPKVNRSETPWLIVLMHCPMYSSYVHHYMEGETMRVMYEPWFVNYKVDVVFAGHVHAYERSERISNVAYNIINRKCSPVRDESAPVYITIGDGGNQEGLATEMTQPQPRYSAYREASFGHGILDIKNRTHAYFGWHRNNDGYAVEADSLWLFNRYWKLDGPSVSMS

SEQ ID NO: 11312 - protein, 222 aa, Zea mays
  misc_feature (89)..(89): Xaa can be any naturally occurring amino acid
  misc_feature (147)..(147): Xaa can be any naturally occurring amino acid
  unsure (1)..(222): unsure at all Xaa locations
MGRRPARCYRQIKNKPYPKSRYCRGVPDPKIRIYDVGMKRKGVDEFPYCVHLVSWEKENVSSEALEAARIACNKYMTKSAGKDAFHLRXSGVHPFHVLRINKMLSCAGADRLQTGMRGAFGKPQGTCARVDIGQVLLSVRCKDNNAXAHASEALRRAKFKFPGRQKIIESRKWGFTKFSRADYLKYKSEGRIVPDGVNAKLLGNHGRLEKRAPGKAFLEAVA

SEQ ID NO: 11313 - protein, 439 aa, Porphyromonas gingivalis W83
MKSLTKLGIPIVIAMLIMAIYNVVDTFWVARLGTLPVAAVSVVFPLSLVFLGIGLMFGVGGGVYISRLLGAKQIVKAGQVASVSVITSVILAALIALVCNAFLPEILLFMGANEEMMSLAEAYGRLFIVSCVIGTLNVSMSNIIVSQGASKTSASAMIIGSVINVALDPLFIYAFGWGVKGAAWATILSRIITTIIYTCFFMKAEVKVSFALFVPTIRMYLDIIKIGISMLCLQLLQTLSISLLQRAAVKYGAEAVAAVGIVLKIVTLGTNVVFGFVKGLQPMAGYNYGAENFQRLKEAVRCSLILTTSFCVLWSTFILVFASPVISCFGKDETMQEIARIALRANTLMFFTFGFQFVYSTLYMAIGRARQSLLLNIGRQGLFFIPVILLLPSYWGLNGVLYAQPVADVFATLMTLFFAIQIHREIRHKSHLTTENLQC

SEQ ID NO: 11314 - protein, 230 aa, Rhodothermus marinus
MPGKPVNLASPNERKLNFWERLYLPAVVQGLAYTWRKMRSPRYTFQYPDELWYPPDSYRGRPVLVEENGRPRCVACGLCARACPPLAISMQAKEVDDVKEREPAWFEINMLRCIYCGYCEEVCPEEAIVMSKEYDLTFQSRDEAIFGLEKLLVPAERLKDRLEWLDRYKDPQYGQHWEFRKENNLHSLKDRPFLKWLLEEEGMEELKSTHLRPEEPVAAERSWGGVRAEG

SEQ ID NO: 11315 - protein, 392 aa, Brassica napus
RPTRPVRGGELFNKVAKGRLKEDVARKYFQQLISAVTFCHARGVYHRDIKPENLLLDENGNLKVSDFGLSAVSDQIRQDGLFHTFCGTPAYVAPEVLARKGYDAGKVDIWSCGVVLFVLMAGYLPFHDRNVMAMYKKIYKGEFRCPSWFSPELTRLCSRLLETNPEKRFTFPQIMENSWFKKGFKHVKFYVEDDKLCNVVDDDDELETGSVESDRSSTVSESDVEFFKPARRVGGLPRPASLNAFDIYRFSQGFDLSGLFDDDGEGSRFVSGAPVSKIISKLEEIAKVVSFTVRKKDCRVSLEGSRQGVKGPLTIAAEIFELTPSLVVVEVKKKGGDRTEYEEFCNKELKPKLQTLTADEVDDPVAVSAVVDETASGVANSPPVCFLPSDTE

SEQ ID NO: 11316 - protein, 402 aa, Chromobacterium violaceum ATCC 12472
MTSSIFAGVELAPRDPILGLNEAFNADTRSTKVNLGVGVYSDDNGKIPLLAAVQAAEKARLEALPARGYQPIEGPAAYDVAVQKLLFGESSELLAAGRVVTAQALGGTGALKIGADFLKRLNPAAKVYISDPSWENHRALFESAGFAVENYPYYHAASRGVDFAAMKAHLSSLDAGSIIVLHACCHNPTGADLSAAQWEEVVSICRERSLVPFLDMAYQGFADGIDADALAVRLFAASNLQFFVASSFSKSFSLYGERVGALSIITAAKDESVRVLSQLKRVIRTNYSNPPIHGAAIVAAVLSSPALRAQWEEELAGMRDRIRDMRLALLEAIKAQGVAVDFSFITAQRGMFSYTGLSAAQVDRLREEFGIYAVSTGRICLAALNSKNVGYVASAIAKVVQA

SEQ ID NO: 11317 - protein, 467 aa, Clostridium perfringens str. 13
MAVEKTMDKIVALCKNRGFIFPGSEIYGGLANSWDYGPLGVEFKNNVKRAWWKKFVQESKYNVGLDSAILMNREVWVASGHVGGFSDPLMDCKECKARFRADKLVEDHMTANGAEVATADGWSNEELMDYITKNNIVCPKCGKLNYTDIRKFNLMFKTFQGITEDSKNEVYLRPETAQGIFVNFKSVQRTTRKKVPFGIAQIGKSFRNEITPGNFTFRTREFEQMELEFFCKPGTDLEWFNFWKDSCWNFLLNLGMKEENIRMRDHGEEELSFYSNATSDIEYLFPFGWGELWGIADRTDYDLNKHAEHSGQDMTYLDPTTNEKYVPYVIEPSLGADRVALAFLVEAYDEEELEGANGKVDVRTVMHLHPALAPFKAAILPLSKKLSEKADEVYAELSKHFNVDYDETGSIGKRYRRQDEIGTPFCITVDFDTLEDGCVTVRDRDNMEQQRVKIEDVRAIIEKSLEF

SEQ ID NO: 11318 - protein, 310 aa, Zea mays
MARHFVLNTGAKIPSVGLGTWQSDPGVVGNAVYAAVKAGYRHIDCARVYGNEKEIGLALKKLFEEGVVKREDMFITSKLWNDHHAPEDVPEALNDSLNDLQLEYLDLYLIHWPFRVKKGTNTSPENFVTPDFPATWGAMEKLYDAGKARAIGVSNFSSKKLGDLLAVARVPPAVDQVECHPGWQQTKLHSFCQSTGVHLTAYSPLGSPGTTWMNGNVLKEPIIISIAEKLGKTSAQVALRWNIQMGHSVLPKSTNEERIKQNLDVYDWSIPDDLLAKFSEIKQARLLRGNFIVNPESVYKTHEELWDGEL

SEQ ID NO: 11319 - protein, 174 aa, Oryza sativa (japonica cultivar-group)
MDRRVVTVQAEEDEMVRQRQRQRQLVRERGRRIKAAAELGLARSSSGGRQWGRALGRRALLLRKGPATAALSSSTLLLETSAGQEESKQGKAMEGEAEQEEEEEEVMVDEKVAVLRQLVPGGEAMAVERLLDETADYIAALRAQVGVMRALACLLSGLGSPPEKEISVTPEKPI

SEQ ID NO: 11320 - protein, 470 aa, Nicotiana tabacum
MGVRRTSFLGCFILAVLGLIISAPILCRGGTTSSFVRKVEKTIDMPMDSDVFSVPPGYNAPQQVHITQGDHVGKAMIVSWVTMDEPGSSTVLYWSNNSKQKNKATGAVTTYRFYNYTSGYIHHCIIKHLKFNTKYYYEVGIGHNPRTFWFVTPPQVGPDVPYTFGLIGDLGQSFDSNRTLTHYELNPIKGQTVLFVGDLSYADNYPNHDNTRWDTWGRFVERSVAYQPWIWTTGNHEIDFAPEIGETKPFKPYTHRYRVPYKSSNSTAPFWYSIKRASAYIIVLSSYSAYGMYTPQYQWLYEELPKVNRSETPWLIVLLHSPWYNSYNYHYMEGETMRVMYEPWFVQYKVDVVFAGHVHAYERSERVSNVAYNIVNGKCTPVRDQSAPIYITIGDGGNIEGLANNMTEPQPEYSAFREPSFGHATLDIKNRTHAYYSWHRNQEGYVVEADKLRLYNRFWHPVDDSTTAKS

SEQ ID NO: 11321 - protein, 280 aa, Streptococcus mutans UA159
MEAYTLINGVHIPKIGFGTWKLADGDEAYKSVSYALEVGYRHVDTAQYYGNEVSVGRAIADSPIKREELFITTKIWNDKHSYDEAKQSVEESLAKLKLNYLDLLLIHWPNPKALRENDAWKTRNADVWRAMEDLYQAGKVRAIGVSNFMIHHLEPLLEVATVKPMVNQVLLAPGCSQEELVAFCRQNEMILEAYSPLGTGSIFDNQTAQDLANKYNKTVAQIALRWSLQKGFLPLPKSATPKNILSNLAIFDFDLTEDDILKLDKIENVKSQGNPDETAF

SEQ ID NO: 11322 - protein, 474 aa, Pirellula sp. 1
MKTARHELVILGGGPAGYVAAIRAAQLGIDVACIDDNPRFGGTCVRVGCIPSKALLESSHLYEEAQHKFADHGLNVSNVEVDLDVMMKRKEKIVESLTGGIDMLFDRRGVTAYHGRGRLRDVDSIEITPSEGAAEDQPTLVTADQIMLCPGSVPAQLPFVEEDGDRIGNSTTALSFPEVPEELVVIGGGYIGLELGSVWNRLGSNVIVLEAFDRIMPGLDKEMATLAHRSFKKQGMDIRTGTFVASAKVDPKPGDKKPCVIKIKNGETIRCDRVLLATGRAPATKSMGLEEAGVKLDERGFIQVNHQFETSVTGIYAIGDCIGGAMLAHKAMEEGIVCVEQMAGIASEMNYEVIPAIVFTHPEIAMVGKTEEELKEAGIEYNKGVCPLGANGRARTLGDIDGRVKILADAATDRVLGVHIIGPRAGDMIAEAAAAMEFGASSEDIARTCHAHPTLSEAVHEAALAIDDRAIHTA

SEQ ID NO: 11323 - protein, 450 aa, Streptococcus mutans UA159
MTKQYDYIVIGGGSGGIASANRAAMHGAKVILFEGKQVGGTCVNVGCVPKKVMWYGAQVAETINNYAADYGFDVTTQAFHFDVLKQNRQAYIDRIHDSYERGFDSNGVERVYGYATFVDAHTVEVAGEHYTAPHILIATGGHALLPDIPGSEYGITSDGFFELDAIPKRTAVVGAGYIAVEISGILHALGSETHLFVRRDRPLRKFDKEIVGTLVDEMKKDGPHLHTFSVPKEVIKNTDNSLTLILENGEEYTVDTLIWAIGRAANTKGFNLEVTGVTLDSRGFIATDAFENTNVEGLYALGDVNGKLELTPVAVKAGRQLSERLFNHKPQAKMDYKDVATVIFSHPVIGSIGLSEEAALDQYGEENVTVYRSTFTSMYTAVTSHRQACKMKLVTVGEDEKIVGLHGIGYGVDEMIQGFAVAIKMGATKADFDNTVAIHPTGSEEFVTMR

SEQ ID NO: 11324 - protein, 209 aa, Solanum brevidens
TNLKMKTNQLFLPFLILVISSNSFLSSAAESPPEVVDIDGKILRTGVDYYILPVVRGRGGGLTMDSIGDKICPLDAVVQEHQEIDQGLPLTFTPVNPKKGVIRESTDLNIIFSANSICVQTTQWKLDDFDETTGQYFITLGGNQGNPGRETISNWFKIEKFDRDYKLLYCPTVCDFCKVICKEIGIFIQDGVRRLALSDVPFKVMFKKA

SEQ ID NO: 11325 - protein, 232 aa, Pyrococcus horikoshii OT3
MIRAVFFDFVGTLLSVEGEAKTHLKIMEEVLGDYPLNPKTLLDEYEKLTREAFSNYAGKPYRPIRDIEEEVMRKLAEKYGFKYPENFWEIHLRMHQRYGELYPEVVEVLKSLKGKYHVGMITDSDTEYLMAHLDALGIKDLFDSITTSEEAGFFKPHPRIFELALKKAGVKGEEAVYVGDNPVKDCGGSKNLGMTSILLDRKGEKREFWDKCDFIVSDLREVIKIVDELNGQ

SEQ ID NO: 11326 - protein, 297 aa, Streptomyces avermitilis MA-4680
MRMGLLGTGPWAQAVHAPALRGHDDLEFVGVWGRRPEAAASLADRHGTRAYDDVDALLADVDAVAVALPPAVQAELAVRAARAGCHLLLDKPIATTVPDGRAVVEAAERAGVASVVFFTTRFQSETEAWISEQGAAKGWFTARAQWLGAVFTSDSPFAASPWRREKGALWDVGPHALSVLLPVLGDVRRVAAAARGPRDTAHLILEHAGGATSTLTLSLTAPPAAAGALVELRGETGVTVLPNSSTSALDAFARAIDALRTAARTGRPHPCDASFGLRVSEVLAEAEARLAGDSPAQ

SEQ ID NO: 11327 - protein, 406 aa, Klebsiella pneumoniae
MSEVSANFHGDKRLPVTVLSGFLGAGKTTLLNHILNNREGRRVAVIVNDMSEVNIDAALVRDGGAELSRTDEKLVEMSNGCICCTLREDLLLEVNRLAKEGRFDQLVIESTGISEPLPVAETFTFAGDDGESLSTVARLDTMVTVVDAFNFLKDYGSEDSIQSRGESLGDGDERSVVDLLIDQIEFCDVLVLNKVDLISEAQKDKLMAVLRSLNPRARIVVSQFGKVPLDNVLNTGLFDFDQAAQAPGWLKELRGEHTPETEEYGITSFVFRARRPFHPARFWQVMDNELNGVVRSKGYFWLASRPEFAGSWSQAGGVARQGLGGMWWASVPKERWPEDPESLKFIMSHWMDGIGDARQELVFIGMEMNESELRNRLESALLTDTEMAEGPLKWRHYPDPVEPWFD

SEQ ID NO: 11328 - protein, 393 aa, Bdellovibrio bacteriovorus HD100
MEKIVFISGKRTPFGAFGGSLKDVSATDLGVAAAKATLEQAGLSADKIDHVVFGNVVQSGADAAYLPRHIGLKTGVPVAVGAFAVNRLCGSGFQSWVNAVQMIQCGEATAVLAGGVEQMSQIPYVARKVRFDGMRMGNFELEDLMTSALTDAYAKMPMAITAENLAVKYGITREESDKYSIQSQQRFQAAVEKGFMKQEICLVTVEGRKGTVVIEKDEHPKPDSTLEKLATLKPVFKKDGIVTAAAASGIVDGAACSLLMSESKAKELGMKPMARIVSYASVGCDPTIMGIGPAGAARLALQKAGLTLDQMDLVEVNEAFAAQYLAVEKELKLDPAKTNVNGGAIAVGHPLGASGTRIMNHLVYELHRRNAKYALGSACIGGGQGIAIIIERI

SEQ ID NO: 11329 - protein, 356 aa, Arabidopsis thaliana
MSYSTIISNTSFLSLASKFTTRGSRLQCTVSMARSAVDETSDSGAFQRTASTFRNFVSKDSNSQFPAESGRYHLYISYACPWASRCLSYLKIKGLDDAISFSSVKPIWGRTKETDEHMGWVFPGSDTEVPGADPDHLNGAKSVRELYEIASPNYTGKYTVPVLWDKKLKTVVNNESAEIIRMFNTEFNHIAGNPDLDLYPSHLQAKIDETNEWIYNGINNGVYRCGFAKKQGPYEEAVEQVYEALDRCEEILGKHRYICGNTLTETDIRLFVTLIRFDEVYAVHFKCNKKLIREYPNLFNYTKDIFQIPGMSSTVNMNHIKQHYYGSHPSINPFGIIPHGPNIDYTSPHDRHRFSK

SEQ ID NO: 11330 - protein, 527 aa, Hordeum lechleri
MALEAAYHYLQIAVGHGTSTPAALLTVLLLLIIRLAWVRTTTASTRLSKQQQLPPSPPGKLPIIGHLHLLGSQTHISIRDLDAKHGRNGLLLLRIGAVPTLFVSSPSAAEAVLRTHDQIFASRPPSMAAAIIRYGLTDIAFAPYGEYWRQARKLLTTHMLSAKVVHSFRHGRQEEVRLVINKTREAATRGTAVDMSELLSGYTNDVVCRAVLGESHRKEGRNRLFSELTEINVSLLGGFSLENYIPPNMIMADVLLRLVSVKAQRLNKRWDDLFNEIIEEHLHPSKPSSGEQQAADFIDLLLSLKEEYGLTTDNIKAILVDMFEAGIETSYLTLEYGMAELMNNRHILTKLQEEVRSQGKKLDMITEEDVSSMAYLRATIKETSRLHPPAPFLLPHFSTADCNIDGYVVPSNTRVLVNAWALGRDLSSWERPDDFLPERFLQDQAGDVDTQMRGKDLRFLPFGFGRRICPGMNFGFATMEIMLANLMYHFDWDVPNMMGTGAGVDMAESFGLTLRRKEKLQLVPQIP

SEQ ID NO: 11331 - protein, 528 aa, Hordeum lechleri
MALEAAYHYLQRAVGHGTTTEALLLTVLLLLIIRLAWVRAFTSTTTSTKFKQQLPPTPPGKLPIIGHLHLIGSHPHVTFRDLAAKHGRDGLMLVHVGAVPTVVVSTPQAAEAVLRTHDHVFASRPRNPVADIIRYGSTDIAFAPYGDYWRRARKVVNTHLLSVKMVYSKRHDREEEVRLVVAKIHELAMAAPGKALDMTELLGGYASDFVCRAVLGESHRKHGRNELFRELTEISASLLGGFNLEDYFPRLANLDVFLRVVCSKAMGVSKRWDNLFNELIAEYEGGKEDNAEDFVHLLLSLKKEYNLSTDNVKAILVNMFEAAIETSFLVLEYSMAELINNRHVMTKVQKEVRESTPEGGKLDLIMEEDLSRMPYLKATIKEAMRVHPPAPFLLPHFSTNDCEVNGYTIPAGTRVIVNAWALARDPSHWERAEEFYPERFLQEGRDAEVDMYGKDIRFVPFGAGRRICAGATFAIATVEVMLANLIYHFDWELPSEMEAVGAKVDMSDQFGMTLRRTQRLHLVPKIYK

SEQ ID NO: 11332 - protein, 412 aa, Klebsiella pneumoniae
MIALTFSGIRLDAMKRTPLIILNGFLGAGKTTLLKNLLTQAHKRRMAVSVIVNDMSELDVDGVLIANTEIVDAASNNFVSISADSISSRSGIQKLDSALKNLLEKRSPDFILLETSGSSHPLPLVRYLREHTQVSLKAFLSLVDTVMLNDDYDGGKKLIPVFQEHLNKGTRGVESLLAEQIMFCNKLLLTKNDRLPFYVVTEVARAIHPLNPQVAIMAVPWGNLQLDELLSMPDYDFHRVALLIDELQDAIDAVLSDEPDKKYDISWRVIEDDRPFHPQRLWDTCHRFMGSRVYRSKGFFWLPGRDDLALLWNQAAGSINLEFISYWKAGVLTHTDNSLTKEERAAIHEQLAKMPGRFGDRRCRLTVIGESGEIDDFVLALRQCLLTEEEIRWWQQGGIFHDPWPTKVARLA

SEQ ID NO: 11333 - protein, 224 aa, Triticum aestivum
YVLGYSGSIMVPLGWIGGTCGLLLAAAVSMYANALLARLHEVGGKRHIRYRDLAGHIYGRKIYGLTWALQYINLFMINTGFIILAGQALKATYGLFSDAGVLKLPYCIAISGFVCALFAFGIPYLSALRIWLGFSTLFSLIYIVIAFVLSLRDGITSPARDYSIPKSSGSTHVFTTIGAVADLVFAYNTGMLPEIQATIRPPVVKNMEKALWFQVTVGSLPLYA

SEQ ID NO: 11334 - protein, 526 aa, Hordeum lechleri
MALEAAHHYLRHAVGHGTSAPAALLLVCVPLLLLLLLFASLRTSASTRKLRLPPSPPGSLPIIGHLHHIGAQTHISLQHLVDKYGHNGLLFLRAGAVPTVIVSSPSAAEAVMRTHDHILASRPWSMASHILRYNTTDVAFSPLGEYWQHTRKLVNTHLLSAKKVHSFRHGRQEEVSLVVDKIREAATNAPSTVVDMSEFLAAYTNDVVSRSVLGATHRKKGRNTLFREMTETNVDLLVGFNLENFIPRWPLTEVLFRLVCWKVQRHLNKWDALLEEVIKEHINLKQDNSADFIHVFLSLQQEYGLTDDNVKSLLMNIFEAAIETSYLVLEYAMAELINNRHVMKKLQTEVRTFASSKGKKLDMITEEDLSSLPYLKATMKEALRLHPPGPLLLPHYSTADCNIDGYDIPAKTRILVNGWAIGRDPTAWERQEDFMPERFLQEGQEKSSNLGQDFKYLPFGSGRRICPGANFALATMEIMLVNLMYHFDWEVPNEKEGTGGKVSMAETFGLMLRRNEKLYLVPRIVE

SEQ ID NO: 11335 - protein, 1510 aa, Trichodesmium erythraeum IMS101
MERKYLREALVVGVNRYPMLKNKKVGDSNLKAAAKDAEAIANMLEKYGKFRVQRLPKKYDEEGKETCDHEGIVKVDDLKKAIINLFTPPGKNETPDVALLFFAGHGYVNIEEDIREGFLATSDAKFAKKLSNNEDIFGVPLSWLKDLLQKSQVQKQIVWLDCCFSGELLNFDGVANLNTQEKKVSRCFITASRSFQTATEKIDGEHGLFTDNLLECLNPENYVDGWVDNHVLTESIQEKMSQTSQAPMCDNSGDTIILTTNSLNEPLDERWKNDPPYRGLSYFRQQENDGVFFHGRTSLTDKLIELVKDNNFVAVLGASGSGKSSLLRAGLLYQLKRGQKISGSDRWFYIAPFTPEESPLKSLLKSLGKSLGEIKIKGEKVEGLIQFVDQTEAEQTEGKKVDFLTKELIEEKLIEFIDVVEAERVIMVMDQFEESFTLCKTHEERLDFFDCFLAVLERRGEKFCVVLGIRADFLGRCSEYGGLANKIQGHQLLVTPLDEGEIEEVIKKPAKLVGMDVEPNLVAKMREDFLRNPGSLPLLEYTLDALWSFATQGENKSPYLTLENYTSLGEIEGALTKRADAVFESLNDEEKSVAKRIFLELVQPGEGKISPGKITDTRRRVILEKLPNERHSLELLSAVSDRLADKNNRLMTKDRSEAGILLDIVHEDLIRSWKTLRKWVEEYQEALPVERKIEADAADWEKEGKSENLLLRAGRLTKAEEYLENYGEMALLDGLAYEFIEASRELKIREEEKEKERQRKEKERQRKVEEQAARILGMLSDSMIRQKLSLLDKGVLLSVESMKQYFDIKKRYGKADSGLLVELDQTLRNGVSQLPKHLYTLKHQSDVYAVAFSPDGKTIATASLDKTARLWDTENGNVLATLNHQSSVNAVAFSPDGKTIATASYDKTARLWDTENGKELATLNHQDWVNAVAFSPDGKTIATASYDKTARLWDTENGKELATLNHQSSVIAVAFSPDGKTIATASSDKTARLWDTENGNVLATLNHQDWVIAVAFSPDGKTIATASSDKTARLWDTENGKVLATLNHQSSVNAVAFSPDGKTIATASSDKTARLWDTENGKVLATLNHQSSVRAVAFSPDGKTIATASYDKTARLWDTENGNVLATLLHQDLVIAVAFSPDGKTIATASWDKTARLWDTENGKVLATLNHQSSVRAVAFSPDGKTIATASSDKTARLWDTENGKVLATLNHQSSVNAVAFSPDGKTIATASSDKTARLWDTENGKVLATLNHQSSVRAVAFSPDGKTIATASSDKTARLWDTENGKVLATLNHQSRVFAVAFSPDGKTIATASSDKTARLWDTENGNVLATLNHQFWVNAVAFSPDGKTIATASSDKTARLWDTENGKVLATLNHQSRVFAVAFSPDGKTIATASSDKTARLWDTENGKELATLNHQSLVNAVAFSPDGKTIATANYDNTARLHWATSEGLIQEACSRLSRNLTAKEWQQYINSDLETYQKTCENLPVHPSVTAEAALTSSDQTLWFDL

SEQ ID NO: 11336 - protein, 1870 aa, GIBBERELLA ZEAE PH-1
MKGSDSLRRANRPAANFDLPPVALAQAQQQTQVQAQAQAQSFQSQSQPQESITNTVTSTSPEITNASLHGQAQAKAQALTTARFRSSSRPSLQDLALVDGTSTSNNHDLPPAYALSSSSSSTGPSSFSYPPAHVHPRPSTANAAATTHTHTRPRPLGPSSSDIATAEQAQFLRIHPVSSTSSLRPRSSTTSASAVASASASTSPSHTPNSLLRQHTSPPSAVDNNSAHFVPRGGLPPAPSIMYQANQRHVSGTDPSRPYQVPPPPPPPMGGPNNGHMPNMMNLPPPPPLPRYNTAPGSNGLSLPPPPGPPPASALGQQPPWHGAFGRMYDSRSGFNIPPPPPSSQHQPYNPKLHAQIAAGQTVSIPPPPPPNEAMSATYIPQGDTYGEGVGIPAFGLEDPTLTVNSQTLRPVTTPQSGTDTNATTPMDEATRERLYAANNAQPRGTSNSSNPTPPGSIPPEIAAQWPLDTVLLWLAQNQFSKDWQETFRALNLHGAQFLELGSGHGGRGNFGMMHQQVYPRLAQECTNSRTGWDQPREREEGKRMRRLIRSIVTGRPADVSKVSTSHGRKESLNGGHGNNLPSAGTDPMDSPNTPLTAPGPGFSSRRFSQTRSTTLPNSISASNINSESNHRNILKHVDTDGARRHSPNVSESSEATFRAPAVHSASPTGSPGIPPALYTSTTTPTIAQSPSAIKAGHRSRSSMDSVASVAAIYGSGVPSDAASLLNRNMNLGDIVHGRSHDARSRHSPSDGGDRSAGGETPSSAKDSNRLLSFLSRKKKQTKDDGAYPSPEDMNGSPTSPHGSFRPVGLGVRGSNGSDTNIDLSGSTLGDDRNGSTLNMRWNKISPVRTYVLATMDYWNYRMCDITEAETATEIRQVICMHLGLGDYENSHIYLTEAGKFEHVDPLDDPSLITVRRAKGDPLGTLKFFVTPPGVAPISSLSVKAEVPIILSPSYLSPGTPVEDAQQMSRQRSSSSPPTSRSNTLTNEKNEDKIAREAKQYRAEIERKQQEYLAKRKQAAMKGSPSETLGPGIVGRNVDFDQPRESPYEDKRPEPLFPQRRPPAPPSDPSATLIKANSLSRKTGASMRASSSSLEGYPSKRYPENEMAEKTKKANKQAPPAPGIGAALAGMGRNLSAIGQSAKNGRASSPSRSSTHSIPGGKDTFSTVEPSQGRGSPSTTSSSKLTTGNVTWNKKNLGFIVPDYSPSDSSFLLSPSPTVDAKFNATVPRAMSPAEMSPNSSRSRTSFPPNQQSPTHRRASHGPEPEFEDTDVHFSKPAPAPPADDDSDDSDDGLFAIPIANQNKGKAAAANADANGHSKRPSLHVNTERSRKGLSVAFKSPKSFGSGMDSNEDSGRQNPTTPHSETWEPEEKDKESKLGRRKSFIEKDVWANRPPTDALINNLDDFFPNLDLDQPVLDEPGESGMPPSPIAESSETNIDQQAQNVAPPQPSYPQHVPPAIPPTRQPSLYNENDTLGSDESTLKALDQHRPTSVAQRSIRRSGGLGRMKSIREVARGAHEANKRTTSTNQGQAATTNIMRRKSTKMFNANIVQIRPDRRGSVVMPQIPQDTVPKRQTTFRWFKGQLIGKGTYGRVYLGMNATTGEFLAVKEVEVNPKAAGGDKNKMKELVAALDQEIDTMQHLDHINIVQYLGCERKETSISIFLEYISGGSIGSCLRKHGKFEESVVSSLTRQTLSGLAYLHREGILHRDLKADNILLDLDGTCKISDFGISKKTDNIYGNDKTNSMQGSVFWMAPEVIRSQGEGYSAKVDIWSLGCVVLEMFAGKRPWAKEEAVGAIYKIANGERPPIPEDIQDTLGPLAVAFMMDCFQVNPFDRPTADVLLSQHPFCEVDPHYQFYDTALYHRIKSFK

SEQ ID NO: 11337 - protein, 396 aa, Pichia stipitis
MLRTAAVRPLKGGVVIARRAMASSSDLVSIELPESSFEGYNLEIPELTFETEKETLLKMYKGMIIIGGMEMASDALYKAKKIRGFCHLSVGQEAIAVGIENAITPEDTVITSYRCHGFAFMRGASVKEVLGELMGKRSGVSYGKGGSMHMFAPGFYGGNGIVGAQVPLGAGLAFSHKYRGQKAAAFTLYGDGASNQGQVFEAYNMAKLWNLPCIFACENNKYGMGTAAARSSAITEYYKRGQYIPGLKINGMDVLATYQASKFAKDWAAQGNGPLVLEYETYRYGGHSMSDPGTTYRTREEVQHMRSRNDPIAGLKATLLDKGIATEEEIKSYDKAARKYVDEQVAAAEADAPPEAKMDLLFEDVYVPGSEIPVLRGRISDDSWDFKNKTFLNKVY

SEQ ID NO: 11338 - protein, 411 aa, Lycopersicon esculentum
MNALAATNRNFKLAARLLGLDSKLELSLLIPFREIKVECTIPKDDGTLASFVGFRVQHDNARGPMKGGIRYHREVDPDEVNALAQLMTWKTAVANIPYGGAKGGIGCSPSDLSISELERLTRVFTQKIHDLIGIHTDVPAPDMGTNPQTMAWILDEYSKFHGYSPAVVTGKPVDLGGSLGRDAATGRGALFATEALLNEHGKSVAGQRFVIQGFGNVGSWAAKLIHEQGGKVVAVSDITGAIKNEKGIDIESLFKHVKETRGVKGFHDAQPIDANSILVEDCDVLMPAALGGVINKDNANEIKAKYIIEAANHPTDPEADEILSKKGVTILPDIYANSGGVTVSYFEWVQNIQGFMWDEKKVNDELKTYMTRGFKDVKDMCKTHNCDLRMGAFTLGVNRVARATVLRGWEA

SEQ ID NO: 11339 - protein, 331 aa, Fusobacterium nucleatum subsp. nucleatum ATCC 25586
MEDDSEDKIDENEDENDETEEHFTEFDDEFNPEYIEDVSEDELSNEKLLNLGNSAKVDEPIKMYLREIGQVPLLTHEEEIDYAKKAYEGDEEASKKLIESNLRLVVSIAKKHTNRGLKLLDLIQEGNIGLMKAVEKFEYTKGYKFSTYATWWIRQAITRAIADQGRTIRIPVHMIETINKIKKESRIYLQETGKDASPEILAERLGMEVDKIKAIQEMNQEPISLETPVGSEEDSELGDFVEDQKTTSPYEATNRAILREELDAVLKTLSPREEKVLRYRYGLDDSSPKTLEEVGKIFNVTRERIRQIEVKALRKLRHPSRKKKLEDFKVD

SEQ ID NO: 11340 - protein, 232 aa, Sinorhizobium meliloti 1021
MAERVLIVDDDTRLSAMLSDYLSGNGYTVHTAATATAGIAELGHRTPDVVILDVMLPDFDGFETCRRIRAVSDVPVLMLTAKGEETDRIVGLELGADDYLPKPFNPRELLARLKAILRRRNGSAAVARTLRFGRLEIDPGSRSVRIDGRECTLTSYQFDVLVALAENPGRTLSREQLMDAVKGEELDAFDRSIDVHISRIRAAIESDPKHPRRIITVRGAGYVFARYQDDTR

SEQ ID NO: 11341 - protein, 518 aa, GIBBERELLA ZEAE PH-1
MYASALSLARWGIVFSSVASAAASNVHVAPRATNAPSSAAAAPKVTAITGCHLHASDLYCFAGETEYVVDIKVTATTDVPSQYTDCHAHGSDMFCVGSDGKDVAVQAESAESEEDHDHEAGEEDHDHSHGEDAAQTGAAGDKSEESDNQHCHFHAGVEHCTGGSGHGSSEAGEAAGSSSSACQPRKRDYDVGLRVGLLFVILATGALGVFGPILLHKMMPSKLNVVLIVLKQFGTGIIISTAFVHLYTHAFLMFSNQCIGDLGYEATTSALVMAGIFMSFLVEYIGNRIVLAKTKASADLSLTEKKSAWLSTEVVSVLVMELGILFHSLLIGLTLVVAGDEYFLTLFVVILFHQMFEGIALGSRIATIGTAADTHSVVVPRPSDDTSSAQDSDKAPPAATETISNDETAHVGLTMKKKLGLASLFAFITPIGMAIGIGVLQKFNGNDKSTLIAIGTLDAVSAGILMWVGLVEMWAADWMTGGHGHKAELADANILTTILAFLGLVAGLVVMSLLGKWA

SEQ ID NO: 11342 - protein, 162 aa, Glycine max
  misc_feature (126)..(126): Xaa can be any naturally occurring amino acid
  unsure (1)..(162): unsure at all Xaa locations
KELKYILDQIESTRSTIFGSASNIHSNGEKQSENVAHIPSVGNNQTPKVRKPYTITKQREKWTEEEHQKFLEALKLYGRGWRQIEEHIGTKNAVQIRSHAQKFFSKVVRESEGSAESSIQPINIPXPRPKRKPLHPYPRKSVNSFKGHCIPNETEISPSTNL

SEQ ID NO: 11343 - protein, 73 aa, SINNINGIA STRIATA
  misc_feature (40)..(40): Xaa can be any naturally occurring amino acid
  unsure (1)..(73): unsure at all Xaa locations
ISGTNGEVMPGQWEFQVGPSVGIEAGDHIWCARYLLERIXEQAGVVLSLDPKPIEGDWNGAGCHTNYSTKSMR

SEQ ID NO: 11344 - protein, 410 aa, Zea mays
  misc_feature (189)..(189): Xaa can be any naturally occurring amino acid
  unsure (1)..(410): unsure at all Xaa locations
MAAMPGGAHAAGAADQMQVDQPLPAAAAHGPANAKHAGSMIEGNDPVTGHIISTTIGGKNGEPKKTISYMAERVVGTGSFGIVFQAKCLETGETVAIKKVLQDKRYKNRELQIMRSMDHCNAVSLKHCFFSTTSRDELFLNLVMEFVPESLYRVLKHYSNMNQRMPLIYVKLYTYQIFRGLAYIHTVPXGVCHRDVKPPLKVVDPLTHQVKILYFGSAKMLVKGEANISYICSRYYRAPELIFGATEYTTSIDIWSAGCVLAELLLGQPLFPGESAVDQLVEIIKVLGTPTREEIRCMNPNYTEFRFPQIFSHPWHKIFHKRMPPEAIDLASRLLQYSPNLRCTALEACAHPFFDELREPHARLPNGRPFPPLFNFKQELANASPELINRLIPDHARRHLGLTLLPTTGP

SEQ ID NO: 11345 - protein, 431 aa, Oryza sativa
PAGARCRKSPPLLSPPAPLPHRTTPRLPPLLSQSTRWSLQFLASLLCWISSSCSASCSALVFGLSGRCAEAERFGRSQESLVRAGELSWEVGMERYEVIKDIGSGNFGVAKLVRDVRTKELFAVKFIERGQKIDENVQREIMNHRSLRHPNIVRFKEVVLTPTHLAIVMEYAAGGELFERICSAGRFSEDEARFFFQQLISGVSYCHSMQICHRDLKLENTLLDGSIAPRLKICDFGYSKSSLLHSQPKSTVGTPAYIAPEVLARKEYDGKVADVWSCGVTLYVMLVGAYPFEDPDEPRNFRKTITRILSVQYMVPDYVRVSMECRHLLSRIFVANPEQRITIPEIKNHPWFLKNLPIEMTDEYQMSVQMNDINTPSQGLEEIMAIIQEARKPGDGSKFSGQIPGLGSMELDDVDTDDIDVEDSGDFVCAL

SEQ ID NO: 11346 - protein, 73 aa, SINNINGIA DOUGLASII
  misc_feature (41)..(42): Xaa can be any naturally occurring amino acid
  unsure (1)..(73): unsure at all Xaa locations
ISGTNGEVMPGQWEFQVGPSVGIEAGDHIWCARYLLERITXXTGVVLSLDPKPIEGDWNGAGCHTNYSTKSMR

SEQ ID NO: 11347 - protein, 307 aa, Azospirillum brasilense
MWNYTDKVKEHFFNPKNAGALDEADDVGEVGSITCGDALKLMMKVNPDQPGHRDAKFQTFGCGSAIASLRSALTEMIIGKTVDEALGQVTNRDIAEYLGGLPPEKMDCSVMGAEALPAAIANFKGEGLVDDHAAGTLVCKDFQAFDAAMDRRRVTVNSLTTLEEVTHYTKAGGSCQTCHEKIEEVLEAVLAKTGAVGPAQAPTPPARSGWIAYQAAGPKAEAAPAKLTTCQRMRRIMFAIEELRPQIQRDGGDVELVDIDGKDIYVRLTGACSGCSQSAASMMGVQAKLVEALGEFVRVKPLSAVGA

SEQ ID NO: 11348 - protein, 359 aa, Azoarcus sp. EbN1
MNPLLRVRAEGQQVWLDNLSRTLLNEGHLAQLIAADGIAGVTTNPAIFHKAIAGGRYYEEDLARLKGEAIDAETRYERLVIPDVQRACDLLRPVFDESRGNAGYVSLEVSPALAHDTARTVAAGLRLKHAVGRDNVLIKVPATSAGLEAIEQLTGHGVSVNVTLMFSLAHVDAVAEAYLGGLAAWQQAGGDVGRVMSVASLFLSRVDTLLDSQLGEIGSDAALALRGKSAVAMAKLAYERYRERFHGPAFASLRSAGARPQLMLWASTGTKNAAYSDLMYVEPLIGPETVNTLPDATLAALRDHGTVARTLDRDVDAARAQFAALERLGIDMTTAGKRLQDEGLRQFEEAFAGLLDLTA

SEQ ID NO: 11349 - protein, 304 aa, Neisseria gonorrhoeae FA 1090
MVQNGHLCKRFSQSAAMVAYRRNMPQGRQEKGEEMDKIRVAAVQMVSGVSPETNVAAMKRLVARAAEQGADWVLLPEYWVLMGANDTGKLALAEPLGGGRFQTALSETAKECGVVLFGGTVPLQSPEAGKVMNTLLVYGCDGVRTGLYHKMHLFGFSGLGERYAEADTIRAGREVPHLSAEGMPVAAGICYDVRFPEFFRRQLPFDVLMLPAAFTHTTGKAHWELLLRARAVENQCYVVAAAQGGLHENGRRTFGHSMIVDPWGDVLDVLPEGEGIVTADIDANRLNSVRNRLPALKHRVLDAV

SEQ ID NO: 11350 - protein, 548 aa, Zymomonas mobilis
MAAKDVKFSRDARERILRGVDILADAVKVTLGPKGVTLFWTKPLVLPYHQRWCFCRQRNRTERQVRKYGHRCLREVPSKTNDLAGDGTTTATVLAQAIVREGMKSVAAGMNPMDLKRGIDLAATKVVESLRSRSKPVSDFNEVAQVGIISANGDEEVGRRIAEAMEKVGKEGVITVEEAKGFDFELDVVEGMQFDRGYLSPYFITNPEKMVAELADPYILIYEKKLSNLQSILPILESVVQSGRPLLIIAEDIEGEALATLVVNKLRGGLKVAAVKAPGFGDRRKAMLEDIAILTKGELISEDLGIKLENVTLNMLGSAKRVSITKENTTIVDGAGDQSTIKDRVEAIRSQIEATTSDYDREKLQERVAKLAGGVAVIKVGGATEVEVKERKDRVDDALHATRAAVQEGIVPGGGTALLYATKALEGLNGVNEDQQRGIDIVRRALQAPVRQIAQNAGFDGAVVAGKLIDGNDDKIGFNAQTEKYEDLAATGVIDPTKVVRTALQDAASVAGLLITTEAAVGDLPEDKPAPAMPGGMGGMGGMGGMDF

SEQ ID NO: 11351 - protein, 92 aa, Daucus carota
DLPGLKKEEVKVEVEEGKVLQISGERNKEKEEKNDKWHPLEVSSGKFLRRFRLPENANVDEVKAGMENGVLTVTVPKVEMKKPEVSVIDISG

SEQ ID NO: 11352 - protein, 157 aa, Daucus carota
MSIIPSFFGGRRSNVFDPFSLDVWDPFKDFPLVTSSASEFGKETAAFVNTHIDWKETPQAHVFKADLPGLKKEEVKVELEEGKVLQISGERNKEKEEKNDKWHRVERSSGKFLRRFRLPENAKVDEVKAAMANGVVTVTVPKVEIKKPEVKAIDISG

SEQ ID NO: 11353 - protein, 186 aa, Brassica napus
  misc_feature (42)..(42): Xaa can be any naturally occurring amino acid
  unsure (1)..(186): unsure at all Xaa locations
LDPRVRTGAKLSRSEHSMGASSEPKSIYDFTVKDAKGNDVDXSTYKGKVLLIVNVASQCGLTNSNYTELAQLYQKYKDHGFEILAFPCNQFGNQEPGSNEEIVQFACTRFKAEYPIFDKVDVNGDSAAPIYKFLKSSKGGLFGDGIKWNFAKFLVDKDGNVVDRYAPTTSPLSIEKDLKKLLGVTA

SEQ ID NO: 11354 - protein, 73 aa, SINNINGIA KAUTSKYI
  misc_feature (46)..(46): Xaa can be any naturally occurring amino acid
  misc_feature (55)..(55): Xaa can be any naturally occurring amino acid
  unsure (1)..(73): unsure at all Xaa locations
ISGTNGEVMPGQWEFQVGPSVGIEAGDHIWCARYLLERITEQAGVXLSLDPKPIXGDWNGAGCHTNYSTKSMR

SEQ ID NO: 11355 - protein, 159 aa, Daucus carota
MSIIPSFFGSRRSNVLNPFSLDIWDPFQDYPLITSSGTSSEFGKETAAFANTHIDWKETPQAHVFKADLPGLKKEEVKVEVEEGKVLQISGERNKEKEEKNNKWHRVEFSSGKFLRRFRLPENANVDEVKAGMENGVLTVTVPKVEMKKPEVKSIHISG

SEQ ID NO: 11356 - protein, 306 aa, Mesorhizobium loti MAFF303099
MIVVVGSINLDLIAKVDRLPSPGETVRGSGFSTAPGGKGANQALAAARAGVPVRMVGAVGKDSFAGEALALLREAKVDLSGVAETFASTGTALIMVGDDGENIIAVVSGANASVVTGDLSKAFLKKGDVVLLQHEIPLATVDAALDQARAAGAITVLNTAPFQGDATAFLGKADYVVANETEFDLYGEALALNGRDRAARMRDFAAKTGRSIVVTLGGDGVMAATPSDFLTVAAMKITPVDTVGAGDTFCGYFAAGLSSGLALDQALARAGAAGSLACLKPGAQPAIPLAKDVDQALQEVSRNDAP

SEQ ID NO: 11357 - protein, 475 aa, Bordetella pertussis Tohama I
MYEQLALYIDGEFLTGDGRRTQDVVNPATLEVLGQLPHASEADLDRALAAAQRAFETWKRTSPMERAAILRKVGQLSRDRAQEIGRNMTLDQGKPLAEAVGEVASCSEHADWHAEECRRIYGRVIPPRNPDVRQFVVREPIGVCAAFTPWNFPYNQAIRKIAAALGAGCTVVLKGPEDSPSAVMAIARMFHEAGLPKGCLNIVWGEPAKISDYLIRSPIVRKVSFTGSVPVGKQLAALAGAHMKRVTMELGGHSPVLVFDDADVDRAAEMLARFKVRNAGQVCVSPTRFYVQNGAYEQFLARFTEVLKNIKVGDGLEKGTDMGPLAHERRVPAMSTFVDDALKHGGKVVLGGDAPDRKGYFFSPTVVTELPDNAMLMTEEPFGPLAPVVRFTDTDEVLRRANSLPFGLSSYVFTNSLKTATKVSNALEAGMVNINHFGSALAETPFGGIKDSGIGSEGGLETFDGYLVTKYITHI

SEQ ID NO: 11358 - protein, 320 aa, Arabidopsis halleri subsp. gemmifera
LLFFVSISLLLIAVANAAEGPKCECSHEDDHEHKAGARKYKIVAIPACLIAGIIGVLFPLLGKFFPSLGPETSFFFVTKAFAAGVILATGFMHVLPEAYEMLTSPCLTSEAWEFPFTGFIAMITAILTLSVDSFATSFLYKSHRKASKRVSDGESGETSVDSEKVQILRTRVIAQVLELGIIVHSVVIGISLGASQSPDAAKALFIALMFHQCFEGFGLGGCIAQGKFKCLSVTIMSTFFAITTPIGIVVGMGITNSYDASSPTALIVQGVLNAASAGILIYMSLVDFLAADFMHPKMQSNIRLQIMAHIALLLGAGLMS

SEQ ID NO: 11359 - protein, 151 aa, Zea mays
  misc_feature (75)..(75): Xaa can be any naturally occurring amino acid
  misc_feature (138)..(138): Xaa can be any naturally occurring amino acid
  unsure (1)..(151): unsure at all Xaa locations
MNALAATSRNFKQAAKLLGLDSKLEKSLLIPFREIKVECTIPKDDGTLASYVGFRVQHDNARGPMKGGIRYHHEXVANIPYGGAKGGIGCSPGDLSISELERLTRVFTQKIHDLIGIHTDVPAPDMGTNSQTMAWILXEYSKFHGYSPTAT

SEQ ID NO: 11360 - protein, 309 aa, Ralstonia solanacearum
MADILAYGEALIEFNQTDPGSAAWALGYGGDTSNFCIAAARQGARTGYVSAVGADRFGQALRTLWQAEGVDHTWVQTDLQAPTGLYFVSHDARGHHFDYLRAGSAASRFQTAQLPLQAIAAARVFHLSGISLAISDTACDAGLAAMAHARAAGVTVSFDTNLRLRLWPLARARAVMREAMRTCDLCLPSWDDVTVLLDCHDRDAIVDTLLGWGIRLVALKMGVEGCYVATPEARTLVPRHPVAAVDATGAGDCFGGAFVARIVAGDTPQDAARYANVAAALSTTGYSAVAPIPRAEAVRAALAGAAAAL

SEQ ID NO: 11361 - protein, 258 aa, Pyrobaculum aerophilum str. IM2
MFRLGLVQKSPGPLSEVVKMVAGSKADLILLPEYSLFDPTGLKPEEVWERTTALEDFVEGLAKIAAETGAYVAGGFLERGPRPKVFNTTVLVSPAGKAVGTYRKTHLFDAYGYKESEAVEPGGELSGIFDVRQIKIGFAVCFELRFPEVFRELALGGAQLVAVPAAWYSGPLKEEILHVLARARAVENGVFIAVAALYSQRFTGRSLVVNPFGVVEADLGVGSKYRVVTIDPSLVDEARRTVPALNLRRPSLYKRLCT

SEQ ID NO: 11362 - protein, 246 aa, Triticum aestivum
PASAIKAYPGDLIEQVCTKKQAGTAPEFPGYRRPTRPTDIICSRTPSQLQIMKQTYYAKFGTYLEHDISQQASGDHQKILLAYVGIPRYEGPEVDPTIVTHDAKDLYKAGEKKLGTDEKTFIRIFTERSWAHMAAVASAYHHMYDRSLQKVVKNETSGNFEVALLTILRCAENPAKYFAKVLRKSMKGLGTDDKTLVRVVVTRTEIDMQYIKAEYYKKYKKPLADAIHSETSGGYRTFLLSLVGSH

SEQ ID NO: 11363 - protein, 530 aa, Euphorbia esula
METQLATKNPSSQPPPPPPELAAPPSSNLKKIVVVASIAAGVQFGWALQLSLLTPYVQLLGIPHTWAAFIWLCGPISGMLVQPIVGYHSDRCTSRFGRRRPFIAAGAASVAVAVFLIGYAADLGHMSGDSIGKSPKIRAIAIFVVGFWILDVANNMLQGPCRALLADLSGTSQKKTRLANALFSFFMAVGNILGYAAGAYTHLYKIAPFTLTKACDVYCANLKTCFFISIALLLVLTVIALTYVKEKQWSPEIAKTVAGVDGDDEDGPVEAAPLPFFGEIFAALKNLQRPMRILLLVTCLNWIAWFPFLLFDTDWMGREVYGGSSDSSATAGESKLYDRGVRAGALGLMLNSVVLGFTSLGVELMARKLGKVKRLWGIVNFLLAICLALTILITKLAESGRHYPTVNGVVSTTPSPPSSGIKAGALTLFAVMGIPQAITYSVPFALASIFSNDSGAGQGLSLGVLNLSIVIPQMLVSVASGPFDALFGGGNLPAFVVGAVAAAASGVLALTYLPSPPPDLPAKALTVGFH

SEQ ID NO: 11364 - protein, 528 aa, Oryza sativa (japonica cultivar-group)
MDSARSWFTKLQTREKSIGKKKELPPNGKEGTDEAPSSATKQRVAAAKQYIEKHYKEQMKNLQDRKERRCSLEKKLADANVSEEEQHNIVKQFEKKETEYMRMQRHKMSVDDFDLLTMIGKGAFGEVRVCREKNTGNVYAMKKLRKSEMLRRGQVEHVKAERNLLAEVDHHCIVKLYCSFQDSEYLYLIMEYLPGGDMMTLLMRKDTLTEDEARFYVGETVLAIEAIHRHNYIHRDIKPDNLLLDRHGHLRLSDFGLCKPLDYSNFPDLNEKDVTSTKPQSTNGDGRQQSMPKRTQQEQLEHWQKNRRTLAYSTVGTPDYIAPEVLLKKGYGMECDWWSLGAIMYEMLVGYPPFYSDEPMTTCRKIVNWRTHLKFPEEARLMTDAKDLISKLLCNVDQRLGTKGAEEIKEHSWFSGVEWDKLYEIEAAYQPQVTDELDTQNFEKFEESSDNIQCSAKAGPWRKMLSSKDLNFVGYTYKNFELVNDPEVLGMAELKKKEKAKRPSAKSLFGIPSRALAVLCSSSIRRHI

SEQ ID NO: 11365 - protein, 264 aa, Gerbera hybrid cv. 'Terra Regina'
MENSDVLELDFSCVDRSMSFPDDTGDMSPQRKMGKGKIEIKRIENTTNRQVTFCKRRNGLLKKAYELSVLCDAEVALIVFSSRGRLYEYANNSVKGTIDKYKKACLDPPTSGTVAEANTQYYQQEAAKLRQQIANLQNQNRQFYRNIMGESLGDMPVKDLKNLEGKLEKAISRIRAKKNELLFAEIEYMQKRELELHNSNQFLRAKIVENERAQQHHMSLMPGSSDYELVTPHQPFDGRNYLQTNDLQPNNDYSCQDQTPLQLV

SEQ ID NO: 11366 - protein, 165 aa, Oryza sativa
MLSVQEALDFDLDAMTSGFGFTPWAADTCPTLEQLMASSASPSPSSSLDDNAAAAEEENGEVEEEEERRRQRRKVSNRLSARRSRARKQQRLEELRGESARLRAENRELAARLHAVARHGLAARCQNARLRAEAAALARRLLALQRLARGRHMMITASPPQFSRR

SEQ ID NO: 11367 - protein, 542 aa, Sinorhizobium meliloti 1021
MAAKEVKFQTDARERMLRGVDVLANAVKVTLGPKGRNVVIDKSFGAPRITKDGVSVAKEIELEDKFENMGAQMLREVASRTNDLAGDGTTTATVLAQAIVREGAKAVASGMNPMDLKRGIDLAVDAVVKELKNNARKISKNSEIAQVGTISANGDTEIGRYLAEAMEKVGNEGVITVEEAKTAETELEVVEGMQFDRGYLSPYFITNQDKMRVELEDPYILIHEKKLSNLQAMLPVLEAVVQSGKPLLIIAEDVEGEALATLVVNKLRGGLKVAAVKAPGFGDRRKAMLEDIAILTGGTVVSEDLGIKLESVTLDMLGRAKKVSIEKENTTIIDGAGSKADIEGRTAQIRAQIEETTSDYDREKLQERLAKLAGGVAVIRVGGSTEVEVKEKKDRVDDALHATRAAVEEGILPGGGVALLRAVKALDGLKTANNDQRVGVDLVRRAIEAPVRQIAENAGAEGSIIVGKLREKTEFSYGWNAQTNEYGDLYAMGVIDPAKVVRTALQDAASVAGLLVTTEAMIAEKPKKEAAPALPAGGGMDF

SEQ ID NO: 11368 - protein, 246 aa, Gerbera hybrid cv. 'Terra Regina'
MSFPNDSGEMSPQRKLGRGKIEIKRIENTTNRQVTFCKRRNGLLKKAYELSVLCDAEVALIVFSSRGRLYEYANNSVKGTIDRYKKACLDPPSSGSVAEANAQFYQQEAAKLRQQIANLQNQNRQFYRNIMGESLGNMPAKDLKNLESKLEKGIGKIRSKKNEILFAEIEYMQKRENELHNSNQFLRSKIAENERAQQHMSLMPGSSDYELVAPHQPFDGRNYLQVNDLQPNNNYSCQDQTPLQLV

SEQ ID NO: 11369 - protein, 497 aa, Staphylococcus aureus subsp. aureus Mu50
MSKVQNESNNVVKRGLKDRHISMIAIGGCIGTGLFVTSGGAIHDAGALGALIGYAIIGIMVFFLMTSLGEMATYLPVSGSFSTYATRFVDPSLGFALGWNYWFNWVVTVAADITIAAQVIQYWTPLQGIPAWAWSALFLVIIFSLNSLSVRVYGESEYWLALIKVITVIVFIAIGLLTIVGIMGGHVVGFEIFNKGEGPILGGNLGGSLLSILGVFLIAGFSFQGTELIGITAGESENPERAVPKAIKQVFWRILLFYILAIFVIGMLIPYDSSALMGGSDNVATSPFTLVFKNAGFAFAASFMNAVILTSVLSAGNSGMYASTRMLYSMSKDKLAFEAFGKTNKNGVPYMSLLVTAIIVVIIFVLQSLTKGAYEYIVAASGLTGFIAWVGIAVSHYRFRRAFDKQNYDKSKLKYTAKLFPFGPLFAGFLCIVVIIGQDVDFIKTGDFNFSRFLITYMGIPVFLAFFIYHKLRYKTKKIPLEQVDLRQDVSMDEIKG

SEQ ID NO: 11370 - protein, 424 aa, Blastocladiella emersonii
TLIDKLMEKTKKVVGSSDKDAPAPASPSSPSTAAGAGSASSTASSTTTAAASGNLSIPSPLVAGSTTSSSISHAQKMATAAHTNSDYSPSPAATPSAPLDAVAERRRRKTTLADLELRQTLGTGSFGRVHLVRLRSTGKYYAMKVLKKAEVVKHKQVEHTLNEKGILEQIDHPFLVALHSSFQDSANLYMVMEYVTGGELFTYLRRSQRFSNNVAKFYAAEVVLAFEYLHSKDIIYRDLKPENLLLDAQGHVKITDFGFAKHVPDITWTLCGTPDYLAPEIIQSRGYGRAVDWYALGVLIFEMLAGYPPFYDEDHVRMYEKILQGKVKWPSHFDPAAKDLLKRLLTTDLTKRYGNLKGGSKDIKMHKWFAGLDWTKLFNKQIPPPYTPPNRGDGDTSNFDAYPEETEPYGKVQPDPYAQLFKDF

SEQ ID NO: 11371 - protein, 339 aa, Haemophilus influenzae Rd KW20
MAIKIGINGFGRIGRIVFRAAQHRDDIEVVGINDLIDVEYMAYMLKYDSTHGRFDGTVEVKDGNLVVNGKTIRVTAERDPANLNWGAIGVDIAVEATGLFLTDETARKHITAGAKKVVLTGPSKDATPMFVRGVNFNAYAGQDIVSNASCTTNCLAPLARVVHETFGIKDGLMTTVHATTATQKTVDGPSAKDWRGGRGASQNIIPSSTGAAKAVGKVLPALNGKLTGMAFRVPTPNVSVVDLTVNLEKPASYDAIKQAIKDAAEGKTFNGELKGVLGYTEDAVVSTDFNGCALTSVFDADAGIALTDSFVKLVSWYDNETGYSNKVLDLVAHIYNYKG

SEQ ID NO: 11372 - protein, 180 aa, Ralstonia eutropha JMP134
MEHGLDTATLGGGCFWCLEAVYQQVNGVRAVESGYTGGHVSHPSYQQVSEGDTGHAEVIRVTFDPAVINYREIIEIFFAIHDPTTLNRQGNDVGPQYRSIIFTHSEAQRAVAEYVMRELVANKVFDAPIVTQIEPEQPYWRAEASHQNYFQEHPSQGYCAFVISPKVAKFRERFASKLRR

SEQ ID NO: 11373 - protein, 229 aa, Nicotiana glutinosa
MKIISRILLLSCLLFLTLFQVKTEPVLDTNKQEIRPGYTYYILPATTGANGGGLTLAKGENGSCPLDVFQAQNSQSRGLPLKFLMVNSSAGLVIDENEDINIKFAAPRYVSICNKSTVWKIEDGFVTTGGIKGGSENGTATSLFTIQKYEDAYALQYCPRAAGCSFICPRLLCGYIGIAPAANGSRRLAVNRPIFKIEFKKASDTEVNFSQFDIYNRCGFSNTYMNKSY

SEQ ID NO: 11374 - protein, 252 aa, Pisum sativum
MESQGQWNPLLSFSRFINHHSNHLATRLEETKRLAGTLIQSHTRTKPAFAATLTPNHVAKSLAGTSVYTVSNSDNEFVLMSDAEGAKSIGLLCFRQEDAEAFLAQVRSRKKEFRGGAKVVPITLDQVYMLKVEGIAFRFLPDPVQIKNALELRAANRGSFDGVPVFQSDLLVVKKKNKRYCPVYFSKEDLEYELSKVSRSSKGVGVSQHIMVGSFEDVLKKMELSEKSSGWEDLVFIPPGKKHSQHMQEVIA

SEQ ID NO: 11375 - protein, 372 aa, Methanocaldococcus jannaschii DSM 2661
MFREKLRREIEIIKNNGLYRFLRKKDDGVLDFSSNDYLCLSKHPEVIEAVKEGLKYGAGSTGSRLTSGNINHQRLEEKIAEFKETERTLVYSSGYATNVGVISALCKKGDLILSDKLNHASIIDGCKLSKADVLIYNHCDVEHLTNLIEENWGKYNNLFIVTDGVFSMDGDIAPLRDLKKIADEFNAILIIDDAHGTGVLGDGRGTLKHFNLKPSDNIVQIGTLSKAIGGLGGFVCGIEEVVEYLINTSRSFIFSTALPPHVVEGCIKAFEIIEKTDIVKKLQKNIKIANKVFKKYEFIKEDNLTPIYPFIFKEKTMEIAEHLIKNNIFCVGIRYPTVPKGLERIRVSINVGHEKEDFELLCERIKEVYSSD

SEQ ID NO: 11376 - protein, 607 aa, Haemophilus influenzae Rd KW20
MKIKNRVNMNLDLHFVHRIQQQAKTRTNMTALRYKEHGLWRDISWKNFQEQLNQLSRALLAHNIDVQDKIAIFAHNMERWTIVDIATLQIRAITVPIYATNTAQQAEFILNHADVKILFVGDQEQYDQTLEIAHHCPKLQKIVAMKSTIQLQQDPLSCTWESFIKTGSNAQQDELTQRLNQKQLSDLFTIIYTSGTTGEPKGVMLDYANLAHQLETHDLSLNVTDQDISLSFLPFSHIFERAWAAYILHRGAILCYLEDTNQVRSALTEIRPTLMCAVPRFYEKIYAAVLDKVQKAPKLRQIMFHWAISVGQKYFDLRANNKAIPFLLKKQFALADKLVLSKLRQLLGGRIKMMPCGGAKLEPAIGLFFHAIGINIKLGYGMTETTATVSCWHDFQFNPNSIGTLMPKAEVKIGENNEILVRGGMVMKGYYKKPEETAQAFTEDGFLKTGDAGEFDEQGNLFITDRIKELMKTSNGKYIAPQYIESKIGKDKFIEQIAIIADAKKYVSALIVPCFDSLEEYAKQLNIKYHDRLELLKNSDILKMFEHRINAVQKELAHFEQVKKFTLLSQAFSIKLGEITPTLKLRRKVILERYRKQIEAMYHSQEA

SEQ ID NO: 11377 - protein, 303 aa, Brucella melitensis 16M
MDGNGNGWQACCRLSRTHFATGHGMTTRIDTKFAELKAEGRPALVTYFMGGDPDLETALKVMKALPKAGADVIELGMPFSDPMADGPAIQAAGLRALNAGQTLAKTLYMAAEFRKEDDTTPIVMMGYYNLIYIYGVERFLTDAKASGVDGLIVVDLPSEMDAELCIPAMKAGINFIRLTTPTTDDKRLPKVLHNSSGFVYYVSMNGITGAAIADTAKVGEAVRHIKKSTDLPICVGFGVKTPEQAAAIATHADGVVVGTAIVNAIAGELDEKGKAKGDPVAAATRLVHALAESVRATRLEAAQ

SEQ ID NO: 11378 - protein, 427 aa, Anaplasma marginale str. St. Maries
MFRFCMADRARVVVTGMGLVTPLGFQIPDVWDRLVNGKSGISAISGFDTHDLECRVGGQVISEGQSGENVFDPTQWVEEKDVKKADRFIIFGVAAADMALSDAGLLGTEFDPDRIGVLVGSGVGGLPCIERNVIAVHERGPRRVSPFFIPGSLVNLLPGHISIRHGLTGYCNASVSACATGAAAIADAARVIASGEADVMLAGGAEGALCRAAVAGFCIIKALSTKFNDTPELASRPWDRDRDGFVIGEGAGILVLESYEHAKMRGANIYAELVGYGITSDAYHVTAPHPEGRGGADAMKRALQMSGIAPESVGYINAHGTSTPVGDSVEISAIKSVFGDHAYRMPISSTKSSIGHLLGAAGGVEAIFSILSIRNGVVPPTLNLQNSSEDSNLNLVPLNAQEHKVSSAMSNSFGFGGVNASLVFGAV

SEQ ID NO: 11379 - protein, 385 aa, Nostoc sp. PCC 7120
MINAIAQRFSQFVAARNIRRFLKLPIWLGMVCGILVLFLVVHPVQSQEPETQKSFVVATRAIPPFVFTDNGELSGFSIDLWRSIASQIGAESKFVEYPSVPDLLSSVQNGKANAGIAAISITAERQQQFDFSLPMFSGGLQILVRNPKLSNSGTPNILSLFLSTTILQVLGLALLLIVIAAHVIWLSERHQKEGMISQSYFPGIFKACWWAAATLATQADEMPKGVIGRILAIIWMFIGVLFVTYFTAAATTSLTVQQLQADINSVSDLPGRVVATTTGSTAATYLKQQKISVLEVPKIEQAYDALETKKAEAVVFDSPVLLFYAANQGQGKVEVVGSVFREENYGIVLPNNSPYRKPINNALLKLKENGTYQSLYDKWFGVKDS

SEQ ID NO: 11380 - protein, 93 aa, Triticum aestivum
AYLGGTGGNKATACIVSSGMSFPVREINFGTGLPAFASYHFPWPAGAAYVMPMPSARGDGEWVVYVHAAPELVKVIEEEPTVFKVLENSYVFG

SEQ ID NO: 11381 - protein, 239 aa, Oryza sativa
MVAEEEVVVVWEGEKEGEIDYVFKVVVVGDSAVGKTQLLGRFTKDEFFLDSKSTIGVEFQTRTLSLHRKRVKAQIWDTAGQERYRAVTSAYYRGALGAMVVYDITRRRTFENVARWVEELRAHADGSTVVALIGNKADMPAGRREVAADEAARFAEEQGLFFSEASALSGDNVDRAFLTLLEEIFAVVSRRALELDEARRMRDGGAGGGEVLSLKGTTLDVGSIMETSAMKKSSQCSCS

SEQ ID NO: 11382 - protein, 382 aa, Neisseria gonorrhoeae FA 1090
MTETTQTPTFKPKKSVALSGVAAGNTALCTVGRTGNDLSHRGYDILNLAQKCEFEEVAHLLIHGHLPNKFELAAYKTKLKSMRGLPIRVIKVLESLPAHTHPMDVMRTGVSMLGCVHPERESHPDSEARDIADKLIASLGSILLYWYQYSHNGKRIEVESDEETVGGHFLHLLHGKRPSESHIKAMHVSLILYAEHEFNASTFTARVIAGTGSDMYSCITGAIGALKGPKHGGANEVAYDIQKRYRNADEADIRERIGRKEIVIGFGHPVYTISDPRNVVIKEVARGLSREAGDMRLFDIAERLESVMWEEKKMFPNLDWFSAVSYQKLGVPTAMFTPLFVISRSTGWAAHVLEQRKDGKIIRPSANYAGPEDLAFVEIEER

SEQ ID NO: 11383 - protein, 322 aa, Zea mays
MTTSAAASATAALSTPSSVNPHRSSSALRLPASLRRSHPNRFLSSSPSRSPLVPVSAMASPAAAGETSSRKKLIIFDAEDDLAASLAKYTSELSAKFAAERGAFTVVLSGGSLVKALRKLAEPPYLEAVDWSKWHVFWVDERVVPKDHADSNYRLASDQFLSKVPIPADQVHAINDELSSEGAAGDYETRLKQLVKNGVVKMSPVSGFPKFDLMLMGMGPDGHVASLFPGHPVVNENQKWVTFVKDSPKPPPERITFTFPVINSSAHIALVVTGAGKAGAVHKALSEGQSTSDLLPVEMVSLQNGELVWFTDKPAVSMLSSI

SEQ ID NO: 11384 - protein, 385 aa, Clostridium perfringens str. 13
MGNFFKNSKKGKDLHGVNEKNYDNIVIKKDKKRFWIKSLLKLVSFVILVVLVSFIAFKHYTKDLTMKEQKANLLNEIKDGRYDITNLVNKSGCSLVTIGDDSNNLAIGKDDGKNVSGSIIRTDGYIITSYSAIKDFSKVYVKISSNDISPFEARIVGFDKDTDIAVLKIGANGLKSISTSELEVLEIGEKVATLGNTTSEEPVGFVSNGIVSAPIKKTSVGEEGHSDSKVFDLIETNSLINSDNNSGILCDYNGVVIGINSLYFTNKFSKPGIYYALEINDALRIADSIIRKGGVTASVTLGVTGSTVADEKSNIYGIYVEDVDKGSNAFNAGIKPTDIIVEADNEKVKNIESLADLLKKHSVGDIIKLKVIRGDTTKDISVTLN

SEQ ID NO: 11385 - protein, 85 aa, Zea mays
TRLMLPAWLGWETALNNALARGQGELLAQMREQWPFFRTRIDMLEMVLAKADAQIAEAYDERLVQPHLLPLGAHLRDLLSQSCKV

SEQ ID NO: 11386 - protein, 67 aa, Arabidopsis thaliana
MSTATFVEIILAIILPPLGVFLKFGCKVEFWICLILTLFGYLPGILYALYIITKKNSCFVVLFSLWD

SEQ ID NO: 11387 - protein, 447 aa, Saccharomyces cerevisiae
MREVISINVGQAGCQIGNACWELYSLEHGIKPDGHLEDGLSKPKGGEEGFSTFFHETGYGKFVPRAIYVDLEPNVIDEVRNGPYKDLFHPEQLISGKEDAANNYARGHYTVGREILGDVLDRIRKLADQCDGLQGFLFTHSLGGGTGSGLGSLLLEELSAEYGKKSKLEFAVYPAPQVSTSVVEPYNTVLTTHTTLEHADCTFMVDNEAIYDMCKRNLDIPRPSFANLNNLIAQVVSSVTASLRFDGSLNVDLNEFQTNLVPYPRIHFPLVSYSPVLSKSKAFHESNSVSEITNACFEPGNQMVKCDPRDGKYMATCLLYRGDVVTRDVQRAVEQVKNKKTVQLVDWCPTGFKIGICYEPPTATPNSQLATVDRAVCMLSNTTSIAEAWKRIDRKFDLMYAKRAFVHWYVGEGMEEGEFTEAREDLAALERDYIEVGADSYAEEEEF

SEQ ID NO: 11388 - protein, 492 aa, Schizosaccharomyces pombe
MRAFRLASGVLRNRKVILGIGAGSLITAGNIKIRNDSKFDAFFAKGFPDELQHRSLFSVLRSAFVYEICSRAWLVKLSLGAMSLCDVFHLSFLYNPFCRYTFYKHFCGGETPQAVMATMDTLQAAGITSCLNYSREVDLDGDMDVNKIASQGVVPPQVPVPSEKNQKVLRQIADKAFESNMHIIDMATYKPGTVCAVKLTPFINPLVLQRYNSILNQYPVESACNYLEHLKSPELSTYEVSELKKFWEYADKLCQFAKEKQIPLFIDAEQTYFQDCMHAVTVDLMRKYNKEVAIVHNTYQLYLKKSRKIMDDHIKKCVAEGWLMGAKLVRGAYLNSEPRFLIHDTKAETDKDFDSAVEAIIAAAAKFAPGDPASASDPIASRKGKWGIMVASHNKKTMFESVNLAETKKVDFTKTSFYLAQLLGMADDITYALAYSQRNQQPNFCIVKYVSCGPISEVLPYLVRRARENIDALDRCKEERAYYRQALRRRIF

SEQ ID NO: 11389 - protein, 375 aa, Campylobacter coli RM2228
MSISEATKKTGGLAGVIAGQSAICTCGLGNGLNYYGYSIEELAQNAEFEEIAYLLQFGELPNAKELENYKEKIIAQRALSENLKNVLKAIPKEVHPMNLMQTAVAALGALEGENEDFSDQDEKIIRLLGILPSMLCYWHHYVNFGKEIDFDSNQTSIAGYFLEKLKLEAPKEDFIKAMQCSLILYAEHEFNASTFTARICASTKSDIFSAVAAAIGALRGPLHGGANEAAMHLIESFKSVEDAIEGVNKKLENKELLMGFGHRVYGLGGDPRNALIKVWSKHLGGDDLLFKISEAIEALMKEKRPSLPPNADFYSASAYHFMGIPTEYFTPIFIMSRVSGWCAHIKEQRANNKLIRPSSEYIGVEPRKFVKIQDR

SEQ ID NO: 11390 - protein, 462 aa, Streptomyces avermitilis MA-4680
MANDASTVFDLVILGGGSGGYAAALRGAQLGLDVALIEKDKVGGTCLHRGCIPTKALLHAGEIADQARESEQFGVKATFEGIDVPAVHKYKDGVISGLYKGLQGLIASRKVTYIEGEGRLSSPTSVDVNGQRVQGRHVLLATGSVPKSLPGLAIDGNRIISSDHALVLDRVPESAIVLGGGVIGVEFASAWKSFGADVTVIEGLKHLVPVEDENSSKLLERAFRKRGIKFNLGTFFSKAEYTQNGVKVTLADGKEFEAEVLLVAVGRGPVSQGLGYEEQGVAMDRGYVLVDEYMRTNVPTISAVGDLVPTLQLAHVGFAEGILVAERLAGLKTVPIDYDGVPRVTYCHPEVASVGITEAKAKEIYGADKVVALKYNLAGNGKSKILNTAGEIKLVQVKDGAVVGVHMVGDRMGEQVGEAQLIYNWEALPAEVAQLIHAHPTQNEAMGEAHLALAGKPLHSHD

SEQ ID NO: 11391 - protein, 320 aa, Hordeum vulgare
MASAKATMGQGEQDHFVLKSGHAMPAVGLGTWRAGSDTAHSVRTAITEAGYRHVDTAAEYGVEKEVGKGLKAAMEAGIDRKDLFVTSKIWCTNLAPERVRPALENTLKDLQLDYIDLYHIHWPFRLKDGAHMPPEAGEVLEFDMEGVWKEMENLVKDGLVKDIGVCNYTVTKLNRLLRSAKIPPAVCQMEMHPGWKNDKIFEACKKHGIHITAYSPLGSSEKNLAHDPVVEKVANKLNKTPGQVLIKWALQRGTSVIPKSSKDERIKENIQVFGWEIPEEDFKVLCSIKDEKRVLTGEELFVNKTHGPYRSARDVWDHEN

SEQ ID NO: 11392 - protein, 398 aa, Xanthomonas campestris pv. campestris str. ATCC 33913
MAPVAITAFTATTALGAGLDAQASALRERRSGMRRNDFGPQPLECWIGRVAGVEDVVLPDALQGWDCRNNQLAWLALQQDGMAAAVQAAAQRYGAERVAVVMGTSTSSVGASEEAYTRLVEDAHGLRFPDDLQRPIVHTPHSLGDFVQHATGLRGPAITVATACSSSAKVFAQAARLMAAGVVDAALVGGVDTLCGSVLFGFNSLQVVAPQLCQPFDARRVGLSLGEAGGFALLERPAAAPDAAQWLYGYGESSDAHHMSAPHPQGLGAQLAMRGALDTAGLDAAAVGYLNLHGTATPANDSVEAAAVAAIFPDTLHASSTKAWMGHTLGAAGIVESVIALLALRDGLLPGTLNSAVPDPACGPQIRFDNAHSRIQYAMNNSFGFGGNNCSLLFGQAR

SEQ ID NO: 11393 - protein, 170 aa, Sinorhizobium meliloti
NQLPAVLWFTGLSGSGKSTIANELDRILHAQGKHTYLLDGDNVRHGLNRDLGFTEEDRVENIRRVAEVAKLMADAGLIVLVSFISPFRDERRMARELMEEGEFIEIFVDTPLDECARRDPKGLYEKALAGKIANFTGVSSCYEAPENPELHIRTVGHQPNDLALAIEGIP

SEQ ID NO: 11394 - protein, 592 aa, Paracoccidioides brasiliensis
MQRAFTSSRASVLSSASSTRAPLSRFRSAGVGLQQQRFAHKELKFGVEARASLLKGIDTLAKAVTTTLGPKGRNVLIESPYGSPKITKDGVTVAKAVTLQDKFENLGARLLQDVASKTNEVAGDGTTTATVLARAIFSETVKNVAAGCNPMDLRRGIQSAVEAVVEYLQTNKRDITTTEEIAQVATISANGDTHVGKLISNAMEKVGKEGVITVKDGKTIDDELEVTEGMRFDRGYVSPYFITDTKAQKVEFEKPLILLSEKKISAVQDIIPALEASTSLRRPLVIIAEDIEGEALAVCILNKLRGQLQVAAVKAPGFGDNRKSILGDIGILTNATVFTDELDLKLEKATPDMLGSTGSITITKEDTIILNGEGSKDAIAQRCEQIRSVISDPATSDYEKEKLQERLAKLSGGVAVIKVGGASEIEVGEKKDRVVDALNATRAAVEEGILPGGGTALLKAAANGLTSLNPTNFDQKLGISIIKNAITRPARTIVENSGLEGSVIVGKLTDDFAGDFNRGFDSARGEYVDMIGAGIVDPLKVVRTALVDASGVASLLGTTEVAIVEAPEEKVPAGSGAGGMGGGMGGMGGGMF

SEQ ID NO: 11395 - protein, 277 aa, Zea mays
MFHSLDPPPLHSLLPEVTHQTPPPKKARTLPFPSQAPGPSPRLLICRCSPSLGSENRREARAAMASSASRFIKCVTVGDGAVGKTCMLICYTSNKFPTDYIPTVFDNFSANVVVDGTTVNLGLWDTAGQEDYNRLRPLSYRGADVFVLAFSLVSRASYENIMKKWIPELQHYAPGVPVVLAGTKLDLREDKHYLMDHPGLVPVTTAQGEELRRQIGAMYYIECSSKTQQNVKAVFDAAIKVVIQPPTKIREKKKKKSRKGCSMMNIFGGRKMLCFKS

SEQ ID NO: 11396 - protein, 481 aa, Streptomyces avermitilis MA-4680
MSAAEGPLVVGVDTSTQSTKALVVDASTGRVVASGQAPHTVSAGAGRESDPRQWWDALCEALHQCGDAAHEAAAISVGGQQHGLVTLDAHGDPVRPALLWNDVRSAPQARRLIEELGGPKAWAERTGSVPGPSFTVTKWAWLTEHEPEAVRATAAVRLPHDYLTERLTGQGTTDRGDVSGTGWWASATESYDEEVLTHVGLDPALLPRVVRPGEVVGTVRDSHDLPFSKGTLVAPGTGDNAAAALGLGLRPGTPVLSLGTSGTVYAVSTRRPADPTGTVAGFADARGDWLPLACTLNCTLAVDRVAALLGLDREAVEPGTGVTLLPYLDGERTPDLPHASGLLHGLRHDTTGGQLLQAAYDGAVHALLGALDLVLDADADRSAPLLLIGGGARGTAWQQTVRRLSGRPVQVPEARELVALGAAAQAAGVLTGEDPAAVARRWDTAHGPVLDAVERDEATLARISGVLSDAAPLLEREPDRR

SEQ ID NO: 11397 - protein, 464 aa, Methanocaldococcus jannaschii DSM 2661
MNKMNIDKNLLEKWDKEYIWHPYTQMKEYRESKNLIIERGEGNYLIDIYGNKYLDAVSSIWCNLFGHSRKEIIEAIKNQADKICHSTLLGCGNVPSILLAKKLVDITPKHLTKVFYSEDGAEAVEIAIKMAYQYYVLRGDKGRTKFISVKEGYHGDTVGAMSVGGSELFHGVFKPLLFKGYHANPPYCYRCKYHNFKDTDERNEKGCEMECLNEMISLIEKHAEEVFCVILEGGIMGSAGMIPYPDGYIEGVAKACKENDVIFILDEVATGFGRTGKMFFCDNEELKKLEKPDILCLGKGLTGGYLPLAATLTTDEIYNQFLGEFGESKQLYHGHTYTGNQLLCSAALATLEIFEKENVIENIQPKIKLFHKELRKLKELEHVGDVRGRGFMVGIELVKDKETKEPYPYGYKAGYRVAEKLLEKGIYMRPIGNVIILVPPLSITEKEIIYLCDALYEAIKEADL

SEQ ID NO: 11398 - protein, 493 aa, Prochlorococcus marinus
MQTNFLFMTTALQTPQRRSRSKLQDASLVNGPMLLLRSIRGFSSNRSMLWLATVPLALFGLGIFNLSAHAADLPELNAAFLANNLWLLIATILVIFMNAGFAMVEAGMCRSKNAVNILAKNLFVFALAVTSYWFIGYSLMYGGSVADGWLYFGGLFFDPTVTADMVTDAGLVPTVDFLFQSAFAGTAATIVSGLVAERVKFGEFVVFAIVLTAFIYPIAGSWKWNGGWLDSLGFVDFAGSSIVHSVGAWAGLVGAMLLGPRIGKYSDGKPQAMPGHNMAIATLGALILWIGWYGFNPGSQLAMDQWVPYVAVTTTLAAAAGAIGATIVSTLTSGKPDLTMIINGILAGLVSITAGCGDMTLAGAWFAGLVGGIIVVFSVAALDAAEIDDPVGAFSVHGVCGVWGTLVIGLWGTAVQGDGAGMGLFNGGGINLLLVQALGAAAYAIWTLVTCWIAWSIIGGLFGGIRVSEEEETQGLDISEHGMESYPDFASAK

SEQ ID NO: 11399 - protein, 328 aa, Campylobacter coli RM2228
MKKFSLWCDFIENSFLDDDFLNLLSRGVNGATSNPAIFKNAILNSPIYKEKIAKLKGKKAKEIYEELAIADIQKAADKLAPLYHTGNDGFISLEIDPRFYDNTSLSLGEAKKLYSAIGKDNVMIKVPATNASYEVMYELMKNGISVNATLIFSLEQSQKCFEALNAGLIEFRKNNIALQGKNTHLRTPQAVISIFVSRFDRLLNSKAKEQNRIGILNANLAYNNIISKNEPNIRALFASTGVKGDDLPKDYYIKELLFENSINTAPLDAINAFKTEIEFKKPLMNFEIYTQLNAIISQNEREKACDELLKDGLEQFCIAFEEILQALN

SEQ ID NO: 11400 - protein, 479 aa, Zea mays
MAGGFRVLHLVRPFLAFLPEVQSADRKIPFREKVIYTVISLFIFLVCSQLPLYGIHSTTGADPFYWMRVILASNRGTVMELGITPIVTSGMVMQLLVGSKIIEVDNSVREDRALLNGAQKLLGILIAIGEAVAYVLSGMYGSVSQLGTGNAILIILQLFFAGIIVICLDELLQKGYGLGSGISLFIATNICENIIWKAFSPTTINSGRGAEFEGAVIALFHLLITRTDKVRALREAFYRQNLPNVTNLLATVLVFLIVIYFQGFRVVLPVRSKNARGQQGSYPIKLFYTSNMPIILHSALITNLYFISQLLYRKYSGNFLVNLLGKWKESEYSGHSIPVGGLAYYVTAPSSLADVLANPFHALFYVVFMLSACALFSKTWIEVSGSSAKDVAKQLKLQYSEQQMVMPGHRESNLQKELNRYIPTAAAFGGVCIGALTVLADFMGAIGSGTGILLAVTIIYQYFETFEKERATELGFFGF

SEQ ID NO: 11401 - protein, 189 aa, Vibrio sp. Ex25
MAWLAFFNFYLVVKVFNTLGYQGFNFKVSKMNQVWVTGDAVVDLIPESETSLLKCPGGAPANVAVAIARLSGKSAFFGRVGDDPFGRFMKSTLDQEGVCTEFLVKDPEQRTSTVVVDLDDQGERSFTFMVKPSADQFMSVEDIPNFKQGDWLHVCSISLANEPSRSSTFEAIKRAKAAGGFISFDPTCV

SEQ ID NO: 11402 - protein, 275 aa, Mesorhizobium loti MAFF303099
MLGFQTATDVTNFRRSVRATGSTTFDINGAAKSNGRTVLSRSFPIGIDVDAFARMANDAASDVQIDSMRRQILGLKQIIGVDRLDYSKGLPGRIQAFARLLERHPEHERTVTYLQIAPPTREEVGAYAEIRAQLEATAGSVNGKYADLTWTPIRYIHRTVPRSRLAGLLRASQVGLVAPLRDGMNLVAKEYIAAQDPADPGVLVLSRFAGAAEELAHSLIVNPYVVDEVADAIAKALGMPLEERIARHGALIERIRRNDAAQWRKSFLEALADSS

SEQ ID NO: 11403 - protein, 191 aa, GIBBERELLA ZEAE PH-1
MEAASARAAARDRWGDLPSSSRTPSQLQRFVQAACSPENYEPNLALSLEIADLINSKKGSAPREAATAIVNYINHRNPNVALLAIGLLDICVKNCGYPFHLQIGTKEFLNELVRRFPERPPMRPTRVQAKILEAIEEWRGTICETSRYKEDLGTSNLLKKWRKRRERPNQPSFKSSFDAVPLRTFKKPTAS

SEQ ID NO: 11404 - protein, 311 aa, Haemophilus influenzae R2866
MKVAVLGAAGGIGQALALLLKLQLPAGTDLALYDIAPVTPGVAVDVSHIPTAVNVKGFSGEDPTPALEGADVVLISAGVARKPGMDRSDLFNINAGIVRGLIEKVAVTCPKACVGIITNPVNTTVAIAAEVLKKAGVYDKRKLFGVTTLDVLRSETFVAELKGLNVSRTSVPVIGGHSGVTILPLLSQVQYAKWNEDEIEPLTKRIQNAGTEVVNAKAGGGSATLSMAQAAARFARSLVKGLSGETVVECTYVEGDGKYARFFSQPVRLGKEGVEEILPIGPLSNFEQQALENMLPTLRADIELGEKFING

SEQ ID NO: 11405 - protein, 164 aa, Zea mays
  misc_feature (33)..(33): Xaa can be any naturally occurring amino acid
  misc_feature (45)..(45): Xaa can be any naturally occurring amino acid
  unsure (1)..(164): unsure at all Xaa locations
SAIDLFGSSDTDLFYELARQFGIHFATPQQIYXHKTRHQVRQKFXSEERKNPSYIHDAIIHRSGDNLYFKKVIKQLNIEDVVLPDIKSTQKQDGASSERGPGNENVLDDLNEEENSSDWLNEEHDVQMADVEEEHGEQMDDVEEERDLGNDGGDDDLGDVFDWY

SEQ ID NO: 11406 - protein, 258 aa, Streptococcus pneumoniae TIGR4
MPKTLTEKLNAIKAAGKGIFVPYIMAGDHEKGLDGLAETIHFLEDLGVSAIEVGIPFSDPVADGPVIEEAGLRSLAHGTSTQALVETLKTIETEIPLVIMTYFNPLFQYGVENFVKDLADTAVKGLIIPDLPHEHANFVEPFLANTDIALIPLVSLTTGIERQKELIEGAEGFIYAVAINGVTGKSGNYRADLDKHLAQLHQVADIPVLTGFGVSSQADLERFNAVSDGVIVGSKIVKALHQGEPIQDFIRQAVAYQK

SEQ ID NO: 11407 - protein, 225 aa, Glycine max
  misc_feature (58)..(58): Xaa can be any naturally occurring amino acid
  unsure (1)..(225): unsure at all Xaa locations
TCDPPGGRIRPRHYLEHPNRKLYWDSGPLPSLPFQALFAKLQQLATVAGDVLLGKEKXQKMLLARLTETVVMWLSDEQEFWGVLEDKSAPLKPLGLQQLILDMHFTVEIARFAGYPSRHIHQIASAITARAIRTFSARGIDPQSALPEDEWFVETAKSAINKLLLGVSGSEASDTDEDHIIDHHDEVVSDSDTVSSLSSMESTESFASASMAELDSPSNLSDPDN

SEQ ID NO: 11408 - protein, 73 aa, SINNINGIA BARBATA
  misc_feature (25)..(25): Xaa can be any naturally occurring amino acid
  misc_feature (38)..(38): Xaa can be any naturally occurring amino acid
  misc_feature (41)..(41): Xaa can be any naturally occurring amino acid
  misc_feature (50)..(50): Xaa can be any naturally occurring amino acid
  misc_feature (52)..(52): Xaa can be any naturally occurring amino acid
  misc_feature (54)..(54): Xaa can be any naturally occurring amino acid
  misc_feature (57)..(57): Xaa can be any naturally occurring amino acid
  misc_feature (64)..(64): Xaa can be any naturally occurring amino acid
  misc_feature (67)..(67): Xaa can be any naturally occurring amino acid
  unsure (1)..(73): unsure at all Xaa locations
ISGTNGEVMPGQWEFQVGPSVGIEXGDHIWCARYLLEXITXQAGVVLSLXPXPXEGXWNGAECXTNXSTKSMR

SEQ ID NO: 11409 - protein, 139 aa, Allium cepa
  misc_feature (102)..(102): Xaa can be any naturally occurring amino acid
  misc_feature (105)..(105): Xaa can be any naturally occurring amino acid
  misc_feature (108)..(108): Xaa can be any naturally occurring amino acid
  misc_feature (111)..(111): Xaa can be any naturally occurring amino acid
  misc_feature (114)..(114): Xaa can be any naturally occurring amino acid
  unsure (1)..(139): unsure at all Xaa locations
KKPAEKKPAAEKPEEEKKTAAEKTPAGKKPRAEKKLPAKDSSASADKKKKRKAKSIETYKIYIFKVLKQVHPDIGISGKAMGNYDSFINGIFEKLAQDFLRXGRXNRXPPXFGXFRIFVVLPGGFPNSFFVVLPGGFQS

SEQ ID NO: 11410 - protein, 690 aa, Oryza sativa
MKLVMGGKILWKDRDNKHIDLNLREWHILREISCVGKAHQLVSLTRVLIARFSLSGEGDSKVDIEAEWLSSLASCCAESGDGTIGGRMFWEKGSPCQQDGDSQGAADIEIPSLPEDIWRLIHSLMPMRDAARAACVSHSFLSSWRCHPNLNFSSEALGLSKNAYGNEELAGLFYSKVNHILKRHSGIGVKKLTIKVYSDYSGKGSSYLNNWLQIAVKPGIEELIIALTQFQAKYNFPCSLLSNGSGDSIQYLHLSNCSFHPTVTLSGLRSLTRLYLCRVRITENELGCLLSHSLALEQLEIRYCNRIVCLKVPCLLQRLISLKVFGCDKLKLIENEAPNVSMFAFQGDKTELKLGETLQIKSLCMVRSGYVYHARAELPSIMPNLESLALKSCKETAFAPKLCSKFLCLRHLSIGLIGFFPAYDYLSLASYIYAAPSLETFDLNVMQRNVQSVSIFAHPADLRSIREEKHHNLKSVTVTSFISVKSLVELTCHILESTASLECLTLDASQTGFRCDTPGSKISKCPPLDRDIIMEGHRGVLAIRRYIQPRARAYLYYYLYHLKKTATVVSVPTTAMLTCGPTLSLGYGYGVEQSKPSPNSICFSIFSILASILCSVNLDDISCESVRVWVQAMEWSKCSSSHCAAVTFLGTVSGLLRILYSSWVYGFLQASTDAFVTASPVWDMHALHQG

SEQ ID NO: 11411 - protein, 336 aa, Antirrhinum majus
APIKIGINGFGRIGRLVARVALQRDDVELVAVNDPFISTDYMTYMFKYDSVHGAWKHHELKVKDEKTLLFGEKPVVVFGRRNPEEIPRASTGAEYIVESTGVFTDKDKAAAHLKGGAKKVIISAPSKDAPMFVVGVNEKEYKSDLHIVSNASCTTNCLAPLAKVINDRFGIVEGLMTTVHSITATQKTVDGPSAKDWRGGRAASFNIIPSSTGAAKAVGKVLPQLNGKLTGMSFRVPTVDVSVVDLTVRLEKKATYEQIKAAIKEESEGKLKGILGYTEDDVVSTDFVGDSRSSIFDAKAGIALNDNFVKLVSWYDNEWGYSTRVVDLIVHMASVQ

SEQ ID NO: 11412 - protein, 222 aa, Legionella pneumophila str. Paris
MIDTIIFDFDGVILNSEPMHFEALVQVLNQSGINLAYEEYMTHYLGLSDISVFPKILNDKGLAFSSTEIRQLIERKVTVYNELIENSEQLPMTPDLDWFLVRAAKQYGKIGICSGSNRHSIIKILEKIHCGRLACYFKTIVSCEDVSLGKPSPEGYLLAAHHLQSNPENCLVIEDSEHGVAAAKAGGMLVAGLLTTLSRDQLANADMIVHDFKELAHLLNSH

SEQ ID NO: 11413 - protein, 73 aa, SINNINGIA TUBEROSA
ISGTNGEVMPGQWKFQVGPSVGIEAGDHIWCARYLLERITEQAGVVLSLDPKPIEGDWNGAGCHTNYSTKSMR

SEQ ID NO: 11414 - protein, 285 aa, Arabidopsis thaliana
HFLQLLQISYFPENHFPKKNKTFPFVLLPPTAITAYQSELGGDSSPLRKSGRGKIEIKRIENTTNRQVTFCKRRNGLLKKAYELSVLCDAEVALIVFSSRGRLYEYSNNSVKGTIERYKKAISDNSNTGSVAEINAQYYQQESAKLRQQIISIQNSNRQLMGETIGSMSPKELRNLEGRLERSITRIRSKKNELLFSEIDYMQKREVDLHNDNQILRAKIAENERNNPSISLMPGGSNYEQLMPPPQTQSQPFDSRNYFQVAALQPNNHHYSSAGRQDQTALQLV

SEQ ID NO: 11415 - protein, 216 aa, Pisum sativum
MAEENQNKYEETTSATNSETEIKDRGVFDFLGGKKKDEEHKPAQDEAIAHEFGHKVTLYEAPSETKVEEEGEKKHTSLLEKLHRSDSSSSSSSEEEGEDGEKRKKKKEKKKKEDTSVPVEKVEVVEGTTGTEEEKGFLDKIKEKLPGGHKKTEEVTTPPPVVAAHVPTETTATTTIHEGEKKGILEKIKEKLPGYHAKTATDGEDKDHHKDETTSH

SEQ ID NO: 11416 - protein, 395 aa, Haemophilus somnus 129PT
MSYLERARELFDEAKAVRRQIHQHPEVGFELPDTMALIKKKLDEHNIQYRQLDDAYALVGTLGDPSKGKTLLLRADMDGLPMVEEANLEFAAKNQCAHLCGHDIHATSLLVALIMLKEDEDKLQGQIKFLFQPAEETLNGGKLMIEKGVLENPKPDAGLALHMWPNGEKPGILINKEAALASALNFKIEIKGKGAHGAMPYNGVDPVFVASQIINGANGILARELPSSKGASLSIGSISAPGGAINIVPPNAYLEGTSRSLYDDSAKHMAKRLPEIVEHIGKAFRAETVYEEVANVPALVNTPAMSELVKASAEEALGPEYTVKYIDPLLASEDYAHIASQLPESCYFFVSCPQPDADGNVYAVHHPKVVFNEEALIIGPATMAQAAVNWLASHR

SEQ ID NO: 11417 - protein, 167 aa, Legionella pneumophila str. Paris
MTKLISVVFYLFIIPNVMAYTPQFNKSEQLKKLTPLQYQVTQNGATEKSFDNAYWNNKEEGIYVDIVSGEPLFSSNDKYDSGTGWPSFTKPIDTSYLVFHTDRSYFFIVRTEVRSKYANSHLGHVFKDGPEPTGLRYCMNSAALKFIPKNEMEKAGYGEYLYLFNKK

SEQ ID NO: 11418 - protein, 706 aa, Arabidopsis thaliana
MILFRFKDEGKPLSSEYGYGRKARPSLDRVFKNVKWGFKKPLSFPSHKDPDHKETSSVTRKNIINPQDSFLQNWNKIFLFACVVALAIDPLFFYIPIVDSARHCLTLDSKLEIAASLLRTLIDAFYIIHIVFQFRTAYIAPSSRVFGRGELVDDAKAIALKYLSSYFIIDLLSILPLPQIVVLAVIPSVNQPVSLLTKDYLKFSIIAQYVPRILRMYPLYTEVTRTSGIVTETAWAGAAWNLSLYMLASHVFGALWYLISVEREDRCWQEACEKTKGCNMKFLYCENDRNVSNNFLTTSCPFLDPGDITNSTIFNFGIFTDALKSGVVESHDFWKKFFYCFWWGLRNLSALGQNLQTSKFVGEIIFAISICISGLVLFALLIGNMQKYLESTTVREEEMRVRKRDAEQWMSHRMLPEDLRKRIRRYEQYRWQETRGVEEETLLRNLPKDLRRDIKRHLCLDLLKKVPLFEIMDEQLLDAVCDRLRPVLYTENSYVIREGDPVGEMLFVMRGRLVSATTNGGRSGFFNAVNLKASDFCGEDLLPWALDPQSSSHFPISTRTVQALTEVEAFALTAEDLKSVASQFRRLHSKQLQHTFRFYSVQWRTWSVSFIQAAWRRYCRRKLAKSLRDEEDRLREALASQDKEHNAATVSSSLSLGGALYASRFASNALHNLRHNISNLPPRYTLPLLPQKPTEPDFTANHTTDP

SEQ ID NO: 11419 - protein, 158 aa, Schizosaccharomyces pombe
MSHFYDLAPKDKDGNPFPFSNLKGKVVLVVNTASKCGFTPQYKGLEALYQKYKDRGFIILGFPCNQFGNQEPGSDEEIAQFCQKNYGVTFPVLAKINVNGDNVDPVYQFLKSQKKQLGLERIKWNFEKFLVNRQGQVIERYSSISKPEHLENDIESVL

SEQ ID NO: 11420 - protein, 213 aa, Synechocystis sp. PCC 6803
MSQSKENYHLLLVDDDPNLLLLVKDYLEYQGYQVTTAGNGREALDLLTTTVPDMIVCDIMMPEMDGYAFIEQVRQNPDISWIPVMFLSAKGQSHNRVKGLNVGADIYMAKPFEPEELAAQVQSCLRQADRLLQHNNHPLEDNARVQVARDVELTPTETKVIQLVAQGLANREIADHLKVSQRTVESHVSNMLNKTGLHNRTELARWAIQKSIA

SEQ ID NO: 11421 - protein, 142 aa, Methanosarcina mazei Go1
MKNEYKGRKWGNFVYNKKVMDHFMNPRNVGEIENADGIGEAGNPHGDQMKIFLKIRDNRIEDVKFKTFGCAAAIASSSMATEMIKGKTLEEAWELTDEAVAEALEGLPPGKLECSVVSREATHRAINDYRKKQGLEPLEEKT

SEQ ID NO: 11422 - protein, 189 aa, Pinus strobus
AWHSAGTYDVKSKTGGPFGTIKHPDELAHGANNGLDIAIRLLEPIKEQFPTISYADFYQLAGVVAVEITGGPDIPFHPGRPDKTEPPEEGRLPDATKGIDHLRDVFGHMGLSDKEIVALSGAHTLGRCHKERSGFEGAWTSNPLIFDNSYFKELLSGEKEGLLQLPSDKALLEDPIFRSYVEKYAADDD

SEQ ID NO: 11423 - protein, 77 aa, Wolbachia endosymbiont of Asobara tabida
EEKQGGIVLPSSAEKKPTKGEVIAIGEGSRNSSGERVTLTVKAGDKVFYRQWAGTEIEHNNEKLIVMKESDILAVIK

SEQ ID NO: 11424 - protein, 313 aa, Bradyrhizobium japonicum USDA 110
MSPRPLMFFGTTNLDLCFNVERLPTPGESLMGSLKQNAGGKGANQAVAAARLGLRPSFYTRLGDDDAGRSLLQALREAGVRLDAIEVCPGEISGSALVLVGDDGSNMIVIDPGANANVTPSMVEKAAEFIERDAIVVAEMGMPVPALNHLFALKSVKEFDLIFNPAPVRAGLSPAAWRSVDFVTPNQTEAFELTGVEVHDFDGAAHAAGKLLDLGPKAALITLGAQGAYYADASATFALRAFPVKVVDTTAAGDAFNGAFAASLAHRLPIREAIKKALAVAALYVTRRGAQRSMPSSWAVDEFLNSQSILELE

SEQ ID NO: 11425 - protein, 423 aa, Kibdelosporangium aridum
MNERRVVITGIGVIAPGGIGAKSFWSLLSEGRTSTRGITFFDPSAFRSRVAAEADFDPYEHGLGPQEIRRMDRAAQFAVVTAAEAMADSGLDLSGVAPHRTGVTVGSTVGATMGLDQEYRVVSDGGRLDLVDHEYAVPHLYNYFVPSSFAAEVAWSVGAEGPATVVSTGCTSGLDSVGYAAELIRDNSADVMIAGAADAPISPITVACFDAIKATTPRNDDPEHASRPFDRTRNGFVLGEGAAMFVLEELESARRPGAHVYAEIAGYASRCNAFHMTGLRPDGKEMAEAIRAALDGAKMGPQDVDYVNAHGSGTKQNDRHETAAFKRSLAEHAYRTPVSSIKSMVGHSLGAIGSIEIAASVLAMENNVVPPTANLHEADPECDLDYVPLTARDWKTDTVLTVGSGFGGFQSAMVLTRPDRSAV

SEQ ID NO: 11426 - protein, 490 aa, Leptospira interrogans serovar lai str. 56601
MRKFDKTLFHEFRRIYKFMPESYDLTVIGAGPGGYVAAIRAAQLGMNVCIIEKDKPGGICLNWGCIPTKALLESAHLLEKLHSAKEYGINLSDPKPDFAAIIRRSRNVADGMASGVEFLLNKNKITRKKGTAVFKDPNTIWLPDSSKEEITSKYFILATGARARELPGLPFDSHTVLSSKTAMIQDKIPESLLIVGAGAIGVEFADFYSTMGTKVTLVEMMDQILPVEDKEISTFLEKSFVKRGIRVLTGVGVSDPKIVNGKVKVLLKGKNLPEAVESFEAEKILVSIGLVPNTDSMHLEEIGIFLQKGFVKTDTKYKTSVPHIYAIGDCNGPPLLAHVASMEGIKAVEAISIHAGNPHHLSYIPIDYNAIPGCTYCHPEVASIGFTEKKATDMGYTISVGKFPFVASGRAKAMGDTGGFTKVIVDKTSGEILGAHLIGPGVTELLPAVSLGITQELTAKEIASTIFAHPTLSETVMESFGAALGEAINL

SEQ ID NO: 11427 - protein, 410 aa, Kibdelosporangium aridum
MTSQAVVTGLGVVSPNGFGVTDYWNATCGGKSGIGRITRFDARRYPAKLAGEVAGFNASDHLPSRLIPQTDRMTQLALVSADDALADADVRTDEATPESQFGMGVVTSSSCGGFEFGQRELQNLWSKGGQYVSAYQSFAWFYAVNTGQISIRHGMRGPSGVLVSDQAGGLDALGHACRLVRNGTDLSCPVASTRRSARGVGSPHLASGSLSVSEEPERAYLPFDTDAAGHVPGEGGALLIIENADAARRRGVTRVYGEICGYGATFDPRPASGREPTLRKAIEIALDNAGMLPEDIDVVFADAAAIPELDEVEAKAISEVFGPRGVPVTAPKTMTGRLASGAAALDVATALLAIRAGVIPPTTNVALSPDYDIDLVVQGPRHTPLNAAVVLARGHGGFNSAVVVRSVDWN

SEQ ID NO: 11428 - protein, 690 aa, Oryza sativa (japonica cultivar-group)
MAISTWSTRLLLSPSASASSHRPNPTRRLAFPSPISGPGRQAPRAYISAPASGPDAYPSPALDAAAAAADVAAAIASSDAVTWAGVWALLSPHRARIAVSLAALLACTTCTLSMPLFSGRFFETLIGRGSEPLWRLLSKIAVLYTLEPIFTIVFVINMTVIWEKVMARLRSQIFRRILIQKMVFFDRHKVGELTGLLTSDLGTLKSVVSDNISRDRGLRALSEITGTLCILFTLSTELAPVLGLLMVSVSVLVALFKRSTVPTFKSYGIVQARISDTASETFSAIRTVRSFGGEKRQISMFDNLALAFQNSGTKLGVLKSANESLTRVVVYVSLMALYVLGGSKVNAGKLSVGTMASFIGYTFTLTFAVQGAVNTLGDLRGTFASVERINSILSAEDIDDSLAYGLAKELEDSNGAVHENGTANKHYMSALKSSSSCSNLAWSGDIHLEGVHFSYPLRSDVEILNGLDLTIECGKITALVGPSGAGKSTVVQLLARYYEPTHGRITVAGEDIRVFDKREWSRVVSLVNQDPVLFSVSVGENIAYGLPDDVVSKDEIIKAAKAANAHEFIVSLPQGYDTLVGERGSLLSGGQRQRIAIARALLKNSPILILDEATSALDTTSERLVQEALNHLMKGRTSLVIAHRLSTVQNAHQIAVCSDGKIAELGTHAELVASGGRYASLVGTQRLAFE

SEQ ID NO: 11429 - protein, 108 aa, Triticum aestivum
QPQSPSVADRFEGITCNKAEGAMYLFPQICLPQKAIEAAKAANKAPDAFYALRLLESTGIVVVPGSGFGQVPGTWHFRCTILPQEEKIPAIISRFTVFHETFMAEYRD

SEQ ID NO: 11430 - protein, 178 aa, Triticum aestivum
  misc_feature (51)..(51): Xaa can be any naturally occurring amino acid
  misc_feature (75)..(75): Xaa can be any naturally occurring amino acid
  misc_feature (78)..(78): Xaa can be any naturally occurring amino acid
  misc_feature (82)..(82): Xaa can be any naturally occurring amino acid
  misc_feature (90)..(90): Xaa can be any naturally occurring amino acid
  misc_feature (101)..(101): Xaa can be any naturally occurring amino acid
  misc_feature (103)..(103): Xaa can be any naturally occurring amino acid
  misc_feature (113)..(114): Xaa can be any naturally occurring amino acid
  misc_feature (116)..(116): Xaa can be any naturally occurring amino acid
  misc_feature (137)..(137): Xaa can be any naturally occurring amino acid
  unsure (1)..(178): unsure at all Xaa locations
VRPFLAFLPEVQSADRKIPFREKVIYTVISLFIFLVCSQLPLYGIHSTTGXADPFLLGCVLPRIQTVGTVMEFGXTPXVTSXGMVMHSLXVRNSLEVDNSXRXDSLRPNGAQXXLXTLIAIGELWHSPCPGMFGMLXTLDRNATPTHFPWRDIAPSGDPKKYGGIPNAQYEDYQTKAG

SEQ ID NO: 11431 - protein, 398 aa, Chromobacterium violaceum ATCC 12472
MAWTKEQKQTVFACYLGWTLDAFDFFLMVFVLKDVAKAFGADIEAVSWAIMLTLAARPIGALIFGRLADRFGRRPVLMANIVLYSVLGFSSAFAPNLLALLALRTLFGVAMGGEWGVGSSLTMESIPKESRGFVSGLLQAGYPSGYLLATLAFGQLFEHIGWRGMFMLSLLPALLTLYIRRNVPESPSWEASKHHDKPGLLQAISAQWRLSLYAIILMTCFNFFSHGTQDMYPTFLRVQHKFDPHTVQLIAICLNVGAIVGGLTMGSLSEKIGRRNAITLAALFALPVLPLWAFTSTPLPLAIGAFLMQISVQGAWGVIPAHLNEISPPAVRATFPGLVYQLGNLLASVNSPLQAHMAKTNGGDYGLAMAIVAGIVALAIAILIRFSHERRGEAMQAH

SEQ ID NO: 11432 - protein, 220 aa, Zea mays
MSAAAAAAASSVTKFIKCVTVGDGAVGKTCMLICYTCNKFPTDYIPTVFDNFSANVSVGGSIVNLGLWDTAGQEDYSRLRPLSYRGADVFILSFSLVSRASYENVLKKWMPELRRFSPTVPVVLVGTKLDLREDRSYLADHSAASIISTEQGEELRKQIGAVAYIECSSKTQRNVKAVFDTAIKVVLQPPRRREVTRKKMKTSSNQSLRRYLCGSGCFTS

SEQ ID NO: 11433 - protein, 812 aa, GIBBERELLA ZEAE PH-1
MNGDLSLSQALGGLRIANPDDAAEAVNASSTTLVGPDSTAQNTSLSASTSTSALPSTPQPTVTSTTPSPYDAIRLDPIDAGVESSLTDPRLTSSAKSTDLTSETSPSTGPSQPLSHTEASRTSIYAMPNAPEPGSGLSYPARESSRRDPHRFNKSSRPVSGVNPGGSPLPPRGSSRGMGVGYAAGPGGPQPNQPYAGDAPVPTSREDWQERGAAVGVRREVDANGRTVVRQVKKGVRDFAFGRTLGEGSYSTVFMATDRQTLKEYAVKVLEKRHIIKEKKIKYVNIEKNTLNRLTEHPGIVRLYYTFQDETSLYYVLDLCNGGELLGVLKKTGTFDIECTRFYGAQILDAIDYMHSRGVIHRDLKPENVLLDDQMHVKITDFGTAKLLKDPREDGSTASASGVPDPGRDEDSRAASFVGTAEYVSPELLTHKNACKASDLWAFGCIIYQLLAGRPPFKGGSEYLTFQKIVNLEYEFPPGFPPAARDLVERCLVLEPARRLTVEHIKNHEFFDGQSFGKSLWRTKAPRLRPYVAPPQEPQVIQLNGFSNSANSTNNSRAPSGPQATPSNGSNRPSRIITELPPPTQLDIEWSPVLTKNNERILKLGDLMVVSTPLPSSPHGKEPGEGHKKLSRFFIGSTTKKRQRLVMITSSGRIVLAPAGGEEKRAKQELSLLGSDCSWKTQVDAKGQTVWCVNTGGHHYTFEEAKSSSTPPEGGSAAADWVECLERARDMALSQSMVTSYGGDSGFADMSSQVSSPSSTLGGPGNYSEGFGISDRQGRNHLSKNQGNAEDPAPKRNRFSKRQSRNGLGSAF

SEQ ID NO: 11434 - protein, 371 aa, Oryza sativa
  misc_feature (51)..(51): Xaa can be any naturally occurring amino acid
  misc_feature (74)..(74): Xaa can be any naturally occurring amino acid
  unsure (1)..(371): unsure at all Xaa locations
MDAQYNPRTVEEVFRDFKGRRAGLVRALTADVEDFFRQCDPEKENLCLYGXFPNEHWEVNLPAEEVPPELPEPXALGINFARDGMQEKDWLSMVAVHSDAWLLSVAFYFGARFGFDKNDRKRLFGMINDLPTIFEVVSGKSKAKPPSANNHSNSKSKSSNKTKSSEPRAKQPKPQPQPPVKNEGREEEGGPDDEEGGGGGGGGGREEEHGETLCGACGESYGADEFWICCDICEKWFHGKCVKITPAKAEHIKQYKCPSCSGGNGGGGGVSGNGKQLKICSTKREAIISQYLVRDERSKNTSTHARSPLISDNPYEVISDIRIMLAEQYTTNAREDDFDAKPNDKDNQGEGNVAWGGINKELYSLQVTIQN

SEQ ID NO: 11435 - protein, 73 aa, SINNINGIA CONSPICUA
ISGTNGEVMPGQWEFQVGPSVGIEAGDHIWCARYLLERITEQAGVVLSLDPKPIEGDWNGAGCPTNYSTKSMR

SEQ ID NO: 11436 - protein, 230 aa, Brassica napus
  misc_feature (181)..(181): Xaa can be any naturally occurring amino acid
  misc_feature (184)..(184): Xaa can be any naturally occurring amino acid
  unsure (1)..(230): unsure at all Xaa locations
MASHIVGYPRMGPKRELKFALESFWDGKTTAEDLKKVSADLRSDIWKQMSAAGIKYIPSNTFAYYDQVLDTTAMLGAVPPRYGWNSGEIGFDVYFSMARGNASVPAMEMTKWFDTNYHYIVPELGPEVKFSYASHKAVNEYKEAKALGVETVPVLVGPVSYLLLSKLAKGVDKSFDLLSLXPKXLPIYKEVIAELKGAGATWIQFDEPLFVMDLEGHKLQAFSGAYAELE

SEQ ID NO: 11437 - protein, 362 aa, Burkholderia cepacia
MPKSKRHEPQAESEKISRATQASVGRAGASTDDEDDNADNERDLEARDAEADGGDDEREGRAEASPDVDDFRTLLQAELTADTIQHYLNRISVKPLLTVEEEQRYSRLAKAGEFEARQVMIERNLRLVVSIAKGYLNRGVPLLDLIEEGNLGLMHAIEKFDPTRGFRFSTYATWWIRQSIERAIMNQARTVRLPVHVIRELNQVLRAKRHLEKNSMSTGEAAERREASIDDIAYLTGKTAEEVTDILALNEHTASLDAPLDLDPASSLLDLLPDDQSQSPDAEVQHRELETLTRAWLSRLSDKHRHVIERRFGLNHIEPATLEELADEMGLTRERVRQIQQEALVRLKRFFASNGVRKDAVL

SEQ ID NO: 11438 - protein, 705 aa, Saccharophagus degradans 2-40
MRTQNATITRLVLFLSLSLAISACNGNGPKQNTISEQTPPADQTPAQPDDTAGADTEGTEDPKETPDTENNSPTVRIHYLNSNQAYDNWGLHLWGDAIASSTATNWTSPFALTRAENDYGLYEVPLADPNGTFNFIMHFGDFKNPAYDFSIIPAQFGTDVWLVQDTPADVTNGVAIPFDNEADARAAYESLMANIGNASAALDLTDIEIKDSDTGLAADWVDTAHFAEIYIRGYQDSDGNGIGDIQGLISRLDYLAESGINGIWLMPAMESSDNDHGYATSDYRAIESDYGTMQDFQQLLDEAHARNIAIVMDYVMNHSSNANPLFQDALSSPTNSKRDWYIIRDDKLEGWNTWGSDPWKSNANGYYYAAFSSQMPDFNLRNPDVIRFHQNNLRFWLNMGVDGFRFDAVGVLVENGKDAWEDQDDNHPVINAMKTTIEAYQKRYIVCESPTGYAAFAQQNSCGRAFNFSAGHGILRSVKQGKLDAEFVEQLNASNIDAMPLILANHDAFAGIRVWDQLNGNKTHYKLAAASYLLASRNPFTYYGEEIGLAGAANLSGDWSIRTPMSWNNDPQNAGFSTAQPFRELSANVMTQNVEAQLGKTDSLLAYYRSIYDLRNAHPVIANGNLNVQGQANDNALVLVRTSDDAQAVILFNYSAQATSKSVSGLTASANYSGALGASNNVSANASGTATVTIPAQTAVVYIRQ

SEQ ID NO: 11439 - protein, 336 aa, Streptococcus pneumoniae TIGR4
MAILVTGGAGYIGSHTVVELLNLGKEVIIVDNLSNSSILVLDRIEAITGIRPVFYELDVCDKQALRKVFEQESIDAAIHFAGYKAVGESVQKPVMYYKNNIMSTLALVEVMSEFNVKKIVFSSSATVYGINNQSPLIETMQTSATNPYGYTKVMLEQILKDVHVADSEWSIALLRYFNPIGAHESGLIGEDPSGIPNNLMPYIAQVAVGKLSELSVFGNDYDTLDGTGVRDYIHVVDLAIGHIKALEKVSEKTDVYIYNLGSGEGTSVLQLVNTFESVNKIPIPYKIVPRRSGDVATCYANADKAYKELNWRTTKSIEDMCRDTWNWQSKNPNGYN

SEQ ID NO: 11440 - protein, 359 aa, Staphylococcus aureus subsp. aureus MW2
MMTIKVGIIGCGGIANGKHMPSLQKVENVEMIAFCDVDISKAASAAEAYGTDNAKVYDDYKALLKDDTIDVIHVCTPNDSHCEITVAGLHAGKHVMCEKPMAKTTAEAQKMIDTAKSTGKKLTIGYQNRFRADSQFLHQAAQRGDLGDIYFGKAHAIRRRAVPTWGVFLDEEAQGGGPLIDIGTHALDLTLWMMDNYEPESVMGSTFHKLNKQHHAANAWGSWNPDEFTVEDSAFGFIKMKNGATIILESAWAINSLEVDEAKCSLSGTKAGADMKDGLRIHGEDMGTLYTKHVELENKGVDFYEGNEVDEAEEEAKAWIDAVVNDTEPVVKPEQAMVVTKILEAIYQSAKSGKAIYFE

SEQ ID NO: 11441 - protein, 325 aa, Pseudomonas aeruginosa UCBPP-PA14
MAKRIQFAAYGGPEVLEYRDYQPAEPGPREVRVRNRAIGLNFIDTYYRSGLYPAPGFPSGLGSEGAGEVEAVGSEVTRFKVGDRVAYATGPLGAYSELHVLAEEKLVHLPDGIDFEQAAAVMLKGLTTQYLLRQTYELRGGETILFHAAAGGVGLFACQWAKALGVQLIGTVSSPEKARLARQHGAWETIDYSHENVARRVLELTDGKKCPVVYDSVGKDTWETSLDCVAPRGLLVSFGNASGPVTGVNLGILSQKGSLYVTRPTLGSYADTPEKLQAMADELFGLIERGDIRIEINQRFALAEAARAHTELAARRTTGSTVLLP

SEQ ID NO: 11442 - protein, 324 aa, Triticum aestivum
MAMAWWKNGALVAAATLAVAAVVCAGVAAAASKFDDVVQPSWANDHVLYEDDLLKLRLDSSSGGGFASKNKFLYGKATADLKLVPGDSAGVVTAFYLSSAGDKHNEFDFEFLGNVTGEPYLVQTNLYIDGVGNREQRIDLWFDPTADFHTYAVLWNPSQVVFLVDDTPIRVYDNKNASATKPKGHHRHPNNATTAATQTASAFPSPQPMAVYSSIWNADDWATRGGLVKTDWSHAPFVATFRDVRVEGCAWAANASDSDAGEVARCSGSSWGKEGRYWWKEKDMQELSVHQSHQLVWARAHHLVYDYCVDTDRFPVQPPECAGR

SEQ ID NO: 11443 - protein, 356 aa, Citrullus lanatus
MQPIPDVNQRIARISAHLHPPKSQMEESSALRRANCRAKGGAPGFKVAILGAAGGIGQPLAMLMKMNPLVSVLHLYDVVNAPGVTADISHMDTGAVVRGFLGQQQLEAALTGMDLIIVPAGVPRKPGMTRDDLFKINAGIVKTLCEGIAKCCPRAIVNLISNPVNSTVPIAAEVFKKAGTYDPKRLLGVTMLDVVRANTFVAEVLGLDPRDVDVPVVGGHAGVTILPLLSQVKPPSSFTQEEISYLTDRIQNGGTEVVEAKAGAGSATLSMAYAAVKFADACLRGLRGDAGVIECAFVSSQVTELPFFASKVRLGRNGIEEVYSLGPLNEYERIGLEKAKKELAGSIEKGVSFIRS

SEQ ID NO: 11444 - protein, 523 aa, Oryza sativa
MAGGGGGGGGAAPAPKHDELTPHPVKDQLPGVSYCITSPPPWPEAILLGFQHYLVMLGTTVIIPTALVPQMGGNNSFFGTRLPAVIGGSYTFVVPTISIILAGRYANEPNPHTKFLRIMRGTQGALIVASALQIIFGFSGLWRNVARYLSPLSAAPLVMLVGFGLYELGFPSVKLTAQVAKCVEIGLPELILLVIFAMYLPHAIHMMKSIFDRFAVLFTIPIVWLYAYLLTVGGAYRNAPPKTQFHCRTDRSGIIGGAPWIRVPYPFQWGAPTFDAGEAFAMMAASFVALVESTGAFIAVSRYASATPLPPSVLSRGIGWQGIGILLDGLFGTGNGSSVSVENAGLLALTRVGSRRVVQISAGFMIFFSILGKFGAVFASIPPPIFAALYCIFFAYVGSAGVGFLQFCNLNSFRTKFILGFSVFMGLSVPQYFNEYTSVAGYGPVHTHSRWFNDIVNVIFSSKAFVAGFVAYLLDNTIHRHDSSVRKDRGHHWWDKFRSYRTDTRSEEFYSLPFNLNKFFPSV

SEQ ID NO: 11445 - protein, 534 aa, Methanosarcina mazei Go1
MKYIVVTGGVMSGLGKGITIASIGRNLKNKGYKVTAIKIDPYINIDAGTMSPYQHGEVFVLRDGGEVDLDLGNYERFLDTELTRDHNITTGKVYQEVIAKERRGDYLGKTVQIIPHITNEIKNKIRKVAARSGADVCLIEIGGTVGDIESMPFLEAVRQMHREEPSENIVFIHVTLVMEDLQGEQKTKPTQHSVKELRALGLSPEVIVTRSKTPLQESAKEKIALFCDVPQELVISAHDAGDIYEVPLEIEEQGLTTQLMKHLRLESGVDDGGWREMVARMKSTTDEVKLAIVGKYTNLEDSYLSILEAVKHGGIDNACRVEVNMVEAETLEEDLVEVEKLKQYDGILIPGGFGGRGTEGKMLAIKFARENDIPFLGICLGMQLAVIEFARNVANLENANSTEFDEDTPYPVIDILPEQTGVADMGGTMRLGDYDAILKEGSFATKLYGTNYIVERHRHRYEVNPEFVDRLESFGIVFSGKNKNRMEIAEIPGKRFFFASQFHPEFKSRPGRPSPPFKGLVRAMCKYRKEREVQ

SEQ ID NO: 11446 - protein, 605 aa, Triticum monococcum
MAALVTSQLATSGAVLGITDRFRRAGFQGVRPRSPADAALGMRTVGASAAPKQQSRKAHRGTRRCLSVVVRATGSGGMNLVFVGAEMAPWSKTGGLGDVLGGLPPAMAANGHRVMVISPRYDQYKDAWDTSVVSEIKVADEYERVRYFHCFKRGVDRVFVDHPCFLEKVRGKTKEKIYGPDAGTDYEDNQLRFSLLCQAALEVPRILDLNNNPYFSGPYGEDVVFVCNDWHTGLLACYLKSNYQSNGIYRTAKVAFCIHNISYQGRFSFDDFAQLNLPDRFKSSFDFIDGYDKPVEGRKINWMKAGILQADKVLTVSPYYAEELISGEARGCELDNIMRLTGITGIVNGMDVSEWDPTKDNFLTVNYNVTTALEGKVLNKEALQAEVGLPVDRKVPLVAFIGRLEEQKGPDVMIAAIPEIVKEEDVQIVLLGTGKKKFERLLKSVEEKFPSKVRAVVRFNAPLAHQMMAGADVLAVTSRFEPCGLIQLQGMRYGTPCACASTGGLVDTIVEGKTGFHMGRLSVDCNVVEPADVKKVVTTLKRAVKVVGTPAYHEMVKNCMIQDLSWKGPAKNWEHVLLELGVEGSEPGIVGEEIAPLAMENVAAP

SEQ ID NO: 11447 - protein, 237 aa, Arabidopsis halleri subsp. gemmifera
YILLILFTFSVSPAIATAPEHCDSGSENPCINKAKALPLKIVAIVAILTTSLIGVTSPLFSRYISFLRPDGNGFMIVKCFSSGIILGTGFMHVLPDSFEMLSSKCLSDDPWHKFPFAGFVAMLSGLVTLAIDSITTSLYTGKNSVGPVPDEYGIDQEKAIHIVGHNHSHGHGVVLATKDDGQLLRHRVIAMVLELGILFHSVVIGLSLGATNDACTIKGLIIALCFHHLFEGMGLGG

SEQ ID NO: 11448 - protein, 919 aa, Polaromonas sp. JS666
MLQGWVIISVSFAYLGVLFAIAYYGDKRADAGRSIIANPAIYALSLAVYCTTWTFYGSVGRAASSGIGFLPIYLGPTLIAGLWWFVMLKIIRISKANRITSIADFVASRYGKSQLLGGMVTVIAVVGVVPYISLQLKAVSNSFTILLHYPDIVMPTKATAQALWQDSALYIAMILAAFTVLFGTRHLDATERHEGMVAAIAFESVVKLLAFLAVGLFVTFGIFNGMGDIFQRADLVPKLKSLMTVADTGSSYGSWWSLTILSMLSVMLLPRQFQIAVVENVNEQHLRKAVWLFPLYLLLINIFVLPIALGGMLHFPAGNVDADTFVLTLPMAQRHESLTLFVFIGGLSAATGMVIVETIALSTMICNDLVMPLALRIKALRLNERQDLSGLLLGIRRWAIVAILLLGYIYFRAAGDAYALVSIGLISFAAVAQFAPAIFGGIYWKGGTRNGAMAGLLGGFAVWGYTLLLPSFAKSGWLPSTFLREGLFGLELLRPQQLFGLSGLDEISHSLFWSLLVNIGFYLGVSLRGQPSVVETRQATAFVDVFRHTASAADGSRLWRGSAQVQDLLPLIGRFLGPVRAQEAFLTYARGRGLSSVAELKADADLVHYAETLLAGALGGASARVMVASVVQEEPLGIDEVMNILDEASQVRAYSRELELKSQELEAATAKLRAANDRLKELDRMKDDFMSTVTHELRTPLTSIRALSEILLETPQASLAERQKFLGIIVKEAERLTRLINQVLDMAKIESGNAEWHTSELDLREVIEESVAATYATFNDRHVTLTQDLASHTPRIRADRDRLIQVMLNLLSNAVKFCHPTRGQVHVSLRQEPGGLRVDVRDNGSGISAANQKIIFERFRQVGDTMTNKPQGTGLGLPISRHIIERFGGRLWVQSEPGNGATFSFTLPFSQGTGAAAPQ

SEQ ID NO: 11449 - protein, 155 aa, Populus nigra
GASDTVRTYHVNLSLFTSIPDFWGIGQLFPIVPIHRLDQRPGARGILSDLTCDSDGKIDKFIGGESSLPLHEIEGGGAGGNGGKYYLGMFLGGAYEEALGGIHNLFGGPSVVRVSQSDGPHSFLVTQAVPGPSCGDVLRVMQHEPELMFETLKHR

SEQ ID NO: 11450 - protein, 609 aa, Zea mays
MAATMGSISANGSYQTNRPSALKQAPHMQFQQCCNGGLRFLSKHSQSTRSKIQVAKRRATDNGIHPKTTGHRAPIVCSAGMTIVFVATEVHPWCKTGGLGDVVGGLPPALAAMGHRVMTIAPRYDQYKDAWDTSVLVEVNIGDTVETVRFFHCYKRGVDRVFVDHPMFLEKVWGKTGAKLYGPTTGTDYRDNQLRFCLLCLAALEAPRVLNFNNSEYFSGPYGEDVVFVANDWHTAILPCYLKSMYKPNGIYKNAKVAFCIHNIAYQGRFARADFDLLNLPDSFLPSFDFIDGHVKPVLGRKLNWMKAGIIESDLVLTVSPHYVKELTSGPDKGVELDGVLRTKPLEIGIVNGMDVYEWDPSTDKYISVKYDATTVTEARALNKESLQAEVGLPVDSSIPVIVFVGRLEEQKGSDILIAAIPEFVGENVQIIVLGTGKKKMEEELTQLEVKYPNNARGIAKFNVPLAHMMFAGADFIIVPSRFEPCGLIQLQGMRYGVIPICSSTGGLVDTVEEGVTGFHMGSFNVECETVDPADVTAVASTVTRALKQYDTPAFHEMVQNCMAKDLSWKGPAKKWEEVLLGLGVEGSRAGIDDAEEIAPLAKENVATP

SEQ ID NO: 11451 - protein, 308 aa, Candida albicans SC5314
MNIVKNLFKGTTTNNLDKEIQQKGFEISQCSEICESCTSKFPKHLKFEGESEGTSLWNTTKPYGMHIIIATGKKDWSHDAINEDGKKKDTLKYKIGKWAENNTNSPLGTIKVNVSSMSSDELYINENYKLEKQGDLLILPYFLNIKGITIDEVDTYLNELESLLINSTNNNDSTIIIDEIITKLPKISPNLNQSFVFFCSHTTRDKRCGITAPIMKREIDNYLQELDLIRNFGDYRPNGIQTEFINHIGGHKYAANVIIYLKKSGKNIWLGLCKPNNIKPIVDECILGDGKVWPNKVRLLQKFDPIEW

SEQ ID NO: 11452 - protein, 60 aa, Malus x domestica
GWGTNEDLVISILGHRNAAQRKAIRKTYADAYGEDLLKELEKELTSDSERIVLLWTLDPP

SEQ ID NO: 11453 - protein, 698 aa, Oryza sativa (japonica cultivar-group)
MKEVGEVEEVRCLDPQLWHACAGGMVQMPAPRSRVYYFAQGHAEHADGGGGAAAAAAELGPRALPPLVLCRVEGVQFLADRDSDEVYAKIRLAPVAPGEAEFREPDELCPLGAAGDAAEPSPEKPTSFAKTLTQSDANNGGGFSVPRYCAETIFPKLDYRADPPVQTVLAKDVHGVVWKFRHIYRGTPRRHLLTTGWSTFVNQKKLVAGDSIVFLRTRHGELCVGIRRAKRMACGGMECMSGWNAPGYGGGGFSAFLKEEESKLMKGHGGGGYMKGKGKVRMADVVEAASLASSGQPFEVAYYPRASTPDFVVKAASVQAAMRIQWCSGMRFKMAFETEDSSRISWFMGTISSVQVADPNRWPNSPWRLLQVTWDEPDLLQNVKCVSPWLVELVSSIPPIHLGPFSSPRKKLRVPPHPDFPFEGHLLNPIFHGNPLGPSNSPLCCYPDTAPAGIQGARHAQFGLPLTDHQLNKLHLGLLHSGSFNRLDAITPPSRISKGFVVSSAPAHDNISCLLSISTPQVAEKSDDRKTTPHIMLFGKAIFTEQQITSSGSTETLSPGVTGNSSPNGNAHKTGNASDGSGSSICIGFSSQGHEASDLGLEAGHCKVFMESEDVGRTIDLSVFGSYEELYGRLADMFGIEKEEIINHLHFRDAAGVVKHPGEVPFSDFMKAARRLTIIAGDRERIERPLIECLVEQA

SEQ ID NO: 11454 - protein, 159 aa, Dactylis glomerata
MEGRVFGLETPLMTALQHLLDIPDGEAGNAGGEKQGPTRAYVRDARAMAATPADVKELPGAYAFVVDMPGLGSGDIKVQVEDERVLVISGERRREEKEDAKYLRMGAPDGKLMRKFVLPENADMEKISAVSRDGVLTVSVEKLPPPEPKKPKTIQVQVA

SEQ ID NO: 11455 - protein, 205 aa, Neisseria meningitidis
MPYTEDMRPGDTANPYGASKAMVERMLTDIQKADPRWSMILLRYFNPIGAHESGLIGEQPNGIPNNLLPYICQVAAGKLPQLAVFGDDYPTPDGTGMRDYIHVMDLAEGHVAAMQAKSNVAGTHLLNLGSGRASSVLEIIRAFEAASGLTIPYEVKPRRAGDLACFYADPSYTKAQIGWQTQRDLTQMMEDSWRWVSNNPNGYDD

SEQ ID NO: 11456 - protein, 169 aa, Nicotiana tabacum
MASQSSKPQSIYDFTVKDAKGNDVDLSIYKGKVLIIVNVASQCGLTNSNYTDMTEIYKKYKDQGLEILAFPCNQFGGQEPGSIEEIQNMVCTRFKAEYPIFDKVDVNGDNAAPLYKFLKSSKGGFFGDSIKWNFSKFLVDKEGNVVDRYSPTTTPASMEKDIKKLLGVA

SEQ ID NO: 11457 - protein, 175 aa, Brassica napus
MGKKRKSDASRLDEVDRTMYGAFRGAANSLSQLYTHAMNHQRVSFLAGERRGLEKLHQWIVRQEEEGTRVSTDDITTYLQNELEYEPEETSTPAPMQEFHQIHTQFAPPSVHTSSAAHAPPSHIAQHYDFNQEKVFLTQPNGLSSPVRRTLQDFNLREAEPGNHHHPNSTGQGFF

SEQ ID NO: 11458 - protein, 483 aa, Anaplasma marginale str. St. Maries
MFSVIKSCARMLRIVTAILCHGILPYTGFLSLRLRSKTRAERLCILLQSLGPTFIKFGQFLAARVDIVGEDAAKNLLRLCDALPPFSFDDVVKTIECDLRRQMGSIFREFDTVPVAAASVAQVHKAKTLDGELRAVKVLRPGVEQDFRRDIRLMRLLARIFGGCRGLQRFQLGQLVEMFASICRLELDLRFEAANAEELRENTKADRGIFCVPKVDWNCTSKRVLTLQWVDAVPIYEIDKLQDRESLARNLILCFCNQVYKDRFFHADMHPGNLMVDSNNRIVAVDFGIMGRIDEETCVYISEIFIGFLSRDYRRVAEAHLDAGYIPGRCDEFITACRAIWEPIADMSAQGFSMAELLTQLFMVTSEFNMKVQPQLLLLQKTMVLVEGICRQLAPDMNLWKIAELWVQEHGDNHGYTERFKKSQVYRSMRGMRMLASKIDRSLDIIISHDGYRQGRGQTTQLGAAPFLMLVIVGLLVVLVIVK

SEQ ID NO: 11459 - protein, 268 aa, Pseudomonas aeruginosa UCBPP-PA14
MSRLQTRFAQLKQENRAALVTFVTAGDPDYASSLEILKGLPAAGADVIELGMPFTDPMADGPAIQLANIRALDGGQTLARTLQMVREFRSGDSETPLVLMGYFNPIHHYGVERFIAEAKEVGVDGLIVVDLPPEHNEDLCHPAQAAGLDFIRLTTPTTGDQRLPTVLEGSSGFVYYVSVAGVTGANAATLEHVEEAVARLRRHTDLPIGIGFGIRSAEHAAAVARLADGVVVGSALIDRIAKARDNAQAVKDVLALCGELAEGVRNAR

SEQ ID NO: 11460 - protein, 605 aa, Aegilops speltoides
MAALVTSQLATSATVLGITDRFRHAGFQGVRPRSPADAPLGMRTVGASAAPKQQSRKAHRGTRRCLSMVVRATGSGGMNLVFVGAEMAPWSKTGGLGDVLGGLPPAMAANGHRVMVISPRYDQYKDAWDTSVVSEIKVADEYERVRYFHCYKRGVDRVFVDHPCFLEKVRGKTKEKIYGPDAGTDYEDNQLRFSLLCQAALEAPRILDLNNNPYFSGPYGEDVVFVCNDWHTGLLACYLKSNYQSNGIYSTAKVAFCIHNISYQGRFSFDDFAQLNLPDRFKSPFDFIDGYDKPVEGRKINWMKAGILQADKVLTVSPYYAEELISGEARGCELDNIMRLTGITGIVNGMDVSEWDPTKDNFLAANYNITTALEGKALNKEALQAEVGLPVDRKVPLVAFIGRLEEQKGPDVMIASIPEILKEEDVQIVLLGTGKKKFERLLKSVEEKFPSKVRAVVRFNAPLAHQMMAGADVLAVTSRFEPCGLIQLQGMRYGTPCACASTGGLVDTIVEGKTGFHMGRLSVDCNVVEPADVKKVVTTLKRAVKVVGTPAYHEMVKNCMIQDLSWKGPAKNWEDVLLELGVEGSEPGVIGEEIAPLAMENVAAP

SEQ ID NO: 11461 - protein, 424 aa, Glycine max
MATRYMTLLTSAKTLFRRLQPPVQDSRCAFHLIRTLHSFVARDQLRRPPPPPPFSGTFRGMVSAPNPNFDEAASLALDNRVPATVITGFLGSGKTTLLNHILTSQHGKRIAVIENEFGEVDIDGSLVASHSSASEEIIMVNNGCLCCTVRGDLVKMLLELVRKKRDKFDHIVIETTGLAKPAPVIETFCSDELVSQHVKLDGVVTLVDCKHAMKHLNEVKPRFVVNEAVEQVAYADRIILNKIDLVTESELNILTKKIKHINGMAQIKQAKFGSVDMDFVLGVGGYDLERIESEVPGECPSSSSHQDDSGHEHKGHHHHHHDHVHDSAVSSVSIVAEGTLDLDEVDDWLERVIEEKGDDLYRMKGVLSVDSSDQRYVFQGVHSMLDGCPGKTWEPNEKRINKLVFIGRNLDETALKKGFKGCLV

SEQ ID NO: 11462 - protein, 107 aa, Brassica napus
PPPFYRDPILPPPSPPPPSGNRISPAVLFVIVILAVLFFISGLLHLLVRFLIKHPSPASASASASRSNRYPEISTSDALQRQLQQLFHLNDSGLDQAFIDALPVFHY

SEQ ID NO: 11463 - protein, 132 aa, Leptospira interrogans serovar Copenhageni
MMNYEVNKSDEDWKKELTPEQYRILRQKGTEMAFTGALYKNQDKGTYVCAACGAVLFSSDTKYESGSGWPSFYQPVKDGVVDKQKDSSHGMERTEILCSKCGGHLGHVFNDGPRPTGLRYCINSASLKFQKE

SEQ ID NO: 11464 - protein, 371 aa, Bacillus cereus ATCC 14579
MTVIRGLEGVVATTSSVSSIIDDTLTYVGYNIDDLAENATFEEVVYLLWHRKLPNEKELAEFNEIVSEYYKVPGEILTYLKQVDLKIAHPMSVLRTAISMLSLYDESAEIMDEKSNYLKAVKLQAQVGTLVAAYARIRKGLDIVEPRKDLSLAANFLYMLNDREPNEVEIEAFDKALVLHADHELNASTFTARVCVATLSDVYSGITAAIGALKGPLHGGANENVMKMLTEIGEEENVESYIHNALQNKVKIMGFGHRVYEQGDPRAKHLREMSKRLCVLLGEEKWYNMSIKIEDIVTKEKGLPPNVDFYSASVYHCLGIDHDLFTPIFAISRMSGWLAHILEQYENNRLIRPRADYNGPTHQVYVPIAQR

SEQ ID NO: 11465 - protein, 351 aa, Brassica napus
  misc_feature (256)..(256): Xaa can be any naturally occurring amino acid
  unsure (1)..(351): unsure at all Xaa locations
MSGSEEMSKALNATTPGFPDIPSTIVRATIVQASTVYNDTPKTIEKAEKFIAEAASDGAQLVVFPEAFIAGYPRGYRFGIGVGVHNEAGRDCFRRYHASAIVVPGPEVDKLAEIARKYKVYLVMGAMEKDGYTLYCTALFFSSEGRFLGKHRKVMPTSLERCIWGYGDGSTIPVYDTPLGKLGAAICWENRMPLYRTSLYGQGIELYCAPTADGSKEWQSSMMHIAIEGGCFVMSACQFCVRKDFPDHADYLFTDXWYPEQHEEAIVSQGGSVIISPLGKILAGPNFESEGLITADLDLGDIARAKLYFDVVGHYSRPDIFNLRVNDNQNKPVTFVSKSVKAEDDSEPQNK

SEQ ID NO: 11466 - protein, 580 aa, uncultured bacterium
MLWQALTAVRDLGRLHDIASILIRYGFGDMVRRMGLANALERAGRALHWNEAEELAHLPPPARVRRALEEMGPTFVKLGQVLATRVDLFEPEWIAEFGKLQDSAPPAPWADVRQQLIEDLGAPPEEVFAAFDPVPLAAASVAQVYRARLEDGSEVVVKVRRPGIRPVIEADLRWLARLAEIAEGESPELRAFRPQEVVRQFTQSLRRELDFAGECRNAERIAENFAGFSDQDVPADATAPEPSATPPIIVIPRVYWQWTGERVCVQEFINGIPGRNLAAVDTAGLDRKILARRGAHAVLKMIVEDGFFHADPHPGNVFYLPGNRIAFIDFGMVGRLTEERRDQLIRLLLGLVKHEPRRVADVMLDWTGDGAIDEDGLMLEIQAFVDQYHGVALKQLRLGSMLSDLMAIVRQHRLALPSDLSLLVKAFITLEGMGRELDPDFDMAGEAMPLLEQAMRARYTPAAIIKRGWRAAGEAFSLVAGLPQDLSRLLRAARRGRLEIHIDVTHLKRVGNQLDSAANRLVVGIVVAALIIGSSIVMTVPGGPSLLGLPFFGLIGFLGAVFGGVWLLLSIWKSSRADRE

SEQ ID NO: 11467 - protein, 994 aa, Candida albicans SC5314
MSTIPSQVEINFNKIHQRSNSSSSTSSYRIPSGNSCIPRTVEMPSLPPTSTHHQHQQMPSSSSHAHIAKKIHREVRFGAYILGSTLGEGEFGKVKLGWRKDGKHPSQVAIKLIKRSTITKDSDSEIKIHREINSLKLLNHPNIVNLVEVMKSGKYIGIVLEYASGGELFDYILQHKYLKENVAKKLFAQLVSGVDYMHAKGLIHRDLKLENLLLDKHRNVIISDFGFVNSYNRDKNDLMKTSCGSPCYAAPELVLSQTAYEGRKVDIWSLGVILYAMLAGYLPFDDDPENEDGSDIIKLYHYICKTPLTFPEYVSPLARDLLRKIIVSDPKKRISIDDIRNHPWLSSHANLLSIRQPEWDKVHSEKQQPIAVEPPQPNKRYSMINERTNSSSLMSPAPRVTHTQPLSSHARSYSSTSISLLYSSPSATPSMANAVTNGEGATTTTTNGSINESNDTLQLSGTPSPKKPSTVSPVRGHQKSASISNSYSSASIALKAVVHEENRLHNHQQSQQYIPRSSTISTIVESPTKANTATETETTDGHKILLPPPSKDAQKLPHAAKKPRPTSYHPSSMSSALIHNNQNPTDVLKMPSPINFPMTQFISTSPPKSNGSLNDSGNFTNCSPKATSRRNSVVTHVHVNGVLSKENLIHSSSSPDNKRNSVLSYLEDKIDTLELTESHSPSKNTFEEIVDAAIATPEINQVPVFDSQTSPNGIGLDIKHKEFDETSLVVEKKSKETVSDSKSEESTKETQQQENVVMYEPIVPVEEYIKKPEEVNSVEAKQPEEVKSEDKSLQGQKSQQQQQQPEKHSADIGKTKVDLKKSASQKKKVKEESIKKQKDVDSKPIERRHTIAARRHHNDENKENKDVKKRNRFSLLSFYSSYNSSNSNVSLATSKVPSNSENNTTVLKPTSMNTTRKVLEPSNETNIMRKETKQTNSNGSTTSKSTTSSSSSSAPAASSSSSSSTSKRASTATKETSAARKVMDFFKRRSVRVG

SEQ ID NO: 11468 - protein, 756 aa, Magnetospirillum magnetotacticum MS-1
MTPVLRMAVLSGVKASVQLHLRLGGAVDAVDDKGRTPLILAASRGHAEICRLLLDAGADLARIDMEGKDALQAATAKGHHAVAELIRASAASLSAPTPVPVAVVDDPDARDAGGGVRAGPPTSEPVPEEAETEPVVDVIEAVEPDPVPEAAPVGAVAEPSTAAPEGVAGELVPADVSSFSHSRHDAEEFDLSGWEEEKDSPPPPADPTCADRADELQRRLSLHVPIDLDAGWDDVDIDLPDILVSVRRRAKLDGDEEAALRELVLVAVADGRIRGEFLALVAPRDQDDPDVPDPDCLANLRVMLGDMGVVVDDDPFSPDRPSETGASDDEDDRFQDEVAEGLAFLRNLNSNRADPLTHYIGGLPRDRLTRDDEASLAMEIERGTKAALAAVAMSPAAVSELLTAVEAVIRGETPPQDVLESDDEEREDDDDAVLDEDGGPGVDGDDMLTGHPLQPELMFRLEAIRDLCRRLSQGQDGGFAERLGDRLAALGLSHAFVARLRRAVETDPSGGEARRRMEAGLETARRARERFALANLKLVVWGAKKFGGLTWPDRIQEGNLGLLKAVERFDHRRGAKFSTYATWWIKQAVTRAVADKGRTIRIPVHAQEAMRKLRRAQNEVFALTGREALPEEVGELTEIPLARVRRFLAVAEEPASLDVEEVGLHAAEMASREPDPEERLAVAEIKAMVRGQLELLPPREATVIRLRFGIGCEREYTLEEIGQQFGVTRERIRQIEAKALRKLSHPGRIKALQGCR

SEQ ID NO: 11469 - protein, 276 aa, Zea mays
MAAAQAISKGSVVSPCGNRAAPGLLARRRGAVAARMAPSAARIGGFWRKNAFPGGRLTLRTRRSRAASPAQMNMNLALGKSMRWWEKGLQPNMREIESAQDLVDALTNAGDRLVVVDFFSPGCGGCRAFHPKICQFAEQNPDVLFLQVNYEEHKSMCHSLHVHVLPLFRFYRGAQGRLCSFSCTNTAIKKFRDALAKHKPDRCRLGPTRGLEESELLALAANKDLQFTYAKEEPELIPRGDAPGEVVAPEPAKLPAAPKPLVRLGSEERSLVSSGR

SEQ ID NO: 11470 - protein, 199 aa, GIBBERELLA ZEAE PH-1
MALDVPKPRAHVQSTCHLPWAPTVTRAAASQVRTSQVKSALADRSSVWFIATLESNTLTASTTTITVNMRSKFKDEHPFEKRKAEAERIRQKYADRIPVICEKVEKSDIATIDKKKYLVPADLTVGQFVYVIRKRIKLSPEKAIFIFVDEVLPPTAALMSSIYEEHKDEDGFLYITYSGENTFGEAHDPISGLKYTSER

SEQ ID NO: 11471 - protein, 335 aa, Nostoc sp. PCC 7120
MKAVLMTAPGNPEVLQLQEVPNPGVPVGSTELLVRLVAAGINPIDTKLRKRGTFYPEQMPAILGCDGAGVVEAVGAGVQGFRVGDAVYFCNGGLGGHQGNYAEYTIVDERFAAHKPASLTFAEAAAAPLVLITAWEALYERGRLEPKERVLIHAGAGGVGHVAIQLAKLKGAIVSTTVGSEDKANFVKQLGADHVILYKNTDFAQAALDWTNGEGVDLAFDTVGGETFHKTFPAVRIYGDIVTILEPDANTVWKVARNRNLRIGLELMLTPMLLNLVEAQQHQAEILTECADWIDQGKLKIHVSHKFPLQDAAKAHQLLESGSIAGKIVLLISDE

SEQ ID NO: 11472 - protein, 385 aa, Thermoplasma acidophilum DSM 1728
MKQIQLSRNVVDDISFGAIVKIRDQLLEMQRAGKKVYRLESGDPSFPIPEHVRLAIEDALKKNRTHYTDSTGIPELRKAIAEKLVKKNGIRSATPENVLVSNGGMNALYITFRSLIAPGEKVIIPDPMWTEIAEIIKLADGIPIRIPVERYVEEMRKYENDDRVRAVFINSPHNPTGYVFGEKQISDIIDFAESKGIFIVSDEAYEDVIFDGLKHLSPGSLYDDTISLFSMSKSYAMSGLRIGYAHTSNEILYDRMKKLLRCTINGVNSATQYGAVAALTGPQDYIGEMRKEYQKRRDIIYEAVSESRYLEPIKPHGTFYLWNRIKEYPPGVSDSWGMTSYLLEKTGVGSSPGPVFGPAGEGYIRFAFSAATDHIQEAADVLRNF

SEQ ID NO: 11473 - protein, 718 aa, GIBBERELLA ZEAE PH-1
MDAIKQTFKRCKEQNRSALVTYVTAGYPKPEDTPNILLALEKGGADVIEVGAPFTDPIADGPTIQTANTIALNNGVTIESTLGMVKEARSRGLKAPVMLMGYYNPLLSYGEERLLQDCHSCGVNGFIVVDLPPEEAVSFRKLCNKGRLSYVPLIAPSTSDTRMKILCQLADSFIYVVSRMGVTGATGTLNANLPDLIERVKKYSGNKPAAVGFGVSTREHFLSVATLSDGVVVGSQIITTIKNAEPGQALSDIEKYCAYLSGRDSGDSNTREVGLVEAVAGAREPSGDNVTVSDTITDADITAEEDSALVAQLAALHGKIPERFGEFGGQYVPESLMDCLSQLEEGFNAIKDDPSFWEEYRSYYEYMGRPGHLHLAERLTEYAGGANIWLKREDLNHTGSHKINNALGQLLLARRLGKTRIIAETGAGQHGVATATVCAKFGMECTVYMGAEDVRRQALNVFRMRLLGAKVVAVEAGSKTLRDAVNEALRAWVVDLDTTHYIIGSAIGPHPFPTIVRTFQSVIGRETKEQMLEKRGKLPDAVVACVGGGSNAVGMFYPFENEPSVKLLGVEAGGDGVDTPRHSATLTGGSKGVLHGVRTYVLQDKHGQISETHSVSAGLDYPGVGPELSSWKDNERAKFVAATDSEAFLGFKLMSQLEGIIPALETAHGIYGAIELAKTMKKDEDIVICVSGRGDKDVQSVADELPKLGPKIGWDLRF

SEQ ID NO: 11474 - protein, 322 aa, Saccharomyces cerevisiae; identical to SEQ ID NO: 1344

SEQ ID NO: 11475 - protein, 456 aa, Triticum aestivum
MVLRRFAWPFGGQRASFCGSFTGWRECPMGLVGTEFQVVFDLPPGLYQYRFLVDGVWRCDDTKPIVRDEYGLISNEMLVTLVENNTHPAVQLEPPPIRRMNLDEGTILTTMPPEPPSRNSGMQIAVFRHRVSEILLHNTIYDVVPVSSKIAILDARLPVKQAFNIMHDEGLALVPLWDDGQGTVTGMLTASDFVLILILRKRNIRVLGHEELEMHSVSAWKEAKLQYYGGADVAGMQRRPLVHVKDSDNLRDVALTIIQNEISSVPIFKSSTDISGIPLLNLATLPGILKFLCSKLQEQPEGYPILRNQISSIPIGTWSQHTGRASTRQLRTSGLSAPLITCLDFLLEDRISSIPIVDDNGSLLDVYSLSDIMALAKNDVYACIELEQLTVENALELQYQVNGRRQCHTCLSTSTLLEVLDQLSVPGVRRLVVIEPMTRFVQGIISLRDAITFLLG

SEQ ID NO: 11476 - protein, 492 aa, Suaeda maritima subsp. salsa
MDPYKFRPSSANNSPYFTANSGAPVWNNNNSLTVGHRGPILLEDYHLVEKLANFDRERIPERVVHARGASAKGFFEVTHDVSHLTCADFLRSPGVQTPVIVRFSTVIHERGSPETIRDPRGFAVKFYTREGNFDLVGNNFPVFFIRDGMKFPDMVHSLKPNPKSHIQENWRIMDFFSHHPESLHMFTFLFDDIGIPANYRHMEGSGVNTYTLINKAGKTYYVKFHWKPTCGVKSLLEDEAIKVGGANHSHATQDLYDSIASGNYPEWKLFIQTIDPADEDKFDFDPLDVTKTWPEDILPLQPVGRLVLNKNIDNFFAENEQLAFCPSIVVPGVHYSDDKLLQTRIFSYSDTQRHRLGPNYLQLPVNAPKCSHHNNHYDGFMNFMHRDEEVDYFPSRYDPVRHAERYPIPSNVLNGCREKQCIPKENNFKQPGERYRSMDPARQERFICRVVDALSDPRVTHEIRSIWISYWSQADKSLGMKVASRLNVRPTM

SEQ ID NO: 11477 - protein, 73 aa, SINNINGIA MICANS
ISGTNGEVMPGQWEFQVGPSVGIEAGDHIWCARYLLERITEQAGVVLSLDPKPIEGDWNGARCHTNYSTKSMR

SEQ ID NO: 11478 - protein, 400 aa, Triticum aestivum
MDSLRLRPSSLRSAPGAAAARRRDHILPSFCSIQRNGKGRVTLSIQASKGPTINHCKKFLDWKYSNHRISHQSINTSAKAGQSLQPETEAHDPASFWKPISSSLDAFYRFSRPHTIIGTALSIVSVSLLAVESLSDISPLFLTGLLEAVVAALFMNIYIVGLNQLFDIEIDKVNKPTLPLASGEYSPATGVAIVSVFAAMSFGLGWVVGSPPLFWALFISFVLGTAYSVNLPYFRWKRSAVVAALCILAVRAVIVQLAFFLHIQTFVFRRPAVFSKPLIFATAFMTFFSVVIALFKDIPDIEGDRIFGIQSFSVRLGQSKVFWTCVGLLEVAYGVAILMGVTSSSLWSKSLTVVGHAILASILWSSARSIDLTSKAAITSFYMLIWRLFYAEYLLIPLVR

SEQ ID NO: 11479 - protein, 336 aa, Bacillus thuringiensis serovar konkukian str. 97-27
MAKVYYEKDVTVNVLKEKKVAIIGYGSQGHAHAQNLRDNGFDVVVGLRKGKSWDKAKEDGFSVYTVAEAAKKADVVMILLPDELQPEVYEAEIAPNLQAGNSLVFAHGFNVHFDQVKPPVNVDVFLVAPKGPGHLVRRTFVEGGAVPALFAVYQDATGVATEKALSYADGIGATRAGVLETTFKEETETDLFGEQAVLCGGVTALVKAGFETLVDAGYQPELAYFECLHELKLIVDLMYEGGLENMRYSVSDTAQWGDFVSGPRVVTEDTKKAMDTVLAEIQDGTFARGWIAEHKAGRPNFHATNEKENEHEIEVVGRKLREMMPFVQPRVKAGVK

SEQ ID NO: 11480 - protein, 610 aa, Pseudomonas aeruginosa UCBPP-PA14
MCGLAGWVDYTRKLDDEFPAIFAMTDTLALRGPDAEGIWKHRNALLGHRRLAVIDLSGGVQPMSYRFPTGQEVTLVYTGEVYNHDALRERLRRAGHEFRTRSDTEVVLHAYLQWGERCCEYLTGMFAFAVFDGRDGHLLLVRDRLGIKPLYYARHREGLLFGSEIKSILAHPEFAARLDAVGLVDLLTLSRGTSQTPFREVQELLPGHLLSWRPNSQAKLRRYWEVRRQEHADDLQSTVQRTRELVTRALGSQLHADVPVCSLLSGGLDSTALTGIAQRIAKAEHGGDINSFSVDFVGQAEQFRSDDLRPDQDQPFALLAAQYIGSRHRTVLIDNAELVCERAREEVFRAKDVPFTFGDMDTSLHLMFGEIRRHSTVAISGEGADELFGGYGWFRDPQAVAAARFPWASRVRLPAGFIDAGFNRRCDLLQYQQASYDDGLRQVEHLAGDSPEERRMREFSHLHLKRWMVLLLERKDRLSMCNGLEVRVPYTDHELVEYVYNVPWSIKSRDGEEKWLLKRACADYVPEAVLKRRKSPYPTSANLGYERFLRGSVRRLLEDAANPVFGIVSREFLAAELEHPEGYFNTQVSRHNLETALALEGWLRLYGLSA

SEQ ID NO: 11481 - protein, 537 aa, Clostridium perfringens str. 13
MSKGQSAKRLKEIVRVFTYYGFDFLISSKLPNSKKVEPRPQALREALEELGATFVKIGQILSTRPDLLPKAYIEELEKLQDNNEITDFHKVKEIFYESFGTDINTYFLEFSETPLASASIAQVHRAQLIDGRDVVVKVQHYKIDEKMKLDLSILRRLSKLTSSHIANTLINPVEAFKEIEEATLKELDFEKEAKNTKRFRELNKNVACVGAPIIIDKLTSKKILTMEYIDGCKVTDFNILKEEGYDFEDIANKLANSFFKQVLEDGFFHGDPHPGNLFIREGKIYFIDFGLVGTLEANLRNWLNKAMIAMVLGDIDTLVDFVNAIGIKKGKVEYSILYDDLKNIVSKYINASLKTIKISDLFKEIFEIAERNNIQFPRELVALVRSIVILEGVIAKIDPDLEIMECIYPYVKERNKEEMLKSLNKDKLLTEAYKFASKSIEIPTKFSELVDSLTKGRAKLQFEMKGLDKPLTDLNRMVNRVAFSLIVGCMIIGSSLIVNAKTGPTFQGVPILGLIGFIVSGIFGLWLLISIIKSGFF

SEQ ID NO: 11482 - protein, 585 aa, Bacillus cereus ATCC 14579
MRKTKIVCTIGPASESIEKLEQLIEAGMNVARLNFSHGSHEEHGARIKNIREASKKTGKTVGILLDTKGPEIRTHDFVDGQAELVTGAEVVLSTEQVLGTAEKFSVSYAGLYDDVDPGSRILIDDGLIELEVIEKADGNIRTKVLNSGTVKNKKGVNVPNVSIKLPGITEKDVKDIIFGIEQKVDFIAASFVRKASDVLEIRELLEEHNAQYIQIVPKIENQEGIDNIDSILEVSDGLMVARGDMGVEIPPEEVPLVQKRLIKKCNVLGKPVITATQMLDSMQRNPRPTRAEASDVANAIFDGTDAIMLSGETAAGQYPVEAVTMMANIAVRVEKSLQYEDMFKKRIKEFTPTITDAISQSVAHTALALDVAAIVAPTESGYTAKMISKYRPKSPIVAVTSDEQVGRRLALVWGVQAFMAEKRAASTDEMLDTAIQTGMDAGLIGLGDTVVITAGVPVAETGTTNLMKIHVVGEEIAKGQGIGRKAAKGKVVVAKTAAEAVANVNEGDILVTTSTDKDMIPAIEKAAALVVEEGGLTSHAAVVGVSIGIPVIVGVNGVTATLKNGQEVTVDAARGIVYNGHAEVL

SEQ ID NO: 11483 - protein, 116 aa, Glycine max
MGIGEKSPSKSFNLHHHHHREGKNKQQEFRGVPKGCMAIKVGQGEEQQRFVVPVIYINHPLFMQLLKEAEEEYGFDQKGTITIPCHVEEFRNVRGLIDRDKSLHHHHHHHVGCFGF

SEQ ID NO: 11484 - protein, 168 aa, Zea mays
MAAWSTATSVHDFIVKDASGKDVALSTYKGKVLLIVNVASQCGLTNSNYTELAQLYEKYKAQGFEILAFPCNQFGGQEPGTNEEIVQFACTRFKAEYPIFDKVDVNGNNAAPIYKFLKSSKGGLFGDSIKWNFSKFLVDKEGRVVDRYAPTPSPLSIEKDIKKLLGSS

SEQ ID NO: 11485 - protein, 380 aa, Campylobacter coli RM2228
MQIKQILDKLKEQNNLRKLTSLKHEGNFVFKEGKKLLNLAGNDYLNLSSCKSLKDEFLDNIKEQDLFFSSSSSRSLSGNFTIYEELESFLKSKFKEKEILHFNSGYHLNISCIAALASIPNTLFLADKFIHASMIDGLKLGGAKFFRFYHNDMNHLENLIQKHYDHYENIIILSEALFSMDGDFSDFNTLIAFKEKYPKIKLYIDEAHSVGCFDEEGLGLVKALNLEEKVDFIVFTFGKALASMGACMICNNLYKSFFINKARAFIYSTALPPINIAWTKFIFEKMSELKEKREKLQIIGNFFKNQLIEKSHQILGDAYIISLVLGENQKAIELAKKLEVNGIFAPAIKEPTVPKNTARIRFSLHAGLSKEDLKKVVELL

SEQ ID NO: 11486 - protein, 327 aa, Arabidopsis thaliana
MSSGTVRRVSRQDIQLVQNLIERCLQLYMNQKEVVDTLLEQAKIEPGFTELVWQKLEEENREFFKAYYLRLMVKHQIMEFNKLLEQQVHHMRQMHPTGVASVQNTNGSHLQSSKILNQKQLCYPSEHTDQSLKSESAHHPMASSLSNAFLNGSSTLNTNVPSSINISTHARRVDASPNMLSSQTTNMPMMQGMNGGMIKSETAFTNPASFMYGGERNALEGHSAVGDTSIPNFSNESNNQPLSDPLLEAEASTFGFLGQIPRNFSLSDLTADFSQSSEILESYDRSPFLVPNAENFLDSRDRGEYQGDNKRLDTISEGFSYDNIGSE

SEQ ID NO: 11487 - protein, 638 aa, Magnaporthe grisea 70-15
MLPLISCLLALCPLAVLAGPAPELQKRSITCLKIGDNATATWKNAAGQTCTFTGVVGSNFGTNPAGTGDYSCNGRCGAGCSGSSLGNAYTQDCFSHDMCSFFNNASGGESDPNCGAAFKDAVDDTAFGTLRGCGESNPNPPNPQGVGGQIVMSWMFRMYKFADSERANSEKSQFFKVGWAKVMDDSGPGAHDRRGREEHRRLDLWYLGSSTGTCPDWKPPMTPSKDDVYMCLPKKNHCSLSQHRPKVAQTTRAHIAAVELIQGREAASLADYSVSELIPPSYFPKMAGESTGTRPKVLLLGTIDQLTRRPLHPIASADEAWSKLSAKADIVTPTSTDRASFLAECASGAFAGVVAAYRTFVSGRTTGRIDAELLAALPPTLRFICHNGAGYDQIDVAACTAAGVRVSNTPSAVDDATADAGIFLMLGALRNFGPGMQSCRNGEWIGKPAPALGHDPRGKVLGILGMGGIGRNMAKKAAVFGMKIRYYNRTRLSAELEADCGAEYVDFDTLLVTSDVLSLNLPLNPKTRHTISHAEFAKMKTGVVVVNTARGAVMDEAALVAALDSGRVASAGLDVYEEEPKVHPGLLANHRCLLVPHMGTYTEETQTKMEEVAISNVVAALEKGQLVTGVPEQSGLTF

SEQ ID NO: 11488 - protein, 625 aa, Cornus unalaschkensis
MASSGEQNQVELLENLKNRLAIAVRSIQWSYAIFWSISSRQPGVLEWGDGYYNGDIKTRKTVQVVEFNADQLGLQRSEQLKELYESLAVTESNPQARRPSAALSPEDLTDTEWYYLVCMSFVFNIGQGLPGRTFANGQPIWLCNAHYADSKIFSRSLLAKSASIQTVVCFPFLGGVVELGVTELVLEDPNFIQHIKTSFLENPYRTVPKIPSYYASENTRTEKDLILAKPSHNLLDTDLDAALECGEIVMCAPNNNSSGFLPNQRTEKSVMVEGLSGGASQVQSWQFMDDEISNCVQNSTNSSESISRTSENPEKDCCLTDLPECNLTKLTSLDLPNDDIHYHSVVSSLLKNSHQLILGPYFHKCNRESSFMGWKKTPSGIQQRRRGTPQKLLKKVLFEVARMHGGCLVESRQDNSRKDGLWRPEDDEIGTTDLFSERRRRDKTKERYSVLGSLIPSTSKDDKISILDGTIEYLKELERRLEDSECLEARTRSKPQDTAERTSDNYENDRIGIGKKPLINKRKACDIVEAELEINLVQLKDSSTDDVSVRIIDKDVFIEIRCPWRERLLLEIMDAISNFHLDSHSVQSSNVDGILSLSIKSKFKGSTVASTGMIIQALQRIICKC

SEQ ID NO: 11489 - protein, 253 aa, Arabidopsis thaliana
MAATQLTASPVTMSARSLASLDGLRASSVKFSSLKPGTLRQSQFRRLVVKAASVVAPKYTSIKPLGDRVLVKIKEAEEKTLGGILLPSTAQSKPQGGEVVAVGEGRTIGKNKIDITVPTGAQIIYSKYAGTEVEFNDVKHLILKEDDIVGILETEDIKDLKPLNDRVFIKVAEAEEKTAGGLLLTETTKEKPSIGTVIAVGPGSLDEEGKITPLPVSTGSTVLYSKYAGNDFKGKDGSNYIALRASDVMAILS

SEQ ID NO: 11490 - protein, 625 aa, Cornus cf. canadensis Xiang and Fan 20-1
MASSGEQNQVELLENLKNRLAIAVRSIQWSYAIFWSISSRQPGVLEWGDGYYNGDIKTRKTVQAVEFNADQLGLQRSEQLKELYESLAVTESNPQARRPSAALSPEDLTDTEWYYLVCMSFVFNIGQGLPGRTFANGQPIWLCNAHYADSKIFSRSLLAKSASIQTVVCFPFLGGVVELGVTELVLEDPNFIQHIKTSFLENPYRTVPKIPSCYASENTRTEKDLILAKPSHNLLDAALDAALECGEIDMCAPNNNSSGFLPNQRTEKSVMVEGLSGGASQVQSWQFMDDEISNCVQNSTNSSESISRTSENPEKDCCLTDLPECNLTKLTSLDLPNDDIHYHSVVSSLLKNSHQLILGPYFHKCNRESSFMGWKKTPSGIQQRRRGTPQKLLKKVLFEVARMHGGCLVESRQDNSRKDGLWRPEDDEIGTTDLFSERRRRDKTKERYSVLGSLIPSTSKDDKVSILDGTIEYLKELERRLEDSECLEARTRSKPQDTAERTSDNYENDRIGIGKKPLINKRKACDIVEAELEINLVQLKDSSTDDVSVRIIDKDVFIEIRCPWRERLLLEIMDAISNFHLDSHSVQSSNIDGILSLSIKSKFKGSTVASTGMIIQALQRIICKC

SEQ ID NO: 11491 - protein, 625 aa, Cornus unalaschkensis
MASSGEQNQVELLENLKNRLAIAVRSIQWSYAIFWSISSRQPGVLEWGDGYYNGDIKTRKTVQAVEFNADQLGLQRSEQLKELYESLAVTESNPQARRPSAALSPEDLTDTEWYYLVCMSFVFNIGQGLPGRTFANGQPIWLCNAHYADSKIFSRSLLAKSASIQTVVCFPFLGGVVELGVTELVLEDPNFIQHIKTSFLENPYRTVPKIPSYYASENTRTEKDLILAKPSHNLLDAALDAALECGEIDMCAPNNNSSGFLPNQRTEKSVMVEGLSGGASQVQSWQFMDDEISNCVQNSTNSSESISRTSENPEKDCCLTDLPECNLTKLTSLDLPNDDIHYHSVVSSLLKNSHQLILGPYFHKCNRESSFMGWKKTPSGIQQRRRGTPQKLLKKVLFEVARMHGGCLVESRQDNSRKDGLWRPEDDEIGTTDLFSERRRRDKTKERYSVLGSLIPSTSKDDKISILDGTIEYLKELERRLEDSECLEARTRSKPQDTAERTSDNYENDRIGIGKKPLINKRKACDIVEAELEINLVQLKDSSTDDVSVRIIDKDVFIEIRCPWRERLLLEIMDAISNFHLDSHSVQSSNIDGILSLSIKSKFKGSTVASTGMIIQALQRTICKC

SEQ ID NO: 11492 - protein, 153 aa, Glycine max
MEGGRSSASNGNCEVRYRGIRRRPWGKFAAEIRDPTRKGTRIWLGTFDTAEQAARAYDAAAFHFRGHRAILNFPNEYQSHNPNSSLPMPLIVPPPSYSSSFTSNYSGDDNNHLVRPGEIMQGGDLDDTFELEYLDNKLLEELLQMQDNRHFYK

SEQ ID NO: 11493 - protein, 268 aa, Vibrio parahaemolyticus
MSRYEKMFARLNEKNQGAFVPFVTVCDPNAEQSYKIMETLVESGADALELGIPFSDPLADGPTIQGANIRALDSGATPDICFEQIGKIRAKYPDLPIGLLMYANLVYSRGIESFYERCAKAGIDSVLIADVPTNESAEFVAAAEKFGIHPIFIAPPTASDETLKQVSELGGGYTYLLSRAGVTGAETKANMPVDHMLEKLNQFDAPPALLGFGISEPAQVKQAIEAGAAGAISGSAVVKIIEAHVEQPQIMLDKLGELVSAMKAATQK

SEQ ID NO: 11494 - protein, 625 aa, Cornus cf. canadensis Xiang and Fan 26-1
MASSGEQNQVELLENLKNRLAIAVRSIQWSYAIFWSISSRQPGVLEWGDGYYNGDIKTRKTVQAVEFNADQLGLQRSEQLKELYESLAVTESNPQARRPSAALSPEDLTDTEWYYLVCMSFVFNIGQGLPGRTFANGQPIWLCNAHYADSKIFSRSLLAKSASIQTVVCFPFLGGVVELGVTELVLEDPNFIQHIKTSFLENPYRTVPKIPSYYASENTRTEKDLILAKPSHNLLDAALDAALECGEIDMCAPNNNSSGFLPNQRTEKSVMVEGLSGGASQVQSWQFMDDEISNCVQNSTNSSESISRTSENPEKDCCLTDLPECNLTKLTSLDLPNDDIHYHSVVSSLLKNSRQLILGPYFHKCNRESSFMGWKKTPSGIQQRTRGTPQKLLKKVLFEVARMHGGCLVESRQDNSRKDGLWRPEDDEIGTTDLFSERRRRDKTKERYSVLGSLIPSTSKDDKISILDGTIEYLKELERRLEDSECLEARTRSKPQDTAERTSDNYENDRIGIGKKPLINKRKACDIVEAELEINLVQLKDSSTDDVSVRIIDKDVFIEIRCPWRERLLLEIMDAISNFHLDSHSVQSSNIDGILSLSIKSKFKGSTVASTGMIIQALQRIICKC

SEQ ID NO: 11495 - protein, 409 aa, Oryza sativa
MAGGGGSLAVGGGLNGWRGVSGSVGAAGLEEGSGPAWWRGHLTANGSRMKKGGGSRRHAIPTGEAGSGAVSRVAVAVAVYVDSSIEQEQLEEVVPWWGLMGRPPCCVKAEVKKGPWTPEEDLMLVAYVQEHGPGNWRAVPTNTGLMRCSKSCRLRWTNYLRPGIKRGNFTDQEEKLIVHLQALLGNRWAAIASYLPERTDNDIKNYWNTHLKKKLKKMSATGGGGDDGEGGGAGEVKTRAAAPKGQWERRLQTDIHTARQALRDALSLDPSPPAKPLDSSSGATAPPSSQAATSYASSAENIARLLEGWMRPGGGGGKTTTTPSSGSRSSAASVLSGEASHSGGATAPTPDGSTVTSKTKDEETAGAPPPPPPPAFSMLESWLLDDGMGHGEVGLMDVVVPLGDPSEFF

SEQ ID NO: 11496 - protein, 532 aa, Brucella melitensis 16M
MRRHSSAISKTRWVCWSDGTDAALVFVAYTKNSAAFPFSGIRAKIMADIYDVIVIGSGPGGYVTAIRAAQLGLKTAIVEREHLGGICLNWGCIPTKALLRSAEILHFGEHAKDYGLKLDGTITPDVKAVVQRSRGVSARLNGGVAFLMKKNKIDVIWGEAKLVKAASGSNPAEISVGKTSKQPMQPQNPVPKGVLGEGSYKAKHIIVATGARPRALPGIEPDGKLIWTYFEAMVPQALPKSMLVMGSGAIGIEFASFYHDMGVDVTVVEVMSQIMPVEDAETSAIARKQLEKRGLKIITDAKVAKVEKGANSVTAHVETKDGKTQTLTVDRMISAVGVQGNIENLGLEALGVKTDRGCIVIDGYGKTNVAGIYAIGDVAGPPMLAHKAEHEGVICVEKIAGLPNVHPLDMGKIPGCTYCNPQVASVGLTEAKAKEQGYDIRVGRYSFSANGKAIALGEDQGLVKTIFDRKTGQLLGAHMVGAEVTELIQGFVIAMNLETTEEELMHSVFPHPTLSETMKESVLDAYGRVLNA

SEQ ID NO: 11497 - protein, 424 aa, GIBBERELLA ZEAE PH-1
MLSTLRVASRRAARPAQYNLAAIRAASNWANVPQGPPDAILGITEAFKADKFDKKINLGVGAYRDDAGKPYVLPSVREAEMKVVESKLNKEYAGITGVPEFPPAAAKLAYGANSPALDRITITQTISGTGALRVGAAFLAKFFPGEKKIYIPQPSWANHKAVFNHAGLEVEQYRYYDKKTIGLDFEGLIADVKSAPNGSVFLFHACAHNPTGVDPTQEQWKQISDVVKEKGHFAFFDMAYQGFASGDTDKDAFAVRYFVEQGHNIALCQSFAKNMGLYGERIGAFSMVCADADEKKRVDSQLKILIRPLYSNPPIHGARIAAEILNSPTLYKQWLGEVKEMADRIITMRALLKDNLEKLGSKHDWSHITSQIGMFAYTGLTSEEMTRLAEEFSVYATKDGRISVAGITSENVGRLAEAIYKVKG

SEQ ID NO: 11498 - protein, 625 aa, Cornus unalaschkensis
MASSGEQNQVELLENLKNRLAIAVRSIQWSYAIFWSISSRQPGVLEWGDGYYNGDIKTRKTVQAVEFNADQLGLQRSEQLKELYESLAVTESNPQARRPSAALSPEDLTDTEWYYLVCMSFVFNIGQGLPGRTFANGQPIWLCNAHYADSKIFSRSLLAKSASIQTVVCFPFLGGVVELGVTELVLEDPNFIQHIKTSFLENPYRTVPKIPSYYASENTRTEKDLILAKPSHNLLDAALDAALECGEIDMCAPNNNSSGFLPNQRTEKSVMVEGLSGGASQVQSWQFMDDEISNCVQNSTNSSESISRTSENPEKDCCLTDLPECNLTKLTSLDLPNDDIHYHSVVSSLLKNSHQLILGPYFHKCNRESSFMGWKKTPSGIQQRTRGTPQKLLKKVLFEVARMHGGCLVESRQDNSRKDGLWRPEDDEIGTTDLFSERRRRDKTKERYSVLGSLIPSTSKDDKISILDGTIEYLKELERRLEDSECLEARTRSKPQDTAERTSDNYENDRIGIGKKPLINKRKACDIVEAELEINLVQLKDSSTDDVSVRIIDKDVFIEIRCPWRERLLLEIMDAISNFHLDSHSVQSSNIDGILSLSIKSKFKGSTVASTGMIIQALQRIIWKC

SEQ ID NO: 11499 - protein, 292 aa, Oryza sativa (japonica cultivar-group)
MEQYEKVEKIGEGTYGVVYKGKHRHTNETIALKKIRLEQEDEGVPSTAIREISLLKEMQHRNIVRLQDVVHKEKCIYLVFEYLDLDLKKHMDSSPDFKNHRIVKSFLYQILRGIAYCHSHRVLHRDLKPQNLLIDRRTNSLKLADFGLARAFGIPVRTFTHEVVTLWYRAPEILLGARHYSTPVDMWSVGCIFAEMVNQKPLFPGDSEIDELFKIFSIMGTPNEETWPGVASLPDYISTFPKWPSVDLATVVPTLDSSGLDLLSKMLRLDPSKRINARAALEHEYFKDLEVA

SEQ ID NO: 11500 - protein, 553 aa, Thermotoga maritima
MKKPFLLLAFVFLLFLTSCFQTSMSQSLVSSNPHSNSTNTDGTSSNLEEVKYPVVYEIFIRSFYDRDGNGVGDLNGVSQKVDYLKELGVDAVWFMPFNEAVSYHGYDITDYYNVEKDYGTMEDLENMIQVLHENGIKVIMDLVINHTSDEHPWFKDAVENTTSSPYWDYYIMSLEDHSGQDHWHWKINSKGQKVWYFGLFGYNMPDLNHDSQKVREEVKKIVDFWISKGVDGFRIDAAKHIYGWSWDDGIQESAEYFEWFRDYVLSKKPDAILVGEVFSGNTYDLSLYPIPVFNFALMYSIRNYPEGQDGMIENNWVEESFLFLENHDLHRFFSHLQEHYKKFSESDYEFIKKRAALWYFLIFTLKGSPVIYYGGEIGTRGFKWHGPVYDEPVREPMQWYASGTGEGQTFWTKEVYKNAGITFGNADVDGCIYDDPYDGFSVEEQESDPKSLLNFIRFILNFRKDHDAILNGDQTIFRDWKNLIAFYRESSNEKLLVVLNPDPVWQNSFTFEENMTMILEVDFENFIWNESNVSFSAGESFTVDPMKAYIFKK

SEQ ID NO: 11501 - protein, 496 aa, Arabidopsis thaliana
MATEKTHQFHPSLHFVLFPFMAQGHMIPMIDIARLLAQRGVTITIVTTPHNAARFKNVLNRAIESGLAINILHVKFPYQEFGLPEGKENIDSLDSTELMVPFFKAVNLLEDPVMKLMEEMKPRPSCLISDWCLPYTSIIAKNFNIPKIVFHGMGCFNLLCMHVLRRNLEILENVKSDEEYFLVPSFPDRVEFTKLQLPVKANASGDWKEIMDEMVKAEYTSYGVIVNTFQELEPPYVKDYKEAMDGKVWSIGPVSLCNKAGADKAERGSKAAIDQDECLQWLDSKEEGSVLYVCLGSICNLPLSQLKELGLGLEESRRSFIWVIRGSEKYKELFEWMLESGFEERIKERGLLIKGWAPQVLILSHPSVGGFLTHCGWNSTLEGITSGIPLITWPLFGDQFCNQKLVVQVLKAGVSAGVEEVMKWGEEDKIGVLVDKEGVKKAVEELMGDSDDAKERRRRVKELGELAHKAVEKGGSSHSNITLLLQDIMQLAQFKN

SEQ ID NO: 11502 - protein, 266 aa, Brassica napus
  misc_feature (139)..(139): Xaa can be any naturally occurring amino acid
  misc_feature (154)..(154): Xaa can be any naturally occurring amino acid
  misc_feature (200)..(200): Xaa can be any naturally occurring amino acid
  unsure (1)..(266): unsure at all Xaa locations
MAPSAASAASFFPVQLAALSLLLPPSSFAAAPPLPTRHLPPPSQLPPVAPPRFSRRSRPRTPNSDAEVIALSPKTLMATNRFICEVCNKGFQREQNLQLHRRGHNLPWKLKQKSTKEVKRKVYLCPEPTCVHHDPSRAXLGDSTGTPKLLSGTXAEKKWKCTECSKRYAWQSDWKAHSKTGHSDWNRRSKTCGTTRVDSXLTHRAFCDAIVTLRARALPSLTSLKSHHFTYGQNTNNPNNTSSMILGLSHMGPSQNLDHESGDRLR

SEQ ID NO: 11503 - protein, 161 aa, Morus nigra
MAGTSTNTQTTGTSQTVEVGLWGGPGGNAWDDGSYTGIREINLSHGDAIGAFSVIYDLNGQPFTGPTHPGNEPSFKTVKITLDFPNEFLVSVSGYTGVLPRLATGKDVIRSLTFKTNKKTYGPYGKEEGTPFSLPIENGLIVGFKGRSGFVVDAIGVHLSL

SEQ ID NO: 11504 - protein, 419 aa, Thermoplasma acidophilum DSM 1728
MTYMPENMDPFEMALQQLEKAAAVLKLDEQALEILKQPEKILQVSIPVRMDNGRIKVFTGFRVRYNTARGPGKGGIRYHTEETLSTVKALAAWMTWKCAIVDIPFGGAKGGVICDPKSMSQGELERLSRGYIRAIADFIGPEVDVPAPDVYTNPQIMAWMMDEYENVVRHSAPNVITGKPLEVGGSEGRGDATAKGGMYVLREGAKRIGLDLSKARVAVQGFGNAGQFAVKFVHEMFGSKVVAVSDTKGGIYVKDGIDYAALLEHKKKTGSVVGFPGSEPITNEELLESDVDVLIPAAIEEQITGKNADRIRAKIVLELANGPTTPEADEILYKRGILDLPDFLSNSGGVTVSYFEWVQNNYGEYWTADDVYKKLDQKMTKAAHDVFDAMDKYKVNPRTAAYVVSVKKVADAMKARGMY

SEQ ID NO: 11505 - protein, 501 aa, Saccharomyces cerevisiae
MVTNMVKLRNLRRLYCSSRLLRTIQNGRISSVSSISLSKKYTTKSAKEGEENVERKHEEEKKDTLKSSSVPTSRISRLFHYGSLAAGVGMNAAAKGISEVAKGNSPTWKSLILSDSNIDRITNKFSKMRGVALKIGQLLSFQDEKVLPKELYEILSRVQNSANHMPQRQLEKVMAKELGANWKTKFSKFDKIPMAAASIGQVHAAELPSGQRVVVKIQYPGVKESIDSDLNSLLMLLTASSLLPKGLFLDKTIANARTELKWECDYNREARALQKFEALLKDDPAFEVPHVFPEYTTDNIITMTRMEGTEIMKLPKASQETKNFISENIMRLCLEEIATFKYMQTDPNWANFLYNGRTKKIELLDFGASRPFAEDFILKYRKLLTYATLRDRKGAYEMSVQLGYLTGLESQSMKDAHVDSVLTLGEPFRGDVDKSFDFKDQTVSDRIRGNIGLMLNERLCPPPEETYSLHRKFSGIFLLCARMGASVHCAKLFKEIFAYKV

SEQ ID NO: 11506 - protein, 420 aa, Magnaporthe grisea 70-15
MTLKTLSAKAATALDQELMSTCAFSLDQLMELAGLSVSQAVFKVHPPTRGRRILVACGPGNNGGDGLVAARHLRHYGYQPSVYYPKRGKNELYQRLTKQLEDLEVPFVDDFGVALSASDHVVDAIFGFSFSGEVREPFPAVIRALAETKVPVTAVDAPSSWDIEHGPPESGHVGSNFNPAVLVSLTAPKPLAKHFKGRHFIGGRYVFFSYIIFVFAQGILLLSIQDKGITWSSPNAGLSRRRSRKNTTSTCPNMTGSTRSPKLQRAAPAPKNSDVVAQRVLSEVSSSFEILPPARWEPLAAALFLVTVRSWFCRLLVPIPRSSYDCTTSRTTVWADGAWTFSIVHFDEDLMVMCLQIDDGSVALGKYHGLQEQYLRMDPPAAHPNSPSVRPAAGDAVDDDCGGDRSYLRAGFGSGRFSRV

SEQ ID NO: 11507 - protein, 309 aa, Thermoplasma acidophilum DSM 1728
MKVLVVVPNFLPLDQIRSAVSTITQDVEVRTDTDFDRSDAEILIVTTFTPVNGDLLKKMPRLRFVQVASIGYDNVDMNAMKKNGIMVSNIPTASADSVAEHALSMVLSLIKDQRFLDAEIRSGRWPRITRSSDLMGKTFGIVGMGSIGRALAARLLPFKVAIIYNDTKRMSEAEEEEYGATFVSLDRLLSDSDVISVHVPLNETTRHMFNSSRFGLMKDGAIFINTSRGEVVVEKDLIEAIQKKGIRAGLDVFEHEPPDPNSPLFRLENTLFSPHIAGVTAESQMRFFRETIANVMRYMQGYDPNFRVI

SEQ ID NO: 11508 - protein, 322 aa, Thermoplasma acidophilum DSM 1728
MLLCAMSVLLIGGNGFAKVHAETYRRLGIEFSVYDRNPQVLEMYRRDYGVRETYSDMAAALDADNDAVDIVLPHNLHYEVAMKAIEKGKHVLVEKPVTGRIDEAVKIINQAKKKRLKFMVAEQFYFDPSFRKALEIVQSGKIGDVRTVIVRDQQRYDAPGWRSRKNEMMGGSLIDGGVHFLEIFLDFGGQWKSISAHNYKGGTSIEGEDNTAALFTFENDVHGIFYYSWSYVEPPKLPAFEVIGTEGSVYEMKESSLMKPDNVRTVLNQPVLNGNIVSVEWKDVYESEIGGFLKSIEKDTEVPYPPANAIRNLETVLMMYGR

SEQ ID NO: 11509 - protein, 330 aa, Magnaporthe grisea 70-15
MFKIRLSAAARPQLHLRQLTRLASSCYQKNSSCPPQPSVLQSVRAIASGPSGSGSAQSSSPFSSSAAPPSAASRQKGSTTTTTTTTTTTTNSSANASTASMADQKKEIATYLQQTHDRVFEHNRVWAAEQTKKDPDFFLKLTAGQKPEYLWIGCSDSRIPAEQITGLGPGEAFIHRNIANLVCSIDLNVMSVINYAVQHLQVKHIVVCGHYGCGGVKAAMTPRDLGILNPWLRNIRDVYRLHEAELDAIPEEEARYDRLVELNIIEQCRNVIKTAAVQQSYEANSFPIVHGWVFGFQDGRLKDLKVDHEAILKDVQKIYNLTGTPRMGGP

SEQ ID NO: 11510 - protein, 464 aa, Haemophilus influenzae R2866
MNFRLLSQYHADIKKLIKISLPILLAQIAQNSMGLADTIMAGRVSSTDMAAISIGASIWMPLMLFGQGLLLALPPTISYLNGSGQRHRIAHQVRQGIWLVLGVSIPLGLLIYFCEIPLQYMQMESKMSDLARDYLYAMLWGLPAYLMLINFRCLNDGIAKTKPAMVITFLGLLINIPLNYIFIYGKFGIPAFGAVGCGIATAIVNWAMCLMMIFYSYTNTQERSLKVFSQLIEMPNLKTLKKLLRLGLPIAIAICCEVALFALTSLMLSPLGATIVASHQITLNTSSFIFMFPMSIGMAATILVGQALGTGSPQNAKKIGYAALLLGLTVTIITALITIFFRYEIASIFVTDEIVIAMAANLLLFAALYQFSDTIQMVVGGILRGYKDTKMILYITLFSYWVIGVPLGYTLGRTDWLIPHIDAKGFWIAFVVSLTFAAFLLSLRMKKMQAMSDNAILQRLEKLK

SEQ ID NO: 11511 - protein, 299 aa, Streptococcus pneumoniae TIGR4
MRNMKAKYAVWVAFFLNLTYAIVEFIAGGVFGSSAVLADSVHDLGDAIAIGISAFLETISNREEDNQYTLGYKRFSLLGALVTAVILVTGSVLVILENVTKILHPQPVNDEGILWLGIIAITINLLASLVVGKGKTKNESILSLHFLEDTLGWVAVILMAIVLRFTDWYILDPLLSLVISFFILSKALPRFWSTLKIFLDAVPEGLDIKQVKSGLERLDNVASLNQLNLWTMDALEKNAIVHVCLKEMEHMETCKESIRIFLKDCGFQNITIEIDADLETHQTHKRKVCDLERSYEHQH

SEQ ID NO: 11512 - protein, 245 aa, Zea mays
MAPRVADKSPLPLATGLKLGVGGGVGGMGLGPHYRGVRKRPWGRYAAEIRDPAKKSRVWLGTYDTAEEAAKAYDVAAREFRGAKAKTNFPFPLAVAVAVAGGAGSPSSDSTTLESSCGGSGCGVEAPVQAAMPLTPALDLDLFHRAAAVSAVTTGGMPFPFKAFPVVRPTPHQYFLYNQAAAAAAAGYRMVKVASAPVTVAAVAQSDSDSSTSSVVDRTCSPPAVTAKKEVSFELDLNWPPPAEN

SEQ ID NO: 11513 - protein, 475 aa, Shewanella oneidensis MR-1
MSNEIKTQVVVLGAGPAGYSAAFRAADLGLETVIVERFSTLGGVCLNVGCIPSKALLHVAKVIEEAKAVAAHGVVFGEPTIDLDKLRSFKQKVISQLTGGLGGMSKMRKVNVVNGFGKFSGPNSLEVTAEDGTVTVVKFDQAIIAAGSRPIKLPFIPHEDPRIWDSTDALELKEVPGKLLVMGGGIIGLEMGTVYSSLGSEIDVVEMFDQVIPAADKDVVRVFTKQIKKKFNLILETKVTAVEAREDGIYVSMEGKSAPAEPVRYDAVLVAIGRTPNGKLIDAEKAGVKIDERGFINVDKQLRTNVPHIYAIGDIVGQPMLAHKGVHEGHVAAEVIAGMKHYFDPKVIPSIAYTDPEVAWVGLTEKEAKEQGIAYETATFPWAASGRAIASDCSEGMTKLIFDKDTHRVIGGAIVGVNGGELLGEIGLAIEMGCDAEDLALTIHAHPTLHESVGLAAEIYEGSITDLPNPKAKKK

SEQ ID NO: 11514 - protein, 597 aa, Oryza sativa
  misc_feature (324)..(324): Xaa can be any naturally occurring amino acid
  misc_feature (344)..(344): Xaa can be any naturally occurring amino acid
  unsure (1)..(597): unsure at all Xaa locations
MDTTIGSVPTASDAAAPAPAANSAPREATLGRHLARRLAEVGARDVFTVPGDFNLTLLDELEAEAGAGHGGVRLVGCCNELNAAYAADGYARARGGGVGACAVTFTVGGLSAINAVAGAFSENLPVVCIVGGPNSNDYGSNRILHHTIGLPDFTQELRCFQTVTCYQAVVNNLEDAHEQIDAAISTAIKESKPVYISISCNLPSIPHPTFSRHPVPFFLSPRLSNQMNLETAVETAAAFLNKAVKPVLVGGPKMRVAKACKSFVELADACGYPVAVMPSAKGLVPEHHPRFIGTYWGAVSTPFCAEIVESADAYLFAGPIFNDXGSPGLQATSQKEKAIIVQPXRVVIGHGPAFGCVLMKDFLHALSARLKKNTAAYENYRRIYVPPGEPPLSEPGEPLRVNVLFQHIQKMLSANSAVIAETGDSWFNCQKLKLPEGCGYEFQMQYGSIGWSVGATLGYAKAAKDKRVIACIGDGSFQVTAQEVSTMLRWGQKSIIFLINNGGYTIEVEIHDGPYNVIKNWNYTGVVEAFHNGEGKCYTAKVRTEEELKEAIEEAQGPKKDCLCFIEVIVHKDDTSKELLEWGSRVSAANSRPPNPQ

SEQ ID NO: 11515 - protein, 226 aa, Escherichia coli
SENYALTTNQGVRIADDQNSLRAGSRGPTLLEDFILREKITHFDHERIPERIVHARGSAAHGYFQPYKSLSDITKADFLSDPNKITPVFVRFSTVQGGAGSADTVRDIRGFATKFYTEEGIFDLVGNNTPIFFIQDAHKFPDFVHAVKPEPHWAIPQGQSAHDTFWDYVSLQPETLHNVMWAMSDRGIPRSYRTMEGFGIHTFRLINAEGKATFVRFHWKPLAGKA

SEQ ID NO: 11516 - protein, 259 aa, Escherichia coli
KLTGRDPDFHRRELWEAIEAGDFPEYELGFQLIPEEDEFKFDFDLLDPTKLIPEELVPVQRVGKMVLNRNPDNFFAENEQAAFHPGHIVPGLDFTNDPLLQGRLFSYTDTQISRLGGPNFHEIPINRPTCPYHNFQRDGMHRMGIDTNPANYEPNSINDNWPRETPPGPKRGGFESYQERVEGNKVRERSPSFGEYYSHPRLFWLSQTPFEQRHIVDGFSFELSKVVRPYIRERVVDQLAHIDLTLAQAVAKNLGIELT

SEQ ID NO: 11517 - protein, 607 aa, Arabidopsis thaliana
  misc_feature (504)..(504): Xaa can be any naturally occurring amino acid
  unsure (1)..(607): unsure at all Xaa locations
MGGCTSKPSTSSGRPNPFAPGNDYPQIDDFAPDHPGKSPIPTPSAAKASPFFPFYTPSPARHRRNKSRDVGGGGESKSLTSTPLRQLRRAFHPPSPAKHIRAALRRRKGKKEAALSGVTQLTTEVPQREEEEEVGLDKRFGFSKEFHSRVELGEEIGRGHFGYTCSAKFKKGELKGQVVAVKIIPKSKMTTAIAIEDVRREVKILQALSGHKNLVQFYDAFEDNANVYIAMELCEGGELLDRILARGGKYSENDAKPVIIQILNVVAFCHFQGVVHRDLKPENFLYTSKEENSQLKAIDFGLSDFVRPDERLNDIVGSAYYVAPEVLHRSYTTEADVWSIGVIAYILLCGSRPFWARTESGIFRAVLKADPSFDEPPWPFLSSDAKDFVKRLLFKDPRRRMSASQALMHPWIRAYNTDMNIPFDILIFRQMKAYLRSSSLRKAALRALSKTLIKDEILYLKTQFSLLAPNKDGLITMDTIRMALASNATEAMKESRIPEFLALXLNGLQYRGMDFEEFCAAAINVHQHESLDCWEQSIRHAYELFDKNGNRAIVIEELASELGVGPSIPVHSVLHDWIRHTDGKLSFFGFVKLLHGVSVRASGKTTR

SEQ ID NO: 11518 - protein, 248 aa, Porphyromonas gingivalis W83
MKRIVLIRHGESLWNKENRFTGWTDVDLSEKGIEEAKKAGELMKKEGFQFTKAYTSYLKRAVKTLNGVLDVMDLDWIPVEKTWRLNEKHYGMLQGLNKAETAEKYGDEQVLIWRRSYDVPPTPMEKEDPRSPFMDPRYKGVCEKDLPLTEALCDTVNRILPYWNETIFPTLKEHDEVLVAAHGNSLRGIIKVLKNISDEDIISLNLPTAVPYVFEFDDNLRLVKDYFLGDPEEIKKLMEAVANQGKKK

SEQ ID NO: 11519 - protein, 582 aa, Cornus unalaschkensis
VLEWGDGYYNGDIKTRKTVQAVEFNADQLGLQRSEQLKELYESLAVTESNPQARRPSAALSPEDLTDTEWYYLVCMSFVFNIGQGLPGRTFANGQPIWLCNAHYADSKIFSRSLLAKSASIQTVVCFPFLGGVVELGVTELVLEDPNFIQHIKTSFLENPYRTVPKIPSYYASENTRTEKDLILAKPSHNLLDAALDAALECGEIDMCAPNNNSSGFLPNQRTEKSVMVEGLSGGASQVQSWQFMDDEISNCVQNSTNSSESISRTSENPEKDCCLTDLPECNLTKLTSLDLPNDDIHYHSVVSSLLKNSHQLILGPYFHKCNRESSFMGWKKTPSGIQQRTRGTPQKLLKKVLFEVARMHGGCLVESRQDNSRKDGLWRPEDDEIGTTDLFSERRRRDKTKERYSVLGSLIPSTSKDDKISILDGTIEYLKELERRLEDSECLEARTRSKPQDTAERTSDNYENDRIGIGKKPLINKRKACDIVEAELEINLVQLKDSSTDDVSVRIIDKDVFIEIRCPWRERLLLEIMDAISNFHLDSHSVQSSNIDGILSLSIKSKFKGSTVASTGMIIQALQRIIWKC

SEQ ID NO: 11520 - protein, 112 aa, Brassica napus
  misc_feature (109)..(109): Xaa can be any naturally occurring amino acid
  unsure (1)..(112): unsure at all Xaa locations
MRPILMKGHERPLTFLRYNRDGDMLFSCAKDHTPTLWYADNGERHGTYRGHNGAVWCCDVSRDSSRLITGSADQTAKLWDVKTGTQLFSFKFSSPARSVDFSVGDKLAXITT

SEQ ID NO: 11521 - protein, 315 aa, Daucus carota
FQVCHSLGGGTGSGMGTLLISKIREEYPDRMMLTFSVFPSPKVSDTVVEPYNATLSVHQLVENADVCMVLDNEALYDICFRTLKLTTPSFGDLNHLISATMSGVTCSLRFPGQLNSDLRKLAVILIPFPRLHFFMVGFAPLTSRGSQQYRSLSVPELTQQMWDSKNMMCAADPRHGRYLTASAMFREKMSTKDLDEQMINVQNKNSSYFVEWIPNNVKSTVCDIPPTGLKMASTFIGNSTSIQEMFRRVSEQFTAMFRRKAFLHWYTGEGMDEMEFTEAESNMNDLVSEYQQYQDATADEEEYYEDEEEEEAQGM

SEQ ID NO: 11522 - protein, 423 aa, uncultured bacterium
MAETITIIDDRTGKRVTVPIHDGVFASSALRELDPTLRMYDPAFLSTAACASSITYVDGDAGVMRYRGYPIEQLAAKSTFLEVAYLLLNGELPTKDQLDAWSFDVTHHTMVHENMRKTICHGFHYDAHPMGMFISAIAALGTFYVDAKDISNVKVLNKQILRLVAKVPTIAAMTYRFSSGLPFVLPNNSMGYAQNFLNMMYRIGDDYVVNPVLARALDVLFILHADHEQNCGTTAMRIVELTTHTDPYSATAAAAAALYGPLHGGANEAVVRMLAEIGDIKKVPAFIESVKRGDGRLIGFGHRVYKNFDPRATIIKKTAYDVFNVTGNNPLLDIALKMEEVALNDDYFVSRKLYPNVDFYSGLIYQALGFPVEMFTVLFAIPRTVGWLAHMSELLKDKEQKISRPRQWYIGVDEREYTPIANR

SEQ ID NO: 11523 - protein, 625 aa, Cornus unalaschkensis
MASSGEQNQVELLENLKNRLAIAVRSIQWSYAIFWSISSRQPGVLEWGDGYYNGDIKTRKTVQAVEFNADQLGLQRSEQLKELYESLAVTESNPQARRPSAALSPEDLTDTEWYYLVCMSFVFNIGQGLPGRTFANGQPIWLCNAHYADSKIFSRSLLAKSASIQTVVCFPFLGGVVELGVTELVLEDPNFIQHIKTSFLENPYRTVPKIPSYYASENTRTEKDLILAKPSHNLLDAALDAALECGEIVMCAPNNNSSGFLPNQRTEKSVMVEGLSGGASQVQSWQFMDDEISNCVQNSTNSSESISRTSENPEKDCCLTDLPECNLTKLTSLDLPNDDIHYHSVVSSLLKNSHQLILGPYFHKCNRESSFMGWKKTPSGIQQRTRGTPQKLLKKVLFEVARMHGGCLVESRQDNSRKDGLWRPEDDEIGTTDLFSERRRRDKTKERYSVLGSLIPSTSKDDKISILDGTIEYLKELERRLEDSECLEARTRSKPQDTAERTSDNYENDRIGIGKKPLINKRKACDIVEAELEINLVQLKDSSTDDVSVRIIDKDVFIEIRCPWRERLLLEIMDAISNFHLDSHSVQSSNIDGILSLSIKSKFKGSTVASTGMIIQALQRIICKC

SEQ ID NO: 11524 - protein, 281 aa, Zea mays
  misc_feature (69)..(69): Xaa can be any naturally occurring amino acid
  unsure (1)..(281): unsure at all Xaa locations
GSSTSPFLEARLVKIDHTGRVLQFFEKPKGADLNSMRVETNFLSYAIDDAQKYPYLASMGIFLEDINAXDALLDLLKSKYIQLHDFGSEILPRAVLDHSVQACIFTGYWEDVGTIKSFFDANLALTEQPSKFDFYDPKTPFFTAPRCLPPTQLDKCKMKDAFISDGCLLRECNIEHSVIGVCSRVSSGCELKDSVMMGADTYETEEEASKLLLAGKVPVGIGRNTKIRNCIIDMNARIGKNVVITNSKGIQEADHPEEGYYIRSGIVVILKNATINDGSVI

SEQ ID NO: 11525 - protein, 625 aa, Cornus unalaschkensis
MASSGEQNQVGLLENLKNRLAIAVRSIQWSYAIFWSISSRQPGVLEWGDGYYNGDIKTRKTVQAVEFNADQLGLQRSEQLKELYESLAVTESNPQARRPSAALSPEDLTDTEWYYLVCMSFVFNIGQGLPGRTFANGQPIWLCNAHYADSKIFSRSLLAKSASIQTVVCFPFLGGVVELGVTELVLEDPNFIQHIKTSFLENPYRTVPKIPSYYASENTRTEKDLILAKPSHNLLDAALDAALECGEIDMCAPNNNSSGFLPNQRTEKSVMVEGLSGGASQVQSWQFMDDEISNCVQNSTNSSESISRTSENPEKDCCLTDLPECNLTKLTSLDLPNDDIHYHSVVSSLLKNSHQLILGPYFHKCNRESSFMGWKKTPSGIQQRTRGTPQKLLKKVLFEVARMHGGCLVESRQDNSRKDGLWRPEDDEIGTTDLFSERRRRDKTKERYSVLGSLIPSTSKDDKISILDGTIEYLKELERRLEDSECLEARTRSKPQDTAERTSDNYENDRIGIGKKPLINKRKACDIVEAELEINLVQLKDSSTDDVSVRIIDKDVFIEIRCPWRERLLLEIMDAISNFHLDSHSVQSSNIDGILSLSIKSKFKGSTVASTGMIIQALQRIICKC

SEQ ID NO: 11526 - protein, 130 aa, Oryza sativa
MGRLFVMHLEGKVYSCKHCHTHLGLSSDIISKSFHCKHGKAYLFNKVVNVTSGVKEDRMMITGMHTVSDIFCVGCGSIVGWKYEAAHEKSQRYKEGKFILESRYKVSGPDGSHYFVTHDAHVGGSDVDDV

SEQ ID NO: 11527 - protein, 319 aa, Oryza sativa (japonica cultivar-group)
MAAAQGSGVPAALALSSGHTMPSVGLGVWRMDSPAIRDLIHSALRIGYRHFDCAADYQNEAEVGDALAEAFQTGLVKREDLFITTKLWNSDHGHVVEACKDSLKKLRLDYLDLYLIHFPVATRHTGVGTTASALGDDGVLDIDTTISLETTWHAMEDLVSMGLVRSIGISNYDIFLTRDCLAYAKIKPAVNQIETHPYFQRDCLVKFCQKHGILVTAHTPLGGSTANTEWFGSVSCLDDPVIKSLAEKYGKTPAQLVLRWGLQRNTVVIPKTSKEERLQENFAVFDFAISDEDMEKMRSIDRKYRTNQPAKFWGIDLFA

SEQ ID NO: 11528 - protein, 440 aa, Colwellia psychrerythraea 34H
MSKKNKPNSNAMFTRAIDNMPLGVADSYRYWGEENTVFLSSMKGCTITDCDEQTFVDFRLAYGPIILGYRDERIDNEVISAITTVGTISGFSTGLDSDVVELVKSLCPNIDKMRFSNSGTEAVIGAVRTARGFTKRNKIVVVEGGFHGLHDEVMWKSDVDNWDVNTQQVPDIVPFGGGIPQSTREHQVSVPLNDFDAIDAVFTQYGDDIAAILIEPIMGNCGSIASTQAYMQKLRDVCDNNGSLLIMDEVKTGFRVAKGGAQALYGIFADLTTYAKAMGNGYPVAAFGGRAEVMDTISFAKDGVTHGGTYTANMVALSAAKATLTVLKETDALETIANVGQKIQALLSRVFTKFGVEHCFAGPDAMFGVHFGSKVPQNYRDWKQTNSDLYTQFALNLIENGVMLEPDSREPWFICEAHQTVDLNWLEQVAEQSMAAAINE

SEQ ID NO: 11529 - protein, 625 aa, Cornus unalaschkensis
MASSGEQNQVELLENLKNRLAIAVRSIQWSYAIFWSISSRQPGVLEWGDGYYNGDIKTRKTVQAVEFNADQLGLQRSEQLKELYESLAVTESNPQARRPSAALSPEDLTDTEWYYLVCMSFVFNIGQGLPGRTFANGQPIWLCNAHYADSKIFSRSLLAKSASIQTVVCFPFLGGVVELGVTELVLEDPNFIQHIKTSFLENPYRTVPKIPSYYASENTRTEKDLILAKPSHNLLDAALDAALECGEIDMCAPNNNSSGFLPNQRTEKSVMVEGLSGGASQVQSWQFMDDEISNCVQNSTNSSESISRTSENPEKDCCLTDLPECNLTKLTSLDLPNDDIHYHSVVSSLLKNSHQLILGPYFHKCNRESSFMGWKKTPSGIQQRTRGTPQKLLKKVLFEVARMHGGCLVESRQDNSRKDGLWRPEDDEIGTTDLFSERRRRDKTKERYSVLGSLIPSTSKDDKISILDGTIEYLKELERRLEDSECLEARTRSKPQDTAERTSDNYENDRIGIGKKPLINKRKACDIVEAELEINLVQLKDSSTDDVSVRIIDKDVFIEIRCPWRERLLLEIMDAISNFHLDSHSVQSSNIDGILSLSIKSKFRGSTVASTGMIIQALQRTICKC

SEQ ID NO: 11530 - protein, 463 aa, Achromobacter denitrificans
MNTVDITEIIEKQKPNRKVLALLILSFLIMLCDGYDLQAIAFASPTIIADWGIQKASFGFIFSGGLFGVMVGGFLFGYVADRIGRRPALLWGTLLFGVFTLAAVLATNITQLAVLRFVAGLGIGGITPIAIALNVEYAPKRFRASVVGLVMIGYVVGTSSGGIFAAWLVPTFGWQVLFYIGGLAPLLLLPFLAMSLPESIKYLVLSGQKAEAVARVVNAIDPSIRASSQTRFVLGTAEEGARIAGWKDSVKALFGGQLSKITPALWGAFVCSSVTVFFLASWIPVLTVGTGRSASLAAVGLALFSAGGRFGGIFSSRVIDRFGIGAMASIPLIAAVFVVSVGSFEFSDTGFLSMLCLIGFFVLGGHVGLMGAMGLFYSNANRANGVGWAISIGKFGSIIGPAIAAVLIAANTAISYLFMAAAAPLLMAGMGILVLGRLQKAADHEHRMGADRANDPEARPIDA

SEQ ID NO: 11531 - protein, 641 aa, uncultured bacterium
MPGVCAIIISIFNIVTNPDAQGMNLDFAKRWIARASANRLIVLLFLFTAGFIDVAIFFLAQEDHKERVAQVESLLQRTVDSLGVEFDNELNIIERTLSGIGEVVAARGGLPPEADLALHRLTVRRHALTPSVRSILIVRPDGSQAAHSLQQPPPATNLADRNYFWAQAETFDTGLFIEPYLASSLDGSEISAFSMRINSDGGQFLGVAAASIAGSQLDDNLALQNLPKGYRIQVTLADGTGLACFPVQANCRRENWLMAPLFRDHVPNVGRALLQDATLFDEPIGFAAYRVSGRYPLVVSASAEKTAVMAVWHRNLVAYFFTALISNAALLYMSLYAARQFAARREALRALEEANESLERRVSERTAELQHYQGHLEDMVHARTLELAQARDDAEAASRAKSALLANMTHELRTPLHQISGLVLILQRRIEDEKQKSSLEKIGGAARRLQTLLENILELARVESGRVVIESKPFAPAMLLTDAVNRWQAEAARKGLHIEVATSPDLPASVCGDFVRIAEVIDCLTSNAIKFTSQGTITLRETVLEHKSRNCLMRFEVADTGIGIAAEYQQAVFGQFTQVDDSMTRKFGGAGVGLALSRRLVELMSGEIGFDSEPAMGSVFWFTLWLPMYCCSGEADDSVAG

SEQ ID NO: 11532 - protein, 575 aa, Nostoc sp. PCC 7120
MLEHDVIIVGGGLAGCRAAVEIARTDPSLNVAVVAKTHPIRSHSVAAQGGMAASLKNVDSTDTWEAHAFDTVKGSDYLADQDAVAILTQEAPDVVIDLEHMGVLFSRLPDGRIAQRAFGGHSHNRTCYAADKTGHAILHELVNNLRRYGVHIYQEWYVMRLILEENEAKGLVMYSLLDGHIEVVRAKAVMFATGGYGRVYNTTSNDYASTGDGLAMTAIAGLPLEDMEFVQFHPTGLYPVGVLISEAVRGEGAYLINSEGDRFMATYAPSRMELAPRDITSRAIAYEIRAGRGVNLDGSPGGPFVYLDLRHMGKEKIMSRVPFCWEEAHRLVGVDAVTQPMPVRPTIHYCMGGIPVNTDGRVRSSGDGLVEGFFAAGETSCVSVHGANRLGSNSLLECVVYGKRTGAAIAQYVQKRKLPAIDEQRYIKQAQQEIQALLEQPGEYRINQVRQAFQDAMTDYCGVFRTQELMSQGWQKITEIQQKYSQIYLDDKGSCWNTELVEALELRSLMIVGQTILASALNRQESRGAHFREDYPQRDDTKFLQHTMAYYSPAGIDIQYRPVTITMFEPQERKY

SEQ ID NO: 11533 - protein, 657 aa, Arabidopsis thaliana
  misc_feature (72)..(72): Xaa can be any naturally occurring amino acid
  unsure (1)..(657): unsure at all Xaa locations
MVNPGHGRGPDSGTAAGGSNSDPFPANLRVLVVDDDPTCLMILERMLMTCLYRVTKCNRAESALSLLRKNKXNGFDIVISDVHMPDMDGFKLLEHVGLEMDLPVIMMSADDSKSVVLKGVTHGAVDYLIKPVRIEALKNIWQHVVRKKRNEWNVSEHSGGSIEDTGGDRDRQQQHREDADNNSSSVNEGNGRSSRKRKEEEVDDQGDDKEDSSSLKKPRVVWSVELHQQFVAAVNQLGVDSELKTCLLMHFGNIVEFQKYRIYLRRLGGVSQHQGNMNHSFMTGQDQSFGPLSSLNGFDLQSLAVTGQLPPQSLAQLQAAGLGRPTLAKPGMSVSPLVDQRSIFNFENPKIRFGDGHGQTMNNGNLLHGVPTGSHMRLRPGQNVQSSGMMLPVADQLPRGGPSMLPSLGQQPILSSSVSRRSDLTGALAVRNSIPETNSRVLPTTHSVFNNFPADLPRSSFPLASAPGISVPVSVSYQEEVNSSDAKGGSSAATAGFGNPSYDIFNDFPQHQQHNKNISNKLNDWDLRNMGLVFSSNQDAATATATAAFSTSEAYSSSSTQRKRRETDATVVGEHGQNLQSPSRNLYHLNHVFMDGGSVRVKSERVAETVTCPPANTLFHEQYNQEDLMSAFLKQEGIPSVDNEFEFDGYSIDNIQV

SEQ ID NO: 11534 - protein, 291 aa, Thermobifida fusca YX
MRAVSGIPPAFSPPSGKPSMSLLQSTTQSGKVALDRIRDMPDRAVCAFDFDGTLAPIVPDPRDSRAHPGAVPALRALAGRVRAVAVITGRPAQTAVDYGGLDAVPGITVLGHYGRERWEDGKLTVPEPPPGVAMVREALPGLLDEVGAPEGTWIEDKKHALAVHTRRTADPEAALELLRAPLADLAKRAELAVEPGRMVIELRPPGVDKGAALTDLVTRLGAEAVLYAGDDLGDLAAYDAVERLREQGVAGFKLCSGSAEVTELARRADAVVPGPEGVVAFLEELVAAVGG

SEQ ID NO: 11535 - protein, 479 aa, Thermobifida fusca YX
MDKAQILVASNRGPVSFSIGDDGAVKSRRGGGGLVSGLSSVATEIETLWVCAALSDADRKAAAAAPEGRLDKAGYDVGGASVRMLNIPADVFNNAYNSVANSTLWFVHHMLYDTPNKPSFGSRFRAEWEDYRAYNSAFAEALLTGADEGAKVAVQDYHLALVPKMLRVRRPDLRIAHFSHTPWAPPEYFRMLPADIGRELLEGMLGADHLGFLSVRWADAFLRCCEVFLRAPVNWGTRTVEHGGRVIRVGVHGLGADAQGLRERAAAEDVARWRERLRERVGDRKLIVRVDRTELSKNIVRGLEAFGELLRKRPEWRNRVTHLAFAYPSRSGVAEYRAYTESVRATAEAINAEFGTDDWTPVVLEVNDDYPRSLASYQIADVLLVNPIRDGMNLVAKEGPVLSLNGVALVLSTEAGAADDLGADAILVNPYDVSETAEALHRALTMDEEERRQRTERLAEAAAALPPQRWFTDQLRALD

SEQ ID NO: 11536 - protein, 502 aa, Persea americana
MAILVSLLFLAIALTFFLLKLNEKREKKPNLPPSPPNLPIIGNLHQLGNLPHRSLRSLANELGPLILLHLGHIPTLIVSTAEIAEEILKTHDLIFASRPSTTAARRIFYDCTDVAFSPYGEYWRQVRKICVLELLSIKRVNSYRSIREEEVGLMMERISQSCSTGEAVNLSELLLLLSSGTITRVAFGKKYEGEEERKNKFADLATELTTLMGAFFVGDYFPSFAWVDVLTGMDARLKRNHGELDAFVDHVIDDHLLSRKANGSDGVEQKDLVDVLLHLQKDSSLGVHLNRNNLKAVILDMFSGGTDTTAVTLEWAMAELIKHPDVMEKAQQEVRRVVGKKAKVEEEDLHQLHYLKLIIKETLRLHPVAPLLVPRESTRDVVIRGYHIPAKTRVFINAWAIGRDPKSWENAEEFLPERFVNNSVDFKGQDFQLIPFGAGRRGCPGIAFGISSVEISLANLLYWFNWELPGDLTKEDLDMSEAVGITVHMKFPLQLVAKRHLS

SEQ ID NO: 11537 - protein, 294 aa, Arthrobacter nicotinovorans
MNLMEVRELAPSRGQLDVAAVQVKFDSTELLEDRISRIQDLVSGVGKADLIVLPELWLHGGFSYDSWRKNAISLESEVFTFLSEVARDKKAWFHAGSFMVTEPSSAASDMWNTSVLFDPTGSLRATYKKIHRFGFSDGEPKLIAAGDEPRVVELQTERATAITGLSTCYDLRFPELYRHISAEGTALNVIPACWPLTRIQHWQTLGRARAIENQSFVVQCNMTGVDQEVELGGHSQIVDGNGDILAQADKEEAVLRATLNFDSLNELRSSFPVLNDRRADIWAAKGKTVIASHL

SEQ ID NO: 11538 - protein, 633 aa, Rhizobium sp. BR816
MSYLQSVPPHDLAAHLADHDGKSVLRFITCGSVDDGKSTLIGRLLVDAKLVFEDQLTNLGRVGSSGAVNGGEIDLALLLDGLEAEREQGITIDVAYRYFATSKRKFIVADTPGHEEYTRNMVTGASTADLAVILIDSRQGILQQTRRHSYIASLLGIRHVVLAVNKIDLVEFRQSVFDEIARDYKAFAKKLGFASIQPIPIAARFGDNVISASPNTPWYKGPALLEYLETVQLDPPATERPFRFPVQLVMRPNANFRGYAGQIASGSVSVGDPVVIAKSGQRSSVKAIVTFDGNLTTAAEGEAVTLVLADEVDASRGNMLVAPAARPFVADQFQAHVIWFDANPMLPGRSYILRTETDSVSATVTALKHQVNINSFAREAAKSLQMNEVGVCNISTQAPIVFDAYKESRATGNFVFVDRVTNATVGAGMIDFPLRRADNVHWQATDVNKGARSAMKSQRPAVLWFTGLSGSGKSTIANALDRLLHARGKHTYMLDGDNVRHGLNRDLGFTEADRVENIRRVAEVAKLMADAGLIVLVSFISPFRGERRMARELMEEGEFIEIFVDTPLEECARRDPKALYEKALAGKIANFTGVSSPYEAPESPELHLKTVEEDPVALALKIEAFLDRHREEK

SEQ ID NO: 11539 - protein, 73 aa, Sinningia lateritia
ISGTNGEVMPGQWEFQVGPSVGIEAGDHIWCARYLLERITEQTGVVLSLDPKPIEGDWNGAGCHTNYSTKSMR

SEQ ID NO: 11540 - protein, 628 aa, Debaryomyces hansenii CBS767
MTRSTDEETNNVSEEQLTNCEKSGRNTSSEIDNRSESMSGISEGERPSQLGESDGNRNSKSKKYYESNAGDGTKATDHHLTGLPLIATLVSCFTSLFIVALDQTIVSTILTTVGSEFHNFEKIGWLTSGYLLSLACLASIYGKVSIAFGRKYTLVWGILVFEAGSVVCARAQNMDTLIAGRVIQGIGGSCVQALTIIIMTEAVILSRRALAFILIGVCFSLASVIGPFIGGAFATHVTWRWCFYVNLPVGGFAIVLLIVCFHPPKPKGNFKEKLARIDYLGVFLLTSGLVLVLLGLTFGGVDFSWNSAAIILLFVLGGLLIIVFCIYNFKISKDPIIIKEVIIIPQIFAASWSATFNFAFFMANLTYLAIYFQVIFNASPWQSGVDLLPMVISVSLSSIANGVFMRFTRYVKVTMLISTTLGPIGCGLLLLLEKDSPARDRIGLLIISGISVGLQFQSSLLAAQLEAPPDVEGSLILTTIFLNFLKSTGATVAVTLAQLIYQATGTSYINSLLNRLEKGSTEYESLKKVPVKTLISTPSLIQSLPDSAKEMVLDQFMKALKNVFYLGLAFSCAGFIVSLFTTNKKIPRHENVKKAGDECDDEALIGDQNSTNADTAGNQLPPSIEGNK

SEQ ID NO: 11541 - protein, 156 aa, Arabidopsis thaliana
MERGRSDMEMINNMANCLILLSKAHQNDTKSRVFACKTCNKEFPSFQALGGHRASHRRSAALEGHAPPSPKRVKPVKHECPICGAEFAVGQALGGHMRKHRGGSGGGGGRSLAPATAPVTMKKSGGGNGKRVLCLDLNLTPLENEDLKLELGRFIF

SEQ ID NO: 11542 - protein, 511 aa, Nicotiana tabacum
MDGSTVQGGSSVESFLRNYKLGKTLGIGSFGKVKIAEHTLTGHKVAVKILNRRKIKNMEMEEKVRREIKILRLFMHPHIIRLYEVVETPSDIYVVMEYVKSGELFDYIVEKGRLQEDEARKFFQQIISGVEYCHRNMVVHRDLKPENLLLDSKWNVKIADFGLSNIMRDGHFLKTSCGSPNYAAPEVISGKLYAGPEVDVWSCGVILYALLCGTLPFDDENIPNLFKKIKGGMISLPSHLSAGARDLIPRMLIVDPMKRMTIPEIRMHPWFQAHLPRYLAVPPPDTMQQAKKIDEDILQEVVKRGFDRNSLVASLCNRVQNEGTVAYYLLLENQFRASSGYMGAEFQETMEYGYHQINSSEVLLPCWQHLPGIMDFQQVGARQFPVERKWALGLQSRAHPREIMTEVLKALQGLNVRWKKIGPYNMKCQWVPGVPGHHEGMSNNSIHIQFFGDDSTVIENGGVTIPNAVKFEVQLYKTREEKYLLDLQRVQGPQFLFLDLCAAFLAQLRVL

SEQ ID NO: 11543 - protein, 214 aa, Zea mays
MASSASRFIKCVTVGDGAVGKTCMLICYTSNKFPTDYIPTVFDNFSANVVVDGTTVNLGLWDTAGQEDYNRLRPLSYRGADVFVLAFSLVSRASYENIMKKWIPELQHYAPGVPVVLAGTKLDLREDKHYLMDHPGLVPVTTAQGEELRRQIGAMYYIECSSKTQQNVKAVFDAAIKVVIQPPTKIREKKKKKSRKGCSMMNIFGGRKMLCFKS

SEQ ID NO: 11544 - protein, 445 aa, Zea mays
MREILHIQGGQCGNQIGAKFWEVICDEHGIDATGRYAGDSDLQLERVNVYYNEASGGRFVPRAVLMDLEPGTMDSVRSGPFGQIFRPDNFVFGQSGAGNNWAKGHYTEGAELIDSVLDVVRKEAENCDCLQGFQVCHSLGGGTGSGMGTLLISKIREEYPDRMMLTFSVFPSPKVSDTVVEPYNATLSVHQLVENADECMVLDNEALYDICFRTLKLSTPSFGDLNHLISATMSGVTCCLRFPGQLNSDLRKLAVNLIPFPRLHFFMVGFAPLTSRGSQQYRALTVPELTQQMWDAKNMMCAADPRHGRYLTASAMFRGKMSTKEVDEQMLNVQNKNSSYFVEWIPNNVKSSVCDIPPRGLKMAGTFVGNSTSIQEMFRRVSEQFTAMFRRKAFLHWYTGEGMDEMEFTEAESNMNDLVAEYQQYQDATADEEYEDEEEEENVAE

SEQ ID NO: 11545 - protein, 625 aa, Cornus cf. canadensis Xiang and Fan 41-1
MASSGEQNQVELLENLKNRLAIAVRSIQWSYAIFWSISSRQPGVLEWGDGYYNGDIKTRKTVQAVEFNADQLGLQRSEQLKELYESLAVTESNPQARKPSAALSPEDLTDTEWYYLVCMSFVFNIGQGLPGRTFANGQPIWLCNAHYADSKIFSRSLLAKSASIQTVVCFPFLGGVVELGVTELVLEDPNFIQHIKTSFLENPYRTVPKIPSYYASENTRTEKDLILVKPSHNLLDTDLDAALECGEIDMCAPNNNSSGFLPNQRTEKSVMVEGLSGGASQVQSWQFMDDEISNCVQNSTNSSESISRTSENPEKDCCLTDLPECNLTKLTSLDLPNDDIHYHSVVSSLLKNSHQLILGPYFHKCNRESSFMGWKKTPSGIQQRRRGTPQKLLKKVLFEVARVHGGCLVESRQDNSRKDGLWRPEDDEIGTTDLFSERRRRDKTKERYSVLGSLIPSTSKDDKVSILDGTIEYLKELERRLEDSECLEARTRSKPQDTAERTSDNYENDRIGIGKKPMINKRKACDIVEAELEINLVQLKDSSTDDVSVRIIDKDVFIEIRCPWRERLLLEIMDAISNFHLDSHSVQSSNIDGILSLSIKSKFKGSTVASTGMIIQALQRIICKC

SEQ ID NO: 11546 - protein, 163 aa, Glycine max
  misc_feature (76)..(76): Xaa can be any naturally occurring amino acid
  misc_feature (128)..(128): Xaa can be any naturally occurring amino acid
  unsure (1)..(163): unsure at all Xaa locations
MACSSVSFLGPLSLLQNSGSEEDLQAKMEDQRKRKRMISNRESARRSRMRKQKHLDDLVSQVAQLRKENQHILTSXNHPTQQYLSVEAENSVLRAQVGELSHRLESLNEILGVLDATTTVSGFVAAAXSSTLVEPINNNSFFNPLNMGYLNHHIMVFADILQY

SEQ ID NO: 11547 - protein, 233 aa, Polaromonas sp. JS666
MRPPGLQLIKIVPMTASLESLFSHNRAWAAQMEAERPGFFTSLVKQQTPKYMWIGCSDSRVPANQITGLEPGEVFVHRNVANIVVHSDLNALSAIQFAVERLKVKDIMVVGHYGCSGVQAALEGARIGLADNWIRHIQDVRHRHRQLLDSLPDAVRANALCDINVIEQVVNVSVSTVMVDAWARSQDVTVHGWAFGVHDGLLQDLQMSVSDPEELDARYRQAVDRVWDLWNSR

SEQ ID NO: 11548 - protein, 165 aa, Solanum tuberosum
MAEPASPGGGGGSHESGGDPSPQSNLREQDRYLPIANIGRIMKKALPANGKIAKDSKDTVQECVSEFISFITSEASDKCQKEKRKTINGDDLLSALATLGFEDYIEPLKVYLTRYREMEGDAKGSARVGDASVRKDVVGSQLGSNTQFMYEGSFAQGLDYGNSQL

SEQ ID NO: 11549 - protein, 624 aa, Cornus unalaschkensis
MASSGEQNQVELLENLKNRLAIAVRSIQWSYAIFWSISSRQPGVLEWGDGYYNGDIKTRKTVQAVEFNADQLGLQRSEQLKELYESLAVTESNPQARRPSAALSPEDLTDTEWYYLVCMSFVFNIGQGLPGRTFANGQPIWLCNAHYADSKIFSRSLLAKSASIQTVVCFPFLGGVVELGVTELVLEDPNFIQHIKTSFLENPYRTVPKIPSYASENTRTEKDLILAKPSHNLLDTDLDAALECGEIVMCAPNNNSSGFLPNQRTEKSVMVEGLSGGASQVQSWQFMDDEISNCVQNSTNSSESISRTSENPEKDCCLTDLPECNLTKLTSLDLPNDDIHYHSVVSSLLKNSHQLILGPYFHKCNRESSFMGWKKTPSGIQQRRRGTPQKLLKKVLFEVARMHGGCLVESRQDNSRKDGLWRPEDDEIGTTDLFSERRRRDKTKERYSVLGSLIPSTSKDDKISILDGTIEYLKELERRLEDSECLEARTRSKPQDTAERTSDNYENDRIGIGKKPLINKRKACDIVEAELEINLVQLKDSSTDDVSVRIIDKDVFIEIRCPWRERLLLEIMDAISNFHLDSHSVQSSNIDGILSLSIKSKFKGSTVASTGMIIQALQRIICKC

SEQ ID NO: 11550 - protein, 579 aa, Cucurbita maxima
MLQMGKAREPNFLILFFFGLILAFGISSEGSQIRHYKWEVEYMFWAPDCNENIVMGINGQFPGPTIRANAGDTVVVELINKLHTEGVVIHWHGILQRGTPWADGTASISQCAINPGETFFYNFTVDNPGTFFYHGHLGMQRSAGLYGSLIVDPPQGKKEPFHYDGEINLLLSDWWHQSIHKQEVGLSSKPIRWIGEPQTILLNGRGQFDCSIAAKYDSNLEPCKLKGSEPCAPYIFHVMPKKTYRIRIASTTALAALNFAIGNHPLLVVEADGNYVQPFYTSDIDIYSGESYSVLITTDQNPSENYWVSVGTRGRHPNTPPGLTLLNYLPNSVSKLPTSPPPETPAWDDFDRSKNFTYRITAAMGSPKPPVKSNRRIFLLNTQNVINGYVKWAINDVSLALPPTPYLGAMKFNLLHAFDQNPPPEVFPEDYDIDTPPTNEKTKIGNGVYQFKIGEIVDVILQNANMMKENLSEIHPWHLHGHDFWVLGYGDGKFTAEEESSLNLKNPPLRNTVVIFPYGWTAIRFVADNPGVWAFHCHIEPHLHMGMGVVFAEGVEKVGRIPTKALACGGTAKSLINNP

SEQ ID NO: 11551 - protein, 1296 aa, Magnaporthe grisea 70-15
MEEIDGFVWVDAPESDQPNEIDNKIYNDGLKCRISVIEEALKPLTENLWSLNKYIHDHPELGYQEHKTHDALTGFMQQQKGWQVTRSAFGMETAWTAVYSSESAGPVVAFNAEMDALPGLGHACGHNLIAIASVAAGLATAEVMRKSHLPGKVVIIGTPAEEGGGGKIKLLEAGAYADVDVSLISHPSIVNNSPMVRTTAFSKLEVEYHGRAAHGANSPWLGINALDALITAYNAISVLRQQTQPGDVIGLQITNGGNAPNVIHAFAAGKAVLRATSASRLQELQRKVEACFRAGAEATGARLEVKATPGYKDHVPNRVMAESYTKYWEALPDMPQPRIPPGGQLTFVKASTDQGDISYCMPSLNASFAIPPGPKGGPPHSPDFEKASSTEAAFDRAMRVGKAMAGTAVDLFADQEFLEKVKAQWRRDMVIEFTDDKIPQYAILSHTWGAEEVSYQDMQRLATNRKRKSWDLGRSPSSSSTASVAMAIFEMSGYIKIKAASHYARAHGFRYLWVDTCCIDKTSSAELSEAINSMFVWYRDAALCFAYLEDVPNRQLKDSRWFTRGWTLQELIAPRQMIFCSSNWNEVGRKSSSNFCDLLATITGVDRRVLRGNINLDEISVANRMRWAANRKTTRREDMAYCLMGIFSVNMPLLYGEGGIRAFIRLQEEIMKDTDDHSIFAWAAQPLSDNPLHGLLASSPAAFADAQTIRLPPLQTSDSVPMSMTNQGLRLKVFLWSVPEYLDDLRRYLPRDSVVTSQELSLPLDGYFAFLECSVIENGEFLCPVILLRNLWGDQYARINIDMVYHLRDPRTYSLDRPGSGYCSIYVKRSPREILPDFIVALEKGLGSYDDRITFVEQALPPESWDPASFVLTPRPVGPSKTTVATIRFADSARKSCLDVSVGLIKVSHGWEPWCRQSHHVSRSLWDVHKELVDALWNSQMPQQLWEAGDTMGTVAQTRLTTRYGRPYVLLEFVQRFEIDGTEIFQPEDNINAAIQTAIEAAKKVLPEPKDGWISDLEATDLVEELHHAGEDDIINIVHESQQGLTGFNRLHLALATGSCKLFDRCISEDVTKPPYGRQETVADLIAFLLGDIYQTGVSLPPDQAAVEAILALDPLSARKLDIRGYSVLWHVARGGDASRMAWLLRDGFTIEAMCRDGRRPIHAACREGYSDVVKVLLESGARADLVANGRTKCVEVLLEAGVDVSRRCECYFVSFNEARSIKKPESFDVVAANELPGNIAAERGFDQIMELISGRGREAAKSPLSPRAMSFEREDDWVVRSVSAPSGTGLAPESS

SEQ ID NO: 11552 - protein, 624 aa, Cornus unalaschkensis
MASSGEQNQVELLENLKNRLAIAVRSIQWSYAIFWSISSRQPGVLEWGDGYYNGDIKTRKTVQAVEFNADQLGLQRSEQLKELYESLAVTESNPQARRPSAALSPEDLTDTEWYYLVCMSFVFNIGQGLPGRTFANGQPIWLCNAHYADSKIFSRSLLAKSASIQTVVCFPFLGGVVELGVTELVLEDPNFIQHIKTSFLENPYRTVPKIPSYASENTRTEKDLILAKPSHNLLDTDLDAALECGEIVMCAPNNNSSGFLPNQRTEKSVMVEGLSGGASQVQSWQFMDDEISNCVQNSTNSSESISRTSENPEKDCCLTDLPECNLTKLTSLDLPNDDIHYHSVVSSLLKNSHQLILGPYFHKCNRESSFMGWKKTPSGIQQRRRGTPQKLLKKVLFEVARMHGGCLVESRQDNSRKDGLWRPEDDEIGTTDLFSERRRRDKTKERYSVLGSLIPSTSKDDKISILDGTIEYLKELERRLEDSECLEARTRSKPQDTAERTSDNYENDRIGIGKKPLINKRKACDIVEAELEINLVQLKDSSTDDVSVRIIDKDVFIEIRCPWRERLLLEIMDAISNFHLDSHSVQSSNVDGILSLSIKSKFKGSTVASTRMIIQALQRIICKC

SEQ ID NO: 11553 - protein, 624 aa, Cornus unalaschkensis
MASSGEQNQVGLLENLKNRLAIAVRSIQWSYAIFWSISSRQPGVLEWGDGYYNGDIKTRKTVQAVEFNADQLGLQRSEQLKELYESFAVTESNPQARRPSAALSPEDLTDTEWYYLVCMSFVFNIGQGLPGRTFANGQPIWLCNAHYADSKIFSRSLLAKSASIQTVVCFPFLGGVVELGVTELVLEDPNFIQHIKTSFLENPYRTVPKIPSYASENTRTEKDLILAKPSHNLLDTDLDAALECGEIVMCAPNNNSSGFLPNQRTEKSVMVEGLSGGASQVQSWQFMDDEISNCVQNSTNSSESISRTSENPEKDCCLTDLPECNLTKLTSLDLPNDDIHYHSVVSSLLKNSHQLILGPYFHKCNRESSFMGWKKTPSGIQQRRRGTPQKLLKKVLFEVARMHGGCLVESRQDNSRKDGLWRPEDDEIGTTDLFSERRRRDKTKERYSVLGSLIPSTSKDDKISILDGTIEYLKELERRLEDSECLEARTRSKPQDTAERTSDNYENDRIGIGKKPLINKRKACDIVEAELEINLVQLKDSSTDDVSVRIIDKDVFIEIRCPWRERLLLEIMDAISNFHLDSHSVQSSNVDGILSLSIKSKFKGSTVASTRMIIQALQRIICKC

SEQ ID NO: 11554 - protein, 589 aa, Arabidopsis thaliana
MSPTNVQVTDYHLNQSKTDTTNLWSTDDDASVMEAFIGGGSDHSSLFPPLPPPPLPQVNEDNLQQRLQALIEGANENWTYAVFWQSSHGFAGEDNNNNNTVLLGWGDGYYKGEEEKSRKKKSNPASAAEQEHRKRVIRELNSLISGGVGGGDEAGDEEVTDTEWFFLVSMTQSFVKGTGLPGQAFSNSDTIWLSGSNALAGSSCERARQGQIYGLQTMVCVATENGVVELGSSEIIHQSSDLVDKVDTFFNFNNGGGEFGSWAFNLNPDQGENDPGLWISEPNGVDSGLVAAPVMNNGGNDSTSNSDSQPISKLCNGSSVENPNPKVLKSCEMVNFKNGIENGQEEDSSNKKRSPVSNNEEGMLSFTSVLPCDSNHSDLEASVAKEAESNRVVVEPEKKPRKRGRKPANGREEPLNHVEAERQRREKLNQRFYSLRAVVPNVSKMDKASLLGDAISYISELKSKLQKAESDKEELQKQIDVMNKEAGNAKSSVKDRKCLNQESSVLIEMEVDVKIIGWDAMIRIQCSKRNHPGAKFMEALKELDLEVNHASLSVVNDLMIQQATVKMGNQFFTQDQLKVALTEKVGECP

SEQ ID NO: 11555 - protein, 624 aa, Cornus unalaschkensis
MASSGEQNQVELLENLKNRLAIAVRSIQWSYAIFWSISSRQPGVLEWGDGYYNGDIKTRKTVQAVEFNADQLGLQRSEQLKELYESLAVTESNPQARRPSAALSPEDLTDTEWYYLVCMSFVFNIGQGLPGRTFANGQPIWLCNAHYADSKIFSRSLLAKSASIQTVVCFPFLGGVVELGVTELVLEDPNFIQHIKTSFLENPYRTVPKIPSYASKNTRTEKDLILAKPNHNLLDTDLDAALECGEIDMCAPNNNSSGFLPNQRTEKSVMVEGLSGGASQVQSWQFMDDEISNCVQNSTNSSESISRTSENPEKDCCLTDLPECNLTKLTSLDLPNDDIHYHSVVSSLLKNSHQLILGPYFHKCNRESSFMGWKKTPSGIQQRRRGTPQKLLKKVLFEVARMHGGCLVESRQDNSRKDGLWRPEDDEIGTTDLFSERRRRDKTKERYSVLGSLIPSTSKDDKISILDGTIEYLKELERRLEDSECLEARTRSKPQDTAERTSDNYENDRIGIGKKPLINKRKACDIVEAELEINLVQLKDSSTDDVSVRIIDKDVFIEIRCPWRERLLLEIMDAISNFHLDSHSVQSSNIDGILSLSIKSKFKGSTVASTGMIIQALQRIIWKC

SEQ ID NO: 11556 - protein, 541 aa, Thermobifida fusca YX
MAAKLIAFDEEARRGLERGMNQLADAVKVTLGPKGRNVVLEKKWGAPTITNDGVSIAKEIELEDPYEKIGAELVKEVAKKTDDVAGDGTTTATVLAQALVREGLRNVAAGANPIGLKRGIDAAVARISEELANLSKEVETKEQIASTASISAGDPQIGEYIAEAMDKVGKEGVITVEEGQTFGLELELAEGMRFDKGYISPYFATDLERMETVLEDPYILIANQKISNNNEFLPVIEKVLQAGRPLVVIAEDVEGTALQTLVVNKIRGTFKSVAIKAPGFGDRRKAMLQDIAILTGGQVITEEVGLKLENTELDMLGRARKVVVTKDETTIVDGAGDASAIAGRVNEIRAEIERTDSDYDREKLQERLARLAGGVAVIKAGAATEVELKERKHRIEDAVRNAKAAVEEGILPGGGVALLQASIAAFEKLELEGDEAIGASIVRRAVEEPLKQIAINAGYEGGVVVEKVKSLEPGIGLNAATGEYTDLFKDGVIDPTKVTRSALQNAASIAGLFLTTEAVIAEKPEKPAANNAGGDMGGMDF

SEQ ID NO: 11557 - protein, 493 aa, Panus rudis
AIGPVTDLHIVNDNIAPDGFTRAAVLAGGTFPGPLITGNKGDNFRIDVIDDLTEESMLKSTSIHWHGFFQKGTNWADGPAFVNQCPITTGHSFLYNFNVPDQAGTFWYHSHLSTQYCDGLRGAFVVYDPNDPHADLYDVDDDSTVITLADWYHTLARQITGVPTPDATLINGLGRSASGPQDSELAVITVEQNKRYRLRLVSISCDPNYIFSIDSHNFTIIEVDGVNSKPLTVDSAQIFAAQRYSVVLNANQPVGNYRIRARPNNGDTTFTNGRNSAILRYKGATVEEPATITPPVSQTPLIEANLKPLASMPVPGTHTPGVADVVKPLQFGFNPPAFTINGASFVPPTVPVLLQILSGAKTAQEIVPSGSIIELPLNSVVELSFPNPTGAPGGPHPFHLHGHTFFVVRSAGQTTYNYDDPIARDVVSTGTAGDNVTIRFATDNAGPWFLHCHIDWHLDAGFAVVMAEGINQTQAANPTPDAWNQLCPTYDAL

SEQ ID NO: 11558 - protein, 432 aa, Oryza sativa (japonica cultivar-group)
MGRKPDPSKPHYGGGASPRAARRTQPSPVFLGTALFVLGFVSLFTGHIVTDADWSRIRSRWRSKQHVICLSSWSMLPYNVGNVQVRNNEPINIWKSSFQITDAVVVARILNATLVVPELDHHSFWKDDSDFSDIFDVDWFISYLSKDVTIVKRIPYEVMMSMDKLPWTMRAPRKSMPDFYIDEVLPILMRRRALQLTKFDYRLTNELDEELQKLRCRVNFHALRFTNSIQTLGEKLVRKLRSMSSRYVAVHLRFEPDMLAFSGCYYGGGDKERRELGEIRKRWDTLPELSAEDERSRGKCPLTPQEIGLMLRALGFSNDTYLYVASGEIYGGEETLQPLRDLFPNYYTKEMLAGNDLKPFLPFSSRLAAIDFIVCDGSDVFVTNNNGNMAKVLAGRRRYMGHKRTIRPNAKKLNLLFKRRKQMGWDIFSQKY

SEQ ID NO: 11559 - protein, 486 aa, Solanum tuberosum
MGLVSENYNKKLLSKIATNDGHGENSAYFDGWKAYENDPFHPTQNPHGVIQMGLAENQLCFDLIQEWIVNNPKASICTYEGVQDFQDIAIFQDYHGLPEFRKAVARFMEKVRGDRVTFDPERIVMSGGATGAHESLAFCLADPGDAFLVPTPYYPGFDRDLRWRTGVQLFPVVCESSNNFKVTKEALEEAYKKAQESNIKVKGLLINNPSNPLGTILDKETLKDILRFINDKNIHLVCDEIYAATAFSQPSFISISEVMSEVVGCNDDLVHIVYSLSKDLGFPGFRVGIIYSYNDVVVNIARKMSSFGLVSTQTQRLIASMLSDTIFVENFIAKSAMKLSQRHDLFTKGLGQVGITTLKSNAGLFIWMDLRRFLEKSTFDDELKLWHIIINKVKLNVSPGCSFHCSEPGWFRVCFANMDDATMQVALKRIRHFVYLQPSKGVEVATKKQYCRTRSKLEISLSFRRLDDFMNSPHSPMSSPMVQARN

SEQ ID NO: 11560 - protein, 493 aa, Thermoplasma acidophilum DSM 1728
MDTKLYIDGQWVNSSSGKTVDKYSPVTGQVIGRFEAATRDDVDRAIDAAEDAFWAWNDLGSVERSKIIYRAKELIEKNRAELENIIMEENGKPVKEAKEEVDGVIDQIQYYAEWARKLNGEVVEGTSSHRKIFQYKVPYGIVVALTPWNFPAGMVARKLAPALLTGNTVVLKPSSDTPGSAEWIVRKFVEAGVPKGVLNFITGRGSEIGDYIVEHKKVNLITMTGSTATGQRIMQKASANMAKLILELGGKAPFMVWKDADMDNALKTLLWAKYWNAGQSCIAAERLYVHEDIYDTFMSRFVELSRKLALGDPKNADMGPLINKGALQATSEIVEEAKESGAKILFGGSQPSLSGPYRNGYFFLPTIIGNADQKSKIFQEEIFAPVIGARKISSVEEMYDLANDSKYGLASYLFTKDPNIIFEASERIRFGELYVNMPGPEASQGYHTGFRMTGQAGEGSKYGISEYLKLKNIYVDYSGKPLHINTVRDDLFQ

SEQ ID NO: 11561 - protein, 267 aa, Debaryomyces hansenii CBS767
MYSDSRDSVFEWDSDVFSDKFRGNSDVSSQGTLSTPSTGNQYCTPRSISAVESFSYDNTMLQPEVIPRTSIWSASFRSNSESLVPFDPLVVNGAEQKTGEEEYVYQIPPRFVFRSFRGCRFAVEDNARFFVIKSYSGMDVDASIANNIWASTNLGNKRLNRAFDEVRAVRGKIFLFFLVNCSGRFCGVVEMKNNIDFTRTSDVWVEKSRWKGVFPVEWLMIKDVPNRHFQHLKNPLNESKSVTNSRDTQELPFDIGVSMLKIFSSFK

SEQ ID NO: 11562 - protein, 622 aa, Debaryomyces hansenii CBS767
MSEQQGSDNRHHHHHHHHNNHHGDHSGQHDGHNNKVHQPQPIDPKANPANRIGKYQVLKTLGEGSFGKVKLAQHTTTGQKVALKIINRKTLAKSDMQGRVEREISYLRLLRHPHIIKLYDVIKSKDEIIMVIEYAGKELFDYIVQRGKMPEDEARRFFQQIIAAVEYCHRHKIVHRDLKPENLLLDEQLNVKIADFGLSNIMTDGNFLKTSCGSPNYAAPEVISGKLYAGPEVDVWSSGVILYVMLCGRLPFDDEFIPALFKKISNGVYTLPNYLSQGAKDILTRMLVVNPLNRITIHEIIEDEWFKQNIEEYLLPPDLSKTKHKKIEVDEDVITALQSTMGYDRDEIVNVINKCNQHNAPQQQSNEIIDAYLLMRENRTLVKDLKNSKLNNMDTFLSQSPPPSWTNNANNNSNMNINVNHSTKAPGVQQSLTYQTLAAVPDLSTLPNSTIAILPSSLPSIHRAYMMESNMDTQLKIAPVSHKKLKTRWHFGIRSRSYPLDVMGEIYRALKNLGAEWSKPTEEELWTIRVRWKYGPCILPNEKSQEEQQKDIPDMMKMQIQLFQLEPNNYLVDFKFDGWENSSNKDVSIKQDVDEMSSFSAYPFLHLATRLIMELAVNSQTN

SEQ ID NO: 11563 - protein, 154 aa, Zea mays
RCIPFRYRDINDGASDDEQKKLVEVLMISSQSGPGLLFPKGGWENDETVEEAAAREAIEEAGVRGDLVQLLGFYDFKSKQPEATCRAAIFALHVKEELASWPEQSTRQRSWLTVPEAAERSRYPWMQEALVTGFSAWLENWRNGGGGCADRTER

SEQ ID NO: 11564 - protein, 189 aa, Nostoc punctiforme
MLQGITPKLRSPIVLFTYYNPILHRGIDKFLQEIAAAGVAGLVVPDLPLEEAAGLLEPAKEMGIDVILLVAPTSDAKRIEAIAHSSQGFIYLVSVTGVTGVRSQLESRVSDLLKQIRGVTEKPIGVGFGISDAAQARQVKEWGADAAIVGSAVVKRLAEGTPEQGLSAIAQLCQSLKAAIKTSTNTPLD

SEQ ID NO: 11565 - protein, 395 aa, Saccharomyces cerevisiae
MLRTQAARLICNSRVVTAKRTFALATRAAAYSRPAARFVKPMVATRGLKQINFGGTVETVYERADWPREKLLNYFKDDTFALIGYGSQGYGQGLNLRDNGLNVIIGVRKDGASWKAAIEDGWVPGQNLFSVEDAIKKGNYVMNLLSDAAQSETWPTIKPLLTKGKTLYFSHGFSPVFKDLTHVEPPKDLDVILVAPKGSGRTVRSLFKEGRGINSSYAVWNDVTGKAHEKAQALAVAIGSGYVYQTTFEREVNSDLYGERGCLMGGIHGMFLAQYDVLRENGHSPSEAFNETVEEATQSLYPLIGKYGMDYMYDACSTTARRGALDWYPIFKNALKPVFQDLYESTKNGTETKRSLEFNSQPDYREKLEKELVTIRNMEIWKVGKEVRKLRPENK

SEQ ID NO: 11566 - protein, 312 aa, Saccharophagus degradans 2-40
MTSTLIIGESMVELTHHTDDLLRKSFAGDTHSAAVYLKRLAGDSEDVSLLSAVGLDGLSNELIEALNKEGVSTHTVLQHPTRTIGLYMVHTDSQGERSFQYWRSQSAARATMALLEQQPALLADLAPTRVFFSGITLAIFDSTARAQLRELLEQLKMRGTQVIFDPNYRPALWQNKEETKAEYQWAFAVSDVVLPGLDDLNKLYGTSSMQSAVALVKTLCSGEAIIKNGEHGVTYLNADTQFSVEVAPVAKPVDTTAAGDSFNAALMAARSKGLPPQQAIEFAASVAAIVIQHKGAIIPRTELQHAINQLNT

SEQ ID NO: 11567 - protein, 395 aa, Saccharomyces cerevisiae
MLRTQAARLICNSRVITAKRTFALATRAAAYSRPAARFVKPMITTRGLKQINFGGTVETVYERADWPREKLLDYFKNDTFALIGYGSQGYGQGLNLRDNGLNVIIGVRKDGASWKAAIEDGWVPGKNLFTVEDAIKRGCYVMNLLSDAAQSETWPAIKPLLTKGKTLYFSHGFSPVFKDLTHVEPPKDLDVILVAPKGSGRTVRSLFKEGRGINSSYAVWNDVTGKAHEKAQALAVAIGSGYVYQTTFEREVNSDLYGERGCLMGGIHGMFLAQYDVLRENGHSPSEAFNETVEEATQSLYPLIGKYGMDYMYDACSTTARRGALDWYPIFKNALKPVFQDLYESTKNGTETKRSLEFNSQPDYREKLEKELDTIRNMEIWKVGKEVRKLRPENQ

SEQ ID NO: 11568 - protein, 637 aa, Pseudomonas fluorescens Pf-5
MSVRRTRKDDGSQWTVADSRSVYGIRHWGAGYFAINDAGRVEVRPNGPSSLPIDLFEQVEELRKSGLSLPLLVRFPDILQDRVRQLTGAFDANIGRLEYQSKYTALYPIKVNQQEAVIENIIATQNVSIGLEAGSKPELLAVLALAPKGGTIVCNGYKDREFIRLALMGQKLGHNVFIVIEKESEVGLVIEEAASLKVKPQVGLRVRLSSLASSKWADTGGEKSKFGLSAAQLLSVVERFRAAGLDQGIRLLHFHMGSQIANLADYQHGFKEAIRYYGELRNLGLPVDHIDVGGGLGVDYDGTHSRNASSINYDMDDYAGVVVGMLKEFCDAQSLPHPHIFSESGRSLTAHHAMLVVQVTDVEKHNDDVPQIDNKQELPETVQWLVDLLGPTDIEMVTETYWRATHYMSDVAAQYADGKLTLAEKALAEQCYFAVCRRLHNSLKARQRSHRQVLDELNDKLADKYICNFSVFQSLPDTWAIGQVLPILPLHRLDEEPLRRAVLQDLTCDSDGKIKQYVDEQSIETSLPVHGLNEGEDYLLGIFLVGAYQEILGDMHNLFGDTDSVNIYQRANGSVYHAGIETHDTIEDMLRYVHLSPEELMTHYRDKVASAKISAAERTQFLDALRLGLTRSSYLSS

SEQ ID NO: 11569 - protein, 338 aa, Pisum sativum
MGAKIKIGINGFGRIGRLVARVALKRDDVELVAVNDPFITTDYMTYMFKYDSVHGQWKNDELTVKDSNTLLFGQKPVTVFAHRNPEEIPWASTGADIIVESTGVFTDKDKAAAHLKGGAKKVIISAPSKDAPMFVVGVNENEYKPEFDIISNASCTTNCLAPLAKVINDRFGIVEGLMTTVHSITATQKTVDGPSSKDWRGGRAASFNIIPSSTGAAKAVGKVLPALNGKLTGMSFRVPTVDVSVVDLTVRLEKAATYDEIKAAIKEESEGKLKGILGYTEDDVVSTDFIGDTRSSIFDAKAGIALNDKFVKLVSWYDNELGYSTRVVDLIVHIAKQL

SEQ ID NO: 11570 - protein, 341 aa, Solibacter usitatus Ellin6076
MKALVKSKSQPGLWLEEIPEPAIGINDVLIRVLRTGICGTDVHIYKWDEWARETIHVPMAIGHEFVGRIEAVGSNVADFFPGDIVSGEGHVVCGRCRNCFAGRRHLCAKTMGVGVNRPGAFAEYIALPMTNIWRHHEGIDLDVAAIFDPFGNAVHTALSFPVLGEDVLITGAGPIGIMAAAVARHAAARYTVITDLNPYRLELAAKLGVTRAVNVREQKLGDVQKELGMTEGFDVGLEMSGNPAGFRDMLANMSHGAKIAMLGIPAGEMAIDWRTVIFNMLTIKGIYGREMYETWYKMSVMLQSGLDISPVITHRYHYTDFEKGFEVMSSGNSGKVILSWD

SEQ ID NO: 11571 - protein, 475 aa, Pseudomonas aeruginosa UCBPP-PA14
MSKVVLASQLPNKRNASLAPGLKQRHVTMLSIAGVIGAGLFVGSGHAIAAAGPAALLAYLIAGTLVVLVMRMLGEMAVASPDTGSFSTYADRSIGRWAGFTIGWLYWWFWVLVIPLEAIAAAAILNAWFPAIDTWIFALAVTFLLTVTNLFSVARYGEFEFWFALLKVIAIIAFIVLGAVAIVGGLPEREVSGLSSLMASHGGFVPNGYGAVLGALLTTMFSFMGTEIVTIAAAESKDPAKQITRATNSVIWRIGLFYLVSIFIVISIVPWNDPLLIQVGSYQRALELLDIPHAKLIVDLVVLVAVASCLNSAIYTSSRMVFSLAKRGDAPSVLKLTNTAHVPRPAVLASTAVGFLTTIVNYFAPEKVFTFLLASSGAVALLVYLVIAVAQLRMRKQLQVSGQPIEFRMWLYPWLTWAVILFIVAALSIMLIMPEHRHEVFATALLTIFTVCLGLLNARRKPRLGEDYAGKTARV

SEQ ID NO: 11572 - protein, 1562 aa, Polaromonas sp. JS666
MTGRMTLRTRLVMLVVAAIVPLFGLSIFKAWVNSDAAINRATANLQFAASLVAANQERMVDSAHQLLISIANVPGLTSEKSLDCQRYFKTLRENFSIYANLGIVGVDGYARCHGVDSSQPAYLGDRDYFRAAVTRRSFVAGDYILGRLSGKPSITFALPVLGADGQVLRVVYVAVDLTEMAKSVAAIQLPPGAAVGIHDRNGVLLASKPALPIKVGQKVASVVLREAVQAKSTGVREGKDASGELRLWAFMPSGASADSAFFVAISINRDLVVGPGQRQLGLELAVLALVAFLGAWIAWMMGGRTIVKPTREILDATRLLQKGQLDVRIPMHSVHDAGEFTKIADGFNAMAESLQQREQDLEAELARSQQSRATLDLTVNSMQEGLIAVDAFGRPLLVNEAASRLFVLAQAPTVLSAEWPQHLGLYLPGADTLYAFDQLPLYKALQGQSGGPQHILVRNAAVPAGRLISCSYRPMHGRDGLVGALMVFADITQLEQLQLERAKSYAELRETQRKLLEAQRMGRIGNWESDFRTGQLWWSEEVYALYGLAPGTVELCSDMAMSMMHPEDRARYVQGYERSVGERAEYGVEFRVITPAGDVRWMHQLCKPHFDETGQAIYRTGVIQDITARKQSELALVHTTDLLRRTGEMAMVGGWELVLDGMRLSSSEQVLRIHELEPGAPWGAEDAINSYPPEARKTFIAAVNAATGHGTPWDLELPMITQTGRRIWVRTQGQAFMQDGKVVRLAGALQDITAQHESREHLRLLESSISRLNDMVVITEAVPLGEPGPRIVFVNDAFVRRTGYSREEVLGKTPRILQGPQTQRAELDRIGAALRAWQPVQAELVNYTKSGEPFWLDLDIVPVADSQGGFTHWVAVERDITQRKLAQQALVESEQRYAALFEGAPVPMWIVDDQTHAFLAVNGACTERYGYTREELLSMTIFDIRSDIEAQRLKAEIASGAHKPVNRRVHRSRDGADLDVETVSRKIQYEGRPARLVVAFDVSAQVKAEKDAQEYLFTLQRAADAASAITWHQTLDGTMQEVAEQVRGVIGTHQAAVSLTINSDWAQAVHALSLSEKYAAYRDLMEPPDGTGIYAVVCEANRSMRLTQAELEAHPRWRGFGSHAGKHPAMRGWLAVPLVARSGKNMGLLQLSDKYEGEFTQQDEYVAMELAQLASIAIENVQLLEEVGRLNAGLEQKVAERTAALTRQEALFRALAERAPQVIWTADPSGAPTYYNQAWFDLVGGRFSDWAGSRWLTAIHPEDLPEVQASWQLASASRSQYENIRRLRARDGSYHTMSSRATPVLDERGELAYWVGIDADITEIKTIEAALRLSNQELEAFSYSVSHDLRSPLNTIDGFSRLLSKQLPGHVNEKSRHYLARIQTGVAQMGQLIEDLLSLAQVSRAQLRAELVDLSALSRRILGEWQARDPERRVVVHVESGLQAHGDSRLVGVVMENLLSNAWKFTSRKVGASISVTQQPDAAGQPVFVVRDNGAGFDMAYADKLFNPFQRLHAASEFAGTGIGLASASRVIGRHGGRLWAQSEPGCGAAFFFTLPRTAIAV

SEQ ID NO: 11573 - protein, 624 aa, Cornus unalaschkensis
MASSGEQNQVELLENLKNRLAIAVRSIQWSYAIFWSISSRQPGVLEWGDGYYNGDIKTRKTVQAVEFNADQLGLQRSEQLKELYESLAVTESNPQARRPSAALSPEDLTDTEWYYLVCMSFVFNIGQGLPGRTFANGQPIWLCNAHYADSKIFSRSLLAKSASIQTVVCFPFLGGVVELGVTELVLEDPNFIQHIKTSFLENPYRTVPKIPSYASENTRTEKDLILAKPSHNLLDTDLDAALECGEIDMCAPNNNSSGFLPNQLTEKSVMVEGLSGGASQVQSWQFMDDEISNCVQNSTNSSESISRTSENPGKDCCLTDLPECNLTKLTSLDLPNDDIHYHSVVSSLLKNSHQLILGPYFHKCNRESSFMGWKKTPSGIQQRRRGTPQKLLKKVLFEVARMHGGCLVESRQDNSRKDGLWRPEDDEIGTTDLFSERRRRDKTKERYSVLGSLIPSTSKDDKISILDGTIEYLKELERRLEDSECLEARTRSKPQDTAERTSDNYENDRIGIGKKPLINKRKACDIVEAELEINLVQLKDSSTDDVSVRIIDKDVFIEIRCPWRERLLLEIMDAISNFHLDSHSVQSSNIDGILSLSIKSKFKGSTVASTGMIIQALQRTICKC

SEQ ID NO: 11574 - protein, 83 aa, Triticum aestivum; identical to SEQ ID NO: 1328

SEQ ID NO: 11575 - protein, 412 aa, Colwellia psychrerythraea 34H
MRRVVVTGIGMLSPLANTAEETWQNLLLGKSGIGNIDHFDTTDYPTKFAGLVKDFDAQNYMERKEAKKMDLFIQYGIAAGVQAFKDSGLEVTEQNAPRIGVAIGSGIGGLGLIEQNHNKLIKAEGNPRKLSPFFVPSTIINMIAGHLSIMFGLQGPNIAITTACTSGVHNIGHAARMIAYGDADAVVAGGAEKASTTLGMGGFGAARALSRRNDDPEAASRPWDKDRDGFVLGDGAGVIVVEEYEHAKARGAKIYAELVGFGMSGDAYHMTSPPENGDGAARAMQNAINDAKVDISRIGYINAHGTSTQAGDMAETNAVKTVFGAGAKNVMMGSTKSMTGHLLGAAGAIEAIFSIQALVNKQVPPTINLDNPDEGCDLDYIAGAARDVELEYVLCNSFGFGGTNGSLIFKKI

SEQ ID NO: 11576 - protein, 624 aa, Cornus unalaschkensis
MASSGEQNQVELLENLKNRLAIAVRSIQWSYAIFWSISSRQPGVLEWGDGYYNGDIKTRKTVQAVEFNADQLGLQRSEQLKELYESLAVTESNPQARRPSAALSPEDLTDTEWYYLVCMSFVFNIGQGLPGRTFANGQPIWLCNAHYADSKIFSRSLLAKSASIQTVVCFPFLGGVVELGVTELVLEDPNFIQHIKTSFLENPYRTVPKIPSYASENTRTEKDLILAKPSHNLLDTDLDAALECGEIDMCAPNNNSSGFLPNQRTEKSVMVEGLSGGASQVQSWQFMDDEISNCVQNSTNSSESISRTSENPEKDCCLTDLPECNLTKLTSLDLPNDDIHYHSVVSSLLKNSHQLILGPYFHKCNRESSFMGWKKTPSGIQQRRRGTPQKLLKKVLFEVARMHGGCLVESRQDNSRKDGLWRPEDDEIGTTDLFSERRRRDKTKERYSVLGSLIPSTSKDDKVSILDGTIEYLKELERRLEDSECLEARTRSKPQDTAERTSDNYENDRIGIGKKPLINKRKACDIVEAELEINLVQLKDSSTDDVSVRIIDKDVFIEIRCPWRERLLLEIMDAISNFHLDSHSVQSSNIDGILSLSIKSKFKGSTVASTGMIIQALQRTICKC

SEQ ID NO: 11577 - protein, 352 aa, Haemophilus somnus 129PT
MSINFVKEGNIMSKYVRSVCLVEPKKVDIKTVLYPKKGECDVLIKVESIGICGSDIGAFRGTNPLVTYPRILGHEIVGTVIESGVGMPKNINIGDRVILEPYIYCGHCYPCSISRTNCCEALKVLGVHIDGAMQEIVRHPAHMLIKAPDIPIHELALAEPLTISLHAIRRTKVKAGEHVAIIGAGAIGLMAALVAKAYGATPILIDILDKRLDYAKSIGIPNIINPAKENDLEAIKSITNGRMAEVVIEASGANIAVQNTLKYTSFAGRIALTGWPKNETPLPTNLITFKELNIYGARTSKGEFEEALKLLESRKIEPKNIISKVITFDEIPHYIEELSENPDDYLKIIAVF

SEQ ID NO: 11578 - protein, 300 aa, Cicer arietinum
MATTTAPSRQLTQKEADIQMMLAADVHLGTKNCNFQMERYIFKRRNDGIYIINLGKTWDKLNLAARIIVAIENSQDIIVQSARPYGQRAVLKFAQYTGAHAIAGRHTPGTFTNQLQTSFSEPRLLILTDPRTDHQPIKEAALGNIPTIAFCDTDSPMNYVDIGIPANNKGKHSIGCLFWLLARMVLQMRGTIRPGLKWDVMVDLFFYREPEEAKQPEEDEVAAPDYAIADFNVSAIPSDGQWPAAIDQPWNDAVPQPIPAVPAVNWAAPEAVAGDWGEAVPPPQQIPTAGIESVPATGWE

SEQ ID NO: 11579 - protein, 338 aa, Synechocystis sp. PCC 6803
MMKFEDFWYVVAESRNLKPGKVLARQILGQWLAIFRDQHGMAIALEDRCVHRHSRLSCGLIKQGNLHCPYHGWIYDHRGQVIGVPAEDQQFKPRENLRTKCYPTMEQEGFIYVCLGEPIQPPFALPQYGKKGWQRIRLIHRFANNVTNCVENFIDIPHTASVHPGIFRTAQRQAIKMIVDRHQGQVKAEYYNENNNLGWWGKFLNSQGNEISHTDRFIMPNVTSVEYKFSSQRHLFITSQSVPITEQSTLVYTDVAFNYGMWNFFAIPLVWWTAKRIIAQDLKILAIQQEVIAKYGTNFNHTPADTIHIFVESIRTAIAKGEDPRQLPDKTVEVTFYV

SEQ ID NO: 11580 - protein, 624 aa, Cornus unalaschkensis
MASSGEQNQVELLENLKNRLAIAVRSIQWSYAIFWSISSRQPGVLEWGDGYYNGDIKTRKTVQAVEFNADQLGLQRSEQLKELYESLAVTESNPQARRPSAALSPEDLTDTEWYYLVCMSFVFNIGQGLPGRTFANGQPIWLCNAHYADSKIFSRSLLAKSASIQTVVCFPFLGGVVELGVTELVLEDPNFIQHIKTSFLENPYRTVPKIPSYASENTRTEKDLILAKPSHNLLDTDLDAALECGEIDMCAPNNNSSGFLPNQRTEKSVMVEGLSGGASQVQSWQFMDDEISNCVQNSTNSSESISRTSENPEKDCCLTDLPECNLTKLTSLDLPNDDIHYHSVVSSLLKNSHQLILGPYFHKCNRESSFMGWKKTPSGIQQRTRGTPQKLLKKVLFEVARMHGGCLVESRQDNSRKDGLWRPEDDEIGTTDLFSERRRRDKTKERYSVLGSLIPSTSKDDKISILDGTIEYLKELERRLEDSECLEARTRSKPQDTAERTSDNYENDRIGIGKKPLINKRKACDIVEAELEINLVQLKDSSTDDVSVRIIDKDVFIEIRCPWRERLLLEIMDAISNFHLDSHSVQSSNIDGILSLSIKSKFKGSTVASTGMIIQALQRIIWKC

SEQ ID NO: 11581 - protein, 783 aa, Ralstonia eutropha JMP134
MTKASTSARESGKSASTSGKVAASAPVKGKSITVAKQQNTEVESKQTAAAAGAKSASAKAGATAPAPKARAASPAAVASERPAAPAVKPEPKKRGRKPKAELQRDESTTDDVTEEFFENDTPAAAPAAAPKTEKQKAKDRKAKEKALLKEFASTQQGTEEELELRRQKLKALIKLGKSRGYLTYAEINDHLPDDMVDSETIDTLVATLNDIGIAVYEQAPDAETLLLNDNAPSATSEEEAEEEAEAALSTVDSEFGRTTDPVRMYMREMGTVELLTREGEIVIAKRIEAGLKDMVMAISACPVTISEILANAERVASDEIKIDEFVDGLIDPNADEMAQEAAGASAADEEDLESDEDEESDEDEEDDDAAGAGASARQLEELKLSALEKFRVIAEQFDKMRRAFEKEGYNSKPYVKAQEAIQAELMGIRFTARSVERLCDTLRGQVDEVRKLERSILNIVVDKCGMPRSDFVARFPGNETNLDWVGTIVADGKPYSTIVERNVPAVHELQQKLIDLQSRVVLPLKELKGVNRKMAEGEKRAREAKREMTEANLRLVISIAKKYTNRGLQFLDLIQEGNIGLMKAVDKFEYRRGYKFSTYATWWIRQAITRSIADQARTIRIPVHMIETINKMNRISRQILQETGNEPDPATLAEKMEMPEDKIRKIMKIAKEPISMETPIGDDDDSHLGDFIEDTNTLAPAEAALHGSMRDVVKDVLDSLTPREAKVLRMRFGIEMSTDHTLEEVGKQFDVTRERIRQIEAKALRKLRHPSRSDKLKSFLEGN

SEQ ID NO: 11582 - protein, 276 aa, Zea mays
MGRSPCCEKAHTNKGAWTKEEDERLVAHIRAHGEGCWRSLPKAAGLLRCGKSCRLRWINYLRPDLKRGNFTEEEDELIVKLHSVLGNKWSLIAGRLPGRTDNEIKNYWNTHIRRKLLSRGIDPVTHRPVTEHHASNITISFETEVAAAARDDKKGAVFRLEDEEEEERNKATMVVGRDRQSQSHSHSHPAGEWGQGKRPLKCPDLNLDLCISPPCQEEEEEMEEAAMRVRPAVKREAGLCFGCSLGLPRTADCKCSSSSFLGLRTAMLDFRSLEMK

SEQ ID NO: 11583 - protein, 316 aa, Oryza sativa
MGNASGRLDDIADAEMDDGGGGGNRAGAGDYSSSLRPMDRAGLPPYGGAGGSGGLVRPPSSAAGYSGGGGSSSPPGTPPRPHSPRMFVPQSPVTPLHRAVDGPPPVFNQILTSEQEEDHDGPPDKLIPTLLVWTLGGKNVYIEGSWDNWKSKQLVHKCGKDHCVMLGLASGVYRYRFIVDGERRFQPDRPREADIMGTISNLIDVHDYVPDSVDSVSELMAPPSPDSSYGFLAPDDKEFTKEPPALPPQLHLGVLNSRGGSGGKEGECAMPKHNVLGHVFIGKGTPPMVAALGTTFRFQSKFVTKVLYKAIQREDR

SEQ ID NO: 11584 - protein, 624 aa, Cornus cf. canadensis Xiang and Fan 29-2
MASSGEQNQVGLLENLKNQLAIAVRSIQWSYAIFWSISSRQPGVLEWGDGYYNGDIKTRKTVQAVEFNADQLGLQRSEQLKELYESLVVTESNPQARRPSAALSPEDLTDTEWYYLVCMSFVFNIGQGLPGRTFANGQPIWLCNAHYADSKIFSRSLLAKSASIQTVVCFPFLGGVVELGVTELVLEDPNFIQHIKTSFLENPYRTVPKIPSYASENTRTEKDLILVKPSHNLLDTDLDAALECGEIDMCAPNNNSSGFLPNQRTEKSVMVEGLSGGASQVQSWQFMDDEISNCVQNSTNSSESISRTSENPEKDCCLTDLPECNLTKLTSLDLPNDDIHYHSVVSSLLKNSHQLILGPYFHKCNRESSFMGWKKTPSGIQQRRRGTPQKLLKKVLFEVARMHGGCLVQSRQDNSKKDGLWRSEDDEIGTTDLFLERRRRDKTKERYSVLGSLIPSTSKDDKISILDGTIEYLKELERRLEDSECLEARTRSKPQDTAERTSDNYENDRIGIGKKPLINKRKACDIVEAELEINLVQLKDSSTDDVSIRIIDKDVFIEIRCPWRERLLLEIMDAISNFHLDSHSVQSSNIDGILSLSIKSKFKGSTVASTGMIIQALQRIICKC

SEQ ID NO: 11585 - protein, 393 aa, Magnaporthe grisea 70-15
MALSRINGNEELYVGGVFALRRVQTLEEKNITHIVSVIDYSLEKYQELRGKFQHMSIDIDDVEDADLLRHFPKLVRFIDGALHPAGHDDDDQGTSDGDTDKGAQTSPHGSEGGQRGNAVYVHCAMGKSRSVTAVCAYLMHKHPARFGAADRSNPDRETAARAATQAAVDWVRQTREIAEPNDGFMKQLALWWEMGTPADADDAVERHPVYQRWLYKREVEESIRIGRAPDWVRFEDEESAKEEDAAATAGPDAQSKVEMRCKKCRRVLTTQRFIVPHSPAHPTSHKTMPACPHVFVEPLSWMRPVLETGELDGRLTCPGAKCGASIGRYSWLGFKCSCGEWVCPAFSLQRSKVDEVAVAATAARGARSGGSDNVEDPRARLGIRMPPSLRENL

SEQ ID NO: 11586 - protein, 215 aa, Hordeum vulgare subsp. vulgare
MAEDTETRPASAGAEEREEGEIADDGDGSAAAAAGRVSAHPLENAWTFWFDNPQGKSRAVAWGSTIHPIHTFSTVEDFWSLYNNIHHPSKLNVGADFHCFKDKIEPKWEDPICANGGKWTISCGKGKSDTFWLHTLLALIGEQFDFGDEICGAVVSVRKNQERVAIWTKNAANETAQISIGKQWKEFLDYKDSIGFVVHEDAKRSDKGAKNRYTV

SEQ ID NO: 11587 - protein, 381 aa, Arabidopsis thaliana
MAISDLPRDLVEEVLSRVPVTSLRTVRSTCKKWNIISKDESFTKKHVGQANAAARESEFQVVIMTEYKVYLMSVNLHGIQNNVDPSIEFKCKLISLDDSDRIGISQVHICHGLFLCITNEKNYKLVVWNPYRGQTKCIEHRISYKRWNSYALGYEMKNNSCLSTQNLENCVDFHPVYETEIYNFHSDSWKNIVDSTPEGDMQYFKQGVSLKGNTYWFARKYVIYEGGQEAWVSFLICFDFTTERFGPRLTLPFDYSTKESVSLLSAREEQLVLLYHPWFTMMMEIWVSNKIELNAVSWIKFLEVNMITFPHYRFSFHHVSFFIDKKNKVVVVLDKDKETRSRNLGYFIGDDGYFKEVELGGSRDRNGYPFVFSYVPSSVQF

SEQ ID NO: 11588 - protein, 280 aa, Magnaporthe grisea 70-15
MAGRLAGKNAVITGAAGGIGLETSILFAKEGAHVLMADISLDALAKALDKVKSLVPGAQVETVKCDVSKEAEVKAMIEHVDAWGGLDIIFNNAGIMHADDADAVDTPENIWNLTQDINVKGVWYGSKHAVLALRRHKKTKGSIINTASVVALVGSATPQLAYTASKGAVLAMTRELAIVHAREGFRFNNLCPAPLNTPLLQDWLGDDQAKRHRREVHFPTGRFGEAVEQAQAVLFLASDESSFVNGHDFVVDGGMTKAYVTPEGPAMAAPQNNASKSSLA

SEQ ID NO: 11589 - protein, 197 aa, Streptomyces coelicolor A3(2)
MAPVPGSGLAKGLAVTLRTMTRKTVTEQYPDAQPELPPRTRGVIGLFEENCTVCMLCARECPDWCIYIDSHKETVPAATPGGRDRSRNVLDRFAIDFALCMYCGICIEVCPFDALFWSPEFEYAETDIRDLTHERDKLREWMWTVPAPPALDPGAEEPKELAAARKAADKLAAQQQPDQPGPDHPGQPDESGQEGRT

SEQ ID NO: 11590 - protein, 391 aa, Thermoplasma acidophilum DSM 1728
MEKTANIDKGLENVNIKWTKLTYIDGNNGILKYGGYNVNDLIENGAKEDEIQYLFLYGELPNRLDLELFQSKVQKGYELPDFVKDIIFELPRESDAVAMQMAAFSALATSTYNFKWNADLDRDQAAKAIGLMSAVTANVYRHIMGKGPVDLEPSDSFAESFLRSTLDRTPSEDEIDAMNAALILYTDHEVPASTTAGLVAVSTLSDMYSGIAAALAALKGPLHGGAAEASIMQFQEIGDPDNVDAWFRDNIVNGNKRLMGFGHRVYKTYDPRARIFRRYAEKLSANDPEAKKMFDIATRLEKIGIDTFGSKKIYPNTDYFSGIVYLALGYPLRNNIYTSFFALSRVTGWISHFMEYVENQHRLIRPRAVYVGPEDLQFVKIDERRGPIITS

SEQ ID NO: 11591 - protein, 317 aa, Triticum aestivum
  misc_feature (257)..(257): Xaa can be any naturally occurring amino acid
  misc_feature (269)..(269): Xaa can be any naturally occurring amino acid
  misc_feature (281)..(281): Xaa can be any naturally occurring amino acid
  misc_feature (283)..(283): Xaa can be any naturally occurring amino acid
  misc_feature (287)..(287): Xaa can be any naturally occurring amino acid
  misc_feature (291)..(291): Xaa can be any naturally occurring amino acid
  misc_feature (297)..(297): Xaa can be any naturally occurring amino acid
  misc_feature (307)..(307): Xaa can be any naturally occurring amino acid
  unsure (1)..(317): unsure at all Xaa locations
MALSRAQTNSGESLISSTFASRYVRTALPRFRIPEQSIPKDAAYQIINDELMLDGNPRLNLASFVTTWMEPECDKLIQNSVNKNYVDMDEYPVTTEFQNRCVNMIAHLFNAPIGEDETAVGVGTVGSSEAIMLAGLAFKRKWQNKMKAEGKPHDKPNIVTGANVQVCWEKFARYFEVELKEVKLREGYYVMDPAKAVELVDENTICVAAILGSTLNGEFEDVKMLNDLLVAKNAKTGWDTPIHVDAANGGFIAPFIXPELEWDFRLPLXKNIKRQAGQQYXLXYAGXSGWXYWREQXRTCPNKLIFXNKLTSGAEQT

SEQ ID NO: 11592 - protein, 607 aa, Magnaporthe grisea 70-15
MLRTIPTRVLRRTSAAASRPASFCRCGRLLSTTPRRAMPPITSTSLPSVNPPLTAALPSDSFHLLPEAKKAGAAEDALYEQQVRDVEAWWATPRYAGITRPYTAADVVSARGSQQQSYPSSTMARKLWNLIQERKAEGKPIHTLGAIDPIQMTQQAAHQEVLYVSGWACSSVLTSTNEVSPDFGDYPYNTVPNQVQRLAKAQSMHDRKHWDARRKMSAQERSSTPYTDYLRPIIADGDTGHGGLTAVTKLAKLFAEAGAAAVHFEDQMHGGKKCGHLAGKVLVSTGEHINRLTAARMQWDIMGTENLVIARTDSESGRLISNNIDARDHEFILGVTDPSAAPLAGTLQNMEARGASASEIDAYEAAFTRDHPLVTFDEAAVSHMKKHNVDPAEYEAGVAKDRDMSIWDRRALAKDILGADKPDVYWDWDVPRTREGYYHFRSGMRAATKRALAFAPYADLLWVETGDPSVSVCRQLGRAVKEAYPEKALVYNLSPSFNWMGHGFTEQTLKSFIWDIAKEGFVLQLVSLAGVHTNATATCELARAFKDEGMLAYVNLVQRKEKEIGCDVLTHQKWSGAAYMDRIVGAIQSGSSTSKSMGAGNTEGQFH

SEQ ID NO: 11593 - protein, 448 aa, Pseudomonas aeruginosa UCBPP-PA14
MNQPLNVAPPVSSELNLRAHWMPFSANRNFQKDPRIIVAAEGSWLTDDKGRKVYDSLSGLWTCGAGHSRKEIQEAVARQLGTLDYSPGFQYGHPLSFQLAEKIAGLLPGELNHVFFTGSGSECADTSIKMARAYWRLKGQPQKTKLIGRARGYHGVNVAGTSLGGIGGNRKMFGQLMDVDHLPHTLQPGMAFTRGMAQTGGVELANELLKLIELHDASNIAAVIVEPMSGSAGVLVPPVGYLQRLREICDQHNILLIFDEVITAFGRLGTYSGAEYFGVTPDLMNVAKQVTNGAVPMGAVIASSEIYDTFMNQALPEHAVEFSHGYTYSAHPVACAAGLAALDILARDNLVQQSAELAPHFEKVLHGLQGAKNVIDIRNCGLAGAIQIAPRDGDPTVRPFEAGMKLWQQGFYVRFGGDTLQFGPTFNARPEELDRLFDAVGEALNGIA

SEQ ID NO: 11594 - protein, 231 aa, Lycopersicon esculentum
MAAAEMERTMSFDAAEKLKAADGGGGEVDDELEEGEIVEESNDTASYLGKEITVKHPLEHSWTFWFDNPTTKSRQTAWGSSLRNVYTFSTVENFWGAYNNIHHPSKLIMGADFHCFKHKIEPKWEDPVCANGGTWKMSFSKGKSDTSWLYTLLAMIGHQFDHGDEICGAVVSVRAKGEKIALWTKNAANETAQVSIGKQWKQFLDYSDSVGFIFHDDAKRLDRNAKNRYTV

SEQ ID NO: 11595 - protein, 389 aa, Arabidopsis thaliana
  misc_feature (273)..(273): Xaa can be any naturally occurring amino acid
  misc_feature (287)..(287): Xaa can be any naturally occurring amino acid
  unsure (1)..(389): unsure at all Xaa locations
MSWWWAGAIGAAKKKLDEDEPSQSFESVALIIGVTGIVGNSLAEILPLSDTPGGPWKVYGVARRPRPTWNADHPIDYIQCDVSDAEDTRSKLSPLTDVTHVFYVTWTNRESESENCEANGSMLRNVLQAIIPYAPNLRHVCLQTGTKHYLGPFTNVDGPRHDPPFTEDMPRLQIQNFYYTQEDILFEEIKKIETVTWSIHRPNMIFGFSPYSLMNIVGTLCVYAAICKHEGSPLLFPGSKKAWEGFMTASDADLIAEQQIWAAVDPYAKNEAXLTATMLISSSGSIXWKILAEQFGIEEYGFEEGKNLGLVEMMKGKERVWEEMVKENQLQEKKLEEVGVWWFADVILGVEGMIDSMNKSKEYGFLGFRNSNNSFISWIDKYKAFKIVP

SEQ ID NO: 11596 - protein, 82 aa, Sinapis alba
ELEHGFVYREHGSTPGYYDGRYWTMWKLPLFGCTDSAQVLKEVQECKKEYPNAFIRIIGFDNNRQVQCISFIAYKPPSFTDA

SEQ ID NO: 11597 - protein, 374 aa, Ustilago maydis 521
MSAREKRSGDAESTPVTVADGVHTHGVLNQHPNASPSAVAGEVANGSSAGSKADLSFRVGISEDSNKRWRRAMEDAHAFVYDFAGVHGQGFFGIFDGHAGKDAAEWCGQNFHKSLLKTLELNPDKPVPDSLNLTFHSVDRELANLASQQGSSSGCTAAIAFLRLEDESGQPLKVGGRASTGPDGHAHEEATRPEHSSERTSGDGLWGKLSKRFDSSDPKNERNSSPSSRRVLYTANVGDARAVLCRGGKAIRLTYDHKGSDAQEAKRITDAGGFVMNARVNGVLAVTRSLGDSAMKEFVVGSPYTTETVLGNEDSFLIIACDGLWDVIEDQEAVDLVRDVQDPQVASQELLKHALNEFSTDNTSVMVVRFASPS

SEQ ID NO: 11598 - protein, 334 aa, Arabidopsis thaliana
  misc_feature (73)..(73): Xaa can be any naturally occurring amino acid
  misc_feature (316)..(316): Xaa can be any naturally occurring amino acid
  unsure (1)..(334): unsure at all Xaa locations
HTKRPTQHNNSSTQRAKPPQANARRKSKPQAPAITHAKGSIEPRARRAEENKNTAPEQETPKGATEEPPAPEXKERGRPEPAKKKEEAKPQETTTRASEREHKTQSAEPEPAGAKHEEEEQKPTPLEQPHQKHEEEEENKPSLLDKHHRPNSSPPSESKSPTSPQPPSAKPRKQTHGPETRNTHEQSSDEEGEDGEKKKKEKKKKIAEGDHAKTVEEENQGVMDRIKEKFPLGEKPRGDDVPVVTTMPAPHPVEDHKPEEEEKKGLMDKIKEKLPGHSKKPEDSQVVNTTPLVETATPIADIPEEKEGVSWTRSKXKLPPVFPARPPFWGRFFF

SEQ ID NO: 11599 - protein, 145 aa, Methanothermobacter thermautotrophicus str. Delta H
MFEKRRLMAEKMMEDMIKNMREMQKEFEKKIAEYAENIPEKLSMDVMETDDAIIIKTDLPGVKKEDINIELTENTISISAVFEEEVEIKEADFIKKERKYGEAKREMRLPEKIRVEDASAKFENGVLTVELPKVEVKKKQTLKVE

SEQ ID NO: 11600 - protein, 325 aa, Arabidopsis thaliana
MADGGKVVCVTGASGYIASWIVKLLLFRGYTINATVRDPKDRKKTDHLLALDGAKERLKLFKADLLDEGSFELAIDGCETVFHTASPVAITVKTDPQVELINPAVNGTINVLRTCTKVSSVKRVILTSSMAAVLAPETKLGPNDVVDETFFTNPSFAEERKQWYVLSKTLAEDAAWRFAKDNEIDLIVLNPGLVTGPILQPTLNFSVAVIVELMKGKNPFNTTHHRFVDVRDVALAHVKALETPSANGRYIIDGPVVTIKDIENVLREFFPDLCIADRNEDITELNSVTFNVCLDKVKSLGIIEFTPTETSLRDTVLSLKEKCLV

SEQ ID NO: 11601 - protein, 624 aa, Cornus cf. canadensis Xiang and Fan 30-1
MASSGEQNQVGLLENLKNRLAIAVRSIQWSYAIFWSISSRQPGVLEWGDGYYNGDIKTRKTVQAVEFNADQLGLQRSEQLKELYESLAVTESNPQARRPSAALSPEDLTDTEWYYLVCMSFVFNIGQGLPGRTFANGQPIWLCNAHYADSKIFSRSLLAKSASIQTVVCFPFLGGVVELGVTELVLEDPNFIQHIKTSFLENPYRTVPKIPSYASENTRTEKDLILAKPSHNLLDTDLDAALECGEIDMCAPNNNSSGFLPNQRTEKSVMVEGLSGGASQVQSWQFMDDEISNCVQNSTNSSESISRTSENPEKDCCLTDLPECNLTKLTSLDLPNDDIHYHSVVSSLLKNSHQLILGPYFHKCNRESSFMGWKKTPSGIQQRTRGTPQKLLKKVLFEVARMHGGCLVESRQDNSRKDGLWRPEDDEIGTTDLFSERRRRDKTKERYSVLGSLIPSTSKDDKISILDGTIEYLKELERRLEDSECLEARTRSKPQDTAERTSDNYENDRIGIGKKPLINKRKACDIVEAELEINLVQLKDSSTDDVSVRIIDKDVFIEIRCPWRERLLLEIMDAISNFHLDSHSVQSSNIDGILSLSIKSKFKGSTVASTGMIIQALQRIICKC

SEQ ID NO: 11602 - protein, 624 aa, Cornus unalaschkensis
MASSGEQNQVGLLENLKNRLAIAVRSIQWSYAIFWSISSRQPGVLEWGDGYYNGDIKTRKTVQAVEFNADQLGLQRSEQLKELYESLAVTESNQQARRPSAALSPEDLTDTEWYYLVCMSFVFNIGQGLPGRTFANGQPIWLCNAHYADSKIFSRSLLAKSASIQTVVCFPFLGGVVELGVTELVLEDPNFIQHIKTSFLENPYRTVPKIPSYASENTRTEKDLILAKPSHNLLDTDLDAALECGEIDMCAPNNNSSGFLPNQRTEKSVMVEGLSGGASQVQSWQFMDDEISNCVQNSTNSSESISRTSENPEKDCCLTDLPECNLTKLTSLDLPNDDIHYHSVVSSLLKNSHQLILGPYFHKCNRESSFMGWKKTPSGIQQRRRGTPQKLLKKVLFEVARMHGGCLVESRPDYSRKDGLWRPEDDEIGTTDLFSKRRRRDKTKERYSVLGSLIPSTSKDDKISILDGTIEYLKELERRLEDSECLEARTRSKPQDTAERTSDNYENDRIGIGKKPLINKRKACDIVEAELEINLVQLKDSSTDDVSVRIIDKDVFIEIRCPWRERLLLEIMDAISNFHLDSHSVQSSNIDGILSLSIKSKFKGSTVASTRMIIQALQRIICKC

SEQ ID NO: 11603 - protein, 488 aa, Agrobacterium vitis
MKNSVQLITYVDRLSGGGFPELRALLDGRLQGLFGGVHALPFFNPIDGADAGFDPTDHTIVDPRLGSWDDVRALAGSVEIMADLIVNHVSAQSSWFQDFIAKGSDSEFADMFMTFGKAFPRGASEQDLLNIYRPRLGCRFQRPRLQIGSQRMLWTTFTPQQIDIDVHSAHGALYLETILDRFAEANVTAIRLDAAGYAIKKAGTSCFMIDETYAFLAKLAEKARDRGMEVLVEIHSYYRDQIEIASKVDRVYDFALPPLILHSLFTGDATALARWLEISPHNAITVLDTHDGIGVIDVGAHSDGRPGLLEPQAIDHLVEEIHRRSEGQSRLATGAAASNLDLYQVNCTYYDALGRNDDDYLIARAIQFFAPGIPQVYYVGLLGGINDMELLGKTGVGRDINRHFYEDREIDLALESPLVKRLSDLIRFRNTHPAFNGSFEVATDDTGSLVLSWNLNTEFAQLVVSFSQGKATITASGCYDFTFSGAIA

SEQ ID NO: 11604 - protein, 249 aa, Campylobacter coli RM2228
MVDFTKFYKDKANVAYMVLGYPNLKISEEFLKRLDESSIDVLELGIAYSDPIADGEIIANAAKIALEQGADIHKIFELLAKIKTKKALVFMVYYNLIFSYGLENFVKKAKALGISALIVPELSYEESKPLYKECQKYDIALITLVSITTPKERVKELVKNAKGFIYLLASVGITGGQSADNKLLQEKIQEIRSFTQLPIYVGFGVKNNTDVRNMRKLADGVIVGTNIVKLFASNDVNQILKGVEEIFEK

SEQ ID NO: 11605 - protein, 122 aa, Glycine max
MDRYEVVRDIGSGNFGVAKLVRDVRTKEHFAVKFIERGHKIDEHVQREIMNHRSLKHPNIIRFKEVVLTPTHLAIVMEYASGGELFQRICNAGRFSEDEGRFFFQQLISGVSYCHSMQVCHR

SEQ ID NO: 11606 - protein, 624 aa, Cornus cf. canadensis Xiang and Fan 42-1
MASSGEQNQVELLENLKNRLAIAVRSIQWSYAIFWSISSRQPGVLEWGDGYYNGDIKTRKTVQAVEFNADQLGLQRSEQLKELYESLAVTESNPQARRPSAALSPEDLTDTEWYYLVCMSFVFNIGQGLPGRTFANGQPIWLCNAHYADSKIFSRSLLAKSASIQTVVCFPFLGGVVELGVTELVLEDPNFIQHIKTSFLENPYRTVPKIPSYASENTRTEKDLILAKPSHNLLDTDLDAALECGEIDMCAPNNNSSGFLPNQRTEKSVMVEGLSGGASQVQSWQFMDDEISNCVQNSTNSSESISRTSENPEKDCCLTDLPECNLTKLTSLDLPNDDIHYHSVVSSLLKNSHQLILGPYFHKCNRESSFMGWKKTPSGIQQRTRGTPQKLLKKVLFEVARMHGGCLVESRQDNSRKDGLWRPEDDEIGTTDLFSERRRRDKTKERYSVLGSLIPSTSKDDKISILDGTIEYLKELERRLEDSECLEARTRSKPQDTAERTSDNYENDRIGIGKKPLINKRKACDIVEAELEINLVQLKDSSTDDVSVRIIDKDVFIEIRCPWRERLLLEIMDAISNFHLDSHSVQSSNIDGILSLSIKSKFKGSTVASTGMIIQALQRTICKC

SEQ ID NO: 11607 - protein, 624 aa, Cornus suecica
MASSGEQNQVGLLENLKNQLAIAVRSIQWSYAIFWSISSRQPGVLEWGDGYYNGDIKTRKTVQAVEFNADQLGLQRSEQLKELYESLVVTESNPQARKPSAALSPEDLTDTEWYYLVCMSFVFNIGQGLPGRTFANGQPIWLCNAHYADSKIFSRSLLAKSASIQTVVCFPFLGGVVKLGVTELVLEDPNFIQHIKTSFLENPYRTVPKIPSCASENTRTEKDLILVKPSHILLDTDLDAALECGEIDMCAPNNNSSGFLPNQRTEKSVMVEGLSGGASQVQSWQFMDDEINNCVQNSTNSSESISRTSENPEKDCCLTDLPECNLTKLTSLDLPNDDIHYHSVVSSLLKNSHQLILGPYFHKCNRESSFMGWKKTPSGIQERRRGTPQKLLKKVLFEVARMHGGCLVESRQDNSKKDGLWRSEDDEIGTTDLFLERRRRDKTKERYSVLGSLIPSTSKADKISILDGTIEYLKELERRLEDSECLEARTRSKPQDTAERTSDNYENDRIGIGKKPLINKRKACDIVEAELEINLVQLKDSSTDDVSIRIIDKDVFIEIRCPWRERLLLEIMDAISNFHLDSHSVQSSNIDGILSLSIKSKFKGSTVASTGMIIQALQRIICKC

SEQ ID NO: 11608 - protein, 431 aa, Glycine max
MWRCINGRIARRFLSTSSASARGWWDHVRPAPKDPIVRVNEAFLADPFPHKINLGIGTYKGDDGKAFIPQSVREAETKIQRCKLEESNASAVRSKFVQECVRLAYGNDSNVVREGLFAGVPTLSGTGACRLFAEFQRHFYPDSQMYLPDPTWSNHHNIWRQAEIPVKTFHYYHPDTKGLDFAALLNDVKNAPDCSFFLLHPCAHNPTGVDPTEEQWREISYQFQVKNHFPFFDMAYQGFSSGDLDKDAIALRIFLEDGHLIGCAQSFAKNMGLSEHKAGCLSVLCQSIKQVAALKSQLQLMSHAMYSSIPFQGISLVTMILSEPDTEALWRKEIKVMAKRIQTMRTTLRHCLENLHSSFNWEHITDQVGMFCFSGLTPDQVQQMEKLFHIYMTPDGRMSMSGVTSSNVDYLANAIHQVTRIDEEALRSCYV

SEQ ID NO: 11609 - protein, 624 aa, Cornus suecica
MASSGEQNQVGLLENLKNQLAIAVRSIQWSYAIFWSISSRQPGVLEWGDGYYNGDIKTRKTVQAVEFNADQLGLQRSEQLKELYESLVVTESNPQARRPSAALSPEDLTDTEWYYLVCMSFVFNIGQGLPGRTFANGQPIWLCNAHYADSKIFSRSLLAKSASIQTVVCFPFLGGVVELGVTELVLEDPNFIQHIKTSFLENPYRTVPKIPSYASENTRTEKDLILVKPSHNLLDTDLDAALECGEIDMCAPNNNSSGFLPNQRTEKSVMVEGLSGGASQVQSWQFMDDEISNCVQNSTNSSESISRTSENPEKDCCLTDLPECNLTKLTSLDLPNDDIHYHSVVSSLLKNSHQLILGPYFHKCNRESSFMGWKKTPSGIQQRTRGTPQKLLKKVLFEVARMHGGCLVESRQDNSRKDGLWRPEDDEIGTTDLFLERRRRDKTKERYSVLGSLIPSTSKDDKISILDGTIEYLKELERRLEDSECLEARTRSKPQDTAERTSDNYENDRIGIGKKPLINKRKACDIVEAELEINLVQLKDSSTDDVSVRIIDKDVFIEIRCPWRERLLLEIMDAISNFHLDSHSVQSSNIDGILSLSIKSKFKGSTVASTGMIIQALQRIICKC

SEQ ID NO: 11610 - protein, 128 aa, Arabidopsis thaliana
RERRRNTKDADLRENLDRQDHHSRGREQRHHRQCQGQDPRQSTTIFELLSGEDQSLLIRRDSFFVLFMILATVMGPVRVEARTCETSSNLFNGPCLSSSNCANVCHNEGFSDGDCRGFRRRCLCTRPC

SEQ ID NO: 11611 - protein, 250 aa, Hevea brasiliensis
MTKNYPKVSEEYQKAIDKAKRKLRGFIAEKGCAPLMLRIAWHSAGTYDANTKTGGPFGTMRHAAEQAHAANNGLDIAVRLLEPIKQQFPILSYADFYQLAGVVAVEITGGPEIPFHPGREDKPEPPPEGRLPNATKGADHLREVFGKTMGLSDKDIVVLSGGHTLGRCHKERSGFDGPWTANPLIFDNSFFTELLAGQKEGLLQLPTDTVLVTDPVFRPYVEKYAADEDAFFADYAEAHVKLSELGFAEA

SEQ ID NO: 11612 - protein, 556 aa, Legionella pneumophila str. Lens
MAIKVTKRGMDLLRDPIVNKGTAFSLQERDEFALHGLIPTTVETLEQQVIRCLDAYSAKENPLEKHIYLRALQDRNEVLFYRFIIDNLVDILPIIYTPVVGQACEMFSHIYRQPRGVFLSYPERDKLDSIIQNIASTRSIKVIVVTDGERILGLGDQGAGGLGIPIGKLSLYTSCGGIHPSNTLPIILDVGTNNKERLDDPEYIGWRHARISGKEYDDFVDQFVQSIKRHMPHVLLQFEDFAQQHAYPLLERYKNQLCTFNDDIQGTASVAVAAILAATRVTNTPLKEHRVALLGAGSAGCGISEQLVHAMINQGLSEEEARSRFYLVDRYGLLHDEMTDLLPFQKGFVRSSTSLQNWKLEKKGEITLTDVINNAQPTILLGVSGQPNQFKEAMIKTMLSYCERPIIFPLSNPTSRAEAIPQDLLNWTAGKALIATGSPFEPVVINGHKIEIAQCNNSYIFPGVGLGVVAGQAKRVTDLMMMAAAVALSELAPAIRTGEGRLLPELNSIREVSQHIARAVILQGIKEGHIEPMNNNKIDESIKRTMWTPQYEPYVL

SEQ ID NO: 11613 - protein, 356 aa, Enterococcus faecalis V583
MNNLFIFVCFCFMWLMIFGVILYYVGLVNHRYIHHTLILGLVTIISGTLCWLFVGYSLSFFGNIQYSIFYSPLASSEIVSILIQLLFCLYSVIMIIGSVLERGNWKYIVLFVPLWIVFVYAPICFSLWGHGNWLGKMGVLDYSGGLVVHTTAGIGSLVLAITSPIRLKNSLIFKSQEMIAFVGMLFITLGWFGFNMAPSGKIGEEAIQVWLNTLISILGGSISWTFTQWILIKKVSIYSIMNGIIGGLVGSTCSVGYVSPAFSLLISVIVCTLCPIVIHIMHLSIANFDDAADSFGMNAVGGIAGSILTGVMAEKGDFFLQLFGTFLISIWSLSLSLLIHYLLKKIVNDCYSQCIK

SEQ ID NO: 11614 - protein, 376 aa, Catharanthus roseus
MALLDQASNLSPMPFDFTRKRKSRRRDGTKNVAETLAKWKEYNEKLDALDGGKPARKVPAKGSKKGCMKGKGGPENSHCKYRGVRQRTWGKWVAEIREPNRGSRLWLGTFRNAIEAALAYDEAARAMYGPCARLNLPNYRASEESSSLPTTSGSDTTTASGISEVSVYEDKKFTPVVSGLKQDDKGESLESADSKPQLLVDAGTPMSAVKEEPKEYQVMDSQSEGQFGDEEPPSKLVCKEVDFGQDQAVVPAVKNAEEMGGEMGGDILKGCSLSEMFDVDELLSVLDSTPLHASDFQHGMGNGNVKAEAAYNYAPSWDSAFQLQNQDPKLGSQQHMAQTPPEINSGLDFLQPGRQEDSYFTLGDLDFLDLGAELGL

SEQ ID NO: 11615 - protein, 210 aa, Catharanthus roseus
MYQSNAHNSDHLTFLPPLVDYQFLNNDFDFSEIFTDFNYANYNYNTSTSDNFSGFQFNENCEEIISPNYASEDLSDIILTDIFKDQDNYEDEVVAGEQEEELITTPTSRGGGGGGCEQRSNEEWIRYRGVRRRPWGKFAAEIRDPKRKGSRIWLGTYETAEDAALAFDQAAFQLRGSRARLNFPNLIGSANAPVRVSPRRRSSSCHLRPQ

SEQ ID NO: 11616 - protein, 359 aa, Burkholderia vietnamiensis G4
MFLKNAWYVACTPDEIDGKPLGRKICNESMVFYRAADGRVAALEDFCPHRGAPLSLGFVRDGVLVCGYHGLEMGCNGKTAAMPGQRVGGFPAIRSFPVVERYGFVWVWPGDASRADPAALPALTWADDPVWAHGGGLYHIRCDYRLMIDNLMDLTHETYVHATSIGQKEIDEAPPKTTSHGDEVVTSRFMHNVMPPPFWQMALRGNGLADDVPVDRWQICRFTPPSHVMIEVGVAHAGHGGYDAPAEHKASSIVVDFITPETDGSIWYFWGMARNFRPDDDALTATIREGQGKIFAEDLEMLERQQRNLEQWPERKLLKLNIDAGGVLSRKVIDRLLAAEEAGGAPSATAAVVRIEAAS

SEQ ID NO: 11617 - protein, 456 aa, Debaryomyces hansenii CBS767
MSLKVVILIGGETTGTRFRPLSMDTPKVLFPIAGKPLISHIVQKIAELGEGELIEVFLLGYFTDLKPFDEYIAEAKKEYSNVNIKYLTEPYSMGTGGGLYYFRDEIFGDGTCEELLVIHGDIVCNYPFKELIQFYKKSNADSVIMGINPLLLMNNYQNKTQIQNHTPFKVYDNIDTFSKYGTIIANKSDSKIVHYVEKPSSKFSEFQLQTEYNTLINGGVYVFDKSILEFLAKAQSHKSSKCKEYDRHNLDNESINSNVLSLELDVLKFLPEAKNRFLTYKSDSFWNQLKTPISALFANIFFLEEYKKNHVCNPLATPSDKVISPVRASNFVTTSENYIIGPNVSLGRNVKIGNGVRIKNCIISDNVTIGDNSFVANAIISKDVKIGRWCRIEGTFTNDTTSKDINQVRSDGYYKLINNIVVLCQNTVVHNQVFVYNSIVLPHKELKNDVKYEIIM

SEQ ID NO: 11618 - protein, 413 aa, Ustilago maydis 521
MADLRGCCDPCGPCAAACLAALFMLSASDLDHHTMQVILSPVRLVSRACTSSRLPVLASRSHLHSASKPKVLLLDQIKLATTELGQLSKVANVVESTAKTRQELIEKFQSGGEYAQVVGIYRHFGGARSIKVTGRFDAELVSQLPSTLRYIVHNGAGYDQLDVQALSDKGIQASNVPTAVDDATSDVALYLLLGALRRFPRAKAQMNAGKFNSAFSFLDARDPRGKTLGIVGAGGIGRAFAHKASHALGVKVIYHNRNQLSSDVESQAAKGGMKYAKTLEELLQQSDIVSLHCPLTPATKGLIGKQQLEMMKKDAILINTARGPVVKEDELAEALEQGVIAGAGLDVFEAEPKIHERLFALKDTNVELLPHVGTLTLETQTEMEAVCLRNLMQGLATGRLGFTVPEQRHVAFN

SEQ ID NO: 11619 - protein, 909 aa, Oryza sativa
VQECYEIAAEYEGKHDSQKLDELGNMLTSLDPGDSIVMAKAFSHMLNLANLAEEVQIAYRRRIKLKKGDFADENSALTESDIEETFKRLVVDLKKSPAEVFDALKSQTVDLVLTAHPTQSVRRSLLQKHSRIRNCLVQLYSKDITPDDKQELDEALQREIQAAFRTDEIRRTQPTPQDEMRAGMSYFHETIWKGVPKFLRRLDTALKNIGIDERVPYNAPLIQFSSWMGGDRDGNPRVTPEVTRDVCLLARMMASNLYCSQIEDLMFELSMWRCNDELRARADELHLSSKKDAKHYIEFWKKVPPSEPYRVVLGDVRDKLYNTRERARQLLSSGYSDIPEETTLTSVEQFLEPLELCYRSLCDCGDRVIADGTLLDFLRQVSTFGLCLVRLDIRQESDRHTDVLDAITTYLGIGSYREWSEERRQDWLLSELNGKRPLFGPDLPKTDEIADVLDTFRVIAELPADNFGAYIISMATAPSDVLAVELLQRECHVKTPLRVVPLFEKLADLESAPAAVARLFSIDWYRERINGKQEVMIGYSDSGKDAGRLSAAWQLYKSQEELINVAKEFGVKLTMFHGRGGTVGRGGGPTHLAILSQPPDTIHGSLRVTVQGEVIEQSFGEEHLCFRTLQRFTAATLEHGMHPPIAPKPEWRALLDEMAVVATKEYRSIVFQEPRFVEYFRLATPEMEYGRMNIGSRPSKRKPSGGIESLRAIPWIFAWTQTRFHLPVWLGFGSAFKHILEKDIRNLHMLQEMYNEWPFFRVTIDLVEMVFAKGDPGIAALYDKLLVSEELWPLGEKLRANCEETKQLLLQVAGHKDLLEGDLYLKQRLRLRNAYITTLNVCQAYTMKRIRDPDYHVTLRPHMSKEIMDWSKPAAELVKLNPTSEYAPGLEDTLILTMKGIAAGMQNTG

SEQ ID NO: 11620 - protein, 229 aa, Pyrococcus abyssi GE5
MIRAVFFDFVGTLLSSEGEAVTHLKIMEEVLKGYNLDPRKILEEYEKLTREAFSAYAGKPYRPIRDIEEEIMRKISEEYGFKYPENFWEIHLKMHQEYGKLYPEVVEVLKELRQSYHVGMITDSDTEYLNAHLEALGVRDLFDSITTSEEAGFFKPHPRIFEIALRKAGVKGEDAVYVGDNPVKDCGGAKNLGMISILLDRTGEKKDLWDRCDFVVSDLREVIKIVKGQ

SEQ ID NO: 11621 - protein, 227 aa, Nicotiana tabacum
ERVPERVVHARGASAKGFFEVTHDITHLTCADFLRAPGVQTPVIVRFSTVIHERGSPETLRDPRGFAVKFYTREGNFDLVGNNFPVFFIRDGMKFPDMVHALKPNPKSHIQENWRVLDFFSHVPESLHMFTFLFDDIGIPQDYRHMDGSGVHTFTLINKAGKSTYVKFHWKPTCGVKSLLEEEAARIGGANHSHATQDLYDSIAAGNYPEWKLFIQTMDPDHEDRFD

SEQ ID NO: 11622 - protein, 356 aa, Colwellia psychrerythraea 34H
MFSQISSKISAIPTTLITGFLGVGKTTAILQLLANKPNNENWAVLVNEFGEIGIDSALLAGSSNEQGVFIREVPGGCMCCASGVPMQVALNQLITKAKPDRLLIEPTGLGHPKEVVEVLTKGKFQETISLQSILCLVDARNLIDKRYTEHPSFVQQLNVADTILAAKADTYSAKDEENLALFIAENELTDKPLHLMQHGNIAPSWLAQQPKTVIVTKPMIGIAVPSLHESSHTIELGYKKEREQSQALQTRLAQEGFIELNNHGEGYFSKGWIFSDKYQFNYKQLFAFITALKASRAKGVILTEQGSYAFNKAGSDFSCNKVTDSKDSRIELIDTNENALNIVKSRDLLLLAKDAI

SEQ ID NO: 11623 - protein, 295 aa, Triticum aestivum
  misc_feature (34)..(34): Xaa can be any naturally occurring amino acid
  misc_feature (49)..(49): Xaa can be any naturally occurring amino acid
  unsure (1)..(295): unsure at all Xaa locations
GGRSLVREPPLGRKFYNLFSQRGLPRSPPYNPGXEDLGGVSPGGPRLPXRKVGKVGAYAGKPMGSYAEEQIIPADVAVPVPPSVNHKTAAAIMLKGMTVHMLVRRIFKVETGHTVLVHAAAGGVGSLLCQWANALGATVIGTVSNEEKATHAHFDGCHHVIIYTKEDVATRVKEITGGKGVNVVYDSVGKDTYKASLECLASRGFLVSFGQSSGSPDPISMGDLASKSLFLTRPSVMHYTGTRDELLEAAGEVFANVANGVLHTRVKHTYPLSEAARAHADLEARKTSGSVLLIP

SEQ ID NO: 11624 - protein, 624 aa, Cornus cf. canadensis Xiang and Fan SC29-1
MASSGEQNQVGLLENLKNQLAIAVRSIQWSYAIFWSISSRQPGVLEWGDGYYNGDIKTRKTVQAVEFNADQLGLQRSEQLKELYESLAVTESNPQARKPSAALSPEDLTDTEWYYLVCMSFVFNIGQGLPGRTFANGQPIWLCNAHYADSKIFSRSLLAKSASIQTVVCFPFLGGVVELGVTELVLEDPNFIQHIKTSFLENPYRTVPKIPSCASENTRTEKDLILVKPSHNLLDTDLDAALECGEIDMCAPNNNSSGFLPNQRTEKSVMVEGLSGGASQVQSWQFMDDEISNCVQNSTNSSESISRTSENPEKDCCLIDLPECNLTKLTSLDLPNDDIHHHSVVSSLLKNSHQLILGPYFHKCNRGSSFMGWKKTPSGIQQRRRGTPQELLKKVLFEVARMHGGCLVESRQDNSRKDGLWRSEDDEIGTTDLFSERRRRDKTKERYSVLGSLIPSTSKDDKISILDGTIEYLKELERRLEDSECLEARTRSKPQDTAERTSDNYENDRIGIGKKPLINKRKACDIVEAELEINLVQLKDSSTDDVSIRIIDKDVFIEIRCPWRERLLLEIMDAISNFHLDSHSVQSSNIDGILSLSIKSKFKGSTVASTGMIIQALQRIICKC

SEQ ID NO: 11625 - protein, 318 aa, Methanothermobacter thermautotrophicus str. Delta H
MRQINVGVIGVGAMGYNHARVYYRLKNANLMAVSDIMKGTLQKVANKYDTVGYVDYENLLEIPEIEVVSVCVPTTHHYNVVMDALEHDKHVLVEKPIAFTLEEAEDMVKTARKKGLKLGTGHVERFNPAVQKAKELIENDVIGDVVSASAKRVGPFPPRIKDVGVTIDLAIHDLDVMHYLFSEPVAEVYAVMGSILEKCEYEDHAEIMTKFKSGITGILEVNWLTPYKRRKLAITGTDGIINVDYIDQRLDVYGKFAQDVDIKHEEPLKNEIKSFLMSVINDEEPEITGEDGIYALRTVLAAMKSAREHRPVKVNGDI

SEQ ID NO: 11626 - protein, 624 aa, Cornus suecica
MASSGEQNQVGLLENLKNQLAIAVRSIQWSYAIFWSISSRQPGVLEWGDGYYNGDIKTRKTVQAVEFNADQLGLQRSEQLKELYESLVVTESNPQARRPSAALSPEDLTDTEWYYLVCMSFVFNIGQGLPGRTFANGQPIWLCNAHYADSKIFSRSLLAKSASIQTVVCFPFLGGVVELGVTELVLEDPNFIQHIKTSFLENPYRTVPKIPSYASENTRTEKDLILVKPSHNLLDTDLDAALECGEIDMCAPNNNSSGFLPNQRTEKSVMVEGLSGGASQVQSWQFMDDEISNCVQNSTNSSESISRTSENPEKDCCLTDLPECNLTKLTSLDLPNDDIHYHSVVSSLLKNSHQLILGPYFHKCNRESSFMGWKKTPSGIQQRTRGTPQKLLKKVLFEVARMHGGCLVESRQDNSRKDGLWRSEDDEIGTTDLFSERRRRDKTKERYSVLGSLIPSTSKDDKISILDGTIEYLKELERRLEDSECLEARTRSKPQDTAERTSDNYENDRIGIGKKPLINKRKACDIVEAELEINLVQLKDSSTDDVSIRIIDKDVFIEIRCPWRERLLLEIMDAISNFHLDSHSVQSSNIDGILSLSIKSKFKGSTVASTGMIIQALQRIICKC

SEQ ID NO: 11627 - protein, 99 aa, Zea mays
  misc_feature (31)..(31): Xaa can be any naturally occurring amino acid
  unsure (1)..(99): unsure at all Xaa locations
MRAISTAAGGMLRARLRSSSRVRGASSGSRXWTTPAHEERPKGYLLNRPTSSPVETRKWEDCELPCYITSFLTRRMLRVGLNAKPDLSIETCAHGKALE

SEQ ID NO: 11628 - protein, 98 aa, Glycine max
  misc_feature (73)..(73): Xaa can be any naturally occurring amino acid
  unsure (1)..(98): unsure at all Xaa locations
SQPCRYLLHSEELKSERLWFRNRIEKKAAYLQEGEERSIGLQIILQRNDSSYSSGNARKGGVYLAFLLVQTRXPMQGVEVAISGAMQLVHWDFNSTEL

SEQ ID NO: 11629 - protein, 39 aa, Hordeum vulgare subsp. vulgare
PLENAWTFWFDNPQGKSRAVAWGSTIHPIHTFSTVEDFW

SEQ ID NO: 11630 - protein, 46 aa, Hordeum vulgare subsp. vulgare
LYNNIHHPSKLNVGADFHCFKDKIEPKWEDPICANGGKWTISCGKG

SEQ ID NO: 11631 - protein, 128 aa, Hordeum vulgare subsp. vulgare
PSKLNVGADFHCFKDKIEPKWEDPICANGGKWTISCGKGKSDTFWLHTLLALIGEQFDFGDEICGAVVSVRKNQERVAIWTKNAANETAQISIGKQWKEFLDYKDSIGFVVHEDAKRSDKAAKNRYTV

SEQ ID NO: 11632 - protein, 52 aa, Spinacia oleracea
GIFSSRKCKTPSKTFKGICTRDSNCDTSCRYEGYPAGDCKGIRRRCMCSKPC

SEQ ID NO: 11633 - protein, 496 aa, Enterococcus faecalis V583
MSYVLGIDLGTSSLKGLLVSEIGDVIATSSSDYPLFSSRPGYSEQNPHDWIKAIENVINDLLSEFPEMKKELKGISISGQMHSLVLLDKDNEIIRPAILWNDVRTTKQCEDIMNCMGREVQEITKNIALEGFTLPKILWVQENEEKNWTKTRHIMLPKDYLVHWLTGCYSTDYSDAAGTLMLDVKKRVWSKTILDKFNIPKEYLPTLFESSAKVGNMRSSLINRFGLETKVEIFAGGADNACAAIGAGIVNSEVAMLSIGTSGVFLSMEDDAENEYQGNLHLFNSALPNSYYSMGVTLAAGNSLKWFRDTFAKDVEFSDLLANIDEVIVGSEGLIFTPYIRGERTPYQDSQIRGSFIGIDSRHSLKHFTRSVIEGITFSLKESKVIMEQRKNLKIKKIISVGGGTKNQQWLQIQADIFGLPITTLETEQGPSLGAAILAVIGCGMCANIDSCIKMFVKYKKVYQPIEKNVLLYNKFFQVYSKVYSTTKEICYQLQE

SEQ ID NO: 11634 - protein, 159 aa, Prochlorococcus marinus subsp. marinus str. CCMP1375
MLINVKETVVETADGEKKNLGDYLGNVLLIVNVASLCGNTPQYKGLEKLFEKYKKNGFCVLAFPCNDFAGQEPGTIEEIKEFCSVKYGTTFEIFNKVHAKGLTTEPYTTLNKVEPKGDVSWNFEKFLVGKDGNVIARFEPSVEPSSEELITAIEVALSS

SEQ ID NO: 11635 - protein, 380 aa, Zygosaccharomyces rouxii
MATHEEFIRTQVFGTVFEITNRYTDLNPVGMGAFGLVCSATDTLAGQPVAIKKIMKPFSTAVLAKRTYRELKLLKHLRHENLICLQDIFLSPLEDIYFVTELQGTDLHRLLQTRPLEKQFVQYFLYQILRGLKYVHSAGVIHRDLKPSNILINENCDLKICDFGLARIQDPQMTGYVSTRYYRAPEIMLTWQKYDVEVDIWSAGCIFSEMIEGKPLFPGKDHVHQFSIITDLLGSPPRDVINTICSENTLKFVTSLPHRDPVPFQERFKTVEPDAVDLLERMLVFDPKKRITAADALVHPYLAPYHDPTDEPTAEAQFDWDFNDADLPVDTWRVMMYSEILDFHKIGGGDGQIDTNAAFDDQVAAATAAPMAQHTNQTNQ

SEQ ID NO: 11636 - protein, 197 aa, Glycine max
  misc_feature (188)..(188): Xaa can be any naturally occurring amino acid
  unsure (1)..(197): unsure at all Xaa locations
MSASRFIKCVTVGDGAVGKTCLLISYTSNTFPTDYVPTVFDNFSANVVVDGSTVNLALWDTAGQEDYNRLRPLSYRGADVFILAFSLISKASYENIAKKWIPELRHYAPGVPIILVGTKLDLREDKQFFIDHPGAVPITTTQGEELRKLIGAPAYIECSSKTQQNVKAVFDAAIKVVLQPPKQKKKEXKAQKACSIL

SEQ ID NO: 11637 - protein, 337 aa, Phanerochaete chrysosporium
MPVKAGINGFGRIGRIVLRNALLHGDIDVVAVNDPFIDLEYMVYMFKYDSVHGRFKGSVEAKDGKLYVEGKPIHVFAEKDPANIPWGSVGAEYIVESTGVFTTTEKASAHLKGGAKKVIISAPSADAPMFVCGVNLDAYDSKYKVISNASCTTNCLAPLAKVIHDKFGIVQGLMTTVHATTATQKTVDGPSNKDWRGGRSVGNNIIPSSTGAAKAVGKVIPSLNGKLNGLAFRVPTVDVSVVDLVVRLEKPASYDEIKQAIKEASETTHKGILGYTEEKVVSTDFTGNDNSSIFDRDAGIALNKTFVKLISWYDNEWGYSRRCCDLLGYAAKVDGAL

SEQ ID NO: 11638 - protein, 1016 aa, Schizosaccharomyces pombe
MDMIDEAITEVVRKIERERSVIHGALSMKRLTQNQTVHQQLHSNIEESKKSIIYLEERLEKLKLRKNGVRKSNSEKPSVGIEKNPSFSTTKSAKSFSSTSSNIDSNLDLLNYDTPLTISKISFLLQQLEFKLSVEEQYRKGIEKMAKLYEREHDRRSIAEAEKKYVESAQKITLLKQALKRYHDLHIEIDEEDVPSTESRGNLNARRPQSGLLKITVGSLRNVTHSAGISKQTEMIVAIRAEDLERARTRPSRTDRFNETFEIDLEKTNEVEIVVYEKKNEKLLLPVGLLWIRLSDLVEKQRRKKVEQEVSDKGWVSADKMINQRLSIFLPSALNNISKPESTDRPNTASGNQSVSAWFSLEPMGQINLTMNFTKHNTRKRPMDAGLGRQGAIRQRKESVHEVYGHKFLQHQFYQIMRCALCGEFLKNAAGMQCIDCHYTCHKKCYPKVVTKCISKSSDSASSEYEKINHRIPHHFESHTNIGANWCCHCGYILPLGRKTARKCTECGITAHAQCVHLVPDFCGMSMEMANRVISEIRTTKIYKAQQHKQKSSHHKHHHHKKSKSSSSKHKENDKASVSITTTTTPSITPADPVPTSPKPLAIEPVKRKPVHAGNLEVTSVSDNKLGATVQVVEQKVDDKADALTKPPSLDAVKEPIPVPSVETSVVAQDLTHKAKRIGLEDFTFLSVLGKGNFGKVMLAELKSEKQLYAIKVLKKEFILENDEVESTKSEKRVFLVANRERHPFLVNLHSCFQTETRIYFVMDFVSGGDLMLHIQQEQFSRRRAQFYAAEVCLALKYFHDNGIIYRDLKLDNILLSPDGHVKVADYGLCKEDMWHDNTTATFCGTPEFMAPEILLEQQYTRSVDWWAFGVLIYQMLLGQSPFRGEDEEEIFDAILSDEPLYPIHMPRDSVSILQQLLTRDPKKRLGSGPNDAEDVMTHPFFSNINWDDIYHKRTQPPYIPSLNSPTDTKYFDEEFTRELPVLTPVNSILTKEMQQHFEGFSYSCEDDKPSTTDNA

SEQ ID NO: 11639 - protein, 862 aa, Debaryomyces hansenii CBS767
MEGIYESDPSLVVEPDHYSGGIPVFKPTKKQFQDFYKFNKAINKYGMQSGIVKIIPPKAWSDTLTLNYTEEGLESIKIKNPIVQHINGSGVGIYSQQNIERPRTYNIFQWKDLSEKSNFQPPAPKGKPRVPPPTVGAVKCTGSAKDVSKMNAKSTINLLQTKNSYNIDTSQFTVDRCELLEKTYWKSLTYAEPMYGADLIGSLFSNSVKSWNVAHLPNILDLMDAKLPGVNDAYLYAGLWKATFAWHLEDQDLYSINYLHFGAPKQWYSISQADSGKFFELMKDTFPEEYRNCLEFLRHKTFLVSPQFLAKNGINCNNIIHNEGEFIITYPYGYHAGFNYGYNLAESVNFALDNWFPYGEVTKKCECISDSVGINVQQLYCKYKGIPYEYVQEQEEIESDSGNQSEEQKTILSQGKKKNVNKKQIKPDPMMQQVKKPEYECYLCPNNLPKKLTKSDQFQLLDTDLKDKKTLNVYRVHRICAQMFTNELEINNDKHTVRGLEQISTAQKNLKCVVCDSNSPKSKKPSHGACFQCKHSKCLRAFHGTCGLGGGGLYDFSGASMVCKYHRLKKSQGNEREQESKISEIPLDSLTQFTISLPDTSHQTKEIYCGYVVSNNPGESTIEVVSYPHLKERIEISYDDIIVGNSEVIDNSYFWNLKKARQSKPKPKKIESARVIDDEKITGIKTDSQLRLFKEDKFITEVLTPEFTAPKELKDERCSIFWYNLPRSSTDQVARYTDNIKSSIPNDTNYMKYLQRKKGKQHPSILIDNQKRKSDSGILYQDNKKAKNMANLQPLIPMFVPANKNYTPNQLFVPNVLYNGSFAPPEQFIYSPPHGPTQGVFYHRPGVETPVPMFRSNGAFKN

SEQ ID NO: 11640 - protein, 686 aa, Pirellula sp. 1
MMSTPDTSPSAYNDRPQATTGMPPGIPYIIGNEAAERFSFYGMKAILTVFMVDYLHWMSSAATNQGMSNAEATEHYHTFTAAAYFFPVIGALLSDIFLGKYRTILYLSIVYCIGHGALALMGSPPMSAGMWLFAGLLLISIGSGGIKPCVSAHVGDQFGKSNSHMLTKVYQWFYFSINFGSFISTLLTPWVLEHYGPHWAFGIPGVLMAIATLLFWMGRHKFVHIRPGGYRFLQELLSWEKFSSIPKLMIIFSFVAVFWALFDQTGSSWVLQAKNLNREWLGYTWLESQIQAINPILVLTLIPLFQFLIYPTIDRVFPLTPIRKISLGLFVMIGGFAIVALLQERVDAGSQPSIGWQFLAYAVLTASEVMVSITCLEFAYTQAPKTMKSIVMAVFLFSVSMGNVFTATVNRYIQTPAAASLAADIDLEEDAKEPMDNGSFVGELKLDDPAAPKLTLLGPDNTLGTPDDATLLLNKEGKLDSIENASLTSFNAVAEKIEAYFLDQTGDDSTRAFPSVEEAQPLVAGAEDAFGNPITYKLLSRDQYQLVSAGADGENDTQWDETLTGTVDRANTSDTVNTDAPTFNWLERQKIAIESEGDPNKAETVKSKLISERGGGDETKLSRDYAIGGRTLLEGAAYFWFWTTCIFVTAILFVPVGYLYKEKTYIQDEEDAEHEAEALADEAIST

SEQ ID NO: 11641 - protein, 152 aa, Nicotiana tabacum
AWHSAGTYDVCSKTGGPFGTMRLKAEQGHGANNGIDIAIRLLEPIKEQFPILSYGDFYQLAGVVAVEVTGGPDVPFHPGREDKTEPPVEGRLPDATKGSDHLRDVFVKQMGLSDKDIVALSGGHTLGRCHKERSGFEGPWTTNPLIFDNSYF

SEQ ID NO: 11642 - protein, 113 aa, Pyrococcus abyssi GE5
MRVYRLYLRDEYLEMVKSGKKKIEVRVAYPQLRGIKKGDKIIFNDMIPAEVIDVKRYETFRQVLREEPIEKIFPDEPSFERALRRFHNMYPKWKEYRYGVIAIKFRILGRERK

SEQ ID NO: 11643 - protein, 207 aa, Vibrio vulnificus YJ016
MSSVIAQKDENVVWHQHAVTKTQRADLKQQKPAVLWFTGLSGAGKSTVAGALENRLAEQGFHTYLLDGDNVRHGLCSDLGFSTQDRRENIRRIGELAKLMADAGLIVLTAFISPHRAERQLVRDLLPEGEFIEVFVNTSLEVCEQRDPKGLYKKARAGEIANFTGIDSEYEVPLNPEIDLPAGEKGIEALVDLLVEQLTLRGVISPR

SEQ ID NO: 11644 - protein, 127 aa, Colwellia psychrerythraea 34H
MAYSEKVLDHYENPRNVGSMDKNDPSVATGMVGAPACGDVMKLQLKISDDGIIEDAKFKTYGCGSAIASSSLVTEWVKGKSIEEAGEIKNTAIAEELALPPVKIHCSILAEDAIKAAIEDYKSKQSK

SEQ ID NO: 11645 - protein, 580 aa, Ustilago maydis 521
MLSKTSSAKPDIILVGAGIVGSALAYSLGKSGRRVALLERDFDEPDRIVGELLQPGGVRALSKMGIVDTLEDIDAVPVEGYHVFYGSRSVPIPYPQERPDQAGSGVVSNSGRVEGRSFHHGKFVQSLRSKALHQQNVTPYEATVRDLLKDAEGRVVGVSATWKKAPEGKPAAFELRAPLTIVADGCFSKFRRTHGSSIQPLVRSNFVGLELHDAPLPAPHHGHVVLSKNGPVLLYQIGTHTTRILIDVAGEKLPSAAKGDLQKHVNENVISQLPEQLRECVQVEMAKGQRLRSMPNSFLPPSMQGQSEHAKGVIVVGDAMNMRHPLTGGGMTVGLWDAVHLTEVLGGSEWAPLSGDKPSRAPLELANWSTLSPALRSWHWNRKGLSSVINILAQALYSLFGADDANLEVLREGCFKYFEMGGECVNGPVSLLSGLAPRPMLLVGHFFAVAVYSIYALFAHPKFYPKEGKTRKPSLLEYPALIWRSIMVFYTACIVLLPVVFTEMKSNVPRLTPVTAASGTSGKGGQLANAGSLRTDNFALVSASILLIATVMFWGNARDPGTARNLSNWLVFPKVGAGAS

SEQ ID NO: 11646 - protein, 274 aa, Synechocystis sp. PCC 6803
MQRLIEGLQKFREGYFSSHRDLFEQLSHGQHPRILFICCSDSRVDPNLITQSEVGDLFVIRNAGNIIPPYGAANGGEGAAMEYALVALEINQIIVCGHSHCGAMKGLLKLNSLQEKLPLVYDWLKHTEATRRLVLDNYSHLEGEDLIEVAVAENILTQLKNLQTYPAIHSRLHRGDLSLHGWIYRIEEGEVLAYDGVLHDFVAPQSRINALEPEDEYAPHPNSPLISYDAFKVPGKERPGREKATESPAPQLSPLPGFGHLPREQAERIYRGSR

SEQ ID NO: 11647 - protein, 498 aa, Zea mays
MTIARRLLRSNASAQAISLLKHVTGTASLQGHAHSPLDASVRHFSSAPSAQSDTTEENGFKGHGMLAPFTAGWQSNDLHPLIIERSEGSYVYDINGNKYLDSLAGLWCTALGGSEPRLVKAATEQLNNLPFYHSFWNRTTKPSLDLAQEILSMFTAREMGKVFFTNSGSEANDSQVKLVWYYNNALGRPDKKKFIARSKAYHGSTLISASLTGLPALHQKFDLPAPFVLHTDCPHYWRYHLPGETEEEFATRLATNLENLILKEGPETIAAFIAEPVMGAGGVIPPPKTYFDKVITAFGRLGTMFGCDYYNIKPDLVSLAKALSNAYVPIGATLVSPEISEVIHSQSNKLGSFAHGFTYSGHPVACAVAIEALKLYRERDIPGHVKQIAPKFQDGIRALADSPIIGEIRGLGMIMGTEFTNNKSPADLFPAEWGVGAIFGEECQKRGMLVRVAGDAIMMSPTLIMTPGEVDELVSIYGEALRATEERVSDLKMKSEKN

SEQ ID NO: 11648 - protein, 549 aa, Anaplasma centrale
MANVVVTGEALDKSIREVVRILEDAVGCTAGPKGLTVAISKPYGSPEITKDGYKVMKSIKPEEPLAVAIANIITQSASQCNDKVGDGTTTCSILTAKVIEEVSRAKAAGADTISIKNGILKAKEAVLTALLSMKREVASEDEIAQVATISANGDKNIGGKIAQCVREVGKDGVITVEESKGFKDLEVEKTDGMQFDRGYLSPYFVTNAEKMLVEFENPYIFLTEKKINLVQSILPVLENVARSGRPLLIIAEDVEGEALSTLVLNKLRGGLQVAAVKAPGFGDRRKDMLGDIAVIAGAKYVVNDELAVKVEDITLDDLGTAKTVRITKDTTTIIGSVDSNADSITSRISQIKSQIEVSSSDYDKEKLKERLAKLSGGVAVLKVGGSSEVEVKERKDRVEDALHATRAAVEEGVVPGGGAALLYTLASLDEVKGKNDDEQLGINIIKRAVRAPIKRIIKNSGSEEAPCVIQHLLKQNDKELIFNVDTMNYANAFASGVMDPLKVVRIAFDLAVSLAAVFMTLNAVVVDIPSKEDTAGGGAAGGMGGMGGF

SEQ ID NO: 11649 - protein, 549 aa, Anaplasma centrale
MANVVVTGEALDKSIREVVRILEDAVGCTAGPKGLTVAISKPYGSPEITKDGYKVMKSIKPEEPLAVAIANIITQSASQCNDKVGDGTTTCSILTAKVIEEVSRAKAAGADTISIKNGILKAKEAVLTALLSMKREVASEDEIAQVATISANGDKNIGGKIAQCVREVGKDGVITVEESKGFKDLEVERTDGMQFDRGYLSPYFVTNAEKMLVEFENPYIFLTEKKINLVQSILPVLENVARSGRPLLIIAEDVEGEALSTLVLNKLRGGLQVAAVKAPGFGDRRKDMLGDIAVIAGAKYVVNDELAVKVEDITLDDLGTAKTVRITKDTTTIIGSVDSNADSITSRISQIKSQIEVSSSDYDKEKLKERLAKLSGGVAVLKVGGSSEVEVKERKDRVEDALHATRAAVEEGVVPGGGAALLYTLASLDEVKGKNDDEQLGINIIKRAVRAPIKRIIKNSGSEEAPCVIQHLLKQNDKELIFNVDTMNYANAFASGVMDPLKVVRIAFDLAVSLAAVFMTLNAVVVDIPSKEDTAGGGAAGGMGGMGGF

SEQ ID NO: 11650 - protein, 128 aa, Hordeum vulgare
PSKLNVGADFHCFKDKIEPKWEDPICANGGTWTISCGKGKSDTFWLHTLLALIGEQFDFGDEICGAVVSVRKNQERVAIWTKNAANETAQISIGKQWKEFLDYKDSIGFVVHEDAKRFGKAAKNRYTV

SEQ ID NO: 11651 - protein, 151 aa, Glycine max
FGSSLNDAPTLCKYLESFYTLRKPVASTINTLAGALYKVFCASPDLARKEMRQACFDYLSLGGLFSEGPVSLLSGLNPRPLSLVLHFFAVAIYGVGRLLLPFPSPKRVWIGARLISGASAIILPIIKAEGIRQMFFPATVPAYYRTPPVAQ

SEQ ID NO: 11652 - protein, 401 aa, Pseudomonas aeruginosa UCBPP-PA14
MSFDLASRLASRRAEDLYRQRPLLESAQGPDVVVDGQPLLAFCSNDYLGLANHPEVIAALRAGAERWGVGGGASHLVVGHSGPHHELELALAEFTGRPRALLFSTGYMANLGAVTALVGKGDTVLEDRLNHASLLDAGLLSGARFSRYLHNDPASLAARLDKAEGNTLVVTDGVFSMDGNLADLPALAAVAQARGAWLMVDDAHGFGPLGASGGGIVEHFGLGQEQVPVLIGTLGKGFGTAGAFVAGSEELIETLIQYARPYIYTTSQPPAVACATLKSLELLRRESWRRQHLAALIARFRHGAEALGLTLMDSFTPIQPILVGGSRQAVALAGMLRARGIMVGAIRPPTVPANSARLRVTLSAAHSEAQVDRLLEALGESWRQLSSSLLAEIEAEEGDDA

SEQ ID NO: 11653 - protein, 604 aa, Colwellia psychrerythraea 34H
MNFMSKCSVLTAISLACITSQVSQAGGVELTEKLTAKAATLAPYQQRDFQEEVFYFVLPDRFYNADTSNDLGAAENDKKRAVSRGGLDKTHKGMYHGGDLAGLTEKLPYLDNMGVSAIWLTPILRNRAMQAGTSGYHGYWILDFTEIDPHLGSNAELKNFIDQAHKRNIKVFFDIITNHTADVIKTKECHGEDGLGWIVDVSKGNDCPFISMAQLAQGKYYTPLIPKGDETLKYPAWLNDMDVYHNQGDSFWRGESSVRGDFAGLDDLYTQKSSVVNGMIAIYQDIIDEFKPDGFRIDTVKHVNIEFWQQFSPALMQHAKAQGIDNFFMFGEVYSFEPELLSRFTTEAKIPSVLDFAFQGAMTKALVEQQGTDVLAQLFAKDHFYNTEHKYIRNTNANQLVNFTGNHDMGRFAFSLKQSSHNYSEQAQIQRNLLAHAMMFFSRGVPVIYYGDEQGFVGDGGDQASRQDMMPSFVDSYNDDDLLATTKSTADDNFDTNHLFYQSFAKYAQLYQQYPALRFGEQAVVYSQNEAGIFAITRQTKATNNTNAQSLLVVFNTAINAQSLNLVSEKIGVKQAETTLLYRSVESGKADEIAPLSFAIYQLK

SEQ ID NO: 11654 - protein, 229 aa, Enterococcus faecalis V583
MKQSILLIEDDPNITDFMEVVLGQERYQLTIASTGMEALTAFQTTSFDLVLLDLGLPDIDGIDLLKILRKRMHLPIIIISARNNEEEKVKALDLGADDYVTKPFGTNELLARIRTALRHQNVQTESLTVVENKDLKIDFEKQLVYKKGQEIHLTKNEYRILALMFRQLGKVVAYQTLMTKVWGPYSNDSQTLRVNMSNIRKKIESNTLKPEYLITEIGVGYRLRDHRLE

SEQ ID NO: 11655 - protein, 316 aa, Kineococcus radiotolerans SRS30216
MTGTTSTGSPRSRTVVVGEALVDVVRTAGSATGTEHPGGSPLNVAYGLGRLEHDVALLTRLGDDEHGALLRAHLDRAGVQLFPGTVDADPTAVARAEIDAEGKATYDFDLLWRVPEVELAPDVTLVHTGSIGAAVSPGAETALSLLRSVRGRATTSYDPNVRPAFFDGPARALARVEEFVDAADVVKASDEDLAWLLPGEDPEVVAHRWQTRGPALVVVTRGSAGAIAVSGAGTLHVPAPRVDVVDTVGAGDAFMSGLLHALHEHDLLGAQGLPRLRHLGLGTLESLVATAIRSASITCSRAGANPPTRAELTAPA

SEQ ID NO: 11656 - protein, 560 aa, Psychrobacter arcticus 273-4
MPNQRPLYIPFSGPALLETPLLNKGSAFSSEERDSFNLTGLLPHNIETIEEQSLRAYHQLRSFTTDIDKHIYLRNIQDTNETLFHHLIEQHIEEVMPLIYTPTVGQACEKFSQIYRRKRGLFISYPDRHKIDDMLQNATKQKVKVIVVTDGERILGLGDQGIGGMGIPIGKLALYTACGGISPAYCLPILLDVGTNNQQLLDDPMYMGWRNQRISGDEYNEFVDLFIQAVKRRWPEVLLQFEDFAQENATPLLNRYRDQLCCFNDDIQGTAAVSVGTLIAACLNKGQKLSQQKIAFLGAGSAGCGIAEHIIRQMQREGLTEEQARKQVFMVDRYGLLTDSMTELQKFQAPLVQKESAIESWDKSQKLGLAQVVKQAKITVLFGVSGQKGLFTREVIEALCVNTEHPIVLPLSNPTSRVEATPQEVTSWSRGKAIVATGSPFPNTTFEDQSFEISQCNNSYIFPGIGLGVLAAHATGISDNMLMSASQALADISMEYEKAPGAILPPIKFIREISEKIAYAVALQAIEDKLALPVTAENLERRLKANFWLPRYHNYRRTSF

SEQ ID NO: 11657 - protein, 391 aa, Psychrobacter arcticus 273-4
MSLQNPIFIPGPTNIPDRLRRAMNVPTQDHRAPDFSDTFLPVLADCKKVFGTQDSEIILFTSSGTGGWEAAISNTLSPGDKVLIARYGMFSHRWIDMCQRHGLDVQVIECPWGTGAPADQFQAILSEDTAHEIKAVMVTHNETATGVLSDIGAVRKAIDSSNHPALLFVDGVSSIASVPFEMDEWGVDVAVAGSQKGFMLATGMAILGVSQKALSHMDEAKLPRTYFDFRDMLKANANGGFPYTPPLNLIYGLRESLEMLFDEGLENVYARHYRLAEGVRQAVSAWGMILCAKTPDLYSNTVSAIFVPEGFNSNKLTDHAFNKYGISFGIGLGEMNGKAFRIGHLGSLTEVMVLAGLAAIEMAMVDLDYPIKLGQGVAAAQEYYRNTATTK

SEQ ID NO: 11658 - protein, 571 aa, Pirellula sp. 1
MSSTIDDVTRSRITDVYGHVPDVLADGLKRCFDQSNPPSTPDELWDHRDVVMITYADQIREPGKSPLDAQRQFLLDHNLDELIRCVHLLPFCPSTSDDGFSVADYLAVDPESGDWDDIKRLGENFDLMYDLVLNHSSQHHRWFQGFLNDEPEYKDFYATADPSEDLSEVVRPRSLPLLTEFDSASGKRHVWTTFSADQVDLNYANPHVMLAMLETLVEYACRGARIIRLDAIAFLWKEIGTSCLHLPQTHAAVRLMRHVLDVAAPGTIVLTETNVPHAENISYFGDGTDEAHMVYQFSLPPLLLDAIHSGDTGVLQGWMRSLDLPTDQVTYFNFTASHDGIGVRPAEGILPQERVDALVEIAKAHGGRIGMRTKPDGSQSPYELNITYLEAVADRATVPAEEHAQRFLATQAIMLSMAGVPAVYFHSLVGSPNDIAGVESSGIPRRINRHKYERAELEAALSETGSLQQLVANGYRHLLRVRKQQTQFHPNASQTVLNLPTDGLLGFVRRHDDQPALCVLANLSGETRAVDPADMPGKLDLDVLSDESLDQNAPIAMAPYQVRWLKSSSTA

SEQ ID NO: 11659 - protein, 954 aa, Kineococcus radiotolerans SRS30216
MSTSTSTSGGTGGSTGGTRAAVPEQPRASQDVLTVDGVSSDEGHAALRASVRRLGELLGASLTRHEGAELLDLVERVRALAREADDGAELARLLSGVDDRTAIVLARAFTAYFQLANASEQLHRGLELSKQPGGGLSATLGRVREALESGDLDRDTAQQILGRLQLRPVFTAHPTESSRRSILDLLLRITGIVEASEDPAQRATDAERGQRRLAELVDLLWQTDELRVLRPRPADEARSALHYLRNLTSTVLPDLLEDLAVGLDELGLDLPVDAQPLRFGSWVGGDRDGNPNVTPEVTMEVLGLQHDAALDVLTAVTRDLLTELAASTQVVGFSPELLASLAADAEALPEVHAARVHLNGEEPYRFKLSYVLARLEGTRTRLHTGAEHVPGRDYAGVGEFTADLLLIQDSLRRNDGQMVADGAVARALRVVRAVGFGLATLDVREHAGRHHEALAAIYDRLGELITPYAALDRSARTKLLSKEMTGHRPLIGAAVRTLTGTPAQVVQLFTTIRTALDRFGEETIETYIVSMTQGIDDLFAVVVLAREVGLVDLAETPGANDVARIGFAPLFETVTELEAAEELLEGLLSDPSYRRVVAARGDVQEIMLGYSDSSKDAGIAASRWQIHRAQRALRDVAARHGVTLRLFHGRGGSVGRGGGPTGEAILAQPYGTLDGPIKVTEQGEVISDKYVQPRLARHNLEVALSAALEASTLHRTSLQPGEVLDGWDTTMGLVAAKGQEAYRALVGDPGLVPFFLAATPVEELGNLNIGSRPSRRPGGTGGLEDLRAIPWVFGWTQSRINVPGWFGVGSGLRAAREAGRGEDLRAMFAGWSFFRSFVSNVQMTLAKTDLGIAAHYVEELVAPDQRGAFDVIRAEHARTLEEVLLLTEQDELLQSAPVLRRTLELRDAYLAPLHALQVSLLGRARASGDAVDPALRRALLLTINGIAAGMRNTG

SEQ ID NO: 11660 - protein, 478 aa, Lactococcus lactis subsp. lactis
MKVLFASSECAPFFKTGGLGDVAGALPKELAKKSEIDSVAVILPYFKNEMKEEYRSLLKDEFYDFVDVGWRHEYVGVKSLEKEGVKYYFLDNEHYFGRGQLYGYGDDGERFAFFDLALCQLLEKLDFIPDVLHVNDWQTAMVPFLLKEKYNWIKAYEKIKTVLTIHNIEFQGLMHGDALSELFGMGMERYFEGVVRHNGMLNMLKTGILYADRVNTVSPTYAKEIQTSEFGCGLESILQYVDGKVSGILNGIDYDIYNPENDILIPYHFSEEELSGKGQMKAELQKRTGLPLNPNVPLIGMVSRLTNQKGFDLVLSQLEKVLEENVQIVLLGTGFPEIEEGFRYFSQKYPDKLSANIAFDIQFAQEIYAGSDFFLMPSAFEPCGLSQMIAMRYGTLPIVHEIGGLKDTVIPFNPISKEGTGFGFVDFEGQILVETINRALEVYGKEPEVLNKMVLSAMSKDFSWGTKAQQYIELYQEL

SEQ ID NO: 11661 - protein, 115 aa, Brassica napus
MSMIPSFFGNNRRGSSSSSFFDPFSLDVWDPFKDFPSSSSSFFRENSAIVNARVDWRETPEAHVFKADLPGLKKEEVKVEVEDNNVLKISGERHVEKEDKSDTWHRVERSSGQFT

SEQ ID NO: 11662 - protein, 446 aa, Pyrus pyrifolia
MAIDIEQQQQPSPGLSKIAVSDTHGEDSPYFAGWKAYDENPYHESSNPSGVIQMGLAENQVSFDLLEKHLEENSEASNWGSKGSKGVSGFRENALFQDYHGLLSFRKAMASFMEQIRGGRAKFDPARVVLTAGATAANELLTFIIADPGDALLVPTPYYPGFDRDLRWRTGVNIVPIHCESSNNFQITPQALEAAYKEAEAKNMRVRGVLITNPSNPLGATIQRAVLEEILDFVTQKNIHLVSDEIYSGSAFSSSEFISVAEILEDRQYKDAERVHIVYSLSKDLGLPGFRVGTVYSFNDKVVTTARRMSSFTLISSETQHLLASMLSDKEFTGNYIKTNRERLRRRYDMIVEGLKKSGIECLKGNAGLFCWMNLSPFLDEPTRECELTLWDSMLHEVKLNISPGSSCHCSEPGWFRVCFANMSEQTLGIALTRIHNFMEKRERAC

SEQ ID NO: 11663 - protein, 462 aa, Kineococcus radiotolerans SRS30216
MASPTPRLDAVINLAKRRGFVFPSGEIYGGTRSAWDYGPLGVELKENIKRQWWRQMVSSRDDVVGLDSSVILPRRVWEASGHVEVFSDPLVESLQTHKRYRADHLLEAYEAKHGHPPVNGLADVPDPETGVRGQWTEPRDFSGLMKTYLGAVDNEEGLHYLRPETAQGIFVNFANVMGSARKKPPFGIGQIGKSFRNEITPGNFIFRTREFEQMEMEFFVEPGTDEQWHQYWLDERMSWYTGLGIDAGNLRFFEHPQEKLSHYSKRTVDIEYRFGFQGSEWGELEGIANRTDYDLSTHSRESGVDLSYFDQTKGERWIPYVIEPAAGLTRSLMAFLVDAYTEDEAPNTKGGVDKRTVLRLDHRLAPVKAAVFPLSRNEQLSPKARDLAAELRRNWNVEFDDAGAIGRRYRRHDEVGTPYCITVDFDTLEDEAVTIRERDTMAQERVGLTQVTSWLGARLVGA

SEQ ID NO: 11664 - protein, 722 aa, Psychrobacter arcticus 273-4
MIKKIVLIFAVLIGVIGFFYFDLNELLTLEGLKGSMDQFEQYKTQSPWLVIGGFFVVYILVTALSLPGAVILTLAAGALFGLVQGILVASFASSIGATLAFLTSRYLLRDTIKQRFPDRLASIDSGVKKEGGFYLFTLRLVPIFPFFLINLLMGLTAIKVRTFYWVSQIGMLAGTFVFVNAGTQLAKIEQLSGILSFNLLASFALLGLFPLIAKGILTILKKRRIYKNHTKPKKFDRNMIVIGAGAGGLVTSYIAATVKAKVTLIEAGEMGGDCLNYGCVPSKALVKSAKVVEQIRHGKRYGLNNTQPDFAFKNIMSRIHEVIADIAPNDSVERYTSLGVEVLKGYAKLIDPWTVEIALNDGGTQTLTARSIVIATGARPFVPDLPGLEETGYVTSDTLWDKFAKFDKVPSKLVVLGGGPIGCELAQSFARLGSAVTQIERGARLMKKEDVDVSVFAQEALTESGVNILTSQQAIRCETRNGKKYIIVAPKGGNDDQQETAIEYDELICAVGRSARLEGYGLDTLGIDTERTISTDEYLETLYPNIYAAGDIVGPYQFTHVAAHQAWYAAVNGLFGHLKKFKVDYRVIPWSTFIDPEVARVGLNEQEAINKGIDFEITRYDFKDLDRAVTESANHGFIKVITPKGKDKILGVTIVAEHAGDLMAEFVLAMKHNLGLNKILGTIHIYPTWAEGNKYAAGEWKRNHAPKKALQLLEKYHTWRRG

SEQ ID NO: 11665 - protein, 332 aa, Pyrococcus abyssi GE5
MKVLIMAGGYATRLWPLTKDKPKPLLPVGIKTILDFIMEKVLELNVDEVYISTNKFFEHKFKPYAEKYGVDLIIEDTYREEEKLGTIGAIKNALDSLGLDDYLIIAGDNIFSLSLRDFVSKFTGKPLIAVYDVGDLELAKRYGVVILEGNRVVKFIEKPQEPPSTLISTGIYALPRDVMGMIDEYLKYGNKDAPGYFIQWLIERGIEVYAYKFDDFWYDIGSADSYLESLKMLMKESYIGDIKVSPYSKIIPPVVILDGTRIEGRSIIGPFAYIGRNCLIENSDVSDSIIFDSTVIRNSTIWRSIIDEKCEIRNLELKKSIVGGHAKIQRGD

SEQ ID NO: 11666 - protein, 498 aa, Polaromonas sp. JS666
MLMKTASQSLTEQLSARFAERIRSRLLAPGARLPSVRLCAEQQGVSASTVVAAYDQLLAQGLVVARKNRGFFVRDASLNAALATVHKAPSAVKTMATATGAAPAAEEPAPLNSWSTATWMATRQAPVDATALIRGMFHKISNKPQPGMGVFPPDWLETTFMPAAVRKVTSVSALRDFSLQYGEPMGDSGLRRALSQKLSALNVHAVPEQIITTVGATHALDIVSRTLLRAGDCVMVEEPGWAVEFARLDALGMRILPVPRRADGPDLEVMAQYCEIHQPKLFVSVSVFHNPTGYCLTPGSAHRVLQLANQHNFHIAEDDTYSHLAPEHATRLCALDGLQRTIYVSGFAKILAPGWRVGFMAAPPDLVERLLDTKLLATLTTPALLEKALAWCIDQGQLRRHAERIRTRLDQARARSVKLALAHGCTFAAEPAGLFGWVDTGVDTDALAQRMLDEGYLIAPGALFHAVRKPSTLMRINFATTQEAAFWKVFARLRDGMK

SEQ ID NO: 11667 - protein, 322 aa, Trichodesmium erythraeum IMS101
MVNKRRSLPPSLTIKLGKWVWTTLWQTMMSKLAPRNNSGEYIRPVSLFRQTVGIQPENKYQPATKRYRLFVGLGCPWAHRTIVVRALKGLEDAISVTIASPAGDKGIWVFEEEEEGCNTLPELYNLAQPGYNGRATVPVLWDEQTKTIVNNESADIIVILNTEFNHFAKNSNLDLYPEQLKAKIDQWNEKIYHTVNNGVYRCGFAQSQEAYEKACQELFTTLDEIDNMLSTSRYLCGESVTLADVRLFTTLFRFDIVYYGLFKCNLRRIKDYKYLSVYLQDLYKLPGIAETCNLEAVKKDYYGNLFPLNPGGIIPLGPDLNS

SEQ ID NO: 11668 - protein, 242 aa, Syringa vulgaris
  misc_feature (188)..(188): Xaa can be any naturally occurring amino acid
  unsure (1)..(242): unsure at all Xaa locations
LVQLRRMENKINRQVTFSKRRNGLLKKAYELSVLCDAEVGLIIFSSRGKLYEFGSAGMTATLERYQRCCFNPQNAGAGAERETQSWYQEVSKLKAKYESLQRTQRHLLGEDLGPLNVKELENLEKQLEGSLSQARQRKTKIMMEQMEDLRRKERQLGEMNKQLKIRVSLELSSHETEGQGLRGFPCQXNAAASAGTSNFMAQPGTNPMEFEPEPVLQMGYHHYNLGEGPLFQDHGYRSFDLF

SEQ ID NO: 11669 - protein, 157 aa, Triticum aestivum
EQLAFCPAITVPGIHYSDDKLLQTRIFSYADTQRHRLGPNYLMLPVNAPKCAHHNNHHDGLMNFMHRDEEVNYFPSRFDPTRHAEQYPIPPRVLSGCREKCIIEKENNFKQAGERYRSFDPARQDRFLQRWVDALTDARVTHELNLFCGGVAMNKKV

SEQ ID NO: 11670 - protein, 470 aa, Pisum sativum
ASGSDENDVVIIGGGPGGYVAAIKAAQLGFKTTCIEKRGALGGTCLNVGCIPSKALLHSSHMYHEAKHSFANHGVKVSNVEIDLAAMMGQKDKAVSNLTRGIEGLFKKNKVTYVKGYGKFVSPSEISVDTIEGENTVVKGKHIIIATGSDVKSLPGVTIDEKKIVSSTGALALSEIPKKLVVIGAGYIGLEMGSVWGRIGSEVTVVEFASEIVPTMDAEIRKQFQRSLEKQGMKFKLKTKVVGVDTSGDGVKLTVEPSAGGEQTIIEADVVLVSAGRTPFTSGLNLDKIGVETDKLGRILVNERFSTNVSGVYAIGDVIPGPMLAHKAEEDGVACVEYLAGKVGHVDYDKVPGVVYTNPEVASVGKTEEQVKETGVEYRVGKFPFMANSRAKAIDNAEGLVKIIAEKETDKILGVHIMAPNAGELIHEAAIALQYDASSEDIARVCHAHPTMSEAIKEAAMATYDKPIHI

SEQ ID NO: 11671 - protein, 597 aa, Oryza sativa
MAAAAVRVDKATSELLLGPDWTLNIDICDAVNSDHGQAKEVIKALKKRLQHKNSKVQFFALTLLETLMKNCGDHVHSQVVERDILQEMIKIVKKKTDMQLRDKILVLLESWQEAFGGNGGKHPQYYWAYAEMKKLGLEFPRRSPDAAPILTPPITRPTSLESYHQPSYGMPVNSSSRFDEAMPSNGPSLSSSEMERMLGAVELLSEMLKAVNPHDRGAVNDEIITELVKQCRSDQKKIISLVTSLRDEELLGQALDLNDRMQILLGKHDAIASGSPLPDEETDIMNESSAETTSTPVATGAPRAAVAAIVPTNVFDEEEEDEDDEFSQLARRNSKFRSTNAESTPSGVATSLSTAHDDEITSSGSSGTSTVSPPVQSHALALPDPPAPVRTAEEQVMSDLLALTISNPSPPQTPPTPEATTTMNQGGSQANDHPQPSYSNQGLAAASYNSYVAPWAQPQCQTPGIQLQQHQQPSQSQLPYNSSPYPPPPWASEDTAESNPFIAASLKNQPTSASPVNVPLNLRPLQQSNSFGVPLRSAGPQSPINGSTKQPMSAGARRPSYVSSNKYFDDLFEKNADGSLMKVGGSVGGGASSPYKT

SEQ ID NO: 11672 - protein, 335 aa, Brucella melitensis 16M
MTILVTGGAGYIGSHTCVQLIEAGHEVVVVDNFDNSHPEALHRIEKITGRAPRREPGDIRDRALMEQMIKRHKCTAVIHFAGLKAVGESSEKPLLYYDCNVLGTLRLLQAMEATGVKKLVFSSSATVYGDPDKLPITEDQPLSATNPYGRTKLVIEDMLRDLYNSDNSWAIAILRYFNPVGAHESGLIGEDPKGIPNNLMPIIAQVATGRREKLNIWGNDYPTPDGTGVRDYIHVNDLAAGHLKALKKLDKPKCFAVNLGTGQGYSVLDVIKAFEHVSNREIKYEIAPRRPGDVAECYADPGFAKKFLGWSAEKNLREMCQDMWNWQSKNPNGYE

SEQ ID NO: 11673 - protein, 241 aa, Tradescantia virginiana
  misc_feature (228)..(228): Xaa can be any naturally occurring amino acid
  unsure (1)..(241): unsure at all Xaa locations
VQLKRMENKINRQVTFSKRRGGLLKKAHEISILCDAEIALIIFSTKGKLYEYATNSKMDNILERYERYSYAEKALTSSDPDIQGNWCQEYAKLKSKVEALCKSQRHLMGEQLETLNLKELQQLEQQLEGSLKHVRSRKTQVMLDSISELQRKEKSLEEQNKNLEKEILEKQKIKALAQQAHWEHQNQPAPRGSPPRPFVIAESHPTLNIGHFQGRTNAVEAEENQQPXMRICSSLLPPWML

SEQ ID NO: 11674 - protein, 1032 aa, Arabidopsis thaliana
MTDTTDDIAEEISFQSFEDDCKLLGSLFHDVLQREVGNPFMEKVERIRILAQSALNLRMAGIEDTANLLEKQLTSEISKMPLEEALTLARTFTHSLNLMGIADTHHRMHKVHNVTQLARSCDDIFSQLLQSGISPDELYKTVCKQEVEIVLTAHPTQINRRTLQYKHIRIAHLLEYNTRSDLSVEDRETLIEDLVREITSLWQTDELRRQKPTPVDEARAGLNIVEQSLWKAVPQYLRRVSNSLKKFTGKPLPLTCTPMKFGSWMGGDRDGNPNVTAKVTKEVSLLSRWMAIDLYIREVDSLRFELSTDRCSDRFSRLADKILEKDYDRGKSNFQKQQSSSCLPTQLPARAHLPACIDFGESRHTKFEIATTDYMPPNLQKQNEQDFSESDWEKIDNGSRSGLTSRGSFSSTSQLLLQRKLFEESQVGKTSFQKLLEPPPLKRAGSAPYRIVLGEVKEKLVKTRRLLELLIEGLPCEYDPKNSYETSDQLLEPLLLCYESLQSSGARVLADGRLADLIRRVSTFGMVLVKLDLRQEAARHSEALDAITTYLDMGTYSEWDEEKKLEFLTRELKGKRPLVPQCIKVGPDVKEVLDTFRVAAELGSESLGAYVISMASNASDVLAVELLQKDARLALTSEHGKPCPGGTLRVVPLFETVNDLRAAGPSIRKLLSIDWYREHIQKNHNGHQEVMVGYSDSGKDAGRFTAAWELYKAQENVVAACNEFGIKITLFHGRGGSIGRGGGPTYLAIQSQPPGSVMGSLRSTEQGEMVQAKFGIPQTAVRQLEVYTTAVLLATLKPPQPPREEKWRNLMEEISGISCQHYRSTVYENPEFLSYFHEATPQAELGFLNIGSRPTRRKSSSGIGHLRAIPWVFAWTQTRFVLPAWLGVGAGLKGVSEKGHADDLKEMYKEWPFFQSTLELIEMVLAKADIPMTKHYDEQLVSEKRRGLGTELRKELMTTEKYVLVISGHEKLLQDNKSLKKLIDSRLPYLNAMNMLQVEILKRLRRDEDNNKLRDALLITINGIAAGMRNTG

SEQ ID NO: 11675 - protein, 397 aa, Arabidopsis thaliana
MDEALTNASAIGDQRQKIEQYKLILSSVLSSNDLLQAQRFIDHILSDDVPLVVSRQLLQSFAQELGRLEPETQKEIAQFTLTQIQPRVVSFEEQALVIREKLAGLYESEQEWSKAAQMLSGIDLDSGMRAVDDNFKLSKCIQIARLYLEDDDAVNAEAFINKASFLVSNSQNEVLNLQYKVCYARILDMKRKFLEAALRYYGISQIEQRQIGDEEIDENALEQALSAAVTCTILAGAGPQRSRVLATLYKDERCSKLKIYPILQKVYLERILRRPEIDAFSEELRPHQKASLPDKSTVLDRAVIEHNLLSASKLYTNIRFDELGTLLAIDPRKAEKIAANMIGQDRMRGSIDQEEAVIHFEDDVEELQQWDQQISGLCQALNDILDGMAKKGMSVPV

SEQ ID NO: 11676 - protein, 206 aa, Polaromonas sp. JS666
MLHIWGRISSINVKKVVWTAQELGLNFQRTDAGGLFGIVKTPEYVRLNPNSTVPVIEDDDFVLWESNVIVRYLCAKHSAGQMYPTDLRARFDAERWMDWQQTTLNPASRPGFWQLIRTPAEQRNAAVIAESNAAVESLMATLDRHLAQRTYMAGEHFSMADIPLACEVHRWFGLPQPRQSRPNLERWYAGIRARQASKGVLDLALS

SEQ ID NO: 11677 - protein, 222 aa, Tradescantia virginiana
  misc_feature (11)..(11): Xaa can be any naturally occurring amino acid
  misc_feature (218)..(218): Xaa can be any naturally occurring amino acid
  misc_feature (221)..(221): Xaa can be any naturally occurring amino acid
  unsure (1)..(222): unsure at all Xaa locations
GLVKKAHEISXLCDAEVALIIFSTKGKLYEYATDSKMENILERYERYSYAEKALTSSDPELQGNWCQEYVKLKAKVEALHKSQRHLMGEQLEALDLKELQQLEHQLEGSLRLVRSRKTQMMLDSISELQRKEKSLEEQNKNLEKEILEKQKEKALAHQAHWEQQNQPLQSTNSPPRPFVIAETHPTLNIGNFQGRTNTVHAEESLQRQMRISSSLLPXWMXH

SEQ ID NO: 11678 - protein, 236 aa, Deinococcus radiodurans R1
MTSPTLIPHPEKHNTERIGWLRAAVLGANDGVVSVSSIVVGVAAASGVTPGTILLAGVAALVAGATSMAAGEYVSVQSQADTEHANLALEARELREQPELELQELADIYVARGVDPVLARQVAEQLTAADALGTHAREELGITEELRARPFQAALASALAFVTGGIIPVIAAVLLPHHLVSVGVTVVTLLALLVLGALAAYAGGANLWKGALRVTLWGAAAMALSALVGSLFGIKA

SEQ ID NO: 11679 - protein, 422 aa, Streptomyces griseoruber
MVRDTPRRAVITGIGVTAPGGIGADAFWQRLVSGRPATRTISRFDASGHRCRVAAECDFDPLEQGLTRQQARRTDRVVQLALAAAREALEDSGLTVDGERTGVALGSAVGGTTTMEQEYAVQSAEGRDWLVDPSYAVPHLYDYFVPTSLAAEVALLTGALGPASVISTGCTSGIDSVGYAAEMIREGTADVMVTGASDAPISPITLTCFDVIKATSARNDDPETACRPFDRTRTGLVLGEGASVLVLEEYEHAKRRGARIYGEIAGYASRCNAYHMTGLKADGLEMSEAIDAALDEARLNPVDIDYVNAHGSGTRQNDRHETAAVKRSLGEHAYRTPMSGIKAIVGHSLGAIGSIEIAACALSLRHGVVVPTANLDEPDPECDLDYVPHTARERRLDAVLTVGSGFGGFQSAMVLTAPGRPA

SEQ ID NO: 11680 - protein, 462 aa, Thermobifida fusca YX
MTVRSGSGLAANDFQQAAKDHLWMHFTELAAYQDTDVPVITRGEGPYVYDTNGKRYLDGLAGLFVSQVGHGRTEIAEAIAEQSRKLAYFPIWTYAHPTAIELADRLADLAPGDLNRVFFTTSGSEAVESAWKLARQYFKLIGQPTRHKVISRRIAYHGTTMGALSITGLQAIKTPFEPLVPSTIQVPNTNIYRAPVHGDDPEAFGRWAADQVEEAILQNDPESIAAVYVEPVQNSGGCFPPPPGYFQRLREICDRYGVLLVSDEVICAFGRVGAYFGAQRFDYLPDIITFAKGVTSGYVPMGGLIAREHLVEPFREAGNTFLHGSTFAGHPVAAAAALANLDIFEREGLIDHVQANAPAFRATLEKLLDLPIVGDVRGEGYFYGIELVKDKETKETFTDEEAHRLLKGFLSPALFDAGLVCRADDRGEPVVQLSPPLICGPEHFAEMESILREVLTEAWQRI

SEQ ID NO: 11681 - protein, 433 aa, Nocardia farcinica IFM 10152
MPENHIDDAKPVLSYPGGEYAMTITEATEGNHGIDLGKMLASTGYVTYDPGFMNTAPTKSAITYIDGEAGILRYRGYPIEQLADSSTFIEVSYLLIYGELPTQAQLDDFTDRIRRHTLLHEDLKRFFDGFPRNAHPMPVLSSAVNALSAYYQDSLDPRDPEQVELSTIRLLAKLPTIAAYSYKKSVGQPFLYPDNSLTLVENFLRMTFGFPAEPYEVDPEVAAALDMLLILHADHEQNCSTSTVRLVGSSDANLFTSVSGGINALWGPLHGGANQAVLEMLDDIKAQGGDVKEFIRKVKNKEDGVKLMGFGHRVYRNYDPRAAIAKKHADNILRKLGGDDELFEIAQALEEAALTDDYFVERRLYPNVDFYTGVIYKAMGFPTRMFTVLFAMGRLPGWIAHWREMHSEPLKIGRPRQIYTGYGARDYSRITER

SEQ ID NO: 11682 - protein, 184 aa, Zea mays
  misc_feature (160)..(160): Xaa can be any naturally occurring amino acid
  unsure (1)..(184): unsure at all Xaa locations
MTPAAGNGSATAAPPPPFLMKTYEVVDDPATDDVISWGPGNNSFIVWNTPEFARDLLPKYFKHSNFSSFVRQLNTYGFRKVDPDRWEFANEGFLRGQKHLLKTINRRKPSLQGNSQPQQPQSQNAPVPSCVEVGKFGLEEEIERLKRDKNVLMQELVRLXTAQQTTDHQLQTLGKRLQGMGVTA

SEQ ID NO: 11683 - protein, 580 aa, Enterococcus faecalis V583
MKNFYKKKFALTDQGAEALTKASISSFFVYCINMVPAFIIMMLIDELVLENAKPRWLYFAVSFVTLLFMYWLLDREYENLYNSTYKESAHLRVQIADDLSNLPLSYFSKHNLSDLSQTIMSDVEGIEHAMSHAIPKSGGMALFFPFISVMLLVGNVKMGLAVILPTLFSFVLILLSKKSQTKANTKYYDTLRENSEEFQETIELQQEINSFNLSKKVQDRLFKKMEESERIHLKVELSTFSVMALSSIFSYVSLAVVILVGVHLLLTGEVTILYVVGYLLAAIKIKDSFDSMKEAVLEIFYLAPKIQRIRAMKETSIQEGSDSPLKSFDVELRDVSFSYDNNTPILDHISFTAKQGEVTALVGASGSGKTSILKLVSRLYDYDEGCILIDGYDIKRVSPASLFSKIAIVFQEVTLFNTSILENIRIGNSQASDEEVKKAARLANCEDFIEKLPDGYHTLVGENGSSLSGGERQRLSIARAFLKNAPILILDEITASLDAENEKRIQESLNRLIQDKTVLIISHRLKSIEKVNKIVVMDQGKVVDQGTHSELYRRSEIYKNLIKKTKLSEKFVYEKEAQSR

SEQ ID NO: 11684 - protein, 315 aa, Clostridium acetobutylicum ATCC 824
MSEFITIGEPLALFAAEGESEIDKRISEVDHFKKFLAGAEVNVSVGVSRLGHSAQYITKLGEDPFGEFIRRRLNEENVGTDYISSTNKKFTGFQLKSKVSEGDPSIFYFRKNSAAANFSVEDLNKVNLDGVKHVHITGIFPALSESTKEATYKLLELAKERNITTTFDTNLRPQLWNSKEDMISTINDIAFKSDILLPGINEGLVLMGSDKPEEIADFYLNKGVKLVIIKLGSKGAYVKTKDEAYTVEGFKVKHVVDTVGAGDGFAVGVISAILEGISVKEAVRRGNAVGALAVMSEGDNDGYPTHEELEKFLGR

SEQ ID NO: 11685 - protein, 351 aa, Pirellula sp. 1
MVQANSRARTSLFLSLWLNLMTHDVYAVGNALVDIQTMVADDLLSELKLDKGIMTLVDDEKQATVLSRFDLPSLSRCAGGSAANTIAAVADFGGKAAFVGKIGDDETGQFFLKDLRALGVTIDVDPQPGTPSGTCAVLITEDAQRTMLTNLAASTALSEADIDEAVIAASKYVYIEGYLFTGEQTKAAAYKAIELAKKNDVKVAFTASDPFLVNMMKDEMWDLIRGPVDLFFCNEEEAKSLTGLEDPIACANKIHESAENVAMTLGPNGSILMHGGEAIPVEGVKVKAIDTTGAGDMYAGGILYGITNGLDWRQSGHLASHAAARVVAQMGARLQKPFTEDEVKQLTDLTV

SEQ ID NO: 11686 - protein, 135 aa, Brassica napus
  misc_feature (98)..(98): Xaa can be any naturally occurring amino acid
  unsure (1)..(135): unsure at all Xaa locations
MDMTLKSPEPEPETPTRIQPAKPISFGNGITKRHHHHHHPIAVTYKECLKNHAAAIGGHALDGCGEFMPSPSSTPSDPTSLKCAACGCHRNFHRRDPXDSSLTSAVPPPSLPPSSTLEYQPHHRHHPPPPAPHLR

SEQ ID NO: 11687 - protein, 398 aa, Psychrobacter arcticus 273-4
MFERIDYYAGDPILGLMDKFAADNNPDKVNLGVGVYYDEDGKMPVLECVKTAEQRIADPISPRPYLPMAGLPGHRKGCQELLFGKDAQVLQDGLVATIATIGGSGALKVGAEFIHEWFPQSKCYVSDPTWGNHIAIFEGSDVEVGKYPYYDTATGGIKFDEMIAFFETLNKDDVLLLHPCCHNPTGVDLTREQWDQVLNVIQARELIPFMDIAYQGFGEDMDSDAYAIRKAVDMGLPLFVSNSFSKNLSLYGERVGGLSVVCPTVDETNRVFGQLNSMVRRIYSSPPSHGGRVVDIVMNDEALHEQWVGEVYAMRDRIKSMRTKLKSVLEEKISGRNFDYLTAQNGMFSFTGLTPEQVAQLQSKYGIYMVSNSRMCVAGLNSSNIDYIANAMVDVLKD

SEQ ID NO: 11688 - protein, 473 aa, Pyrus pyrifolia
MRMLSRNATFNSHGQDSSYFLGWQEYEKNPYHEVHNTNGIIQMGLAENQLCFDLLESWLAKNPEAAAFKKNGESIFAELALFQDYHGLPAFKKAMVDFMAEIRGNKVTFDPNHLVLTAGATSANETFIFCLADPGEAFLIPTPYYPGFDRDLKWRTGVEIVPIHCTNSNGFQITETALEEAYQEAEKCNLRVKGVLVTNPSNPLGTTMTRNELYLLLSFVEDKGIHLISDEIYSGTAFSSPSFISVMEVLKDRNCDENFEVWQRVHVVYSLSKDLGLPGFRVGAIYSNDDMVVAAATKMSSFGLVSSQTQHLLSAMLSDKKLTKNYIAENHKRLKQRQKNLVSGLQKAGISCLNGNAGLFCWVDMRHLLRSNTFEAEMELWKKIVYEVHLNISPGSSCHCTEPGWFRVCFANLPERTLDLAMQRLKAFVGEYYNVPEVNGRSQSSHLSHSRGQSLTKWVSRLSFDDRCPIHGR

SEQ ID NO: 11689 - protein, 333 aa, Alcaligenes faecalis
MKPRIVTTHRIHPDTLALLETAAEVISNQSDSTMSREEVLLRTNDADGMMVFMPDSIDADFLSACPNLKVIGAALKGYDNFDVEACTRHGIWFTIVPDLLTSPTAELTIGLLLSITRNMLQGDNYIRSRQFNGWTPRFYGTGLTGKTAGIIGTGAVGRAVAKRLAAFDMQIQYTDPQPLPQESERAWNASRTSLDQLLATSDFIIPMLPMSSDTHHTINARALDRMKPGAYLVNACRGSIVDERAVVHALRTGHLGGYAADVFEMEEWARPDRPHSIPDELLDPALPTFFTPHLGSAVKSVRMEIEREAALSILEALQGRIPRGAVNHVGAGR

SEQ ID NO: 11690 - protein, 572 aa, GIBBERELLA ZEAE PH-1
MRESPSGSAASAMAENGVAPLSDERTPLLKSNGQGQNPDAEPAIEAQGDDPNQGLPAGQEEETTVVAEEVPTAKLILIFGTAWIGVFLGAVDSTIIATLSGPISSEFQSLSLLSWLATAYLISNAACQPISGRLTDIFGRGPGLVFSNLFFAAGNLICGLAHSQTTMIIGRVVAGIGGGGLMSISTFLGSDLVPLRRRGIVQGLGNICYGSGAMLGGVFGGLINDHTSQGWRLAFLIQVPPVLVSAVAVHFLVRVPPKQSDKSFLARIDFVGAFLTCSFLVLLLLGLNSGGNIVPWTHPLPLTTIPLAVITFGLFLFWESKARQPIIPVKLLLDRTVLNACLCNLACTMTVMGALFYVPLYLQVLGSSATQSGVQILPSPIGISIGSLFSGFVMKKTGKYTRLGVAGLLVLIAGVVVLTVQNQYSPKWLIGVSFFLIGSGYGATLTTTLLACIAAVDHSQQAVITSATYLARSLGSTVGITIGSAVYQNILKARLWERFGDQPGAADEIHRIRDDLDEINHLPEGCTRYTRLLKDGDFHEKDEKTIRYDMDENYTIQHGNWAISSKDKRHMV

SEQ ID NO: 11691 - protein, 264 aa, Alkaliphilus metalliredigenes QYMF
MIEELINKSKKIVIKIGSNTLSNDNGTINKNFLKELSEQIIYLRDKGKQFVIVSSGARIAGVSTLGKWMRKEDMNYKQALCAIGQVELMDAYRRCFEPYNVFIAQMLLTRDDFSDAHRRLNIRNTLFTLVDEGVIPIINENDTVSVEEIRIGDNDTLAALTTNIWNADLLILFSDIDGIYDKNPKEHEDAILVENVMNIDELLEKIEVGDVNEFGTGGIATKIEAAKAVNDYGIPMILANGKKENILLKLLEGTEKATIFQAGK

SEQ ID NO: 11692 - protein, 235 aa, Tradescantia virginiana
VQLKRMENKINRQVTFSKRRTGLLKKAHEISVLCDAEVGLIIFSTKGKLYEYSTDNSMAKILERYDRYATAERAVLEANLNLEVGSHYEYRKIKAKVDALQKSQRHLMGEQLDTMTNKELQQLEQQLETALKHIRSRKNQMMLESVAALQKKEKALREQKSILEKKLIEKQKDMEISQIHQYQAHEDNTSPTSLVLTNSLPTTLNTNGCITHAIEEEHAPTLPHTNNNNLPPWMV

SEQ ID NO: 11693 - protein, 124 aa, Brassica napus
MALSKSLGFILLAAFFVSFTVAQSPAPAPSNGGRRISPAHSPKNAMSPAPAVSPTPQTALTPESSASPPSPPSADSPSDLPAVSPSSISNSPAQAPAPVSGAVSNSYAVFGSVAVMLTAAVLAM

SEQ ID NO: 11694 - protein, 429 aa, Malus x domestica
MLSRNATFNSHGQDSSYFLGWQEYEKNPYHEVHNTNGIIQMGLAENQLCFDLLESWLAKNPEAAAFKKNGESIFAELALFQDYHGLPAFKKAMVDFMAEIRGNKVTFDPNHLVLTAGATSANETFIFCLADPGEAVLIPTPYYPGFDRDLKWRTGVEIVPIHCTSSNGFQITETALEEAYQEAEKRNLRVKGVLVTNPSNPLGTTMTRNELYLLLSFVEDKGIHLISDEIYSGTAFSSPSFISVMEVLKDRNCDENSEVWQRVHVVYSLSKDLGLPGFRVGAIYSNDDMVVAAATKMSSFGLVSSQTQHLLSAMLSDKKLTKNYIAENHKRLKQRQKKLVSGLQKSGISCLNGNAGLFCWVDMRHLLRSNTFEAEMELWKKIVYEVHLNISPGSSCHCTEPGWFRVCFANLPERTLDLAMQRLKAFVGE

SEQ ID NO: 11695 - protein, 226 aa, Paeonia suffruticosa
SQVTFSKRRGGLLKKAHEISVLCDAEVALIVFSTKGKLFEYSTDSSMEKILDRYEQYSIAERQLVEEPGSQGNWSLEYSKLRAKIELLQRNQRRFMGEDLDSLSPKDLQNMEQQLDVSLKNIRSRKNQLMYESISELQKKERAIQEQNNLLAKQIKEKEKTMAQQAQWEQQIHHGPNASAYLLSPHELTTLNMGGNYQGEPTEMRRNELDLTLEPIYTCHLGCFGA

SEQ ID NO: 11696 - protein, 1406 aa, Thermobifida fusca YX
MPRLMPRMKNRTLTESELDALLDALYRMRDGDFTVRLSPRGATRFSEVARVLNEVFDQCEQLSNEVQWVSETVSTDGRLSERVSISPARGSWGQSVRALNQMLDEVSEPVTAVARILDSVANGDLSQRVDLASRHGELHGDLLRLATSVNRMADQMSEFAGEVTRVAREVGTEGKLGGRANVKGVSGIWKDLTDNVNSMADNLTNQVRDISQVTTAVARGDLTKKVTVDVQGEMLQLKDTVNTMVDQLSTFADEVTRVAREVGTEGKLGGRANVKGVSGIWKDLTDNVNSMADNLTNQVRDISQVTTAVARGDLTKKVTVDVQGEMLQLKDTVNTMVDQLSTFADEVTRVAREVGTEGKLGGRANVKGVSGIWKDLTDNVNSMADSLTHQVRNISQVTSAVAAGDLTKKITVDAQGEILELKDTVNTMVDQLSAFADEVTRVAREVGTEGKLGGQAHVSGVSGVWKDLTDNVNSMANNLTHQVRQISVVTTAVARGDLTKKVTVNAKGEILELKDTINTMVDQLSTFADEVTRVTREVGTEGKLGGRANVKGVSGIWKDLTDNVNSMSHNLTTQVRNISQVTTAVARGDLTKRITVDAQGEMLELKDTINTMVDQLSTFALEVTRVGHEVGIEGKLGVQAKVAGVSGVWKDLTDSVNELAKNLTTQVRAIASVASAVARGDLTQSIQVSARGELATLKDNVNLMVSNLRETTAAQRDEDWLKSNLARLSGLLQGRRDLNELARLIMTEVTPLVDAQHGACYLPEDENDTETFRLYAGYGYQPSEERRRITAGQGLAGEAIAQRKELIVHNVPGDYVRIESGLGEAPPLSLAIFPIVSEDRVLGVIELGSYGTFREIHLNFLRQLVSLLSATITTILANSKTEYLLAQSQQLTTALQERSNELQRQQEELRRKNAELHSKAGQLASQNRAIELQNRQIERARRSLEDRAHQLQVSSKYKSEFLANMSHELRTPLNSLLILARLLADNSEKNLTPKQVEFAQTIYKAGSDLLQLINEILDLSKVEAGRMELNPSHVSISQLVDYVEASFRPLASEKGLAFAVEVSPDVPDQLWTDEQRLQQVLRNLLSNAVKFTSSGEVRLVIEPAWAVEDIDVDTFTDPDEVIAFSVIDTGIGIPEDKLQLIFEAFHQGDGGTSRRFGGTGLGLSISRNMAELLGGEIRVSSTVGEGSTFTLLLPVRLPEGTSERMYRSLSDADVVTSFDRPTDTVVLPTETPGPKAADTDPLASSEDEPYVPVLTAESVPQAAGGPQQDDVLAGKRVLIVDDDIRNVFALASALEAHGLEVLYADNGREGIAKLEANEDIDLVLMDIMMPELDGDATTRMIREMPQFADLPIISLTAKAMRGDRENSLAAGASDYVSKPVDLDHLLNVMRRWLDRGKSDNSTSREQ

SEQ ID NO: 11697 - protein, 605 aa, Serratia marcescens
MLLKTSRRTFLKGLTLSGVAGSLGVWSFNARSSLSLPVAASLQGTQFDLTIGETAVNITGSERQAKTINGGLPGPVLRWKEGDTITLKVKNRLNEQTSIHWHGIILPANMDGVPGLSFMGIEPDDTYVYTFKVKQNGTYWYHSHSGLQEQEGVYGAIIIDAGEPEPFTYDREHVVMLSDWTDENPHSLLKKLKKQSDYYNFNKPTVGSFFRDVNTRGLSATIADRKMWAEMKMNPTDLADVSGYTYTYLMNGQAPLKNWTGLFRPGEKIRLRFINGSAMTYFDIRIPGLKMTVVAADGQYVNPVTVDEFRIAVAETYDVIVEPQGEAYTIFAQSMDRTGYARGTLATREGLSAAVPPLDPRPLLTMEDMGMGGMGHDMAGMDHSQMGGMDNSGEMMSMDGADLPDSGTSSAPMDHSSMAGMDHSRMAGMPGMQSHPASETDNPLVDMQAMSVSPKLNDPGIGLRNNGRKVLTYADLKSRFEDPDGREPGRTIELHLTGHMEKFAWSFNGIKFSDAAPVLLKYGERLRITLINDTMMTHPIHLHGMWSDLEDENGNFMVRKHTIDVPPGTKRSYRVTADALGRWAYHCHLLYHMEMGMFREVRVEE

SEQ ID NO: 11698 - protein, 279 aa, Symbiobacterium thermophilum IAM 14863
MSRIAERFALLRSRGEKGLIAYLAAGDPSLATTRRLVHALAEAGVDMVELGLPFSDPLADGPVIQAASQRALAAGANTDNVLELVAALRADGLQIPLLIMTYYNLVLRPGVENFCHRAAAAGVDGLILPDVPVEESDEIRAAAGAVGLDLIQFVAPTSPPERIRRAAELARGFIYAVSSTGVTGVRDRLPPQLTAMVEAVKAVTDTPVAVGFGISRPEQVRQVTAVADAAIVGSAFVRHCGEGLPEHELVERVRILAEELKAGTRPGTGWDSRFVKNEA

SEQ ID NO: 11699 - protein, 477 aa, Synechococcus elongatus PCC 7942
MNQKLSRFPKSSWAYVVIACSIAIALIFSSPVKAKLPLGDRLTWGNAVTETSPAYRQALNQAKTFRMPAEFEPITSIWMAYPTYENQAGYPSQTVQKAMVKAIAPTVKIDFLLNEPEEKVIINGWLKTAGIPASQVRYHLVPHEDLWIRDMGPIFAVNADQTQVVDFGFNAWSYLAATDPAAMTDEQVDRKVAGDLDLPILRSSLISEGGNREFNGKGTLMLTEAVELQRNPGLTKEKIETELKRVFNLKKVIWLQEGVIDDELSYRGKLPDGSLTVLATGGHIDEYARFVDSNTILLAEVTAEERASDPLAAINYQRLEENLKILQAATDQDGKPFRIVRIPAAKPIYVNMTKEDAVFQALQELTFEDGTVIQDDDQIKTILAASYLNFVIANDVVIVPRYWQPDRNLEYQQKDQAALAAFQSVFPNKKIVAINPENINAGGGGMHCIVQQQAVVDAVARSLSTGAGDRSKSRSNL

SEQ ID NO: 11700 - protein, 484 aa, Proteus mirabilis
  misc_feature (53)..(53): Xaa can be any naturally occurring amino acid
  unsure (1)..(484): unsure at all Xaa locations
MEKKKLTTAAGAPVVDNNNVITAGPRGPMLLQDVWFLEKLAHFDREVIPERRXHAKGSGAFGTFTVTHDITKYTRAKIFSEVGKKTEMFARFSTVAGERGAADAERDIRGFALKFYTEEGNWDMVGNNTPVFYLRDPLKFPDLNHIVKRDPRTNMRNMAYKWDFFSHLPESLHQLTIDMSDRGLPLSYRFVHGYGSHTYSFINKDNERFWVKFHFRCQQGIKNLMDDEAEALVGKDRESSQRDLFEAIERGDYPRWKLQIQIMPEKEASTVPYNPFDLTKVWPHADYPLMDVGYFELNRNPDNYFSDVEQAAFSPANIVPGISFSPDKMLQGRLFSYGDAHRYRLGVNHHQIPVNAPKCPFHNYHRDGAMRVDGNSGNGITYEPNSGGVFQEQPDFKEPPLSIEGAADHWNHREDEDYFSQPRALYELLSDDEHQRMFARIAGELSQASKETQQRQIDLFTKVHPEYGAGVEKAIKVLEGKDAK

SEQ ID NO: 11701 - protein, 329 aa, Sinorhizobium meliloti
MPDQLAPTPVTVLTGYLGAGKTTLLNRILSEPHGKKFAVIVNEFGEVGIDNDLIVDADEEVFEMNNGCICCTVRGDLIRIIEALMRRRERFDGILIETTGLADPAPVAQTFFVDEDVRSKTRLDSIITVVDAKHLLGEIDRAHEAQEQLAFADTIILNKTDLVSPEGLQAVEDRIRRINPTAGILKTQRCNLEIASLLDRNAFDLDRILEVEPDFLEADHDHEHDDHVASFSLVERRPVDPEKFFRWLQTTARAFGTDMLRMKGIIAFAGDTDRYVVQGVHMLVEGDHQRPWKEGEERVSRLVFIGRNLPKDVITDGFMACCANPAVVG

SEQ ID NO: 11702 - protein, 105 aa, Zea mays
  misc_feature (5)..(5): Xaa can be any naturally occurring amino acid
  misc_feature (8)..(8): Xaa can be any naturally occurring amino acid
  misc_feature (10)..(10): Xaa can be any naturally occurring amino acid
  misc_feature (14)..(14): Xaa can be any naturally occurring amino acid
  misc_feature (16)..(16): Xaa can be any naturally occurring amino acid
  misc_feature (21)..(21): Xaa can be any naturally occurring amino acid
  misc_feature (43)..(43): Xaa can be any naturally occurring amino acid
  misc_feature (47)..(47): Xaa can be any naturally occurring amino acid
  misc_feature (59)..(59): Xaa can be any naturally occurring amino acid
  misc_feature (65)..(65): Xaa can be any naturally occurring amino acid
  misc_feature (70)..(70): Xaa can be any naturally occurring amino acid
  misc_feature (85)..(85): Xaa can be any naturally occurring amino acid
  misc_feature (89)..(92): Xaa can be any naturally occurring amino acid
  misc_feature (95)..(95): Xaa can be any naturally occurring amino acid
  misc_feature (99)..(99): Xaa can be any naturally occurring amino acid
  misc_feature (102)..(102): Xaa can be any naturally occurring amino acid
  unsure (1)..(105): unsure at all Xaa locations
MAKSXTRXEXLLCXYXLLGAXSSCIFLTLSLRLLPSPCGLLLXFLHXLSAVFSADGCSXSFTASXTPVQXNNAHTVGAALTAIFXGAIXXXXFTXRTSXFLXELQ

SEQ ID NO: 11703 - protein, 283 aa, Nocardia farcinica IFM 10152
MTFRSETSAVPSIVLNDGNVIPQLGFGVFQVPPDDVFDVVTTALRAGYRSIDTAAVYGNEEGTGRAIRAFGLPRDEVYVTTKLWNSEQGYDSTLRAFDDSMSKLGLDYLDLYLIHWPVAAAGKFVDTFRAFQELKRQGRVRSIGVSNFTVDNLRTLIAETGEIPAVNQIELHPALAQRELREFHAENAIATEAWSPLGQGTLLEDATITRIAQEVGRTPAQVIIRWHLQLGNVVIPKSVTPARIEANFDVFGFELSREQMAAIDGLDRGGRIGPDPDTFSAGL

SEQ ID NO: 11704 - protein, 585 aa, Raphanus sativus
MCGILAVLGCSDDSQAKRVRVLELSRRLRHRGPDWSGIYQNGGNYLAHQRLAIIDPASGDQPLFNEDKSIVVTVNGEIYNHEELRKGLKNHKFHTGSDCDVIAHLYEEHGENFVDMLDGIFSFVLLDTRDNSFMVARDAVGVTSLYIGWGLDGSLWVSSEMKGLHEDCEHFEAFPPGHLYSSKSGGGFKQWYNPPWFNESVPSTPYEPLAIRRAFEDAVIKRLMTDVPFGVLLSGGLDSSLVASITARHLAGTKAAKRWGPQLHSFCVGLEGSPDLKAGKEVAEYLGTVHHEFHFTVQDGIDAIEDVIYHVETYDVTTIRASTPMFLMSRKIKSLGVKMVLSGEGSDEIFGGYLYFHKAPNKQEFHQETCRKIKALHKYDCLRANKATSAFGLEARVPFLDKEFINTAMSLDPESKMIKPEEGRIEKWVLRRAFDDEERPYLPKHILYRQKEQFSDGVGYSWIDGLKAHAAENVNDKMMSNAAYIFPHNTPLTKEAYYYRMIFERFFPQNSARLTVPGGATVACSTAKAVEWDASWSNNMDPSGRAAIGVHLSAYDGSKVALPLPPHKAIDDMPMMMGQEVVIQT

SEQ ID NO: 11705 - protein, 772 aa, Streptomyces coelicolor A3(2)
MTAKSAAAAARATVYGYPRQGPNRELKKAIEGYWKGRVSAPELRSLAADLRAANWRRLADAGIDEVPAGDFSYYDHVLDTTVMVGAIPERHRAAVAADALDGYFAMARGTQEVAPLEMTKWFDTNYHYLVPELGPDTVFTADSTKQVTELAEAVALGLTARPVLVGPVTYLLLAKPAPGAPADFEPLTLLDRLLPVYAEVLTDLRAAGAEWVQLDEPAFVQDRTPAELNALERAYRELGALTDRPKLLVASYFDRLGDALPVLAKAPIEGLALDFTDAAATNLDALAAVGGLPGKRLVAGVVNGRNIWINDLQKSLSTLGTLLGLADRVDVSASCSLLHVPLDTGAERDIEPQILRWLAFARQKTAEIVTLAKGLAQGTDAITGELAASRADMASRAGSPITRNPAVRARAEAVTDDDARRSQPYAERTAAQRAHLGLPPLPTTTIGSFPQTGEIRAARADLRDGRIDIAGYEERIRAEIQEVISFQEKTGLDVLVHGEPERNDMVQYFAEQLTGYLATQHGWVQSYGTRYVRPPILAGDISRPEPMTVRWTTYAQSLTEKPVKGMLTGPVTMLAWSFVRDDQPLGDTARQVALALRDEVNDLEAAGTSVIQVDEPALRETLPLRAADHTAYLAWATEAFRLTTSGVRPDTQIHTHMCYAEFGDIVQAIDDLDADVISLEAARSHMQVAHELATHGYPREAGPGVYDIHSPRVPSAEEAAALLRTGLKAIPAERLWVNPDCGLKTRGWPETRASLENLVATARTLRGELSAS

SEQ ID NO: 11706 - protein, 375 aa, Candida albicans SC5314
MDEIPELVTELPENGVIKTEKVPAAPFVPSSSTPTALAKKIPITIVTGYLGSGKSTLLQNIGKTANKRLAIILNEFGDSSVIEKSVTIQDQDDSVQEWLDIGNGCLCCTVKDNGVTAIENLIENSKDKIDYILLETTGVADPAPIAKMFWLDEGLASNIYIDGVVTVVDAEHITKCLDDVGGHWHKESLGEDVEFEDGITTAHLQLALADVILLNKIDKVSDTQPMTQRIRQINQTSPIHTTSFGDIEISKILDLHAFDVDAKLTTSETSFHDDRISTVTITFPFLENEEGFSKVENFLQHVLWDNLVNGKNVEVHRMKGLLVHGNDVRVVQGVRDTYEIIENGKLLEEVKENKLVFIGKNLHRPDLQEELSKFL

SEQ ID NO: 11707 - protein, 534 aa, Ustilago maydis 521
MSAAVTASNAATAANGVSPSSAASSSAVATATANSAAKPAVQPSEVGWLFVTQYYTFLNQNPARLHCFFTKKSTMVHGIEQEESSPCFGQQQIHDKITSLNYQDAKVFVSNVDSQSSASGGILVQVLGELSNNGAAWRKFAQTFFLAEQPNGYYVLNDIFRYLKDDDEIEAEAEAVDEALQEEIDEADKNGVEVAHTIQINNIGNANAVPHLPAPTSSPAASKAIEAADTKPAATEQQPATKLDAPSAADNAVATSTAAEPTNTDADQVGTDKKLTAVDNHQAPVPPKGAKDAADAAKTETAPAAAASAPNAAASTPAAAAAAAAAPTPAPAQPAGPPKPKTWATLAASDATRWGSNVSAEAKGVSSSRPAAATTSTAAKPAAAAAAASAPKPAAATSNGASSSPSVYIKNVVADQVTEAALRQALEAFGTVKDVQIIGSRSCAFAEFTSVDGARKAAAKASVAVGKNGWNVTIEERRKPSAGGAGGAGAAGGARGAGGAPRNGAAGGSRTGAARGGNAAVRAGRGGAGRAGAN

SEQ ID NO: 11708 - protein, 489 aa, Burkholderia sp. 383
MSTVQETLALKDPSLFRQQAYVNGEWQGATNGETFEVRNPATGGLLGTVPAMGTAETRHAIEAANAAWPAWRKKTAKERAVVLRKWHDLMMEHADDLALILTTEQGKSLAEAKGEIGYAASFLEWFAEEGKRVYGDTIPTPASDKRIVVTKEAIGVCAAITPWNFPAAMITRKVGPALAAGCPIVVKPAEATPFSALAMAVLAERAGVPAGVFSVVTGDPKAIGGEMTSNPIVRKLSFTGSTPVGRLLMSQCAATVKKVSLELGGNAPFIVFDDADLDAAVQGAIASKYRNSGQTCVCTNRFYVHEAVYDQFAQKLAAAVGQLKVGRGTEPGVTQGPLINEAAVLKVEAHIEDALAKGATVVTGGKRHALGHGFFEPTVLTGVTPAMKVAKEETFGPLAPLFKFGSDDEVIRLANDTEFGLAAYFYSRDIGRVWKVAEALEYGMVGVNTGLISNEVAPFGGVKQSGLGREGSHYGIDDYVVIKYLCLAV

SEQ ID NO: 11709 - protein, 234 aa, Streptococcus thermophilus LMG 18311
MVIGTVIAASMGLVDFSPVAAAPVVHVPTSFYFGMPKFELSSIIMMCIIATVSMVESTGVYLALSDITKDPIDSTRLRNGYRAEGMAVLLGGLFNTFSYTGFSQNVGLVKLSGIKKRLPIYYTAGFLVLLGLLPKFGALAQIIPSPVLGGAMLVMFGFVSIQGMQILARVDFANNEHNFLIVAVSIAAGVGLNNSNLFNSLPTAFQMFFSNGIVVASLLAIVLNAILNHNKKEK

SEQ ID NO: 11710 - protein, 429 aa, Burkholderia sp. 383
MTVKNADLQARKNAATPRGVGVMCDFYAARAENAELWDVEGRRFIDFAAGIAVLNTGHRHPKIVKAISDQLNNFTHTAYQIVPYASYVELAEKINARAPGDFPKKTAFFTTGAEAVENAIKIARAATGRPGVIAFSGGFHGRTMMGMALTGKVAPYKLNFGPFPGDVFHAPYPNAVHGVTTADSIKAIEMLFKADIDPKRVAAIIFEPVQGEGGFYAAPAEFVRALRKICNEHGILLIADEVQTGFARTGKLFAMQHYDVLADLITMAKSLAGGMPLSGVVGRADVMDAAAPGGLGGTYAGNPLAVASAHAVLEIIDEEKLCERATQFGDVLKAKLNALQADVPQIADVRGPGAMIAVEFLKPGSGEPDAEFTKRVQTRALERGLLLLVCGVYSNVVRFLFPLTIPQAVFDEALVILEEVLKETVGVPA

SEQ ID NO: 11711 - protein, 494 aa, Zea mays
  misc_feature (205)..(205): Xaa can be any naturally occurring amino acid
  unsure (1)..(494): unsure at all Xaa locations
MDPYKHRPSSAFNAPYWTTNSGAPVWNNDSSLTVGARGPILLEDYHLVEKLANFDRERIPERVVHARGASAKGFFEVTHDITHLTCADFLRAPGVQTPVIVRFSTVIHERGSPETLRDPRGFAVKFYTREGNWDLVGNNFPVFFIRDGIKFPDMVHALKPNPRTHIQDNWRILDFFSHHPESLHMFSFLFDDVGIPADYRHMDGXSGVHTYTLVSRAGTVTYVKFHWRPTCGVRSLMDDEAVAVGGANHSHATKDLTDAIAAGNFPEWTLYIQTMDPEMEDRLDDLDPLDVTKTWPEDAFPLQPVGRLVLNRNIDNFFAENEQLAFCPGLIVPGIYYSDDKLLQTRIFSYSDTQRHRLGPNYLLLPANAPKCAHHNNHYDGFMNFMHRHEEVDYFPSRYDAARNAPRYPIPTAHIAGRREKTVISKENNFKQPGERYRAMDPARQERFITRWVDALSDPRLTHEIRTIWLSNWSQADRSLGQKLASRLSAKPSM

SEQ ID NO: 11712 - protein, 449 aa, Streptococcus thermophilus LMG 18311
MHETHSLRERFLVFFKIFVPILIYQFANFSASSVDTTMTGQYDALHLAGVAMATSLWSPFFTFLTGIVSALVPIIGHHLGSGRKDRVAPDFYQFLYMALGLSLILFALVFLGAPLVLGHLGLEPVVRKVALGYLRFLSLGIIPLLLFSVVRSFLDALGLTRLSMYLMLLLLPLNGFFNFLLIYGIAGLPELGGAGAGLGTSLAYWALFLISIAVIRKHKKVKPYQIEKIQPLDKTALLDALKLGLPIGGTVFAEVSIFSGVGLVMAKYPSLVIASHQAAMNFSNLTYAFPLSVSSAMAIIISYEFGAKRMDAVKSYSKLGRLTALVFAGFTLFFLYFLRYDLAELYGHEPEFLRMTTVFMTYSLFFQVSDAFAAPLQGILRGYKDTKVPFYLGVLSYWGLTFPVGYLLEKVAGLGPYSYWIGLIASLIVSGLCYQWRLNRIVKRYESHH

SEQ ID NO: 11713 - protein, 426 aa, Brassica napus
GRPTRPGCGRNCLGACCLNGARLPLYSCKKLENSGTGEKLVISHEAREPPVAFLESLVLGEWEDRFQRGLFRYDVTACETKVIPGKYGFVAQLNEGRHLKKRPTEFRVDKVLQSFDGNKFNFTKVGQEELLFQFEAGEDGEVQFFPCMPLDAENSPSVVAINVSPIEYGHVLLIPRVLDCLPQRIDHKSLLLALHMAAEAANPYFRLGYNSLGAFATINHLHFQAYYLAMPFPLEKAPSKKLATTASGVKISELLSYPVRSLLFEGGSSMQDLSDTVSDACVCLQSNNFPFNILIADCGRQIFLMPQCYAEKQALGEVSPEVLETQVNPAVWEISGHMVLKRKEDYEGASEENAWRLLAEASLSEERFKEVNALIFEAIGCSDQEEELEGTVVEQDNPSGSRNPKRNRTHGAPITNGTASECLVLQ

SEQ ID NO: 11714 - protein, 414 aa, Alkaliphilus metalliredigenes QYMF
MMTNLMEQCKVLQNASKQLSSMNTKDKNEALRQVAISLQKNESFIIQENQKDVENAEAKGMKESLVDRLRLTKDRVEGMIKGIQTIIELKDPVWKSNEVWTLENGLTVSKMTVPIGVIGIIYESRPNVTVDAFCLTLKSGNGVLLRGSSTSIFSNRALVHAIKEGLKNSDVSEAVISLIDDPDRGLVKEMLTLNEYIDLIIPRGGKELIDFVVKNATVPTIETGVGNCHIFVDESANIDEAVDIIENAKVQRPGVCNACETVLIHEKIAKDLLPKVSGRIGKQVEIRGCQHTQSLIGGKLAIEDDWAEEFLDYIVAVKVVPNVDEAIEHINHFGTKHSEAILTENLSHANQFLRQVDAAAVYVNASTRFTDGSEFGLGGEMGISTQKIHARGPMGLNELVTVKYTIVGNGQIRK

SEQ ID NO: 11715 - protein, 340 aa, Streptococcus thermophilus LMG 18311
MRNIPKSVTLKAWRCKYLVKGVLKMSNPNNHVIYLAGGCFWGVEEYFSRVPGVLDAVSGYANGSSETTRYELISQTGHAETVQVTYDAGKVTLREILLHFFRIINPLSKNKQGNDVGTQYRTGVYYTDVNDLPIIEKVFQEMSEQYGQPLAVELLPLQHFIPAEEYHQDYLKKNPNGYCHINVNQAVNPVIDSSSYHKPSQEELKVSLSPAAYAVTQENRTERAFTSPLWNHFEPGIYVDVVTGEPLFSSRDKFYSACGWPSFSRPISPEVANYKEDHSHNMDRIEVRSRVGDSHLGHVFPDGPSDKGGLRYCINGVATRFVPKADMEKEGYAYLLDQVD

SEQ ID NO: 11716 - protein, 436 aa, Kineococcus radiotolerans SRS30216
MSAPSPPGGWDRPGDAPGDGRDPWSGPPTAPPPSAEQVWWRPEGPPPGHDAFPPHAPVDPGTAPGPGGHRRAGAPARRIVVGSGVLLLGVVGGFAGGLLQDEVGDSDGTYPAVAIASPSAGSTERPAGSVAGIAAAALPSVVALQVQGQEGTGTGSGFVLDTSAGGGGTFVLTNNHVVAGAYDDGVTVVFQDGAQAVGELVGADASYDLAVVRVERGGLRALPFGDSAAVVVGDPVVAVGAPLGLQGTVTEGIVSALNRPVSAGESGPDASYIQAIQTDAAINPGNSGGPLLNAAGEVIGINSAIAALPGAGGGQTTGSIGLGFSIPSEQARRTAEQLIRTGRAVHPIIGVSLDSSYTGEGVQILDSPGAVNPGGPGERAGLQPGDVVLAIDGRPVTEPAELIVDIRAREPGEQVTLTVRRDGRTTEVPVTLEADG

SEQ ID NO: 11717 - protein, 1320 aa, Candida albicans SC5314
MKSQSTDTLQPRISSDSLVYSSSSSSSNVYSQPKLPFARSYSSIPEQVHDPGSRQSSKNSNTNFSFSEHDDSIQEFLISPIQSDIFPYSKKPVISPVLESPEAGGDSTIVETSSPSPTKSGTVSLNSNAIGSIIGSYDYSKSSLELEKPKPVEEPVFQKDHARDHARQGSDASTISNGSEQVSKDKRFVRYAMNTQSPLVNASNKWQISNVIKWLDKNQFNNSWKETFRRNEISGNRFLELENFDKESMIWKQFSKFLQLDDDLNSVDRFIELLRKESSHELQTRKSLGGGEISPINVKHENRKSTPIYTKHMSTSSVSSSNSSSSISRPLSYVDSKPKEQLSSPSHHSFFRKHSRSTSNESKDAKKRYSSFDDNRVKSVPKNDKKSNGILSTLRKYGGDKIAKNTKQRSSTYFPSLDLPPPLESDPPAYNERKISVDSELSPKSIKSFSDDLSIDPKYLPTQHQELDLRKFHDCEPITILASKDNISFVPIVITELSNAKSHIIKALGLIDIGSITLHLTDFFHKEGEAIPDFLIPKVLKLDGLLKFYVRQELKSPEGTTTTFSTTSSDSKSYIADGNKTYPETPQYLLQAQHDSRVDYWNFKDLTSISEDPSKSLAGAKQNIDSKRNDTKQKPKEFPLKFPFANAPKKGNTVPQLQIDTSGVNNISKPPTSTGSTFQVLRKKGHEIDFDKRRKSPYESKTPKIIANIYSSSVANTKKSPISASTVMALKDDVVVQRPETISRSNSIIAKRTAPPPPGDRRVQIQRQNSILRRKPGLKSTNNVTSGSSEGSKKNISDSTDDNDSEDAFFVKPLKKKENELGNNSDNNSENDEDNDSDDDFFVKPIKKEVADVSAGKVELDDSEEDFFVKPIHKKPSHMNVRPPVEEVYNNLEKYFPYTNLDKPIIDDSPASPSPQRRPTISRTFSSANKSPVAPTSADSKNTNDEQPSLRVRRMKTIRGVANEARRKVLQMKQASPPNTFANITRENSAKLTRSNTKMWGQRVVEVTSQEIEKGFVSKLRNKNGLYQEYAWIKGELIGRGSFGDVYLGLNVTTGEMLAVKQVVCGRNNKEGIEALHKEVETMKDLNHMNIVQYLGYDQQKNIYSLFLEYVAGGSIALCLKSYGKFDETLIRFITKQILLGLEYLHSNNIIHRDLKADNLLLEVDGTCKISDFGISKRSNDIYANNANMSMQGTIFWMAPEVIDSMVEGYSAKIDIWSLGCVVLEMFAGKRPWSNEAAISVIYKTGKEKLAPPIPDDIAHLVSPVAESFINRCFTIDPKDRPTAGELLNDPFVNTLDHDFNFANTKLAEMIRYNSKRLFT

SEQ ID NO: 11718 - protein, 153 aa, Oryza sativa
MAPKAEKKPAAKKPAEEEPAAEKAEKAPAGKKPKAEKRLPAGKGEKGSGEGKKAGRKKGKKSVETYKIYIFKVLKQVHPDIGISSKAMSIMNSFINDIFEKLAAEAAKLARYNKKPTITSREIQTAVRLVLPGELAKHAVSEGTKAVTKFTSS

SEQ ID NO: 11719 - protein, 432 aa, Alcaligenes faecalis
MFSIFTSIVIWALLGSLIGWWLGPFIGLALFCGGLLMLVVISTLQLSRVERWTRNLNDPPPPAVGPWDAILAPIYRQLRRDRQEIQDLNRYVDGIMMAAEALPDGAITLNGDMELQWCNQTACEHIGLNLATDRHHSIFNILREPEFSRYARQPQWDGPLLLHLSKDGRERSLLLQLTPYGLGQFLIVTRDVTQVEMLETTRKDFVANVSHELRTPLTVLLGFLETLQDMPPESLPLEQRQRYEQMMLEQTRHMQSIVADLLTLSTLESSPTVEGETVQVSQLIESALKQGEAISGGQHSFVTDLDPRIAIQGMETELSSAVSNLITNAVRYTPKDGTITVRWYLNDNGEACYSVQDTGIGIAAQDIPRLTERFYRVDKGRSRSTGGTGLGLAITKHIIVRHNADLQIQSRLGVGSVFMLRFPKSRVRLQDS

SEQ ID NO: 11720 - protein, 426 aa, Thiomicrospira crunogena XCL-2
MSNSHTLFEAAQAHIPGGVNSPVRAFKGVGGDPVFFESAKGAYLTDADGKQYIDYVASWGPAILGHTHPDVIKAVQTQAEKGLSFGAPTEIETTMADMVCDLIPSMDMVRMVSSGTEATMTAIRLARGYTGRDKIVKFEGCYHGHSDSLLVKAGSGALTLGVPSSPGVPACLAQETLTLTHNDSEEVKKVFSEIGDQIACIIVEPVAGNMNCIPPEDGFLETLREVCDESGAVLIFDEVMCGFRVGLTGAQGRYNITPDLTTFGKVIGGGMPVGAFGGKKEVMQHIAPLGPVYQAGTLSGNPIAMTAGLKTLELISKPGFFEELEAKTTKLVNGLQKAADEAGIAFTTNQVGAMFGFFFSEEKDIRRFSQVAKGNMEQFKAFYHGMLDEGIYLAPSAFEAGFVSSAHTDQDIDDTIAAAKKVMATL

SEQ ID NO: 11721 - protein, 282 aa, Cryptococcus antarcticus
LKDDRALFNSAQKLFALIISLGQAMVYVATGLYGQPQDLGAGVCLLLVLQLVAAASIVILLDELLTKGYGLGSGISLFIATNICESIVWKAFSPTTVNTGRGPEFEGAVIALFHLLFTWNDKSRALKEAFYRDRLPNIMNLLATAAIFAAVIYLQGFRIEIPVKSNRARGARGSYPVKLFYTSNMPIMLESALTSNVFLVSQMLFNRFPDNIFVKLLGAWEPLEGSSQLSAVSGLAYYISAPRSITSALTDPLHTVIYIAFIVTACAVFSKTWIEVSDRVPE

SEQ ID NO: 11722 - protein, 378 aa, Nostoc sp. PCC 7120
MMVCEYKPGLEGIPAAQSSISYVDGQKGILEYRGIRIEDLAQQSTFLETAYLLIWGELPTKEELQVFEEEVRLHRRIKYRIRDMMKCFPESGHPMDALQASAAALGLFYSRRDLHNPAYIRDAVVRLIATIPTMVAAFQLMRKGNDPVKPRDDLDYSANFLYMLNEKEPDALAAKIFDICLILHVEHTMNASTFSARVTASTLTDPYAVVASAVGTLGGPLHGGANEEVIQMLEEIGSVENVRSYVEERLQRKDKLMGFGHRVYKVKDPRATILQGLAEQLFAKFGADKYYDIAQEMERVVEEKLGHKGIYPNVDFYSGLVYRKMGIPTDLFTPIFAIARVAGWLAHWKEQLEENRIFRPTQVYNGKHSVTYTPIDQR

SEQ ID NO: 11723 - protein, 283 aa, Sulfolobus solfataricus P2
MIHLAVGRFNIDIIVKLDSIPPIDSSHMTDVLEIMPGGAATNYAVAVTKLGHSAKLLAKVGKSEVVRSLMEKVVELGVGLEYVEELNEKPSATLIFLRNDGTLSMVRRLGASILLTREDVKRRFGLFDVIHFASVSPNVVVRDPYAKLVSYDPGPQAKNIESVDVDILYVNEKEYEMIEDKNIRARFIVIKMGKKGAKIITETEECSVEPIQVEKIVDTTGAGDTFDAAFNVTYSEDKDIVKSLQVASVASGLKVSRIGGISSPTLEEVREYLRKKKPNVICK

SEQ ID NO: 11724 - protein, 664 aa, Thiomicrospira crunogena XCL-2
MNTSNKRVQPQLGRRQFVKGIALSTISAAIGSHLPSAWAKEEFSAIGTGNLNPKQPVLIGPEFDLTISETPVNITGSPVKATLINNSLPAPTLVWREGETVTIRVKNTLSVDTSIHWHGIILPFQMDGVPGLSYDGIKPGETFTYQFTVQQHGTYWYHSHSKFQEQTGLYGALVVLPKKADPLDYDHDFVIQLSDWSDSAPDTIYSNIKKMGDYYNYSQRTVGDFWHEVKTYGFSKAWEKRKMWNQMRMTDRDLSDVTGATYTYLMNGLSPKAHWRTVIESGKKVRLRFVNSSAMTFFDVRIPGLKMTVVAADGNLVQPVEIDEFRIGVAETYDVIVEPDTSKQAYAIFAQAIDRSGFAIGSITSDPTQLADTPEMDPLPILSMTDMGMDMNSTSHPMNMDGEMKGMSHSSQSMDMSNGSQSMTPSDHNSMNGMKHNMSSMQQQDYGHALAMEKNQMGMDVSNIDHSKHAHGMDNMNVNLDDITIPMDMSPQLPQIKTPSAEGAQIGMRAMAPQYRLDDPGVGLRENGRKVLTYADLKNRFPTRHDPKPTKELVMHLTGNMERYMWSINGIPFEKAEPLNFQYGDRVRITFINDTMMNHPMHLHGVWSDLETGDENHIPRKHTVIVQPGSKISYRVTMDAKGDWAYHCHLLYHMMGMFRKVQIR

SEQ ID NO: 11725 - protein, 194 aa, Nostoc sp. PCC 7120
MLKFLKQVGDYAKEAVQAGRYIGQGLSVTFDHMRRRPVTVQYPYEKLIPGERFRGRIHYEFDKCIACEVCVRVCPINLPVVDWEFDKATKKKKLNHYSIDFGVCIFCGNCVEYCPTNCLSMTEEYELATYDRHELNYDSVALGRLPYKVTDDPMVTPLRELVYLPKGVLDPHDLPANAPRPGARPEDLVEKTEA

SEQ ID NO: 11726 - protein, 637 aa, Thermoactinomyces vulgaris
AANDNNVEWNGLFHDQGPLFDNAPEPTSTQSVTLKLRTFKGDITSANIKYWDTADNAFHWVPMVWDSNDPTGTFDYWKGTIPASPSIKYYRFQINDGTSTAWYNGNGPSSTEPNADDFYIIPNFKTPDWLKNGVMYQIFPDRFYNGDSSNDVQTGSYTYNGTPTEKKAWGSSVYADPGYDNSLVFFGGDLAGIDQKLGYIKKTLGANILYLNPIFKAPTNHKYDTQDYMAVDPAFGDNSTLQTLINDIHSTANGPKGYLILDGVFNHTGDSHPWFDKYNNFSSQGAYESQSSPWYNYYTFYTWPDSYASFLGFNSLPKLNYGNSGSAVRGVIYNNSNSVAKTYLNPPYSVDGWRLDAAQYVDANGNNGSDVTNHQIWSEFRNAVKGVNSNAAIIGEYWGNANPWTAQGNQWDAATNFDGFTQPVSEWITGKDYQNNSASISTTQFDSWLRGTRANYPTNVQQSMMNFLSNHDITRFATRSGGDLWKTYLALIFQMTYVGTPTIYYGDEYGMQGGADPDNRRSFDWSQATPSNSAVALTQKLITIRNQYPALRTGSFMTLITDDTNKIYSYGRFDNVNRIAVVLNNDSVSHTVNVPVWQLSMPNGSTVTDKITGHSYTVQNGMVTVAVDGHYGAVLAQ

SEQ ID NO: 11727 - protein, 637 aa, Thermoactinomyces vulgaris
AANDNNVEWNGLFHDQGPLFDNAPEPTSTQSVTLKLRTFKGDITSANIKYWDTADNAFHWVPMVWDSNDPTGTFDYWKGTIPASPSIKYYRFQINDGTSTAWYNGNGPSSTEPNADDFYIIPNFKTPDWLKNGVMYQIFPDRFYNGDSSNDVQTGSYTYNGTPTEKKAWGSSVYADPGYDNSLVFFGGDLAGIDQKLGYIKKTLGANILYLNPIFKAPTNHKYDTQDYMAVDPAFGDNSTLQTLINDIHSTANGPKGYLILDGVFNHTGDSHPWFDKYNNFSSQGAYESQSSPWYNYYTFYTWPDSYASFLGFNSLPKLNYGNSGSAVRGVIYNNSNSVAKTYLNPPYSVDGWRLNAAQYVDANGNNGSDVTNHQIWSEFRNAVKGVNSNAAIIGQYWGNANPWTAQGNQWDAATNFDGFTQPVSEWITGKDYQNNSASISTTQFDSWLRGTRANYPTNVQQSMMNFLSNHDITRFATRSGGDLWKTYLALIFQMTYVGTPTIYYGDEYGMQGGADPDNRRSFDWSQATPSNSAVALTQKLITIRNQYPALRTGSFMTLITDDTNKIYSYGRFDNVNRIAVVLNNDSVSHTVNVPVWQLSMPNGSTVTDKITGHSYTVQNGMVTVAVDGHYGAVLAQ

SEQ ID NO: 11728 - protein, 430 aa, Arabidopsis thaliana
MALAMMIRNAASKRGMTPISGHFGGLRSMSSWWKSVEPAPKDPILGVTEAFLADPSPEKVNVGVGAYRDDNGKPVVLECVREAEKRLAGSTFMEYLPMGGSAKMVDLTLKLAYGDNSEFIKDKRIAAVQTLSGTGACRLFADFQKRFSPGSQIYIPVPTWSNHHNIWKDAQVPQKTYHYYHPETKGLDFSALMDDVKNAPEGSFFLLHACAHNPTGVDPTEEQWREISQLFKAKKHFAFFDMAYQGFASGDPARDAKSIRIFLEDGHHIGISQSYAKNMGLYGQRVGCLSVLCEDPKQAVAVKSQLQQLARPMYSNPPLHGAQLVSTILEDPELKSLWLKEVKVMADRIIGMRTTLRESLEKLGSPLSWEHVTKQIGMFCYSGLTPEQVDRLTSEYHIYMTRNGRISMAGVTTGNVGYLANAIHEVTKSS

SEQ ID NO: 11729 - protein, 505 aa, Vitis vinifera
MELAKPSSVFAIQDHQSSSPPTPIWKTVVVASIAAGIQFGWALQLSLLTPYVQLLGIPHKWAAFIWLCGPISGMIVQPVVGYHSDRCTSRFGRRRPFIAAGAVLVAIAVFLIGYAADIGRVSGDPLHNTIKTRAVAVFVVGFWILDVANNMLQGPCRALLADLSGTSARRTRTANALYSFFMAVGNVLGYAAGSFSKLHKMFPFARTQACDLYCANLKSCFFLSIALLLILTIIAFATVHETPLNRADIAVVEAGQPFYSQMMNAFRQLRRPMWVLLLVTCLNWIGWFPFLLFDTDWMGREVYGGTVGEGPRGRLYDLGVRAGSLGLMLNSVVLGLMSLGVEFFGRGVGGVKRLWGGVNFLLALCLALTVLVSKLAASWRHSLGGELHPPPIGIKAGALSLFAVMGVPLAITYSIPFALASIFCHSSGAGQGLSLGVLNLAIVVPQMMVSVASGPWDARFGGGNLPAFVVGAFAAALSGVLALTMLPAPPPDVPNTKDERTQPSS

SEQ ID NO: 11730 - protein, 386 aa, Ipomoea purpurea
MVDGNHPLPAPKVCVTGAAGFIGSWLVKTLLQRGYHVHATVRDPGNTKKVKHLVELPKADTNLTVWKGVMEEEGSFDEAIAGCEGVFHVATPMDFDSKDPENEVIKPTINGVLNIINSCVKAKTVKRLVFTSSAGTLNVQPQQKPVYDETCWSDLDFIYAKKMTGWMYFASKILAEKEAWKATKEKKIDFISIIPPLVVGPFITPTFPPSLITALSLITGNQAHYSIIKQGQYVHLDDLCEAHIFLYEHPKAEGRFICSSHHTTIHGLAEMITQNWPEYYIPSQFKGIEKELAVVYFSSKKLQDMGFQFKYSLEDMYRGAIETLRKKGLLPYSTKEAAAIEEEQETVPLKVEEPTAIEQKQETVPLKLEEEPIAIEKKQEVVPLKA

SEQ ID NO: 11731 - protein, 261 aa, Parachlamydia sp. UWE25
MKLQLFLFATILNILPLVYVSATEEKKPANSEIPQTQDLVNQVLTFARNHQDFKNLYFKEHEHEFIRLAEQGQNPHTLFIGCSDSRMVPDLILGTKPGELFVIRTAGNFVPPYDQNGWDGVSATIQYALEALDVKHIIICGHSHCGAIKGLFQTINSTQLGILKRWLQFGNEAKETTMKIVKPETSEKDLYTVAEQISVVYQLAHLMTFPAIKKKVDEKTLDLHGWYYKIETGEVSYYDPETFVFKPLKKLKAQALQSILN

SEQ ID NO: 11732 - protein, 181 aa, Brassica napus
VDPRVREDGDAAAGRPEVETKNVDCGEAGGSVWRKESINPTAAIRSVCVRDMGTEMTPIGSQEPSRTATPVRATTPVGRSPVTSPVRASRRGETVRMATEVATVTETRSVASNNNENIGLGDNSNTKAMNAMEARAMAWDEAERAKFMARYKREEVKIQAWENHEKRKAEMEMKKKKKGRP

SEQ ID NO: 11733 - protein, 327 aa, Thermus thermophilus
MKAPVRVAVTGAAGQIGYSLLFRIAAGEMLGKDQPVILQLLEIPQAMKALEGVVMELEDCAFPLLAGLEATDDPDVAFKDADYALLVGAAPRKAGMERRDLLQVNGKIFTEQGRALAEVAKKDVKVLVVGNPANTNALIAYKNAPGLNPRNFTAMTRLDHNRAKAQLAKKTGTGVDRIRRMTVWGNHSSIMFPDLFHAEVDGRPALELVDMEWYEKVFIPTVAQRGAAIIQARGASSAASAANAAIEHIRDWALGTPEGDWVSMAVPSQGEYGIPEGIVYSFPVTAKDGAYRVVEGLEINEFARKRMEITAQELLDEMEQVKALGLI

SEQ ID NO: 11734 - protein, 522 aa, Oryza sativa (japonica cultivar-group)
MDAVAGAGQLVGLAAATLLTAAFLVAVKMGWRRRRRQREVAPEGGCRVVGGDGGDRTDIVIVGAGVAGSALAYTLGKDGRRVHVIERDMTEPDRIVGELLQPGGYLKLMELGLEDCVEEIDAQRVLGYALLKDGRNTKLSYPLEKFHSDVAGRSFHNGRFIQKMRQKAASLPNVHLEQGTVTSLLEEGGTVKGVQYKTKSGEELKAYAPLTIVCDGCFSNLRRVLCSPKVDVPSCFVGLVLENCQLPHPNHGHVILANPSPILCYPISSTEIRCLVDIPGQKVPSMATGEMAKYLKTVVAPQIPPELHDSFIAAIDKGSIRTMPNRSMPAAPLPTPGALLMGDAFNMRHPLTGGGMTVAFSDIVVLRNLLKPLGNLHDAPSLCKYLESFYTLRKPVASTINTLAGALYKVFCASTDQAKNEMREACFDYLSLGGVFSNGPIALLSGLNPRPLSLVAHFFAVAIYGVGRLMLPVPSPKRMWIGARLVSGACGIIFPIIKAEGVRQMFFPATVPAYYRAPPPME

SEQ ID NO: 11735 - protein, 197 aa, Cryptococcus laurentii
LGSGISLFIATNICENIVWKAFSPNTINTGRGPEFEGAVIALFHLLFTWNDKTRALKEAFYRERLPNIMNLLATVAVFAAVIYLQGFRIEIPIKSSKMRGQRGSYPVKLFYTSNMPIMLESALTSNVFLISQMLASRFPDNLLVRLLGVWEPLEDAPSQLSAVSGIAYYISAPHSLRAALTDPLHTVIYIAFIVTAC

SEQ ID NO: 11736 - protein, 604 aa, Oryza sativa (japonica cultivar-group)
MAEVAAGTGQLIGVAVATLLAAIFLAAALLGSRRRRRRAPLAGKPAAVGGCGVADGEGCGGDGRTDVIVVGAGVAGSALAYTLGKDGRRVHVIERDLTEPDRIVGELLQPGGYLKLIELGLEDCVQEIDAQRVLGYALFKDGKDTKLSYPLEKFHSDVAGRSFHNGRFIQRMRQKAASLPNVQLEQGTVTSLVEEDGTVKGVKYKTKSGEELKAYAPLTIVCDGCFSNLRRALCSPKVDVPSCFVGLVLENCQLPHANHGHVVLANPSPILFYPISSTEVRCLVDVPGQKVPSIANGEMAKYLKTVVAPQIPPEIYDSFIAAIDKGSIRTMPNRSMPAAPHPTPGALLMGDAFNMRHPLTGGGMTVALSDIVVLRNLLKPLRNLHDASALCKYLESFYTLRKPVASTINTLAGALYKVFSASPDQARNEMRQACFDYLSLGGVFSNGPIALLSGLNPRPLSLVAHFFAVAIYGVGRLMLPLPSPKRMWIGVRLISSACGIIFPIIKAEGVRHMFFPATVPAYYRAPRPMERRKSRWDRADEIPEDVEMGMGEIEAAGELTATRIETAGELPAPRIETAGELPKGAQIGMGEVVVVIAVIRRFTW

SEQ ID NO: 11737 - protein, 380 aa, Glycine max
MAEDKEMSSSVTNGDDSLTGHIISTTIGGKNGEPKQTISYMAERVVGTGSFGIVFQAKCLETGEAVAIKKVLQDRRYKNRELQLMRVLDHPNVISLKHCFFSTTSTDELFLNLVMEYVPESMYRVIKHYTNANQRMPIIYVKLYMYQIFRGLAYIHTVPKVCHRDLKPQNILVDPLTHQVKLCDFGSAKVLVKGEANISYICSRFYRAPELIFGATEYTSSIDIWSAGCVLAELLLGQPLFPGENAVDQLVHIIKVLGTPTREEVRCMNPNYNDFRFPQIKAHPWHKIFHKKMPPEAIDLASRLLQYSPSLRCTALEACAHPFFDELREPNARLPNGRPFPPLFNFKQELSEASPELVNKVIPDHMKRQIGLQFVRPAGS

SEQ ID NO: 11738 - protein, 713 aa, Alkaliphilus metalliredigenes QYMF
MNTGPQQPQNTMEQNSKNEKLDLHRVDHNNELLTTNQGGRVSNTDDSLKAGARGPTLMEDFHFREKMTHFDHERIPERVVHARGFGVHGYFQVYEPMAELTKAKFLQDPTKKTPVFVRFSTVVGSKGSADTVRDVRGFATKFYTEDGNYDLVSNNIPVFFIQDAIKFPDVVHAIKPEPHNEIPQASAAHDTFWDFVVNTPETAHMIMWLLSDRAIPRSFRMMEGFGVNTFRFVNEQGKARFVKFHWKPLLGVHSLVWDEAQKLAGKDPDYHRRDLWDAIDMGEYPEYELGVQIVEEEEEFNFDFDILDATKIWPEEMIPVKRIGKMTLDNNVANFFAETEQVAFHPGHVVPGIDFSNDPLLQGRLFSYLDTQLIRLGGPNFHEIPINRPMAPIHNNQRDGYHRMTIDRGRVSYSPNSLQNDAPHPAPEADHGYVHHAEKVEGQKVRERSESFRDHYRQATLFWNSMSSAEKQHIIEAFHFEVGSVMDKQIKQRVVNMFNNVDGQLATQIAVGVGADSPAALGGNGVTATSPAVSQENTVKDARTRKVAILLENGFNYPEVTQVMSAFNGAGVHTEIVSKNLGMLTSVDGQQLEVGKNYATTASIKYDAVYVPGGPQSINSLMMQGDALHFVNEAFKHAKAIGATNEGVDLLMASAIQGVNMAGGNTQDQLITEMGVVTVRNVTDTNQFSQEFTNAIAQHRHWSRQNKKQMIPA

SEQ ID NO: 11739 - protein, 337 aa, Cochliobolus lunatus
MVVKVGINGFGRIGRIVFRNAIEHNDVEIVAVNDPFIEPHYAAYMLKYDSTHGQFKGDIKVDGNNLTVNGKTVRFHMEKDPANIPWSETGAYYVVESTGVFTTTEKAKAHLKGGAKKVVISAPSADAPMFVMGVNHETYKSDIEVLSNSSCTTNCLAPLAKVIHDKYTIIEGLMTTIHSYTATQKVVDGPSAKDWRGGRTAAQNIIPSSTGAAKAVGKVIPELNGKLTGMAMRVPTANVSVVDLTVRIEKGASYDEIKQAVKEASEGPLSGILGYTEDDIVTTDLNGDNRSSIFDAKAGISLNKNFVKLVSWYDNEWGYSRRVLDLLVYIAKIDGNA

SEQ ID NO: 11740 - protein, 152 aa, Yarrowia lipolytica CLIB122
MSDQLTEDQVAEFREAFSLFDKNNDGKITTKELGTVMRSLGQNPSESELADMINEVDANNDGTIDFAEFLTMMARKMKDTDSEEEIREAFKVFDRDNNGFISAQELRHVMTSIGEKLTDEEVDMMIKEADANGDGRIDYNEFVQLLVSSTIT

SEQ ID NO: 11741 - protein, 252 aa, Glycine max
  misc_feature (39)..(39): Xaa can be any naturally occurring amino acid
  unsure (1)..(252): unsure at all Xaa locations
MFPHKVASMAFPNPSMSVSPQKKMGRGKIEIKRIENTTXNRQVTFCKRRNGLLKKAYELSVLCDAEVALIVFSSRGRLYEYANNSVKATIERYKKACSDSSGAGSASEANAQFYQQEADKLRAQISSLQNNNRQMMGESLGPLTAKELKNLETKLEKGISRIRSKKNELLFAEIEYMQKREIDLHNNNQLLRAKIAEGERNHHNLAVLPGGSNYDSLQTSQQQFDSRGSFQVTGLQPNNQYARQDQMSLQLV

SEQ ID NO: 11742 - protein, 90 aa, Brassica napus
MDSDSWSDRLASASRRYQLDFLSRSDNFLGFEEAEGEEEFREEYACPFCSDYFDIVSLCCHIDENHPMDTINGVCPVCAVKVSSDMVAHI

SEQ ID NO: 11743 - protein, 314 aa, Tropheryma whipplei TW08/27
MPRYDVVSLGEGQIRLTVPRGENLLTAKQLYLTAAGSEANVTGLLSQLGHSCAWASVIPKGELGDRIVREYRAVGTDVSHIVRTDTGRVALYFLQPGADPMPAEVVYDRLHTPFREIEPEIFDWGSLLDTRILFITGITMALTEKTRRVIEYGVACASERGVDIVLDVNHRARLWSGKEARGVIVPLLDKVKILFCSRGDADRVFGITGEPDDVARTLRARYGVPTVVSTAGTQGVYLSSATGEESFPVTPVRVIDRPGAGDAFVGGSLHGHLSGDLRMGIKTGMLAAQHALSHYGDLVSTSAFGEYTSTDILR

SEQ ID NO: 11744 - protein, 500 aa, Arabidopsis thaliana
MADGNTRFTVDEALVAMGFGKFQIYVLAYAGMGWVAEAMEMMLLSFVGPAVQSLWNLSARQESLITSVVFAGMLIGAYSWGIVSDKHGRRKGFIITAVVTFVAGFLSAFSPNYMWLIILRCLVGLGLGGGPVLASWYLEFIPAPSRGTWMVVFSAFWTVGTIFEASLAWLVMPRLGWRWLLAFSSVPSSLLLLFYRWTSESPRYLILQGRKAEALAILEKIARMNKTQLPPGVLSSELETELEENKNIPTENTHLLKAGESGEAVAVSKIVLKADKEPGFSLLALLSPTLMKRTLLLWVVFFGNAFAYYGVVLLTTELNNSHNRCYPTEKQLRNSNDVNYRDVFIASFAEFPGLLISAAMVDRLGRKASMASMLFTCCIFLLPLLSHQSPFITTVLLFGGRICISAAFTVVYIYAPEIYPTAVRTTGVGVGSSVGRIGGILCPLVAVGLVHGCHQTIAVLLFEVVILVSGICVCLFPFETSGRDLTDSISASKEPPSASV

SEQ ID NO: 11745 - protein, 339 aa, Arabidopsis thaliana
MEQAALKSSVRKEMALKTTSPVYEEFLAVTTAQNGFSVDDFSVDDLLDLSNDDVFADEETDLKAQHEMVRVSSEEPNDDGDALRRSSDFSGCDDFGSLPTSELSLPADDLANLEWLSHFVEDSFTEYSGPNLTGTPTEKPAWLTGDRKHPVTAVTEETCFKSPVPAKARSKRNRNGLKVWSLGSSSSSGPSSSGSTSSSSSGPSSPWFSGAELLEPVVTSERPPFPKKHKKRSAESVFSGELQQLQPQRKCSHCGVQKTPQWRAGPMGAKTLCNACGVRYKSGRLLPEYRPACSPTFSSELHSNHHRKVIEMRRKKEPTSDNETGLNQLVQSPQAVPSF

SEQ ID NO: 11746 - protein, 298 aa, Zea mays
  misc_feature (83)..(83): Xaa can be any naturally occurring amino acid
  misc_feature (205)..(205): Xaa can be any naturally occurring amino acid
  unsure (1)..(298): unsure at all Xaa locations
MKIQCDACEGAAATVVCCADEAALCARCDVEIHAANKLASKHQRLPLEALSASLPRCDVCQVRTSPAHCACATRGTRQAGTSXNEATTPPRARSQEKAAFIFCVEDRALFCRDCDEPIHVPGTLSGNHQRYLATDIRVGFASASSACSDACDAHDDSDHHAPPKAAVSSAAQQVPSPPQFLPQGWAVDELLQFSDCESSDKARRXRKLRSMTNNLPACTHRLMHGLVCVCVLQLHKESPLGFKELEWFTDIDLFHEQTPKAGRRLAEVPELSGTQAANDAAYYRPAKATATAGAGVRQ

SEQ ID NO: 11747 - protein, 316 aa, Clostridium acetobutylicum ATCC 824; identical to SEQ ID NO: 1424

SEQ ID NO: 11748 - protein, 563 aa, Xylella fastidiosa 9a5c
MCSIFGIFNLQPSDNLQRLRHQALECSQRQRHRGPDWSGVYVDVGAILVHERLAIVDPAGGAQPLLSEDGTLALAVNGEIYNHAVLKGTLQQPYVFQTHSDCEVINALYREETPTSFLNRLNGIFAFALWDKTTGRGLIARDPMGVVPLYWGHDQDGRLRVASEMKALIEHCPDVAQFPPGHWYDTTTGTLVKYYERSWKNYSAVEGVQVSLQELREAFERAVHRQLMTDVPYGVLLSGGLDSSLVAAVAARYARHRIETNDQSEAWWPRLHSFAIGLKDSPDLSAANVAAEALNTVHHGFEYTLQEGLDVLPEVIRHIETYDVTTIRASTPMFLLARRIKAMGVKMVLSGEGSDEIFGGYLYFHKAPNAREFHEELVRKLNALYYYDCLRANKAMMAWGVEPRVPFLDREFLDVAMRMDAQHKMVDKTSDGPQQMEKGILRAAFDGYLPPSILWRQKEQFSDGVGYGWIDGLKAHAETQVSDHALATAETRFQVNPPQTKEAYYYRSIFERFFPSPAAAETVPGGKSIACSSPAAIAWDASFATMADPSGRAVSGVHQQALL

SEQ ID NO: 11749 - protein, 215 aa, Wolbachia endosymbiont of Drosophila melanogaster
MRNNFSIKLSYIRNLFAKEYKKIEEYCILEKKQHIQIGPEEGKLLSLFIKIQKIKSIVEIGTLYGYSSICMAKALLKDGHIYTIENNPQHSRIAKKNFSAFNLSDKITLIEGDALEKINELSAKAPFDMIFIDADKSSYPKYLDWAESYIKQDGLIVADNTLLFNTVFLESPPKEVSEKSWHAMREFNNRLSDEKKYFSILIPTDEGMTVALKLT

SEQ ID NO: 11750 - protein, 300 aa, Streptococcus thermophilus LMG 18311
MHFYLISFKIILLQLEKENRMETYTLSNGVTIPKIGFGTWQIPEGEEAYNSVSFALKAGYTHIDTAQIYGNEVSVGKAISDSDVAREDLFLTTKLWNDKHDYDLAKASIDESLERLGVDYLDLFLIHWPNPKALRENDAWKAGNAGAWKAMEEAYKEGKVRAIGVSNFMQHHLEALFETAEIVPHVNQILLAPGCTQEDLVAYCRERDILLEAYSPLGTGSIFGNEDVEAVAERNGKSVAQVALRWSLQKGFLPLPKSVTPKNIEANLDIFDFDLSEEDMAVLDKIQGIKTQVDPDTVNF

SEQ ID NO: 11751 - protein, 185 aa, Streptococcus thermophilus LMG 18311
MMETIMKWSDQAYGIKYVPLRYFNVAGAKPDGSIGEAHGPETHLLPIILQVAQGVREKIIIFGDDYNTPDGTNVRDYVHPFDLADAHLLAVEYLRKGNESTAFNLGSSTGFSNLQILEAARKVTGKEIPAEKAGRRPGDPDTLIASSEKARTVLGWKPQFDNIEKIIESAWAWHSSHPKGYDDRD

SEQ ID NO: 11752 - protein, 416 aa, Brevibacterium fuscum var. dextranlyticum
GSAWEWDEQTGQYFLHLFSKKQPDLNWENPEVRAAIYRMMNWWLDRGIDGFRMDVISFISKHPDLPDGAVGKGGIWGDGIPFFGSGPRVHEYLQEMHREVFAHRDADLLTVGEMVDVTPELARLYTDQRRKELDMVFHFEHVGLDHGADGKFSRKALDLVAVKRSFARWQDALSDVGWNSLYWNNHDQPRVVSRFGDDSDHWYESATAFATILHLMRGTPYIYQGEELGMTNMPFTSIDEFRDLESLNYYRQALERDGADAATVLAGITVGGRDNARTPVQWDASVHAGFTTGEPWIPVNPNHGWLNAATQRQDPESVYGWYKRLIQLRHEEPVIVDGRFNLILADDPQIFAYTRTDSDTELFIAANCSADPAALPGDVTEEWDDADVLLANHPGVRELGRTLLPWEVIVLRRGLA

SEQ ID NO: 11753 - protein, 619 aa, Thermoplasma volcanium GSS1
MLSMVEVKIIKSDGFFNEVLISSDKKIHFDTAYAEGDFNCFGEGSIVSETTDDLKFKIANLIPGKYHFKIAIDQYKILREAENRSGSYSFSIWLEKPYHNPDYAQFCAIIDKKLMDVRIAVPKHSISVSIFTKDTLKPVYSRRASFDTFDAVEYVFDGMSDYYFEVDNSRLPKEGYFSPKVHIEHEGGSKIIYHIFPDRFFRVGPHLPTLSRWGDKPTFSSFFGGNLRGITEKIGYIKALNVDTIYLNPVYKSKSNHRYDVDDYFSIDGLLGGEQDFIELVNEAHENGIKIVADMVFNHTSTDFPYFLDALKNGKNSKYWNWYIFHGEGAAVFDGRAKGKTKPLYETFMGVGRMPKLNHKNAEVRKFCIDVMKYYKNKFGVDGFRYDVAHSIYPEFFLEAVKEFGNEMLHIGEAWCLPSMFMLSGYWNSFTNYYLRNAIIKFVREEINITEFYNMIQNMIISYGPLIQQNVMNILDSHDTERILRAFKGNKKKVKLAYSILFMFDGFATIYYGDEVGLDGGRDPDDRRCFPWDNMDEDMLQFLKKLGEIRRMYHTGSAGIITVEETQECKYITRLSGESIIKVAIAKKPVTLEGEIILSSCGEKTIYEGDFALSIAKYA

SEQ ID NO: 11754 - protein, 787 aa, Candida albicans SC5314
MVDFAKSLFGFGNYKKESSLQSPTPPPSAHSSQEQHHKSNTEEYPQSHLSQQQHSHRYQPPHMSEQSHQFPQQQQQQQQSGTNKFFPKTLVSAAPTTAVANHSSVYGTTSTTTNNYPEAYLNQTFKNNIYNPQQQQQQQAQQPPPEQQQSSAPYQNSANIQQPYGNQWGSSQDQDANIITIDKTGNKLSPASRDSPIKGKLKVTILEAKDIFATQPYVVCSFESSEFVTNAPDSYGKSPVSSFGHNNNQGHNGPRNMYNSNHGPSPKALPMKNSGNLFGQRPSMYQRQLSTPHLNLPNDSSNPIWNHDTIFDVVGSKSELDISVYDGARDDAFLGHVRISPSTDKNNKNESEWLQLGARITGETVSSGHIKIKWEYTSFDNNIKRSYGPDDFHFLRLLGKGTFGQVFQVRKKDTNRVYAMKILSKKVIVKKKEIAHTIGERNILVRTSAASSPFIVGLKFSFQTPSDLFLVTDFMSGGELFFHLQKEGRFNEDRSKFYTAELILALEHLHDNDIVYRDLKPENILLDANGHIALCDFGLSKADLNMDGTTNTFCGTTEYLAPEVLLDEQGYTKMVDFWSLGVLIFEMTCGWSPFHAENTQQMYKNIAFGKVRFPKDVLSPEGRSFVKGLLNRNPKHRLGATDDARELKAHPFFADIDWDLLRAKNIPPPFKPHIVSETDISNFDTEFTSENTSALKRQMEIATTPLSPGIQANFKGFTYVDDSTMDDHFARSYRANAFRPPGSFIPGDPNLPPDEEVLAEQIEEEDEMEVDEDQHMDDEFVNGRFDL

SEQ ID NO: 11755 - protein, 346 aa, Rosa gallica
QKWSNGEHSNELLHAQAHIWNHIFSFINSMSLKSAIQLGIPDIINKHGYPMTLSELTSALPIHPTKSHSVYRLMRILVHSGFFAKKKLSKTDEEGYTLTDASQLLLKDHPLSLTPFLTAMLDPVLTKPWNYLSTWFQNDDPTPFDTAHGMTFWDYGNHHPSIAHFFNDAMASDARLVTSVIIDDCKGVFEGLESLVDVGGGTGTLAKAIADAFPHIECTVLDLPHVVADLQGSKNLKYTGGDMFEAVPPADTVLLKWILHDWNDEECVKILKRSREAITSKDKKGKVIIIDMMMENQKGDEESIETQLFFDMLMMALLTGKERNEKEWAKLFTDAGLSDYKITPIL

SEQ ID NO: 11756 - protein, 635 aa, Thermotoga maritima MSB8
MERFPYEKLPESELKELKELGRLCRGDILKMTYIANSGHPGGSMSSIDLYLTVFKYAKLRPVDDPARDRIVISHGHTSPGVYAAMARLGFVDLDEVLAGFRHPASVFEGHVTRGVGIIDWTTGNLGQGLSAGLGFALASRFTGKDYHVFVLMSDAEQAKGQVAEARRVAKKYGVTNLTVIIDYNDAQISGRARDVMPVNIKENYLADGWRVIEIDGHDYEQIYLALKEAVEDELNPVAIIAKTVMGKGVSFMENEVKYHGKPLNREELEKALAELGIENDVDVYIEKRKQLPVEKHKKVYKTYPIKIDTGEPITYTSPTDNRSAFGKAILDLVKKNVNNPETTPIVAVDCDLKGSVKLDLLDKEFPERLLEVGVQEHNAAAMAGALSAEGVITFFADFGVFGISETYNQHRLNAINGTNLKVVVTHCGLNVGEDGKTHHGLDYVSGPMNWYGFKVIVPGDPNQTDRVVRYAAKEYGNFVIAMGRSKLPIILDENGKPFFGEGYTFEYGKIDVVRKGDDAVIITYGSTLCEAVNAADELKKEGVNVAVLNVSCPVDLDIETLKMVDGKPVLVVEDHNVFTGLGSFLGTTLLENGIIPKKYVRVGVPEFAVSGSYTMLYKLYGLDKDGIISRLREML

SEQ ID NO: 11757 - protein, 159 aa, Brassica napus
DILEQLTHLAVLHFGESVLARVLQLYDKYIDFLIKALPGHADEDGLPELQDHTILTRAETDSEQLALLGAAFTILDELLPKSLVKVWNLEVENNGGDGGDSSSSPSLISSSAPELKEWKRHMVQAFDKLRNYFCLQFVLSFIYSREGLTRLDALIYLTE

SEQ ID NO: 11758 - protein, 346 aa, Rosa gallica
QKWSNGEHSNELLHAQAHIRNHIFSFINSMSLKSAIQLGIPDIINKHGYPMTLSELTSALPIHPTKSHSVYRLMRILVHSGFFAKKKLSKTDEEGYTLTDASQLLLKDHPLSLTPFLTAMPDPVLTKPWNYLSTWFQNDDPTPFDTAHGMTFWDYGNHHPSIAHFFNDAMASDARLVTSVIINDCKGVFEGLESLVDVGGGTGTLAKAIADAFPHIECTVLDLPHVVADLQGSKNLKYTGGDMFEAVPPADTVLLKWILHDWNDEECVKILKRSREAITSKDKKGKVIIIDMMMENQKGDEESIETQLFFDMLMMALLTGKERNKKEWAKLFTDAGFSDYKITPIL

SEQ ID NO: 11759 - protein, 346 aa, Rosa hybrid cultivar 'Kazanlik'
QKWSNGEHSNELLHAQAHIWNHIFSFINSMSLKSAIQLGIPDIINKHGYPMTLSELTSALPIHPTKSHSVYRLMRILVHSGFFAKKKLSKTDEEGYTLTDASQLLLKDHPLSLTPFLTAMLDPVLTKPWNYLSTWFQNDDPTPFDTAHGMTFWDYGNHHPSIAHFFNDAMASDARLVTSVIIDDCKGVFEGLESLVDVGGGTGTVAKAIADAFPHIECTVLDLPHVVADLQGSKNLKYTGGDMFEAVPPADTVLLKWILHDWNDEECVKILKRSREAITSKDKKGKVIIIDMMMENQKGDEESIETQLFFDMLMMALLTGKERNKKEWAKLFTDAGFSDYKITPIL

SEQ ID NO: 11760 - protein, 532 aa, Yarrowia lipolytica CLIB122
MSKELYANSKDDAVYSYSFGVPYPHHPYSSQRAGPTGPLLLQDTYLIDALAHFDRERIPERVVHANGGGAHGYFEVTDDISDITYAEPFQKIGYKCPTTVRFSTVGGERGSPDTARDPRGFAVKHKTDWGNWDMVGLNSPVFFIRDPVKFIHVNHSQKRDPQTNLTAGDDASNYWNYLVQNPESLHQVVYMFGDRGTPNGWRHMNCFSTHTYKMINKEGKLTYVQFHYKSDQGVKNFTGPEAAEMAGKSPDHDQKDLFFAIDNGDYPSWTVSLQTMTPEQAEEWEYSILDMTKTWPYDKFPLRKVGKLVLNKNAENFFEEIEQAAFSPSNLIHGIEASDDPVLQARLFSYPDTARHRLGPNFNQLPVNQARTFQKGSGCPFMAGNFQRDGNMAIHNQGNRPNYLSTIRPIQSVSVPNEDFKNTHDYCGVVTKEMEDESFKVQAEAAKKHNEKIWESSSYLYLSGFQESDAAQPRDLYERVYDDAAKQRMIDNVVDHASTIKQHGLKEQVAKYFGRISDDLGKKIAEGLGVPY

SEQ ID NO: 11761 - protein, 346 aa, Rosa hybrid cultivar 'Kazanlik'
QKWSNGEHSNELLHAQAHIWNHIFSFINSMSLKSAIQLGIPDIINKHGYPMTLSELTSALPIHPTKSHSVYRLMRILVHSGFFAKKKLSKTDEEGYTLTDASQLLLKDHPLSLTPFLTAMLDPVLTKPWNYLSTWFQNDDPTPFDTAHGMTFWDYGNHQPCIAHFFNDAMASDARLVTSVIIDDCKGVFEGLESLVDVGGGTGTVAKAIADAFPHIECTVLDLPHVVADLQGSKNLKYTGGDMFEAVPPADTVLLKWILHDWNDEECVKILKRSREAITSKDKKGKVIIIDMTMENQKGDEESIETQLFFDMLMMALVTGKERNEKEWAKLFTDAGFSDYKITPIL

SEQ ID NO: 11762 - protein, 433 aa, Sulfolobus solfataricus P2
MLCLFIFRRDLRLDDNTGLIKALEDCEKVIPAFILDPRQVGNENEYKSEFAINFMINSLNELNDELRKRGSRLYVYFGLAEEVIKNLLKDVDAVYLNEDYTPFSKMRDERIRKYCEDTGKIMKSFEDYLLTSKNDFKNYRNFTTFYNVVKNKQIKKPVQNNYTNYYKNSLGDEHELPPRQGERGGRKEGIKLIERARQINYDRKDFVAEDNRTFLSPHLKFGTLSIREVYYSLLDSQAIIRQLYWRDFYTLLAYYNERVFHEPLKREYNCIEWENNERLFQAWLEGKTGYPIIDAGMRQLNRTGDMPNRVRMLTAFFLVKVLIIDWRIGEKYFASKLIDYDPSVNNGNWQWIASVGTDYIFRVFDPWKQQVTYDPEAKYIKRWVDELESYDAEIIHNAYKYTLKSYPKPIVDWRIRVNLAKRLYEVCRKSKIK

SEQ ID NO: 11763 - protein, 221 aa, Tropheryma whipplei TW08/27
MDNLVLLRHGNSLWNQENLFTGWVDVRLSELGEKEAKTAGQLLREANRYPDVLFTSLLTRSIQTAHIALMEIDRVWLPTFRSWRLNERHYGSLQGKNKAQVLEEFGEEQFNSWRRGYDTPPPPLHSQADDPRYEEPPPLSESLKDVQNRLLPYWQGVILPHLVAGKVVLVVAHGNSLRALVKHLECISDTDVCQLNIPTGIPLVYSIDPSGCATHPGRYLP

SEQ ID NO: 11764 - protein, 303 aa, Zea mays
  misc_feature (152)..(152): Xaa can be any naturally occurring amino acid
  unsure (1)..(303): unsure at all Xaa locations
MADSPMTDTCTDPDTDDRNQMTLRFSCMNNIDGALDKAIAYTASDSSDKSRDKLDQKTLRRLAQNREAARKSRLRKKAYIQNLESSRLKLTQLEQELQRARQQGIFISTSGDQPQSTSGNGALAFDMEYARWLEEHNKHVNELRAAVNAHAXTPAERCFMWLGGFRSSELLKLLAGHLEPLTDQQLVGISNLQQSSQQAEDALSQGMEALQQSLAETLASGSLGPAGPSGNVANYMGQMAMAMGKLGTLENFLRQADNLRLQTLQQMQRILTTRQSARALLAISDYFSRLRALSSLWLARPRE

SEQ ID NO: 11765 - protein, 206 aa, Brassica napus
  misc_feature (155)..(155): Xaa can be any naturally occurring amino acid
  unsure (1)..(206): unsure at all Xaa locations
MAEVISKTSLFFRGACVNHHHHADDFSVSPVSFGLKKSFSSLKQKPLRSDFSGKQILQTFNRSFRSSSVTAQSTLRIGTAQKWWEKGLQENMREISSAQELVDSLADAGDKLVVVDFFSPGCGGCKALHPKMCQLAEQSADVQFLQVNYEEHKSXCYSLGVHVLPFFRFYRGAQGRVCSFSCTNATIKKFRDALAKHSPDRCSLGP

SEQ ID NO: 11766 - protein, 572 aa, Arabidopsis thaliana
  misc_feature (104)..(104): Xaa can be any naturally occurring amino acid
  unsure (1)..(572): unsure at all Xaa locations
MEAKIVKVLDSSRCEDGFGKKRKRAAASYAAYVTGVSCAKLQNVPPPNGQCQIPDKRRRLEGENKLSAYGNRSGKALVRYYTYFKKTGIAKRVMMYGNGEWNDXAIEFKLCGHSFILGFSHMQRLDMETGAKTPLAWIDNAGKCFFPEIYESDERTNYCHHKCVEDPKQNAPHDIKLRLEIDVNGGETPRLNLEECSDESGDNMMDDVPLAQRSSNEHYDEATEDSCSRKLEAAVSKWDETDAIVVSGAKLTGSEVLDKDAVKKMFAVGTASLGHVPVLDVGRFSSEIAEARLALFQKQVEITKKHRGDANVRYAWLPAKREVLSAVMMQGLGVGGAFIRKSIYGVGIHLTAADCPYFSARYCDVDENGVRYMVLCRVIMGNMELLRGDKAQFFSGGEEYDNGVDDIESPKNYIVWNINMNTHIFPEFVVRFKLSNLPNAEGNLIAKRDNSGVTLEGPKDLPPQLESNGARGSGSANSVGSSTTRPKSPWMPFPTLFAAISHKVAENDMLLINADYQQLRDKKMTRAEFVRKLRVIVGDDLLRSTITTLQNQPKSKEIPGSIRDHEEGAGGL

SEQ ID NO: 11767 - protein, 567 aa, Glycine max
MLPLRPQAQVGGLQTSLSLVSSDPLLSPDEPRSNSNNLHESPAESASSQETWPTADAAAAKKMENGKAEVNCLEQKVIHRVSSSDKVTLQDVARESVCMICEKMHHLPEEYLEELKNGLRSILEGGNGSQHREDFFILQKLVQSRTDLTAKTLVRAHRVQLEILVAINTGIQGFLHPSISLSQTSLIEIFGYKRCRNIACQNQLPADDCTCEICTNTNGFCNLCMCVICNKFDFEVNTCRWIGCDLCSHWTHTDCAIREQLICMGPSSKSGAGPSEMVFRCQACNRTSELLGWVKDVFQHCAPSWDGEALMRELDYVSRIFHGSKDPRGRKLFWKCDDLKEKFLSKKMDSKAVCRAILMFFQELEVDSAKCLENGESGRLIAPLDACNRIAEVVHEAIRKMEMVADEKMRMFKKARLSLEACDRELADKAREVTELKMERQKKKLQIEELEKIVRLKNAEADMFQLKADEAKREAERLQMIALAKQDKSEEEFTSNYLKQRLNEAEAEKQYLYEKIKLQESSRASQGSSGGDPSQMLMYSKIHDLLYSVPSKADSQGNERHPFRTNP

SEQ ID NO: 11768 - protein, 457 aa, Arabidopsis thaliana
MLAVSVLVAVYKRSTVPVYKSHGLAQATMSDCVSETFSAIRTVRSFSGEKRQMSIFGSQILAYKLSGLKLGTFKSINESITRVAVYISLLALYCLGGSKVKTGELAVGTVVSFIGYTFTLTFAVQGLVNTFGDLRGTFAAIDRINSILNAVDIDEALAYGLERDIHTKKVQDENLKLFLSAGPNVNIRHLDKYYMSNLKSTNNLRTLTWAGDVCLDDVHFAYPLRPDVKVLDGLSLTLNSGTVTALVGSSGAGKSTIVQLLARFYEPTQGRITVGGEDVRMFDKSEWAKVVSIVNQEPVLFSLSVAENIAYGLPNEHVSKDDIIKAAKAANAHDFIISLPQGYDTLVGERGGLLSGGQRQRVAIARSLLKNAPILILDEATSALDAVSERLVQSALNRLMKDRTTLVIAHRLSTVQSANQIAVCSDGKIIELGTHSELVAQKGSYASLVGTQRLAFE

SEQ ID NO: 11769 - protein, 174 aa, Physcomitrella patens
GMSHEVRERTDALDAAGNTTAAIGKGFAIGSAALVSLALFGAYVSRAGIASVDVIQPKEFVGLIVGAMLPYWFSAMTMKSVGKAALAMVEEVRRQFRTIPGLMEGTTKPDYKRCVKISTDASLKEMIPPGALVMLTPLIVGTLFGVETLAGLLAGALVSGVQIAISASNTGGAW

SEQ ID NO: 11770 - protein, 342 aa, Mesorhizobium sp. BNC1
MPMSSSNKFKVAVVGRAFGPEAQAIIQEVAPPEFDLSFSVDTTEKAHPLIRESDFCLVTTAITEKLLQESPKLRLVHKWGIGIDKIDLEGAERQGVYVAITAGSNAGAVAEHTIMLILAALRRLALADQSMREGKWIYTELRPLCRKLSGKTVGILGFGNIGRNVAQRLQGFDVEIIYHDPFRAPPEVEDRLKATYVSFDELIKRSNILTLHCPGGAANHHIINASALAKMQRGSVLVNCARGDVVDEEAMVAALQSGQLLAAGLDAFEPEPLPASSKLTQLTSVVLTPHTAGSVLDNVAPVAQHAFGNMLRMIRGEALPKSDLVVVPDKPRQFAGAGPVAV

SEQ ID NO: 11771 - protein, 483 aa, Nocardioides sp. JS614
MGGVPLRPRRRPRAGPHPGDLAGDPRERARIGTLTGVLDRHRLAELRTTEEERFVAARPRSAALAARARGPLLAGVPMPWMTRWPGRFPVFFESATGARLVDVDGHEYVDLCLGDTGAMTGHALPQVADALAARARSGITTMLPSADAVWVGEELARRFGLPTWQLAMSATDANRFVLRFARHLTGRPRIAVMDWCYHGTVDETLAVLDGDRVVPRPGALGPQVPVAETTAVVPFNDAEALERRLAVGDVACLLMEPALTNIGIVLPEPGYLEAVREITHRHGVLLVIDETHTLCTGPGGATAAWGLEPDLVVVGKPIGGGVPCAAYGMSAAVADRLSGPMLGHEIDVAGVGGTLTGNALALAAIRATLSTCLREEDFTVAIPLAERFTDGVAGVIAEHRLPWHVQRLGCRAEYWFCPPPRDGAAAAAAVDEELEGFLHLWCLNRGVLLTPFHNMALFSPAHTPADVDRHTEVFGEAVAALLA

SEQ ID NO: 11772 - protein, 153 aa, Methanococcoides burtonii DSM 6242
MKFGLVRRGSSDVSRWDPFDEIRQTQEHLNQLLREVSPFGGLFEGKSRAPLMDIKEEDNNVIVTTDLPGIDKEDVEISVNNNILEIHAEFKKESESEKEGYVQKERTYSSFSRSAVLPSVVSDEGVKAKLEAGVLTITLPKTKAEEKTKIKIE

SEQ ID NO: 11773 - protein, 127 aa, Arabidopsis thaliana
  misc_feature (14)..(15): Xaa can be any naturally occurring amino acid
  misc_feature (17)..(17): Xaa can be any naturally occurring amino acid
  misc_feature (28)..(28): Xaa can be any naturally occurring amino acid
  misc_feature (31)..(31): Xaa can be any naturally occurring amino acid
  misc_feature (40)..(40): Xaa can be any naturally occurring amino acid
  misc_feature (50)..(51): Xaa can be any naturally occurring amino acid
  misc_feature (72)..(72): Xaa can be any naturally occurring amino acid
  misc_feature (79)..(79): Xaa can be any naturally occurring amino acid
  unsure (1)..(127): unsure at all Xaa locations
NPVGATFPIQKVSXXRXGTQVTPPVWRXKCXMVLKRKEDXEGASEDNAWXXLAEASLSEERFKEVTALPFEXAIGCSNXQEEDLEGTIVHHQNSSANVNQKTTRTHGGPITNGPPPESLVLPVNQIW

SEQ ID NO: 11774 - protein, 346 aa, Rosa hybrid cultivar 'Kazanlik'
KKWSNGEDSNELLHAQAHIWNHIFSFINSMSLKSAIQLGIPDIINKHGPPMTLSELTSALPIHPTKSHSLDRLMRILVHSGFFAKEKLSETDEEGYTLTDTSQLLLKDHPLSLTPFLTAMLDPVLTKPWHHLSTWFQNDDLTPFATAHGMTMWDYGNHQPSFSHFFNDAMASDARLVASVIINECKGVFEGLESLVDVGGGTGTLAKAIADAFPHIECTVLDLPHVVADLQGSKNLKYTGGDMFEAVPPADTVLLKWILHDWNDEECVKILQRSKEAITSKDKKGKVIIIDMIMGNQKGDEESIEMQLFFDMLMMVLLKGKERNEKEWAKLFTDAGFSDYKITPIL

SEQ ID NO: 11775 - protein, 611 aa, Xylella fastidiosa 9a5c
MGVSMNTVPFPSQGGIDRRRFLQGLALGGVAAGTGLWRLPVHAANPELPPLQRRTTPLELRIGQSSVNFTGRMRPAITVNNSLPGPVLRWRQGDTVQIHVTNTLPDVMTSIHWHGIVLPSNMDGVPGMSFDGIAPGEHYLYRFQLHQSGTYWYHSHAMFQEQAGLYGALIIDPLEPPPYRADREHILLFSDWTDLDPAALFRRLKKMSSYDNTYQRTVRDFFHDIRRDGLRTTLADRRMWGRMRMTPTDLSDVNAHTYTYLLNGTTPAGAWTGLFRPGEKVLLRLINGSAMTYFDVRIPGLKLTVVAVDGQYVHPVTVDELRIALAETYDVLIQPHGQDAFAIFAQDMGRTGYACGTLAVRPGLHAPLPALDPRPRLTMQDMGHGMAHGQHGSRASEMADMPGMTHPGRLGDHASHASQPPAQTIPHGSHSLPADRTAPRHPASEQNNPLVEMHVDAPQPLLNDPGIGLRDNGRHVLTYADLHSLFDDPDGREPGREIELHLTGHMEKFAWSFDGIPFASAQPLRLNYGERVRIVLVNDTMMAHPIHLHGLWSDLEDANAAFQVRKHTIDMPPGTRRSYRVRADALGRWAYHCHMLYHMESGMMREVQVRP

SEQ ID NO: 11776 - protein, 544 aa, Glycine max
  misc_feature (119)..(119): Xaa can be any naturally occurring amino acid
  misc_feature (383)..(383): Xaa can be any naturally occurring amino acid
  unsure (1)..(544): unsure at all Xaa locations
MASEKISSILLFSAVILLVRDAPSAIAGDIVHDDDSTPKKPGCENQFVLVKVQTWVNGVEDVEFVGVGARFGRAIVSKEKNAKHTRLILSDPRDCCIPPKNKIVGDVIMVDRGNCTFTXKANIAQNANASAILIINNQKELYKMVCEPDETDLNIHIPAVMLPLDAGTRLEKMLTTTSSVSVQLYSPFRPAVDIAEVFLWMMAVLTILCASYWSAWTTREAAIEQDKLLKDASDEIPNTKYASVSGVVNMNVKAAVLFVVFASCFLFMLYKLMSSWFIDVLVVLFCIGGIEGLQTCLVALLSRWFKHAGESYIKVPFLGAISYLTLAVSPFCITFAVLWAVYRNVSFAWIGQDILGIALIITVLQIVHVPNLKVGTVLLGCAXFIYDIFWVFVSKKFFKESVMIVVARGDRSGEDGIPMLLKFPRIFDPWGGYSIIGFGDILLPGMLVAFSLRYDWLANKSLRSGYFLWAMVAYGFGLLITYVALNLMDGHGQPALLYIVPFTLGTLMTLGRKRGDLRVLWTSGEPETPCPHIRLQHSGELSLE

SEQ ID NO: 11777 - protein, 264 aa, Pseudomonas fluorescens Pf-5
MRVALYQCPPRPLDVAGNLQRLHQVAMEATDADLLVLPEMFLSGYNIGLEAVGALAEAQDGPSAQRIAAIAQAAGTAILYGYPERSVDGQIYNAVQLIDAQGQRLCNYRKTHLFGDLDHSMFSAGEDDFPLVELDGWKLGFLICYDIEFPENARRLALAGAELILVPTANMIPYDFVADVTIRARAFENQCYVAYANYCGHEEQIRYCGQSSIAAPDGSRIALAGLDEALIIGTLDRQLMGESRALNRYLSDRRPELYDDLSKR

SEQ ID NO: 11778 - protein, 346 aa, Rosa hybrid cultivar
QKWSNGEHSNELLHAQAHIWNHIFSFINSMSLKSAIQLGIPDIINKHGYPMTLSELTSALPIHPTKSHSVYRLMRILVHSGFFAKKKLSKTDEEGYTLTDASQLLLKDHPLSLTPYLTAMLDPVLTNPWNYLSTWFQNDDPTPFDTAHGMTFWDYGNHQPSIAHLFNDAMASDARLVTSVIINDCKGVFEGLESLVDVGGGTGTLAKAIADAFPHIECTVLDLPHVVADLQGSKNLKYTGGDMFEAIPPANTVLLKWILHDWNDEECVKILKRSRVAITSKDKKGKVIIIDMMMENQKGDEESIETQLFLDMLMMALVGGKERNEKEWAKLFTDAGFSDYKITPIL

SEQ ID NO: 11779 - protein, 346 aa, Rosa hybrid cultivar
QKWSNGEHSNELLHAQAHIWNHIFSFINSMSLKSAIQLGIPDIINKHGYPMTLSELTSALPIHPTKSHSVYRLMRILVHSGFFAKKKLSKTDEEGYTLTDASQLLLKDHPLSLTPYLTAMLDPVLTNPWNYLSTWFQNDDPTPFDTAHGMTFWDYGNHQPSIAHLFNDAMASDARLVTSVIINDCKGVFEGLESLVDVGGGTGTLAKAIADAFPHIECTVLDLPHVVADLQGSKNLKYTGGDMFEAVPPADTVLLKWILHDWNDQECIKILKRSRVAITSKDKKGKVIIIDMMMENQKGDEESIETQLFFDMLMMALVGGKERNEKEWAKLFTDAGFSDYKITPIL

SEQ ID NO: 11780 - protein, 677 aa, Physcomitrella patens
MAHALGVIGLHGLQLSQTKQHYGQSLHVESYSGRFQYSQDTAGAACFRDKPSPPVVASSLTSSNEEQIAVKKEKTRGSLRKCKVAGRVELPSRDQQQSVARALTVLHEHISGVALQNIALSEDELSRYSSILPDASTLLRRSMLEAQWALTLKELMHEQKMEEQKNSRRAGKGKKSFSLEVTEDVSPGSTSTATGDLAVEDLTDEEKVTERKVTRRRGKGKLKQVERKQDTSLQETGNVHTEGSEEVVDYFRSGEQLKDLNTARRGGEGKLTKFERKLDSSLVEDACPESTSTMTTELVVKSGSPSARTRRLESRQRRVAIAGKPTSPDALTIHPLKKYQKGERVRRVKFDGVQDYLTTYLREITKINLLTKQEEVFLSKKLRIGLNLLEERKKLAAELGYVPSNEEWAPHMNLSVGDLVRKLGEAEWARDKMVMANLRLVVSVAKQYHSFGLEMADLIQEGSIGLLRGVEKFDHTRGYKLSTYVHWWIRQGVTRAIADHSRTVRLPVHVHDTLGRIRKAKSTLLSEGCTASVQEISEATNLTGTKIKNTLQVTKKLVSLDKEIGRNTLQSGDGETLHSLVADRDIENQPWTIVERMLMKDDVDKLLTSQLGPRERDIVRLHYGVGREDGSVMSLESISYRYGVSRERVRQLETAAMRKLQIKSREQGLDRYLHSMQ

SEQ ID NO: 11781 - protein, 442 aa, Methanococcoides burtonii DSM 6242
MNINTKEDVLKAIENNNVKFIRLQFTDIQGVVKDVEIPVTQIEKALSVGISFDGSSIEGFVRINESDMVLKPDTSSFAILPWNQKKGVVARMICDIYLPDGTPFEGDPRYTLKKVMKEAKEMGFSLNVGPELEFFLFERHDGKATTIPHDFGRYFEFAPADLAEDIRRDIVLTLMDLGFEIEASHHEVAFGQHEIDFKYGDALTTADNVTTFKYVTRTIAKLNGLHATFMPKPIFGENGSGMHVNLSLSKNGENIFYDADGDMQISDEARYFIGGLLKHVKAITAISNPLINSYKRLVPGYEAPVYIAWSGANRSSLIRIPAARGKGTRVELRSPDPSCNPYITFAAVLAAGLDGIRNKIDPGDNREENIFELTDKGLRDFGIETLPSTLNDSAKYLADDELLKEALGAHVHNSVLSLAKAEWDSYRIQVHDWEIERYLNTV

SEQ ID NO: 11782 - protein, 346 aa, Rosa hybrid cultivar
QKWSNGEHSNELLHAQAHIWNHIFSFINSMSLKSAIQLGILDIINKHGYPMTLSELTSALPIHPTKSHSVYRLMRILVHSGFFAKKKLSKTDEEGYTLTNASQLLLKDHPLSLTPFLTAMLDPVLTKPWNYLSTWFQNDDPTPFDTAHGMTFWDYGNHQPSTAHFFNDAMASDARLVTSVIIDDCKGVFEGLESLVDVGGGTGTVAKAIADAFPHIECTVLDLPHVVADLQGSKNLKYTGGDMFEAVPPADTVLLKWILHDWNDQECIKILKRSRVAITSKDKKGKVIIIDMMMENQKGDEESIETQLFFDMLMMALVGGKERNEKEWAKLFTDAGFSDYKITPIL

SEQ ID NO: 11783 - protein, 470 aa, Escherichia coli
MKKTKIVCTIGPKTESEEMLAKMLDAGMNVMRLNFSHGDYAEHGQRIQNLRNVMSKTGKTAAILLDTKGPEIRTMKLEGGNDVSLKAGQTFTFTTDKSVIGNSEMVAVTYEGFTTDLSVGNTVLVDDGLIGMEVTAIEGNKVICKVLNNGDLGENKGVNLPGVSIALPALAEKDKQDLIFGCEQGVDFVAASFIRKRSDVIEIREHLKAHGGENIHIISKIENQEGLNNFDEILEASDGIMVARGDLGVEIPVEEVIFAQKMMIEKCIRARKVVITATMMLDSMIKNPRPTDAEAGDVANAILDGTDAVMLSGESAKGKYPLEAVSIMATICERTDRVMNSRLEFNNDNRKLRITEAVCRGAVETAEKLDAPLIVVATQGGKSARAVRKYFPDATILALTTNEKTAHQLVLSKGVVPQLVKEITSTDDFYRLGKELALQSGLAHKGDVVVMVSGALVPSGTTNTASVHVL

SEQ ID NO: 11784 - protein, 346 aa, Rosa hybrid cultivar
QKWSNGEHSNELLHAQAHVWNHIFSFINSMSLKSAIQLGILDIINKHGYPMTLSELTSALPIHPTKSHSVYRLMRILVHSGFFAKKKLSKTDEEGYTLTNASQLLLKDHPLSLTPFLTAMLDPVLTKPWNYLSTWFQNDDPTPFDTAHGMTFWDYGNHQPSIAHFFNDAMASDARLVTSVIIDDCKGVFEGLESLVDVGGGTGTVAKAIADAFPHIECTVLDLPHVVADLQGSKNLKYTGGDMFEAIPPANTVLLKWILHDWNDEECVKILKQSREAITSKDKKGKVIIIDMMMENQKGDEESIETQLFFDMLMMALVTGKERNEKEWAKLFTDAGFSDYKITPIL

SEQ ID NO: 11785 - protein, 221 aa, Frankia sp. EAN1pec
MFFGRHKTTLPTADQALPGRGTPIFTGPDRHTVLGASLLGPFPEGLRTAVFGMGCFWGAERKFWQVPGVYSTAVGYAGGITPNPTYEEACSGLTGHTEAVLVVFDPAKVSFAELLRVFWEAHDPTQGMRQGNDVGTQYRSAVYTTGEDQAAAALASRDAFQRVLTAAGYPEITTEIAPAGPFYYAEEYHQQYLSDAKNPHGYCGLGGTGVSCPVGLASAES

SEQ ID NO: 11786 - protein, 470 aa, Escherichia coli
MKKTKIVCTIGPKTESEEMLAKMLDAGMNVMRLNFSHGDYAEHGQRIQNLRNVMSKTGKTAAILLDTKGPEIRTMKLEGGNDVSLKAGQTFTFTTDKSVIGNSEMVAVTYEGFTTDLSVGNTVLVDDGLIGMEVTAIEGNKVICKVLNNGDLGENKGVNLPGVSIALPALAEKDKQDLIFGCEQGVDFVAASFIRKRSDVIEIREHLKAHGGENIHIISKIENQEGLNNFDEILEASDGIMVARGDLGVEIPVEEVIFAQKMMIEKCIRALKVVITATMMLDSMIKNPRPTRAEAGDVANAILDGTDAVMLSGESAKGKYPLEAVSIMATICERTDRVMNSRLEFNNDNRKLRITEAVCRGAVETAEKLDAPLIVVATQGGKSARAVRKYFPDATILALTTNEKTAHQLVLSKGVVPQLVKEITSTDDFYRLGKELALQSGLAHKGDVVVMVSGALVPSGTTNTASVHVL

SEQ ID NO: 11787 - protein, 587 aa, GIBBERELLA ZEAE PH-1
MSAGDGTSTPGVGGSNASEFVRKLYRMLEDPAHQDVARWGKDGDTFVVVENEKFTRSILPKHFKHSNMASFVRQLNKYDFHKVRQTNDSGSAANGANTLEFKHPNFRVGSKDDLDNIRRKAPAPRRTQATEDFTTSHHISVMTEQLTATQQQVQQLQELFTEVSQTNRLLVNEVLTLQKMLNAQKQSQHEMLNFLSPSTNRHQQTMHLNVGTSPLDGSDDSAPELRRARELLSSVTPDQIADRELERLQGVYGSPADSAVVIPQASMPMMHDPMNDINRYPVYPVGQTVGIDPFHSDHIHKIPYAMPNDSSANAMQEVAAPQPINIQTHGNSNSSANSALTWASRKPRIFLVEDDPTCAKIGIKFLKSMGCEVEHAQNGADAYSRITGVARDHFDMIFMDIIMPKLDGVSTTMYIRQDCPAIPIVAMTSNIRSDEVHCYFEHGMNGVLAKPFTKSGMQKIVENHLSYLLKGYDPSTQQESGSGYVVGGAGYMNPPSNLNTPGGTAFKFETTPTPPATGATWSPGQMPQQSPLTTGMDQGYGMVNGANQYGLTPTSASRASFPGNISQNNQGRMDGQSPPEKRQRTYV

SEQ ID NO: 11788 - protein, 600 aa, Glycine max
MPAWWNRKWSKSKEEDEEDEPRAGFHLNFMKSPVSVTSSKSKSKTTTPTPMKKKKKPKSFDEKVEGVPLPRPAHSHADPLGSVSVSGGSSVSSSTSFDDHPISSPNTNPNPNRGHDEVRVNVRSKSPGPGSRGPTSPTSPLHQRLNNLSLDSPTGSQCHPLPLPPGSPTSPSSVLSNARANGHLENATSNVSKWRKGKLLGRGTFGHVYLGFNSENGQMCAIKEVKVVSDDQTSKECLKQLNQEINLLNQLSHPNIVQYHGSELVEESLSVYLEYVSGGSIHKLLQEYGSFKEPVIQNYTRQIVSGLAYLHGRNTVHRDIKGANILVDPNGEIKLADFGMAKHINSSASMLSFKGSPYWMAPEVVMNTNGYSLPVDIWSLGCTIIEMATSKPPWNQYEGVAAIFKIGNSKDMPEIPEHLSNDAKNFIKLCLQRDPLARPTAHKLLDHPFIRDQSATKAANVSITRDAFPCMFDGSRTPPVLESHSNRTSITSLDGDFASKPALAAPRALRSPRDNTRMITSLPVSPSSSPLRRYGPTHQSCFFSPPHPAYTIMGQSSYTLNDISSYPMTSNATFALDPWHETSRYRANTPPGGSPRMRLI

SEQ ID NO: 11789 - protein, 469 aa, Vibrio cholerae O1 biovar eltor str. N16961
MRLVWFRRDLRSFDNTALTAALNSGDPVAAMYIATPEQWHQHHLAPIQADLIWRRLAELQQELAALNVPLFYQQVADFQAAAVAVSQLAKTLNATQVLANRDYELDEQQRDQLAQQLLSEQGIIWSAFDDKCVLPPGSVRTKQGEFFKVFTPFKRAWLTLFQPPVIGKNRPVALWNVPSALAELVWHPEQAFDYPRIDSTPWAADFETVRAQLRDFCRERVQDYHQARDFPAREGTSSLSPYLAIGVLSARQCVARLYHESSMGELSEGAQVWLSELIWREFYQHLVAIEPNLSKSRDFVEWGARLEWWNDNEKFQLWCEGKTGYPIVDAAMRQLNQTGWMHNRLRMIVASFLTKDLHIDWRWGERYFMSRLIDGDYAANNGGWQWCASTGCDGQPYFRIFNPVSQGEKFDPNGDFIRRWVPELRSVSSAYIHQPWTYPAVNSVLYPARLVDHKQEREVTLRLYKTAKG

SEQ ID NO: 11790 - protein, 471 aa, Vibrio parahaemolyticus RIMD 2210633
MILVWFRRDLRTLDHTALKAALDTGQPVVACFIATPEQWQEHHMAPMQADLIARRLEHVHQELTELNIPLLYKEVPRFDDCTQVICDWADKLNATAAMVNINYEVNEVELDRKVSQALDNRGVEFHAFHDKCVHAPTTVLNKQGEYFKVFTPFKRAWLQKFSLPTVSKPQRQNELPSAQLAAVKQDGFDADFTFSYPRESSEAWCVSTNDILKQLRTFARERSDGYQMKRDFPAIDGTSQLSPYLAIGALSPRQCIARLYAENPQPDLSEGKATWLSEIIWREFYQHLLVFEPKLVKGRGFIDWEDKIQWSYDEQAFECWKTGTTGYPIVDAAMRQLNQTGWMHNRLRMIVASFLTKDLHIDWRWGEEYFMSKLVDGDFAANNGGWQWSASTGCDGQPYFRIFNPISQGEKFDSDGQFVRHWVPEIKSVPNKFVHKPWTWEGFSLLEYHKPMVDHKVEREITLRLFKSAKE

SEQ ID NO: 11791 - protein, 328 aa, Lycopersicon esculentum
MAVNGASSSGLIVSFGEMLIDFVPTVSGVSLAEAPGFLKAPGGAPANVAIAVTRLGGKSAFVGKLGDDEFGHMLAGILKTNGVQAEGINFDKGARTALAFVTLRADGEREFMFYRNPSADMLLTPAELNLDLIRSAKVFHYGSISLIVEPCRAAHMKAMEVAKEAGALLSYDPNLRLPLWPSAEEAKKQIKSIWDSADVIKVSDVELEFLTGSNKIDDESAMSLWHPNLKLLLVTLGEKGCNYYTKKFHGTVGGFHVKTVDTTGAGDSFVGALLTKIVDDQTILEDEARLKEVLRFSCACGAITTTKKGAIPALPTASEALTLLKGGA

SEQ ID NO: 11792 - protein, 430 aa, Haemophilus ducreyi 35000HP
MQNLRYPIDSKPPFGLSVLLAVQHLLAALGGIIAVPLVIGNVLKLPTSDTIVLVNAALLVSGIVTIIQCRGIGPIGLRLPSVMGTSFTFVAAALAIGFSEYGVAGIMGSSLIGSLVMIIGSFFMPYVRKLFPPVVTGIVVMMIGLSLIPVAVDWFAGGQKGDPHYADPANLAMATFVLVLVVILVQWGKGIFSAAAIVIGMLVGYAVALALGWINFEAIQNAEAFAIPQPLHFGLAFPISGIIGMSIAYLVTIVESSGNFLALGNATQTEITGKHLRGGVLCDGLGSAFAAVMSTTPFSSFAQNIGVISLTGVASRYVVTVMGVLLVLAGVFPWLGAIIVSIPSPVLGGAGLMMFAMIIAAGIQMLDKVERSKRNGLIIAISIGCGLAVTTRPELLDKLPNFFKEVFGSGITVGSVLALLLNLILPEDKH

SEQ ID NO: 11793 - protein, 465 aa, Parachlamydia sp. UWE25
MVEHYDLAVVGAGPGGYVAAIRAAQMGLKTICIDKRETLGGTCLNVGCIPSKTLLHSTDLYSTLKQHGLEQAIEVSDLKVNFTKLMERKRNVVKGLIEGIALLFKKNGVIYLKGEAQFLDAHTLQVKNGTHIDEIKANYILLATGSESTSLPHLPFDEKNIVSSTGALNLATVPPRLLVIGGGVIGVELASVYNRLGSSVTIIEMSDRLCPAMDIALSKYLFQILKKQGIEIKLSTKMMTAVLQPNETILTIEQNEQLQNISGEVVLVAVGRRPYTQGLALDKVGIQIDKKGFIPVDGFFRTSQPHIFAIGDLIEGVMLAHRASQEGITVVEWLKGERQSINYLAIPNVVYTNPEVASVGLTEQEASESGLTLLTGTTYFRGNSRARCTDEIEGFVKLIGEKKSGRLLGMHIIGAHASELIAVGTLAIQKQINLKDLAETVQAHPTLSETIKEAALQALGKAVHG

SEQ ID NO: 11794 - protein, 478 aa, Mesorhizobium sp. BNC1
MATYKAPLMLIGGEWTKGSGEPKEVINPATEEVIAMLPSATEADLDRALQSAQRGFREWQELSAEQRCDIIMRGCRILRERAAEIAPLITIEQGKPVEEARLEIIRAASIIEWDANEGRRAYGTIVPSDPGFNRYGIKLAIGPVAAFTPWNFPISSPGRKLGGALGAGCSVIIKSSEETPAATCALVQCLLDGGLPPEVINIVSGKSSMISAYLIASPVIRAITFTGSTPVGKHLAKLAAEAMKPVVMELGGHSPVIVFDDVDADKIARQAVAAKFRNAGQICTAPTRFIIQEKAHDAFVESFVKAASAIKVGNGLEADTQMGPLANSRRLRALEELVADARAKGATVATGGKRIGNRGYLFEPTVLTDVPDDADVVNVEPFGPIAPVVRFREFEEAIEIANRLPYGLCSYAFTNSQAYSHELAHRVESGIMSLNHFGTSQADTPFGGVKESGYGREGGYETLDAFMITKFVSQQITA

SEQ ID NO: 11795 - protein, 416 aa, Methanococcoides burtonii DSM 6242
MAEQNPFENARKQLQKCADILELDEGIHDILKNPMREMHVSLPIRMDDGSIKVFQGFRVQYNDAKGPTKGGIRFHPDETVDTVKALAAWMTWKCAVMDIPLGGGKGGVICNPKEMSQSELERLSRKYISSISMIVGPDKDVPAPDVYTNPQMMAWMMDEFSKFAGKNQFGVITGKPLSVGGSLGRGDATARGGLYAVREAAAEIGLELKDATVAIQGYGNAGYFAGTLCEELFGCKVVAVSDSRGGAVNMNGISAEAAQEHKKATGSVVGLAGTEPISNEDILELDVDILIPAALEHVITHENADNIKAKIVAELANGPTTPEADEMLFQKGVHLIPDFLCNGGGVTVSYFEMVQNFYMYRWSIERVHNRLDAKMTNAYHAVLEASKQYNVNMRTAAYVVAVNRVVEAMADRGWLY

SEQ ID NO: 11796 - protein, 67 aa, Pseudomonas fluorescens Pf-5
MQVRLIRADCYQELPMDLIRIIFAILLPPLGVFLQVGFGGAFWLNILLTLCGYIPGIVHAVYIIAKR

SEQ ID NO: 11797 - protein, 346 aa, Rosa gigantea
QKWSNGEHSNELLHAQAHIWNHIFSFINSMSLKSAIQLGIPDIINKHGYPMTLFELTSALPIHPTKSHSVYRLMRILVHSGFFAKKKLSKTDEEGYTLTDASQLLLKDHPLSLTPYLTAMLDPVLTNPWNYLSTWFQNDDPTPFDTAHGMTFWDYGNHQPSIAHLFNDAMASDARLVTSVIIDDCKGVFEGLESLVDVGGGTGTMAKAIADAFPHIECTVLDLPHVVADLQGSKNLKYTRGDMFEAVPPADTVLLKWILHDWNDQECIKILKRSRVAITSKDKKGKVIIIDMMMENQKGDEESIETQLFFDMLMMALVGGKERNEKEWAKLFTDAGFSDYKITPIL

SEQ ID NO: 11798 - protein, 346 aa, Rosa gigantea
QKWSNGEHSNELLHAQAHIWNHIFSFINSMSLKSAIQLGIPDIINKHGYPMTLSELTSALPIHPTKSHSVYRLMRILVHSGFFAKKKLSKTDEEGYTLTNASQLLLKDHPLSLTPFLTAMLDPVLTKPWNYLSTWFQNDDPTPFDTAHGMTFWDYGNHQPSIAHFFNDAMASDARLVTSVIIDDCKGVFEGLESLVDVGGGTGTVAKAIADAFPHIECTVLDLPHVVADLQGSKNLKYTGGDMFEAIPPANTVLLKWILHDWNDEECVKILKRSRKAITSKDKKGKVIILDMMMENQKRDEESIETQLFFDMLMMALVTGKERNEKEWAKLFTDAGFSDYKITPIL

SEQ ID NO: 11799 - protein, 628 aa, Xylella fastidiosa 9a5c
MTWSQDLAHKTYSILHWADGYFEVNDAGQMVVMPVGRDGVRISLPEVVDAARAAGAKLPLLLRFPDILGHRLGKLQAAFAQAQSEWEYAGGYTAVYPIKVNQHRGVAGVLASHQGDGFGLEAGSKPELMAVLALSRPGGLIVCNGYKDREYIRLALIGRKLGLKTFIVIEKPSELRMVLEEAKTLGVLPGLGVRVRLASLGAGKWQNSGGDKAKFGLSPRQVLDVWKVLRGTEYADCLNVMHFHMGSQISNVRDIAKGMREATRYFVELSRLGAKITHVDVGGGLGIDYEGTRSRSDCSINYGLQAYASHIVQPLASACEDYDLVPPRIVTECGRAMTAHHAVLIANVTEVEAVPEGRVPGVCDDEPAVVRHMREIYGELDARPAIELFYEAQHFHAEGLAAYTLGQIDLVHRARIDDLFYAISHGVRERLSHEEKSHRPVLDELNERLVDKYFVNFSVFESIPDVWAINQIFPIVPIERLNEAPTRRGVVCDLTCDSDGTVKQYVENESLDSALPLHVLRHGEAYRIGFFLVGAYQEILGDIHNLFGDTDAVEVAVDGRGYRIAQQRCGDTTDVMLDYVGYALDEVRRVYAQRITAAGMSAAESKALSDMLEAGLTGYPYLSDVPLE

SEQ ID NO: 11800 - protein, 867 aa, Yarrowia lipolytica CLIB122
MESTPRAPMSWNKRDDRDTRDPPDDRDRSHWRPRSEQSNRGAGSSRNDKSIRGGRGGRGGGSRNNSSRGGGFRDDHFGGSRDAPPPPPPREHGDTYRDDGPDLFSDGAWSGGRSTWQDPPLRKDSYSGDKPWDRLSSRYDNRPDDTPPRQQRSTGGRRPGADNKDWPDRSRGDRSWQNSSSNAPWQQNKGRDDRRDGSSYRPDSDRYDRDRDIRDRDNRGRDSGDGRGNRENRDRETTPLYRDRRVSGPPPSLPSTPSRASSTGPVPPSSAPRPGQRRPLPDQVTFASQSDSGPTSSAKRKRKKAGASTTALTDSNIHNPNNPNYIGYTKKEARERERKKQETEELDPSRSGSVGDISLDSSSLGNGGGASSEASVASRDGSRDGRKRLNPTFSDSSESRSRSDFQNKRPKREASTGPQFDDDVPCYGDDEPGEPVVATTPVDTTKPRVTQHTLTSSIFERVTQVGEGTYGKVYKAVNQVSGTTSALKRLRLETEREGFPVTALREIKLLQSLRHDNIISLKEMMVEENGVFMIFGYMSHDLSGILAQPNVRLEEGHIKFLFHQILSGLTYIHQRGILHRDIKGSNILVDGDGNLKLADFGLSRTIDPSNKRARYSNRVITLWYRPPELLFGATLYDGAVDNWGAGCLLVELYSRLAVFRGADEINQLDCIFDIMGTPTNEYWPDLESLPWFEMLKFNYKKPSKFLQMYDQVCSKPALKLASKLLEMNPAYRMTSQEAMNSDYFNVEPKAERPLVLRELVGEWHEFDAKKLRRAKRKEEDLRRGKERRERKEAEARAKAEGRPEEKPEGLATGGGLAVGTSGQEKVTAENTTEANAEPPSAPGSSREPTCTTAPPSVHPSTTDTDTA

SEQ ID NO: 11801 - protein, 333 aa, Streptococcus thermophilus LMG 18311
MAILVLGGAGYIGSHMVDRLVEKGQEKVVVVDSLVTGHRAAVHPDAIFYQGDLSDQDFMRKVFKENPDVDAVIHFAAYSLVGESMEKPLKYFDNNTAGMIKLLEVMNECGVKYIVFSSTAATYGIPEEIPILETTPQNPINPYGESKLMMETIMKWSDQAYGIKYVPLRYFNVAGAKPDGSIGEDHDPETHLLPIILQVAQGVREKIMIFGDDYNTPDGTNVRDYVHPFDLADAHLLAVEYLRKGNESTAFNLGSSTGFSNLQILEAARKVTGKEIPAEKADRRPGDPDILIASSEKARTVLGWKPQFDNIEKIIASAWAWHSSHPKGYDDRG

SEQ ID NO: 11802 - protein, 346 aa, Rosa gigantea
QKWSNGEHSNELLHAQAHIWNHIFSFINSMSLKSAIQLGILDVINKHGYLMTLSELTSALPIHPTKSHSVYRLMRILVHSGFFAKKKLSKTDEEGYTLTNASQLLLKDHPLSLTPFLTAMLDPVLTKPWNYLSTWFQNDDPTPFDTAHGMTFWDYGNHQPSIAHFFNDAMASDARLVTSVIIDDCKGVFEGLESLVDVGGGTGTVAKAIADAFPHIECTVLDLPHVVADLQGSKNLKYTGGDMFEAIPPANTVLLKWILHDWNDEECVKILKQSREAITSKDKKGKVIIIDMMMENQKGDEESIETQLFFDMLMMALVTGKERNEKEWAKLFTDAGFSDYKITPIL

SEQ ID NO: 11803 - protein, 825 aa, Alkaliphilus metalliredigenes QYMF
MIRIKAIIMAGGKGTRLKPLTCNIPKPMVPILNKPTMEYTVELLRKHNIKDIAVTIAHLPTVITDYFHDGGKWDVNLSYYTEETPLGTGGSVKNAEEFIDDTFIVLSGDSLTDINIKKAIEFHKNKGSKATLILKNEQMPIEYGVVITNDNGRITRFLEKPSWGEVFSNTINTGMYILEPEVLDYFQPGENFDFSKDLFPKLLEDDIPMYGYVTEDYWCDVGALNSYTETHFDILSGKVNIGLEGHQIEDGIWVGEGTQIGSGVKITPPVYIGKNCVIHEGVKIDAYTTIGDHCNIENNTSLKRSIIWNHSTLGRNSRCRGSIVCNHVHIKEHVDLYENAVIGEGSILEGRVVVKPDIRLWPYKKVEENTVVNQNLVWGTKASKTIFGFKDICGHINIDINPEFASKLGTAFASTLEEESIVILSSDASNASQMIKNALIAGVHATGAGVINIGNVVMPVNRFAVTDLRGSGGIHVRMDYSDKKLIHIEFVDKIGANIQRNTEREIENVFNREDFKRCNVEQIKSTTNIENFNYYYINNGGRLLKNSSNIKRQNPSLIVSSKSDTIQQLATEFLESIGCDVKQDYNLKGDKRIQDYLVEMTPRIKKGKVNLAVIISEDGEDIILIDGAGRIIEQEKYDALIAMMILKEGKQKKLILPYTAPYIIEEMAHIYGVEVQRVKSNPASIMNAMLAVENGQSQGLSQYTLTYNAIWAIGGILDFLVEKNIKLEDLVDELPNFYYIKEEIPCDWKDKGRIIRQIIEENQHKSIEMFEGVKINDEKGWTLILPDSTKPLFNIYTEGSSQEYAKELSIFFSGKVKELLKNQEE

SEQ ID NO: 11804 - protein, 346 aa, Rosa gigantea
QKWSNGEHSNELLHAQAHIWNHIFSFINSMSLKSAIQLGIPDIINKYGYPMTLSELTSALPIHPTKSHSVYRLMRILVHSGFFAKKKLSKTDEEGYTLTDASQLLLKDHPLSLTPFLTAMLDPVLTKPWNYLSTWFQNDDPTPFDTAHGMAFWDYGNHQPSIAHLFNDAMASDARLVTSVIIDDCKGVFEGLESLVDVGGGTGTMAKAIADAFPHIECTVLDLPHVVADLQGSKNLKYTGGDMFEAVPLADTVLLKWILHDWNDEECVKILKQSREAITSKDKKGKVIIIDMMMENQKGDEESIETQLFFDMLMMALVTGKERNEKEWAKLFTDAGFSDYKITPIL

SEQ ID NO: 11805 - protein, 394 aa, Synechococcus sp. CC9605
MATTNSLLPVDDRHRKAFAPIGTPDRLLLGPGPSNAHPTVLTALSRTPIGHLDPLYVDLMCEVQELLRYAWQTDNRLTLPMSGTGSAAMEATIANTVEPGDTVLVAVKGYFGLRLADMAGRYRAEVKTIEKPWGEWFSLDELEVALIEHKPAILAMVHAETSTGVCQPMEGVGDLCRKHDCLLLLDTVTSLGGVPLYIDEWKVDLAYSCSQKGLSCPPGLGPFTMGPRAEAKMTARQGKVPNWYLDVSLLNQYWGSDRVYHHTAPVNMNFGMREALRLLAEEGLDQAWARHRSNAEMLWTGLESLGLSMHVPAERRLPTLTTVRIPDGVDGKAFSQQLLNNHGIEVGGGLGSLAGKIWRIGLMGYNSTPENVNRLLNLFETELPRFSGSVAAAA

SEQ ID NO: 11806 - protein, 467 aa, Arabidopsis thaliana
MAPAFGKCFMFCCAKTSPEKDEMATESYEAAIKGLNDLLSTKADLGNVAAAKIKALTAELKELDSSNSDAIERIKTGFTQFKTEKYLKNSTLFNHLAKTQTPKFLVFACSDSRVCPSHILNFQPGEAFVVRNIANMVPPFDQKRHSGVGAAVEYAVVHLKVENILVIGHSCCGGIKGLMSIEDDAAPTQSDFIENWVKIGASARNKIKEEHKDLSYDDQCNKCEKEAVNVSLGNLLSYPFVRAEVATLEDIGMDMTELNTLTYDDLDSVSKLQKSRRYADIMQQVEEALEGSVLEYKKLIVDCKQLLVDIENEIVIVQNFIRDKYRVKFQELELLVPHPIDYARVVKRIGNEMDLKLVDLEGLLPSAMIMVLLVTALTTKGNQLPEDVLLKTIDACDRALDLDSARKKPSHASETPSSSASGYKSLENVKHINVAANRILSAAKGLQMSSLMVVVIKQRTGSRKSGN

SEQ ID NO: 11807 - protein, 385 aa, Thermotoga maritima MSB8
MYLMNTYSRFPATFVYGKGSWIYDEKGNAYLDFTSGIAVNVLGHSHPRLVEAIKDQAEKLIHCSNLFWNRPQMELAELLSKNTFGGKVFFANTGTEANEAAIKIARKYGKKKSEKKYRILSAHNSFHGRTLGSLTATGQPKYQKPFEPLVPGFEYFEFNNVEDLRRKMSEDVCAVFLEPIQGESGIVPATKEFLEEARKLCDEYDALLVFDEVQCGMGRTGKLFAYQKYGVVPDVLTTAKGLGGGVPIGAVIVNERANVLEPGDHGTTFGGNPLACRAGVTVIKELTKEGFLEEVEEKGNYLMKKLQEMKEEYDVVADVRGMGLMIGIQFREEVSNREVATKCFENKLLVVPAGNNTIRFLPPLTVEYGEIDLAVETLKKVLQGI

SEQ ID NO: 11808 - protein, 449 aa, Arabidopsis thaliana
MNHNSNLVLPSHQTETQTQDETDISVWRFRGSDNAAKASSVTMRVIVYKLFDECSLDVKKPLLPLAHGDPSVYPCYRTSILVENAVVDVLRSGKGNSYGPAAGILPARQAVADYVNRDLTNKVKPNDVFITVGCNQGIEVVLQSLARPNANILLPRPSYPHYEARAVYSGLEVRKFDLLPEKEWEIDLPGIEAMADENTVAMVIINPNNPCGNVYSYDHLKKVAETAKKLGIMVITDEVYCQTIFGDKPFVPMGEFSSITPVITLGGISKGWIVPGWRIGWIALNDPRGILKSTGMVQSIQQNLDITPDATTIVQAALPEILGKANKELFAKKNSMLKQNVELVCDRLKEIPCLVCNKKPESCTYLLTKLKLPLLEDIEDDMDFCMKLAKEENLVLLPGVALGLKNWIRITIGVEAQMLEDALERLNGFCKRHLKKTESSFQALSNGKI

SEQ ID NO: 11809 - protein, 709 aa, Pseudomonas aeruginosa PAO1
MSEQNNEQRSQAAGTDTVDRGNSNAKLEQLEAYREDATGEALSTNTGTRIADNQNTLKAGERGPSLLEDFIMREKITHFDHERIPERVVHARGSAAHGYFEAYEDLSDLTKAGFLAEAGKRTPVFVRFSTVQGPRGSADTVRDVRGFAVKFYTDEGNFDLVGNNMPVFFIQDAIKFPDFVHAVKPEPHNEIPTGASAHDTFWDFVSLTPESAHMVMWLMSDRAIPIAYRNMQGFGVHTFRLVNAAGESVLVKFHWRPKSGTCSLVWDEAQKLAGKDPDFNRRTLWEDIEKGDYPEWELGLQVIPENQQDSFDFDLLDPTKLVPEELVPVRVVGRMVLNRNPDNFFAETEQVAFHVGHVVPGIDFTNDPLLQGRLFSYTDTQLLRLSGPNFNEIPINRPLCPFHNNQRDAPHRQTINRGRASYEPNSIDGGWPKETPPAARNGGFSTYHEPVSGSKLRKRADSFADHFSQAALFWHSMSEAEQAHIVAAYSFELSKVERQSIREREVNQILLNIDPQLAARVAANVGVQLAAPANPTPQPKPSPALSQMNLLSGDIRSRKVAILIADGVAESDVSDLRDALRQEGADAKLIAPSASPVQAENGAELSPEGTWDGLPSVAFDAVFVPGGAASSQAIGADGRGLHYLLEAYKHLKPVAFAGDAQALASQLSLPGDPGVVLGATATDVFPGLRQALMQHRIWQREAATKAIPA

SEQ ID NO: 11810 - protein, 330 aa, Oryza sativa (japonica cultivar-group)
MVPEEPNVVNRITTAFWEFQLLACSDEPISSGTPSSPSSPLTKETGDANTVLIDDLFLAHSDAILAGGDQEDHQLGNDLGQQQAATAMEIDDDMIYSLIRNWDNDSSSSWIELLDHVVVSPASCFVPWKRTELDKQAVAGGGEAAQRLLKKAVGGGGAWMNRAAGSSIKNHVMSERRRWEKLNEMFLTLKSLVPSIDKVDKASSLAETIAYLKELERRVQELESGKKVSRPAKRKPCSERIIGGGDAGAVKEHHHWVLSESQEGTPSNVRVIVMDKDELHLEVHCRWKELMMTRLFDAIKSLRLDVLSVQASAPNGLLGLKIRAKVVSLT

SEQ ID NO: 11811 - protein, 849 aa, GIBBERELLA ZEAE PH-1
MAMLASKAAFPAGMGSSSHTPVASQPAMPLPRRTPMMPSSGAYGSPTESEFTEHDPAESVKNWDEDQVCEYLRTVKCGEYEKIFRKNHINGENLLEMDKDVLKEMGVEKVGDRVRLFLSIKKLRTRAYANEKKRNRDSFGGLDIQITAPNDSPRLHSSRGVPASSSKRYSRQLDLYGALDNGKTSSRPNSPLPGTDVRNLRARGKTYASIPVNAQGQRIVTTNPDLPANRLVTTHTRNNSSMDGSLMAALPQGQEVIRVISTGGVTKVVKISGCNTCEEVMRVTLRKFALREDHERNYCFWVLAGIDPDPGQCRRLGDTELWRIIKDQRRPERNRLILRRVPAGEPGEAELHRAAAIAMEEEQQKHARALETVDKRRSLRPFGGLRPPSELIASDLTSYFPDHTREDIDRTARLSMRRSTRMSKVNSRLSVASNLSFASSIQDAPPIPTIADSWLNANTQLAKVRTRDSHIRVPQAAYNRDSVTSSVLDTLQEESSLEPDRKSYVSFTESGSDSAPVSVTDPEGNTTATSYYDGDTSTGSGSFQEIRQALTNDGDDVDEELHSFLAGESWGDDKWMKGALIGQGSFGCVYLALHAVTGELLAVKQVETPAPGANSQGDNRKKGMIDALKREISLLRDLRHPNIVQYLGCSSTADYLNIFLEYVPGGSVQTMLNSYGALPEPLVRSFVRQILTGLSYLHNQDIIHRDIKGANILVDNKGTIKISDFGISKKLEATNILNGANNSKHRPSLQGSVFWMAPEVVKQTSYTRKADIWSLGCLVVEMMTGSHPFPDCSQLQAIFKIGGGKAAPTIPEHASEAAKEFLAQTFEIDHNLRPSADQLILSPFLIPIT

SEQ ID NO: 11812 - protein, 454 aa, Botryotinia fuckeliana
PGPTLYADWGDMIQVTLKNSMPDNGTGIHWHGLRQYHTCTEDGVPGITECPLAPGDTKTYTFQATQFGTSWYHSHYSSQYGEGMLGGIVINGPATSNYDVDLGVYTISDWYYTPVFALGERIAHSQAGPPSGDNGLINGSMVAPAGQTGGKYTTNTITAGKKYRLRLINTSVDNHFMVSLDNHAFTVITSDFVPIVPYTANWIFIGIGQRYDVIITANQTVGSYWFRAEVQNGCGTNNNNGNIKSIFTYSGAASTTPSSSATPYTGRCTDETGIIPFWDSFVPSGPLSGNVEQLNVAINIGVDASGPIVTWGINLSAIDVDWKKPILQYVLDGNNSWPASENLIELPNAAQWYYWVIQEVPGNVNGNPVSINVPHPMHLHGHDFFLLGTGVGTYNNTINGPSLDYDNPTRRDVAMLPAGGWMVLAFQTDNPGAWLMHCHIAWHVSEGLAVQFQG

SEQ ID NO: 11813 - protein, 98 aa, Arabidopsis thaliana
  misc_feature (47)..(47): Xaa can be any naturally occurring amino acid
  misc_feature (57)..(57): Xaa can be any naturally occurring amino acid
  misc_feature (72)..(72): Xaa can be any naturally occurring amino acid
  misc_feature (85)..(85): Xaa can be any naturally occurring amino acid
  unsure (1)..(98): unsure at all Xaa locations
LGEKIWVVTWGPFFFGRGFFLFCGFGNGLQFMGGQAAGYAAADSVQXLPLVSTFWGXVVLFGRITERSSRKXYLLLFCMLFMFIXSSASSHASSGHRK

SEQ ID NO: 11814 - protein, 395 aa, Sulfolobus solfataricus P2
MLEDVYLVDYARTAFTRFSRKDYQKDPFYNIRPEELAGMVINRLIEKNGIKAEEIDEIITGCALQVGEQWAFGGRHEIFAARLPYNIPTMAVDRQCASSLTTVSIGAMEISTGMADIVLAGGVEKLSRTPMFDNPHIEVNTKFLTDSKYIEYDLTTGYVMGLTAEKLAEEARIKREEMDRWSLRSHQLAWKAIQEGYFKDEILPIEVEVEGKKTVVNVDQSVRPDTSIEKLGQLPPAFKPNGTITAGNSAPLNSGASYVLLMSKNALKKYGLTPMAKIRSFGFAGVPPAVMGKGPVPASKKALEKANLSTRKIDLWEINEAFAVVVLYAIKQLELDESTVNKKGGAIAIGHPLGATGARLVGTLARQLIIEGKDYGVATLCVGGGQGGAIVLERV

SEQ ID NO: 11815 - protein, 157 aa, Saccharomyces cerevisiae
MPIDQEKLAKLQKLSANNKVGGTRRKLNKKAGSSAGANKDDTKLQSQLAKLHAVTIDNVAEANFFKDDGKVMHFNKVGVQVAAQHNTSVFYGLPQEKNLQDLFPGIISQLGPEAIQALSQLAAQMEKHEAKAPADAEKKDEAIPELVEGQTFDADVE

SEQ ID NO: 11816 - protein, 728 aa, Aspergillus fumigatus
MRLTFIPSLIGVANAVCPYMTGELNRRDEISDGDAAAATEEFLSQYYFNDNDAFMTSDVGGPIEDQNSFSAGERGPTLLEDFIFRQKIQRFDHERVPERAVHARGAGAHGVFTSYGDFSNITAASFLAKEGKQTPVFVRFSTVAGSRGSSDLARDVHGFATRFYTDEGNFDIVGNNIPVFFIQDAILFPDLIHAVKPRGDNEIPQAATAHDSAWDFFSQQPSTMHTLLWAMSGHGIPRSFRHVDGFGVHTFRFVTDDGASKLVKFHWKSLQGKASMVWEEAQQTSGKNPDFMRQDLHDAIEAGRYPEWELGVQIMDEEDQLRFGFDLLDPTKIVPEEFVPITKLGKMQLNRNPRNYFAETEQVMFQPGHIVRGVDFTEDPLLQGRLFSYLDTQLNRHGGPNFEQLPINQPRVPVHNNNRDGAGQMFIPLNPHAYSPKTSVNGSPKQANQTVGDGFFTAPGRTTSGKLVRAVSSSFEDVWSQPRLFYNSLVPAEKQFVIDAIRFENANVKSPVVKNNVIIQLNRIDNDLARRVARAIGVAEPEPDPTFYHNNKTADVGTFGTKLKKLDGLKVGVLGSVQHPGSVEGASTLRDRLKDDGVDVVLVAERLADGVDQTYSTSDAIQFDAVVVAAGAESLFAASSFTGGSANSASGASSLYPTGRPLQILIDGFRFGKTVGALGSGTAALRNAGIATSRDGVYVAQSVTDDFANDLKEGLRTFKFLDRFPVDH

SEQ ID NO: 11817 - protein, 241 aa, Mesorhizobium loti MAFF303099
MTTQPDPARFAHVTDWVFDLDNTLYPHHSNLFSQIDVKMTAYVGELLALPREEARKLQKELYLEYGTTLNGLMTRHGIDPDDFLEKVHDIDYSWLVPDPVLGTAIRQLPGRKFIFTNGDRRHAERTARQLGILDHFDDIFDIVAAGLNPKPARQTYEKFAELHAVTGHNAVMFEDLARNLEVPKALGMTTVLVVPRNFEPTFAEIWERDPAQEDDVDFVTDDLAAFLTAIVAGERAVGSRE

SEQ ID NO: 11818 - protein, 370 aa, Deinococcus radiodurans R1
MTSPSSTATSSPTTTTAPTPARMRALSKQQPGEGIWMIETEVPTPGPNDLLIRIRKGSICGTDVHIYKWDDWASQTVPVPMVVGHEYVGVVAGMGSEVRGFEIGDRVSGEGHVTCGHCRNCRAGRRHLCRNTQGVGVNRPGSFAEYLVLPAFNAFKLPDDIPDDVAAIFDPFGNAVHTALSFDLVGEDVLITGAGPIGCMAAAVARHVGARNVVITDVNDYRLDLARQMGVTRAVNVAREDLWTVATQELDMHEGFDVGMEMSGSGPAFAQMVSVMNNGGKVALLGIPSGEVQIDWNAVIFKMLTIKGIYGREMFETWYKMAALIQSGLDLTPVITHHYGIGDFQQGFDAMLSGQSGKVILDWETEEQSA

SEQ ID NO: 11819 - protein, 353 aa, Glycine max
  misc_feature (65)..(65): Xaa can be any naturally occurring amino acid
  unsure (1)..(353): unsure at all Xaa locations
MGVPEKDPLSQLSLPPGFRFYPTDEELLVQYLCRKVAGHHFSLPIIAEIDLYKFDPWVLPNLIDXIFAGKAIFGEKEWYFFSPRDRKYPNGSRPNRVAGSGYWKATGTDKIITTEGRKVGIKKALVFYIGKAPKGTKTNWIMHEYRLLDSSRKNTGTKLDDWVLCRIYKKNSSAQKAVQNGVVPSNEHTQYSNGSSSSSSSQLDDVLESLPAIDERCFPMPRVNTLQQQQHEEKVNVQNLGEGGLLDWTNPSVLNSVVDFVSGNNNHNQLVQDQTQGMVNYNACNDLYVPTLCHVGTSVPQKMEEEVQSGVRNQRVQNNSWFLQNDFTQGFQNSVDTSGFKYPVQPVGFGFRN

SEQ ID NO: 11820 - protein, 70 aa, Lolium perenne
SSRAMSIMNSFISDIFEKLAGESAKLARYNKKPTITSREIQTSVRLVLPGELAKHAVSEGTKAVTKFTSS

SEQ ID NO: 11821 - protein, 585 aa, Aloe arborescens
MTSDSASVLDLDTKTTVGGGVEDAYGEDQATEEQLVTPWTISVASGYSLLRDPHHNKGLAFTEKERDAHYLRGLLPPVCISQELQEKKLMRSLRQYQVPLQRYMAMMDLQERNERLFYKLLIDNVEELLPVVYTPTVGEACQKYGCIFRRPQGLYISLKEKGKILEVLKNWPERSIQVIVVTDGERILGLGDLGSQGMGIPVGKLSLYTALGGIHPSSCLPVTIDVGTNNEQLLNDEFYIGLRQKRATGQEYAELLHEFMTAVKQNYGEKVIVQYEDFANHNAFELLAKYSKSHLVFNDDIQGTASVVLAGLVAALKVVGRTLAEHTFLFLGAGEAGTGIAELIALEMSRQTKAPIEETRKKIWLVDSKGLIVSSRKESLQHFKKPWAHEHEPVKTLLDAVKTIKPTVLIGSSGVGQTFTKEVAEAMPSFNEKPVILALSNPTSQSECTAEQAYSWSEGRAIFASGSPFDPVEYNGKLFVPGQANNAYIFPGLGLGLVISGAIRVHDEMLLAASEALAQQVTEENFANGLIYPPFTIIRKISAHIAANVAAKAYELGLATHLPRPANLVKYAESRMYSPLYRSYR

SEQ ID NO: 11822 - protein, 178 aa, Novosphingobium aromaticivorans DSM 12444
MSEQATAILAGGCFWCTEAVFRDVIGVSNVESGYIGGTVESPTYKQVCSGSTGHAEAIRVTFDPQVIGYGQILDIFFATHDPTQLNRQGNDIGTQYRSALFPLDDEQRSEAKAAIGRAQPDWPRPIVTTIEGPATWYPAEDYHQEYWEGEGQRNPYCLAVIPPKLMKLRKSFANKVKA

SEQ ID NO: 11823 - protein, 107 aa, Lolium perenne
MAPKAEKKPAAKKPVEEEPASEPAAKAPAAKKPKAGKSLPAGKTAAKEGGGVDKKSKKKNKKSVETYKIYIFKVLKQVHPDIGISSKAMSIMNSFINDIFEKLAGES

SEQ ID NO: 11824 - protein, 569 aa, Arabidopsis thaliana
  misc_feature (41)..(41): Xaa can be any naturally occurring amino acid
  misc_feature (163)..(163): Xaa can be any naturally occurring amino acid
  unsure (1)..(569): unsure at all Xaa locations
MDSHSSHLNAANRSRSSQTPSPSHSASASVTSSLHKRKLAXTTAANAAASEDHAPPSSSFPPSSFSASTRDGALTSNDELESISARGADTDSDPDESEDIVVDDDEDEFAPEQDQDSSIRTFTAARLDSSSGVNGSSRNTKLKTESSTVKLESSDGGKDGGSXSVVGTGVSGTVGGSSISGLVPKDESVKVLAENFQTSGAYIAREEALKREEQAGRLKFVCYSNDSIDERMMCLIGLKNIFAGQLPKMPKEYIVRLLMDRKHKSVMVLRGNLVVGGITYRPYHSQKFGEIAFCAITADEQVKGYGTRLMNHLKQHARDVDGLTHFLTYADNNAVGYFVKQGFTKEIYLEKDVWHGFIKDYDGALPMECKIDPKLPYTDLSSMIRQQRKAIDERIRELSNCQNVYPKIEFLKNEAGIPRKIIKVEEIRGLREAGWTPDQWGHTRFKLFNGSADMVTNQKQLNALMRALLKTMQDRADAWPFKEPVDSRDVPDYYDIIKDPIDLKVIAKRVESEQYYVTLDMFVADARRMFNNCRTYNSPDTIYYKCATRLETHFHSKVQAGLQSGAKSQ

SEQ ID NO: 11825 - protein, 443 aa, Saccharomyces cerevisiae
MFVAPVSSQKLDTAIRKETTFVPMLAASFKRQPSQLVRGLGAVLRTPTRIGHVRTMATLKTTDKKAPEDIEGSDTVQIELPESSFESYMLEPPDLSYETSKATLLQMYKDMVIIRRMEMACDALYKAKKIRGFCHLSVGQEAIAVGIENAITKLDSIITSYRCHGFTFMRGASVKAVLAELMGRRAGVSYGKGGSMHLYAPGFYGGNGIVGAQVPLGAGLAFAHQYKNEDACSFTLYGDGASNQGQVFESFNMAKLWNLPVVFCCENNKYGMGTAASRSSAMTEYFKRGQYIPGLKVNGMDILAVYQASKFAKDWCLSGKGPLVLEYETYRYGGHSMSDPGTTYRTRDEIQHMRSKNDPIAGLKMHLIDLGIATEAEVKAYDKSARKYVDEQVELADAAPPPEAKLSILFEDVYVKGTETPTLRGRIPEDTWDFKKQGFASRD

SEQ ID NO: 11826 - protein, 105 aa, Lolium perenne
MAPKAEKKPAEKKPVEEEPATEKAKKTPAAKKPKAGKSLPAGKTAAKEGGEKRGRKKGKKSVETYKIYIFKVLKQVHPDIGISSKAMSIMNSFINDIFEKLAGES

SEQ ID NO: 11827 - protein, 75 aa, Lolium perenne
MAPKAEKKPAEKKPVEEEPTTEKAKKTPAAKKPKAGKSLPAGKTAAKEGGEKRGRKKGKKSVETYKIYIFKVLKQ

SEQ ID NO: 11828 - protein, 399 aa, Novosphingobium aromaticivorans DSM 12444
MTDLFSKFDPLIEQRRALLAGGVEDPFNLVMERVISPTVAVCNGRETILLGTYNYMGMTFDPDVIAAGKQALDDFGSGTTGSRVLNGTYAGHKACEEALKEFYGMDHAMVFSTGYQANLGIISTIAGKGDYIILDIDSHASIWDGCKMGDAEVVPFKHNDIEAMEKRLKRVPEGAGKLVVLEGVYSMLGDIAPLKEMIRIAKEHGAMVLVDEAHSMGFIGPNGRGVAEEQGVLDQVDFVIGTFSKSVGTVGGFCVSNHPKFEILRLVCRPYVFTASLPPSVVHTAATSIRKLMHAGNKRAHLWENSKTLHKGLRDKGFQLGTTEPQSAIISVIMPDLERGAAMWEALLHEGLYVNLARPPATPAGMTLLRCSLCAEHTAEQVQTIIGMFERAGKAVGII

SEQ ID NO: 11829 - protein, 400 aa, Glycine max
MAGICCGVVGEGDTPAPLEPTPRPSRRRSLDILPLKYIADMPMPPPEALRKRPKLNLRDCDNAIENCDESTGHKVTKKESKVDYDDDVVSETKNVTVSEVEEESPKFGVTSVCGRRRDMEDSVSVRPCFTQGFHYFGVFDGHGCSHVATMCKERLHEIVNEEIESARENLEWKLTMENGFARMDDEVHRRSQSNQTFTCRCELQTPHCDAVGSTAVVAVVTPDKIVVSNCGDSRAVLCRNGVAIPLSSDHKPDRPDELLRVQSKGGRVIYWDGPRVLGVLAMSRAIGDNYLKPYVISEPEVMVTERTEEDECLILASDGLWDVVSNETACGVVRMCLKAQKPPGSPGSDVAADGSDRACSDASILLTKLALARHSSDNVSVVVVDLRRDQRQSSNYNDVN

SEQ ID NO: 11830 - protein, 100 aa, Lolium perenne
MAPKAEKKPVEEEPAADKAKKTPAAKKPKAGKSLPAGKTAAKEGGEKKGKKKAKKSVETYKIYIFKVLKQVHPDIGISSKAMSIMSSFINDIFEKLAGES

SEQ ID NO: 11831 - protein, 364 aa, Arabidopsis thaliana
MGKGGMSQGEGSKVEEENMAAWLVGINTLKIQPFLLPSVGPHDVRVRMKAVGICGSDVHYLKTMICADFVVKEPMVIGHECAGIIEEVGEEVKHLVVGDRVALEPGISCWRCNLCREGRYNLCPEMKFFATPPVHGSLANQVVHPADLCFKLPENVSLEEGAMCEPLSVGVHACRRAEVGPETNVLVMGAGPIGLVTMLAARAFSVPRIVIVDVDENRLAVAKQLGADEIVQVTTNLEDVGSEVEQIQKAMGSNIDVTFDCAGFNKTMSTALAATRCGGKVCLVGMGHGIMTVPLTPAAAREVDVVGVFRYKNTWPLCLEFLTSGKIDVKPLITHRFGFSQKEVEDAFETSARGSNAIKVMFNL

SEQ ID NO: 11832 - protein, 434 aa, Mycobacterium bovis AF2122/97
MLGTPTSGFGSVVVAETRSYRDAKSNTEVRVNHAHLTNLTPDTDYVYAAVHDGTTPELGTARTAPSGRKPLRFTSFGDQSTPALGRLADGRYVSDNIGSPFAGDITIAIERIAPLFNLINGDLCYANLAQDRIRTWSDWFDNNTRSARYRPWMPAAGNHENEVGNGPIGYDAYQTYFAVPDSGSSPQLRGLWYSFTAGSVRVISLHNDDVCYQDGGNSYVRGYSGGEQRRWLQAELANARRDSEIDWVVVCMHQTAISTADDNNGADLGIRQEWLPLFDQYQVDLVVCGHEHHYERSHPLRGALGTDTRTPIPVDTRSDLIDSTRGTVHLVIGGGGTSKPTNALLFPQPRCQVITGVGDFDPAIRRKPSIFVLEDAPWSAFRDRDNPYGFVAFDVDPGQPGGTTSIKATYYAVTGPFGGLTVIDQFTLTKPRGG

SEQ ID NO: 11833 - protein, 208 aa, Glycine max
MYGQSSSSSSSYESDLALLDSIRHHLLGESESIFGAPNFGSGRSSSFSSLDSCLSDNWGELPFKEDDTEDMVLYGVLRDAVNVGWVPSLDAGSPESVSSGFPAVKLEPDLMPALISPCPPPRIAAEEKKVVPAKGKHYRGVRQRPWGKFAAEIRDPAKNGARVWLGTFETAEDAALAYDRAAYRVGTVQEQVGSQVAECTRGEQLLVS

SEQ ID NO: 11834 - protein, 547 aa, Arabidopsis thaliana
  misc_feature (35)..(35): Xaa can be any naturally occurring amino acid
  unsure (1)..(547): unsure at all Xaa locations
MITPKLELLFFIIMFHVNSRFRYKLSYNFELPCMXSVQHIYKFFDLNMETHFLLLSLAFLLFISLKLLFGKRLSKFNLPPSPARPLPLIGHLHLLKLPLHRTFLSFSQSLGGAPIFSLRLGNRLTVVVSSYSIAEECFTKNDIVFANRPEFILGKHIEYNSTTMTSAPYGDHWRNLRRIATLEIFASHKLNGFLSVRKDEIRHLLLRLSKNSRHGFAKVEMRHLLFELTINNVLRMVAGKRFYGEGTEQDEVARRVTHLMDEIVSSAGAGNAADYLPILRWFTDFEKRVKELASRVDEFLQSLVDERRAHKQKGTTMMDHLLSLQESQPDYYTDVTLKGIIIVMILAGSETLAGTLEWAMLNVLNHPEVLEKARTEIDTEVGFDRLMDEADTKNLPYLQWIVLETLRLHPAAPTNVPHRTSEDCMLAGYDVPRGSMLLVNVWSMHRDPSIWEAPEMFKPERFKNEKLNQKLLSFGLGRRACPGVGLAHRVVSLALGSMVQCFEWQRIGQEYVDTSEDKPVALMRPATPLLAMCKARPIVHEFLDAFA

SEQ ID NO: 11835 - protein, 498 aa, Kineococcus radiotolerans SRS30216
MARAPPPRGAPSDRGAGPGDPGTTVEEDVVQLAPQEQSGLGTGLKPRHITMISIAGVIGAGLFVGSKTAIAEAGPGVLLSYAFAGLLVVLVMRMLGEMATAHPDTGSFSTYADRALGRWAGFSVGWLYWWFWVLVIPVEATAAADILSSWIGAPQWVWALLVTLALTASNLTSVGNYGEFEFWFAGVKVVAIVGFIAVGLLAIFGVLPGSDISGTPGFSLTGDAGGFLPNGFSAVLAGILLTMFSFMGTEIVTIAAAESPDPQKGVRRAVNSVIGRIGVFYLGSIFVVVALVPWNSAALDADGSFQTTLQAIGIPGAATIMDVVILTAVASCLNSALYTASRMVFSLSRRGDAPVWLSHVSRRGVPYPAILASTVVGFLAVVGNYLLPEKIFEYLLATSGALALVIYAFIALSQVVVRRRLDEAGERPAVRMWLFPWLTYATIAFIAVVLVLMVVLPGQRVQLALSLVLTVVVVALGLRHQRRRGPAARPADEAAAHR

SEQ ID NO: 11836 - protein, 392 aa, Pseudomonas fluorescens Pf-5
MSFDLAARLAARRAEHLYRQRPLLQSPQGPQVVVDGQPLLAFCNNDYLGLANHPQVIEAWRSGASRWGVGGGASHLVIGHSTPHHALEEALAELTGRPRALLFTTGYMANLGAVTALVGQGDTVLEDRLNHASLLDAGLLSGARFNRYLHNDAHSLAKRLEKATGNTLVVTDGVFSMDGDVADLPALARATKARGAWLMVDDAHGFGPLGANGGGLVEHFGLGLDEVPVLVGTLGKAFGTAGAFVAGSEDLIESLIQFARPYIYTTSQPPALACATLKSLELLRSEHWRREHLAALIRQFRQGAEQIGLQLMDSFTPIQPILVGDSARAVRLSQMLRERGIMVSAIRPPTVPAGSARLRVTLSAAHSEAQVQLLLSALADCFRELQAEPSHA

SEQ ID NO: 11837 - protein, 823 aa, Candida albicans SC5314
MTEINDSTENITRIDRNDAKELKHWLAKANCQHHYSKFIENGITMDLLPELDTGSLKELGISKLGDRLRLEIAISNLKAENLKELISVDEIYQLLNLNPQPSGSLTNLNNNNNSLLDVSNSNEGTLTQLSQNNSSNNLPISSMNSSTNNINGNTINSSSGNVVGNSASSKDSSKTITFILQDGSTKRVNATGCFNAQAIKRRVLKKLGFKPDEIQFDTYVHSVPHGVENVLYGKTEPTITLLYDVELVTICYSPERLEKYRIMLVPKNEPPTPAAIETSKKIMSKYKKQVSGSKAELQEEVNQLHTKDVQAHRSTLRNFFGQRPPSELISSNLAEYFPDTRQKDLEQTVRNSVRHSVRLSRRFNLPAGAFSSSVYSLNKRQSILSNSTGFPSNRTMSISSGEQQSGVFNTSGGGSGGLRRAQRTIGDVMVNSITAIDEVVNSNDTFSVFNKPSTSFSNQPVQPLNNHDSRSIISSKSLSGGTALHRISISPNYNDNPAHDRHSTIELLNPSDSEGEDGEEDGEFGISDYAGLSSSSGENGPPENWLKGARIGSGSFGTVYLGMNPFTGELMAVKQIPLVNENGNNSDTENIQNSMQEQQREMMLLKELNHENIVRYFGSTTDENFLNIFLEYVPGGSVQSMLNSYGPFEEPLIRNFVRQVLIGLSYLHGEDIIHRDIKGANILIDIKGTVKIGDFGISKKVSAIDEEDEDFKKTGKRASLQGSVFWMAPEVVKQTTYTKKADIWSVGCLIVEMFTGRHPFPELSQMQALFKIGNHITPQIPEWCTNEAKEFLKKTFEINFEMRPDAIELLAEQFLNPLIMSKQ

SEQ ID NO: 11838 - protein, 296 aa, Arabidopsis thaliana
MMFQQDYPHGFSLVETSLSYEMLDYFQNIVVSNSEDVASQQNSISSSSYSSATLSCSITEQKSHLTEKLSPLRERYGCGDFLSRKRRRRSEKTIVDKENQRMNHIAVERNRRKQMNHFLSILKSMMPLSYSQPNDQASIIEGTISYLKKLEQRLQSLEAQLKATKLNQSPNIFSDFFMFPQYSTATATATATASSSSSSHHHHKRLEVVADVEVTMVERHANIKVLTKTQPRLLFKIINEFNSLGLSTLHLNLTTSKDMSLFTFSVKVEADCQLTPSGNEVANTVHEVVRRVHKER

SEQ ID NO: 11839 - protein, 560 aa, Candida albicans SC5314
MKFWTYSTKVLATLLAVVSITHASGPTDGDAVADPNSAVVKLTSENFASFIEENPLILAEFFAPWCGYCKMLGPEYSKAADSLNESHPKIKLAQIDCTEDEALCMEHGIRGYPTLKIIRDGDSKTAEDYQGPREAAGIADYMIKQSLPAVQFPETFEELDTLIDAQTKPFVLQINPTEDGNATFNKVANQKRKDYVFINVEDKQIIKDLNKKFKNVDITGKKPSYLVVQPKQFDEVAKFDGKKIDAESLTEFIGVEAVPYFGEINQDTYMTYMTSPLPIAYYFYNNAEQREAIADDLTKLGKKYRGKLNIVGLDASLFGRHAEVINMDPEVVPLFAIHHISDNKKFGVNQTDYPEGPSFKVIEKFVADYFADKLTPIIKSEPLPTEEEKSANPVVKLVAHNYKDVLEQTDKDVFVKYYAPWCGHCKKLAPTWEELAEIFGSNKDDAKVVVADIDHTNNDVDVPYNIEGYPTLLMFPANGKVDEKTGIREPIVFEGPRELDTLIEFIKEKGALNVDGAELKAKLDEQKATKEDEEVEEEKEEEEEEEAPVEDKENVEHDEL

SEQ ID NO: 11840 - protein, 1100 aa, Pseudomonas aeruginosa PAO1
MARREKPVFLNDPQWYKDAVIYQVHVKSFYDANNDGIGDFAGLIEKLDYIADLGVNTLWLLPFYPSPRRDDGYDIAQYRGVHSDYGSLADARRFIAEAHRRGLRVITELVINHTSDQHPWFIRARHAKKGSRARDYYVWSDSDEKYQGTRIIFIDTEQSNWTWDPVAQQYYWHRFYSHQPDLNFDNPQVLREVLGVMRYWLDMGVDGLRLDAIPYLIERDGTSSENLPETHQVLKRIRAELDAHYPDRMLLAEANQWPEDTRPYFGGEDGGEGDECHMAFHFPLMPRMYMAIAQEDRYPITDILRQTPDIPANCQWAIFLRNHDELTLEMVTDDERDYLWNHYAADRRARLNLGIRRRLAPLVERDRRRIELLHSLLLSMPGTPTLYYGDEIGMGDNIYLGDRDGVRTPMQWSVDRNGGFSRADPAKLVLPPILDPLYGYQTINVEAQARDPHSLLNWMRRLLAVRSQQKAFGRGSLKMLAPSNRRILAYLREYAEGERQDSILCVANLSRAAQAVELDLASHAGKVPVEMIGGMSFPPIGELTYLLTLPPYGFYWFYLADATQMPSWHVAADERLPELPTLVVKQRLGELLQGASRNILEGETLPAYLPKRRWFAGEKGQPRLCYIVPLDEAEPRCALCEVEIDGLRYQLPLGFLDADQRGDSLPQLLALARLRRGRKVGLLTDAASLPLFARKVLAQLRAEAVIAHGDGEIQFIPAAGLAEMDDIADEDVLPFSVEQSNSSIRFGERMVLKVLRKILPGLHPEIEVGGYLTRHGYPGIAPLLGEVRRVGADGEPHTLMILQGYLNNQGDAWNWTLDNLERAVRDEISAASEALEGQYDSLAELRGFAANLGARLGEMHSVLAGESDDPAFGSRESDEASVQAWALRIAEQLREAGKRLSEPPRPLQGEAAEQARRLLERLPALLERLPLLARQAAGGLLIRVHGDLHLGQVLMVQGDARFIDFEGEPARSLEERRQRHSPMKDVGGMLRSFDYAAAMVLRNAQSTDSSEQADSARRKVAMRYRSEARDAFLAGYRAAAAGLMHAWHGREGEGAALALACLEKAAYELLYEADYRPDWLEVPLAGLAELTEHLLKGKNR

SEQ ID NO: 11841 - protein, 3487 aa, Microcystis aeruginosa
MVESIDYKKLMATTLSKMEVMQARINELETRQSESIAVVGMACRFPGGINSPEKYWSFCQAGLDAIVEVPKSRWDISKLYSQEPTLGKMNTAYGGFLQENITEFDARFFSISAKEAASMDPQQRLLLEVAWEALENANLPLKNLADNKVGVFVGITSIDHALKVYGTNYDQIDSFFGSGNALSAAAGRLSYFLNLHGPCLSIDAACASSLAAVHQGIRSLRNRECELALVGGVNLILEPAITISLSQSGMMSPDGRCKTFDASANGYVRGEGCGVLILKTLSEAQKNGDHILALLRGSAVNHNGAAAGLTVPSGPAQQELLRQALVDARIVPEDVSYIEAHGTGTSLGDPIELNAIASVYGKRSDPLYVASVKTNIGHLEAAAGMAGIIKTILILQQGEIPSHLHFQTPNPLINWEDHPIKIPTQNIPWPNNNKVPIAGVSSFGFSGTNAHVIVQQAPVSKISEIQQQLPSHLLTLSAHNKTALKELAKRFHTLLESRPEIGDICYSAAVGRIDLPERLAIVGDTCPELQQRLAAFAEEKPLDDLTFYQRFTSEKSPKIVFLFTGQGACYPGMGHQLYQTQPTFRQYIDQCAEILSKYLDHPLTEILFGEQTDLLNQTAYAQPAIFALEYSLTMLWKSWGITPSLLIGHSVGEYVAACIAGVFSLEAGLALVVKRGQLMQTTTSGKMASIFADEETVSSLIKNYTQTVSIAAINHPQQIVIAGESASIEEVISTCKKQKIPAQYLPVTQAFHSPLMEPILKEFEKEARQIYYQRPQILLLSGLDGELLENAPDAAYWSKQCREPVRFLSSLITAFNKGYNLFLEVGPRPILAEQGRRYKDEVIWLSSLNRGLDNWHTILSALAQLYLNGAPFNPEQFNRNYGYKKVRLPNYPFQRKPFQFQPNPRTENQSIDKIFLDAQTSNLTDTETTVFNMQKHQQEIRNQLKSILALLLKEDENDLPEDETLLNLGADSIILTDFSRKVEEKFQVKVKIDQLFTDLQTLADIAEYLCQFVNEKPLENASEITTKVINDETELSNYLQVIEQLQPIATAYIIRALESLGKKLNQGEQWTIETLRQTLPVARKYHILLNRYLQDLEQANVLHNQGNIWTVKNLPESFSLPQALQKLEKTCPSAKPELEMLQRCGENLAEVLKGNIDPLTLIFPEGSVAHAESIYGNSPVSRLMNQRVAQAINQILTNFSNSDRPYQILEIGGGTGATSEAILHHLNLDHVTYSFSEVSPFLLHQARQKFQKKYNLNFHQLDIEKSPISQGIPARNYHIVVAANVLHATRNITETLTHIRELLRPGGYLVLLETVENNSWLNLTFGLTPGWWRFQDQQLRSDTPLLRGENWCSVLKSCGFATANSFSKQNNIPINNGQELILACVPDEPLSIPAIPKFTVSGESSGKEALMMAQLQSLKDLKDLHEKTIIKQLEVLQTAPVFPSIAPEILTNQTQIIPTQSSKTETYLPVSQEKPKSPEKPSSPNLNPLALKLTENKSLTEQQQAFIQNLQSIYNQKTAKSKAYSQNSRKTMVDVKPTIDFRMALKEFQYPIVSESAQGAYFKDIDGNNYIDLAMGFGVNFFGHSPDFVIKAVQEQMNRGIGLGMQSNLAAETAALISEMGRVERVAFSNTGTEAIMAAVRIARSRTKRQKIVMFAGSYHGTFDGILARVGEDKTTAQPLSLGTPLGMVEDIIVLSYGVEESLDIIATHADDLAAVLVEPVQSRKPDLQPQEFLQKLRQITHKKGITLIFDEIITGFRIAPGGAQEWFNVEADIVIYGKAIGGGLPISMICGKADFLDTVDGGFWQYGDDSHPQTELTAFGGTFCRHPLALAACRAVLLHLRENSPTIQEKVNQLTHRLATEVNQFFQEIGIPIRVVNFGSLFRFEPFGAYSIFLQPIELPLFYYLLNLKGIYTWEKRVCFLSTCHTNKDIDKVIVAVKEAITELQQAGFFANAKRPQVKKEEKKPLSEDEDGRGHLPSLNQSFPTSEAQRQLWLLAELDRNASASYNVTTSLELLGSLDVYILEKTINQVINRHEALRTKIIEQGELQEVVNEVNIKLNLIDFKDEDNPEATALALRSQFSQKPFDLSIAPLFAVILMRLKPDHYLLSLKTHHIVADGWSLGLILQEIGQLYSSQNNTTKEVLTPPMQFRQYLTLRAQETQSPQMLEHRDFWLKTYQEDLPTFELPTDFPRPAVKTYTGGQESQVIPSEVGQNLQKVGRKNKATLFMTMFAAYTAFLRRISGHRDLVIGIPISGRQIEGSDNLVGFCSQFLPLRIQVDATTSFIEHLQHTKQTLIDAFRHQSYTLEDLLAALQLPRDFSRSPLISVSFNMDPSLTLPEFKDLKVSLPPSPIGYTPFDLGFNLIELNDNLIIYCNYNTELFKKETIKQFIESFEILLRGIIDDANHLLYQLPLLTPVQQEKLLRQLTGKTRKLPEKATIIDDFVAQVKLTPNAPALIAGKINLSYQELNEKVNRLTHYLQQEYQLGVGKVIGVMLQRDHNLIIGILATFKTGATYVPIDSQYPHSRIEFILKDSGCHVCLTESNFISKLPEKMQKICLDKIDPIVEKYDKDEPKIFRNSSQTAYIFYTSGSTGNPKGVMGCHISILNVIQSLRLTFDLDKHPEWRYIFTAAVTHDPSIRNIFLPLTIGASLYMYEIKYIGHLVSFLQENQINALHTTPSIYREILGLLEPGETISSLKYISVGGEKLDRETALALRKRFPAEIVSNVYGSTETCVGVSQYEIKENLDSEIPLGQVFHNNRLGVLDEFNNPVPLHVIGEICVEGAALASGYHNQPEMTQEKFKPSFLDETKTLFRTGDLGKQTAPGIIEFMGRKDNQVKVNGYRIDPGEIEYQLTRYAPIERAIVLPVQVNNQTQLSAYCQTDKTLEIAEIRELLAKFLPVYMIPSYFIFLKQFPLTRHGKLDLHSLRELRETGKSLVNSNYVAPRNHLESNLVSIWEKILSKHPIGIFDNFFEIGGHSLLLSRVVTRVHKELNVSVKLADFFKVPTIAGLATLISQTQYNYQEPISAIPPQKSYPMSHGQRRLWALEFLDQNHNAYGMPSAYQFKGNLNIDAFENAFQQLIQRHEILRTTFTLINNQPRQVVHNQMNFVIKQIDLTAYVSTEQENLIEESISHNAKTTFDLEVGPLLKVNLLKLSQENYIVLFNMHHIIFDGWSAGVLIKDFLTHYHAYGQENSQLMPPLRIHYKDYTSWQESQLETLKLQGQRDYWLAKLTPVPVRLNLPVDYPRPPVKSFQGNTITWQPEPELIDTFEKLVKAQEASLFMGLVSLVKSFLFRYTEQNEITIGSAIAGRNHPDLEDQIGFYVNTLVLRDQITDHDSFTDVLSKVKTTTLEAYDHQDYPFDQIVSDLNLQRDPSRNALFDVAIVLQNNQNVDLALDGITVNSIDPKMITAKFDLEFIFVEEEELYLKLIYNTDIFIHERILLIIDLFKNWLEQVLKFAHEPLINLSLASSENLTQEGQELFTEDFNF

SEQ ID NO: 11842 - protein, 278 aa, Bradyrhizobium japonicum USDA 110
MTTRIDIRFAELAKQGRSAFVTFLMAGDPDPATSLEIIKALPKSGADVIEIGMPFTDPMADGPSIQAAGLRALKAGMTLKKTLELVRGFRKDDNATPIVLMGYYNPIYIYGVDKFLVDAKSAGVDGLIIVDLPPEEDDELCLPAMKAGLNFIRLATPTTDDKRLPAVLANTSGFVYYVSITGITGAAAADSSAVSEAVARIKRHTKLPVCVGFGIRTPETARAIASHANGAVVGTALVDALKNSLDADGRATAKTVNAVAELTASLAQGVKGAQQAAE

SEQ ID NO: 11843 - protein, 484 aa, Synechococcus sp. PCC 7002
MTFSFDSWFRGLSPRLSYPFRRQGRLLLLACMLPLLWQGVAIAQGSLGEIPPAVQVTLDTLWVVFAAMLVFFMNAGFAMLESGFCRAKNTVNILAKNLIVFALSSLAFWAIGFALMFGDGNAVLGWNGFFLTGADNSPLTGSAYSGIFSSLSWAGIPLYTKFFFQLAFAGTAATIVSGAVAERIKFASFVIFSLFLVGFSYGITGHWVWGGGWLATLGFYDFAGSTVVHSVGGWAALMGVILLGPRLEKFAGDRINAIPGHNMSTATLGGLILWLGWFGFNPGSTMAADPDAISHIIVTTNMAAAAGAIAATITSWIQFGKPDLSMIINGVLAGLVGITAACAYVNVPSAIVIGAIAGVIVVFSVLTFEGLRFDDPVGALSVHLVCGIWGTLAVGLFSVGGDIYPWYAADAGPSAGLLFGGGVAQLLSQFIGVVVVGMFTAGFSFAIWLVLELSMGLRVSKEEELEGLDIGEHGMEAYHRFFRE

SEQ ID NO: 11844 - protein, 239 aa, Bacillus amyloliquefaciens
MKRVLLILVTGLFMSLCGITSSVSAQTGGSFFEPFNSYNSGLWQKADGYSNGDMFNCTWRANNVSMTSSGEMRLALTSPSYNKFDCGENRSVQTYGYGLYEVRMKPAKNTGIVSSFFTYTGPTEGTPWDEIDIEFLGKDTTKVQFNYYTNGAGNHEKLPDLGFDAANAYHTYAFDWQPNSIKWYVDGQLKHTATTQIPAAPGKIMMNLWNGTGVDDWLGSYNGVNPLYAHYDWVRYTKK

SEQ ID NO: 11845 - protein, 394 aa, Candida tropicalis
MATIFLFTKNVFIALAFALFAQGLTIPDGIEKRTDKVVSLDFTVIRKPFNATAHRLIQKRSDVPTTLINEGPSYAADIVVGSNQQKQTVVIDTGSSDLWVVDTDAECQVTYSGQTNNFCKQEGTFDPSSSSSAQNLNQDFSIEYGDLTSSQGSFYKDTVGFGGISIKNQQFADVTTTSVDQGIMGIGFTAVEAGYNLYSNVPVTLKKQGIINKNAYSCDLNSEDASTGKIIFGGVDNAKYTGTLTALPVTSSVELRVHLGSINFDGTSVSTNADVVLDSGTTITYFSQSTADKFARIVGATWDSRNEIYRLPSCDLSGDAVVNFDQGVKITVPLSELILKDSDSSICYFGISRNDANILGDNFLRRAYIVYDLDDKTISLAQVKYTSSSDISAL

SEQ ID NO: 11846 - protein, 174 aa, Synechococcus sp. PCC 7002
MVATVSLDAVLHKHRIRPTIQALQSEIVQWRRQIHQKPELAFRENLTAEFIAHKLTAWGIPHQTGIAETGIVALIEGHQKGKVLGIRADMDALPIQEENEVDYRSQHPGVMHACGHDGHVAIALGTAKYLQENRDSFRGAVKIIFQPAEESPGGAKPMIQAGVLHNPDVDAIIG

SEQ ID NO: 11847 - protein, 112 aa, Pennisetum glaucum
LEYMDGGSLSDFLKTVKTIPEPYLAAICKQVLKGLMYLHHEKRIIHRDLKPSNMLINHMGEVKISDFGVSAIIASSSAQRDTFTGTYNYMAPERISGQKHGYMSDIWSLGLV

SEQ ID NO: 11848 - protein, 466 aa, Lactococcus lactis
MLYGKENRDEAEFLEPIFGSESEQVDLPKYKLAQQSIEPRVAYQLVQDEMLDEGNARLNLATFCQTYMEPEAVKLMSQTLEKNAIDKSEYPRTTEIENRCVNMIADLWNASEKGKIYGTSTIGSSEACMLGGMAMKFSWRKRAEKLGLDINAKKPNLVISSGYQVCWEKFCVYWDIEMREVPMDREHMSINLEKVMDYVDEYTIGVVGIMGITYTGRYDDIKALDNLIEEYNKQTDYKVYIHVDAASGGLYAPFVEPELEWDFRLKNVISINTSGHKYGLVYPGVGWVLWRDKKYLPEELIFKVSYLGGELPTMAINFSHSASQLIGQYYNFVRYGFDGYKAIHERTHKVAMYLAEEIEKTGMFEIMNDGAQLPIVCYKLKENSNRGWNLYDLADRLLMKGWQVPAYPLPKNLENEIIQRLVIRADFGMNMAFNYVQDMQEAIDALNKAHILFHQEPENKTYGFTH

SEQ ID NO: 11849 - protein, 307 aa, Nostoc sp. PCC 7120
MSIIVFGSINIDLVATAPKLPGAGETLLGEDFFKVPGGKGANQAVALARLGVPTQMVGRVGAQSFGAELMQNLQDAGVQTDNIFVDETASSGVAMITVAHNGENQIVVIPGANGRVNQVDVERLSRILPTATALLLQLEIPVPAVIAAAQAARSNNITVILDPAPAPSDLPTELYSFVDIITPNEVEAGQLVGFPVDGEDAARKAAGVLLQKGVKSAIVKLGAKGVVCATNKETFFVPAFSVDTLDTVAAGDAFNGGLATALYSGLSLHQAVIWGAAAGALAATKLGAQTSLPDKLTFEAFLKERVL

SEQ ID NO: 11850 - protein, 256 aa, Staphylococcus aureus subsp. aureus MSSA476
MAKESKSANEVSPEQINQWIKEHQENKNTDAQDKLVKHYQKLIESLAYKYSKGQSHHEDLVQVGMVGLIGAINRFDMSFERKFEAFLVPTVIGEIKRYLRDKTWSVHVPRRIKEIGPRIKKVSDELTAELERSPSISEIADRLEVSEEEVLEAMEMGQSYNALSVDHSIEADKDGSTVTLLDIMGQQDDHYDLTEKRMILEKILPILSDREREIIQCTFIEGLSQKETGERIGLSQMHVSRLQRTAIKKLQEAAHQ

SEQ ID NO: 11851 - protein, 489 aa, Triticum aestivum
  misc_feature (17)..(17): Xaa can be any naturally occurring amino acid
  unsure (1)..(489): unsure at all Xaa locations
HASGRNQSQRPGMAPLXLTLDALLFNMIGGQLKRFAKARKDLLVAVNEIVRHMFDEIDYVLEGGTAERFAILYSQGSGGEGRTSIKVPKVYWTYTRKSILALEWIDGIKLTDAERISKANLNRKKMIDEGLYCSLRQLLEDGFFHADPHPGNLVATEDGSLAYFDFGMMGDIPRHYRVGLIQMLVHYVNRDPLGLANDFHSLGFVPEGTDLHAVATALSVAFGDGRRQSNDFQGVMNHLYDVMYDFNFSLPPDYALVIRALGSLEGTAKALDPDFKVIESAYPFVIGRLLADPSPDMRKILRELLIRDDGSIRWNRLERLIAAISQQSSEESSKKPGDENTASSSDWRSFDMHSVVSATEDLFHFILSRKGWRVRVFLIQDIVKASDAFLQETTFPGIFEEEGNTGELNPERSRMIRRLINGVQSFRQAISLAPNAWTAMLIRVALKPESQRFILDVFLALVNYSHDKVPETCWICMSKYLNYLDRQWR

SEQ ID NO: 11852 - protein, 163 aa, Mesorhizobium sp. BNC1
MSALAQAAKSLLLKEFFGAVVLSMRQFFAPKATLNYPHEKGPLSPRFRGEHALRRYPNGEERCIACKLCEAICPAQAITIEAGPRRNDGTRRTVRYDIDMVKCIYCGFCQEACPVDAIVEGPNFEFATETREELYYDKDKLLANGDRWERELARNIALDAPYR

SEQ ID NO: 11853 - protein, 112 aa, Zea mays
MAAVETVVLKVAMSCEGCAGAVRRVLSKMEGVETFDIDLKEQKVTVKGNVKPEDVFQTVSKSGKRTSYWEGEATAPDAAAAPEAEAAPSTAAEAPPAAAPAAPEITPAKADA

SEQ ID NO: 11854 - protein, 1168 aa, Mycobacterium bovis AF2122/97
MSINDQRLTRRVEDLYASDAQFAAASPNEAITQAIDQPGVALPQLIRMVMEGYADRPALGQRALRFVTDPDSGRTMVELLPRFETITYRELWARAGTLATALSAEPAIRPGDRVCVLGFNSVDYTTIDIALIRLGAVSVPLQTSAPVTGLRPIVTETEPTMIATSIDNLGDAVEVLAGHAPARLVVFDYHGKVDTHREAVEAARARLAGSVTIDTLAELIERGRALPATPIADSADDALALLIYTSGSTGAPKGAMYRESQVMSFWRKSSGWFEPSGYPSITLNFMPMSHVGGRQVLYGTLSNGGTAYYVAKSDLSTLFEDLALVRPTELCFVPRIWDMVFAEFHSEVDRRLVDGADRAALEAQVKAELRENVLGGRFVMALTGSAPISAEMTAWVESLLADVHLVEGYGSTEAGMVLNDGMVRRPAVIDYKLVDVPELGYFGTDQPYPRGELLVKTQTMFPGYYQRPDVTAEVFDPDGFYRTGDIMAKVGPDQFVYLDRRNNVLKLSQGEFIAVSKLEAVFGDSPLVRQIFIYGNSARAYPLAVVVPSGDALSRHGIENLKPVISESLQEVARAAGLQSYEIPRDFIIETTPFTLENGLLTGIRKLARPQLKKFYGERLERLYTELADSQSNELRELRQSGPDAPVLPTLCRAAAALLGSTAADVRPDAHFADLGGDSLSALSLANLLHEIFGVDVPVGVIVSPASDLRALADHIEAARTGVRRPSFASIHGRSATEVHASDLTLDKFIDAATLAAAPNLPAPSAQVRTVLLTGATGFLGRYLALEWLDRMDLVNGKLICLVRARSDEEAQARLDATFDSGDPYLVRHYRELGAGRLEVLAGDKGEADLGLDRVTWQRLADTVDLIVDPAALVNHVLPYSQLFGPNAAGTAELLRLALTGKRKPYIYTSTIAVGEQIPPEAFTEDADIRAISPTRRIDDSYANGYANSKWAGEVLLREAHEQCGLPVTVFRCDMILADTSYTGQLNLPDMFTRLMLSLAATGIAPGSFYELDAHGNRQRAHYDGLPVEFVAEAICTLGTHSPDRFVTYHVMNPYDDGIGLDEFVDWLNSPTSGSGCTIQRIADYGEWLQRFETSLRALPDRQRHTSLLPLLHNYREPAKPICGSIAPTDQFRAAVQEAKIGPDKDIPHLTAAIIAKYISNLRLLGLL

SEQ ID NO: 11855 - protein, 308 aa, Pasteurella multocida subsp. multocida str. Pm70
MGKIWVLGDAVVDLIPEGENTYLRCAGGAPANVAVGIARLGATTGFIGRVGDDPLGRFMLNKLQQENVCTQYMHLDPKQRTSTVIVDLKEGERSFTFMVNPSADQFLELSDLPHFNPNDWLHCCSIALINEPSRSSTFAAIHRIKAEGGFFSFDPNLRESLWNSPAEMKTVVNQVVALADVLKFSEEELLFLTDSDTLSDATAKLTQHYPDKLIIVTLGKLGATYYLQGKSQLVSSKKALIPVDTTGAGDAFVSGLLFGISQVKNWQNPTALVEIIKQANACGALATTAKGAMSALPNKQQLDAFLAE

SEQ ID NO: 11856 - protein, 571 aa, Candida albicans SC5314
MTIDITTTKSVGAGRGSTALSSSSSSSSGEDTIKHGRSDSIDESTLNQEGCALTSTISNSSNNSNNNSNNHTSYFNKRRKSKASAEHFNTVYHQYNKCFQNYYHCYQYLKPNCQYVTSVKPSVNHWQLRDLLKFNQSNNQVYYTKDDAIYSCDLDSFNVNEYIKFNYYPRCFDHVDDYIVTGGLLTTSSKMFSLNLQNLTYDSPNATTNTSGSTNYYNNNTINSLSSASIRRVSKGLFSFYNPELKQLNTVKVGEMINNDVTLYKSSNNHFQSYICNNDTFLYCLDINQSEFKCLNKINCEPNTSLNNVVKNPQSEKILTATGDSSSIFLIDPTMGKVVKTIDSKQDSGFTCAYHSSGMVFNTVHQNGVSLIYDLRMMKDVVQIHSTRPGHQSGAFRAAKFSNDLNDLLIISEHVGRVHIIDLRKLNNVDDHQVIVLPAALNEYIDNDEADSDKQREQSEFNKPLVYDYLYAKNNKLFNTSQHSSSLMLSTSSSSSSTSTSSAMVNISYSPTSRCEDSYQQSSRHLHGELELSGIEFTDDSKILIGCQDSGMLVWDVNSIARRSIGSCDFV

SEQ ID NO: 11857 - protein, 316 aa, Chromobacterium violaceum ATCC 12472
MSNEIDILDEDDILDEEGGEENAAEAEAEESSESTAVFEDVVADVTQIYLNDIGNNALLTPQEELALARRVVAGEFEARQKMIEHNLRLVVNIAKHYINRGLALLDLIEEGNIGLMHALEKFDPERGFRFSTYATWWIRQSIERAIMNQSRTIRLPVHVIKELNVYLRASRHLESQIGREPSVEEIAHLVGKPVEDVRKVLNLNERMASLDAPLDIDPMLSIGESIPDEQHEEPELQLHNSQLEMFVHDWLSQLNEKQRLVIERRYGLNGYEICTLEELAASLNLTRERVRQIQIEGLEQLRRILRRKGISRDFLL

SEQ ID NO: 11858 - protein, 369 aa, Burkholderia sp. 383
MPDPILLTPGPLTTSATTRHAMQHDWGSWDAAFNQLTASVCADLVAIAHGGDEYVCVPMQGSGTFSVEAALGTLVPRDGVVLVPDNGAYCARILKILGRLGIEAIALPFGEDAAVDPAAIEAAFAREPRITHVAQVHLETSAGVLNPLDDIAAVCRRHGKRLIVDAMSSFGALPITLAGSGIDALISASGKCLEGVPGMGFAIVRREALDASEGNSPSLALDLHDQYAYLLKTGQWRFTPPTHVIAALRAALDQYLAEGGQPARGARYVDNCRTLVESMHALGFTTFLDASVQAPVIVTFHAPDHPAYDFRRFYDAVRDAGFILYPGKLTQLETFRVGCIGAIDSNDIRRAVAAIAQAVESLGIAVQRA

SEQ ID NO: 11859 - protein, 242 aa, Pinus resinosa
MGRGRVELKRIENKINRQVTFSKRRNGLLKKAYELSVLCDAEVALIIFSSRGKLYEFGSAGMLKTLERYQKCSYVLQDATVSDREAQNWHQEVGKLKARVELLQRSQRHLLGEDLGPLSIKELQQLERQLEVALTHVRSRKTQVMLEMMDELRRKERILQEVNKSLRKKLQEAEGQAFNAMQPPPHAWDSHAVANNAYAMQHPSNAVDCEPTLQTGYQYAPPESSMPRHEQAQNNYMQGWMV

SEQ ID NO: 11860 - protein, 471 aa, Triticum aestivum
  misc_feature (333)..(333): Xaa can be any naturally occurring amino acid
  misc_feature (401)..(401): Xaa can be any naturally occurring amino acid
  unsure (1)..(471): unsure at all Xaa locations
MGATGDSEVAAAEGAAAGCRARAALLGAYELGRTLGEGNFGKVKQARHRATGEHFAVKILDRGRVLSLRGADDQVRREIATLTMLAHPNVVRLHEVAASKTKIYMVLEFVNGGELFDRIAIKRKLSEREGRRLFQQLIDGVSYCHGKGVYHRDLKPENVLIDRKGNIKISDFGLSALPQHLGNDGLLHTTCGSPNYIAPEVLQNRGYDGSLSDIWSCGVILYIMLVGHLPFVDRNMVVLYQKIFKGDTQIPEWLSPGAQNLLRRILEPNPMKRINMAEIKIHEWFQKDYIPAAPYDDDDEDVRLGAILPIKQQISEAPGDKSTHQMNAFQLIXMASSLDLSGLFEEEGVSQRKIRFTSAHPPKDLFDKIEVSATQSGFHVQRAHSKLKITGNCNGPNNPHXFLVCAEVFVLGPSLHVVELRKSHGDTAVYRQLCDRISSDLGIDKIFGMGSLFDDNLPGFDSRAATPLVAL

SEQ ID NO: 11861 - protein, 532 aa, Yarrowia lipolytica CLIB122
MSKELYANSKDDAVYSTSFGVPFPHHPYSAQRAGPTGPLLLQDTYLIDALAHFDRERIPERVVHAKGGGAHGYFEVTDDLSDITYAEPFQKAGYKCPVTVRFSTVGGERGSADSARDPRGFSIKHRTDWGNWDMVANNTPIFFIRDPIKFPHFIHTQKRDPQTNLGAGPDASHFWNYLTQNPESLHQITYMFGDRGTPDGWRHMNGYSGHTFKFISKEGKITYTQFHYITDQGVKNLSAEKAGELAGANPDSSQQDLFEAIDNGDYPSWTVYVQTMTPEQAEKFRYSILDLTKVWSHKEFPLRKVGKFVLNKNADNYFEEIEQVAFSPSNLPNGLEASADPVLQSRLFSYPDTHRHRLGPNFNQLPVNQPRTFQKGSGCPFLAGNFQRDGNMAINNQGNRPNYLSTIRPIQSVSVPDEDFKSTHNYTGVVTKKMEDESLSVQTEEAKKHDEKIWEGASYIYVSGIQDIDAEQPRALYEKVYDDAAKARFIENVVGHASSIKQPGLKEQVAKYFGQINDDLGQKVAKGLGVSY

SEQ ID NO: 11862 - protein, 485 aa, Candida tropicalis
MAPTFTNSNGQPIPEPFATQRVGQHGPLLLQDFNLIDSLAHFDRERIPERVVHAKGSGAYGVFEVTDDITDVCAAKFLDTVGKKTRIFTRFSTVGGELGSADTARDPRGFATKFYTEEGNLDLVYNNTPVFFIRDPSKFPHFIHTQKRNPETHLKDANMFWDYLTTNEESVHQVMVLFSDRGTPASYREMNGYSGHTYKWSNNKGEWFYVQVHFISDQGIKTLTNEEAGSLAGSNPDYAQEDLFKNIAAGNYPSWTCYIQTMTEAQAKEAEFSVFDLTKVWPHGKYPMRRFGKFTLNENPKNYFAEVEQAAFSPAHTVPHMEPSADPVLQSRLFSYADTHRHRLGTNYTQIPVNCPVTGAVFNPHMRDGAMNVNGNLGNHPNYLASDKPIEFKQFSLQEDQEVWHGAATPFHWKATPADFKQATELWKVLKKYPNQQEHLAHNVAVHASAADAPIQDRVIAYFTKVHPDLGDLIKKEILELSPRK

SEQ ID NO: 11863 - protein, 513 aa, Pseudomonas aeruginosa PAO1
MGHSVAGVCLEEPAVLTAFPSLLHPQDPPQQRDRILFVTAELSDFVKVGGLGDFSAALPRVLKREHSVRVLLPGYRQVLERCRDLRIIGSLPGRAAIPPCEIGLVTLDDGLEVMLVLCPLLYEREGTPYMDDQGNDWPDNHLRFARLCLAAAEIAGGRGAQGWQPGLVHANDWPSALTPAYMAWNGVRTPSLFTIHNLAYQGLCDLQCSAELGLPDEALSHESMEFHGRLSFLKAGIAHAHHITTVSETYAQEITTPEYGCGLHGILKYKVEKRQLSGIVNGIDDSWQPHCDPHLVACFSARQWAGKRANTRYVEERFGLEPGKGPLFAVVSRLVQQKGIDLTLEISDALLQAGGRLVSIGRGEPNLEKAMLELARRHPGQVGVHIGFDETEARRIYAGSDFLLMPSRYEPCGLSQLYAQCFGSLPIARCTGGLADTIVDGVTGFLFREETAQSYLDAVMRAINVYHCPSLLNAMRCKAMAAPMFWSDSVEPYNRLYRRLLRNTAPALRGVRQ

SEQ ID NO: 11864 - protein, 344 aa, ASPERGILLUS NIDULANS FGSC A4
MTIGVAIIGSGIFAREQHLPAIKEAPMFSLKAIYSRSLKSAQGLAEGLEGVDLYSDDSGAGKSYQDLLARQDIGAVILALPIVAQPAYIKEALAAKKHVLSEKPIAKDLATAQDLMAWYNDNANVDKSKTFWGVAENFRFIRKWLKTAEEVQKLGGVKTFRVVVRNKVGTEGKYFSIDTPWRKIPEYQGGFLLDGGIHTVAGVRLILGRGKNSLKSLTAQTSQLQEHLPPIDTVDALLTTASGAAGVFSLSFGSEFKSFVLEFTCEKGVVSLVDDQLTVNGVATEIPFEGVGVKEEVKAFGESIVNGELNKKLVPDEALADLEVLEMMFRSGEDGGRKTLKLQD

SEQ ID NO: 11865 - protein, 635 aa, Lotus corniculatus var. japonicus
MCGICCVIGVPAGAESIRSTVLDRAKRIRHRGPDWTGVYAKGKNIIVHERLSIVDVETGNQPLKSADGKQVLVCNGEIYNHLQLRQSLKAPVQFATNSDSECILHLYNERGVGFVNSLNGIFGFVLIDEAKDTFIVARDHEGIIPLYYGWDETGALWVASELKALHDVCVRFEEFPPGHVLHGKVGSAGKLEKWYQPVWHDEAYVPAATAACDIKGLRESLEAAVERQMMTDVPYGVLLSGGLDSSVISAVAVRVAAKRAAAKADSKHTELGHVDPKSVVHSFSVGLKGSPDLKAAREVAAFIGTEHHEFVFTVDDGINALRDVIYHLETFDTTTIRASTAMYLMSRKIKALGVKMVLSGEGSDEVFGGYLYFHKAPDRVEFHKETVRKLKALNKFDCLRANKSTMAWGLEARVPFLDKEFLDFAMTLDPTHKMCGKHAGGRIEKWIVRKAFEGYLPPAILWRQKEQFSDGVGYSWIDSLKAFADAKVSDAQLAAAAFKFPENTPLTKESYLYRSIFETHYPEPAARACVPGGPSVACSTPAAIAWDAAFQKMADPSGRAVAGVHADAYAVAADDKTPDTSADAKHGTAAEHKASGATRAPFIAAANGIKCSAEAALPHALPKPVALASGKAEAE

SEQ ID NO: 11866 - protein, 387 aa, Tropheryma whipplei str. Twist
MPVKIKTQSRGSDKEAFAGAPSTSGASGAVLDEDLSTDPASHISAQATASDTDVASKGSEGDFEAIVLADTKDDESTPASPVISGATADPVKDYLKQIGKVSLLTADEEVSLAKRIEAGLFAEEKLSESGDLAPKLKRELRWVVRDGQRAKDHLLAANLRLVVSLAKRYTGRGMQFLDLIQEGNLGLIRAVEKFDYVKGFKFSTYATWWIRQAITRAMADQARTIRIPVHMVEVINKLSRVQRQLLQDLGREPTPDELGRELDMPPERVVEVQKYGREPISLHTPLGDEGDSEFGDLIEDVDAVAPDDAVGFSMLQQQLRLLLDSLSEREAGVIRMRFGLDDDMPKTLDYVGEYFDVTRERIRQIEAKTMAKLRHPSRSQCLRDYLG

SEQ ID NO: 11867 - protein, 287 aa, Glycine max
MSEALEDVPSMKGGCEEEEEGLNLKATELRLGLPGCESPEREGAFRSVVVSGAKRGFSDAIDENWNGGSEKDAALFSPRGAVSVSAAKSLTLTATDCTNQPTALGASVLKETVPRSPKPLHEKKPQISAPAAKAQVVGWPPIRSFRKNSMASQPQKNDTDAEAKSGCLYVKVSMEGAPYLRKVDLNSFTTYKDLSLALEKMFSCFTLSQCGSYGVSSRENLSESRLMDLLHGSEYVLTYEDKDGDWMLVGDVPWEMFTESCKRLRIMKSFEAIGLAPRAMEKCKSRN

SEQ ID NO: 11868 - protein, 456 aa, GIBBERELLA ZEAE PH-1
MSSKSRWADTEEDARLDAKLKEEKRRKKAEKARKLEEEKKLQDTAKQSNLEADDDRPSKRRRITPEPGAKQDEKLPPAKLLRFPTGSWGKSRSVENYEKLNDIEEGTYGWVARATNKATGKVVALKRLKLEPQDRNGLPVTGLREIQILKDCQHRNIVTMEEVVVGDDVSRPDNSLFLVLEFVEHDLKSILEDMPEPFLSSEVKRLLLQLTSGIAYLHDNWILHRDLKTSNLLLNNRGQLKIADFGMARYVGDPPPKLTQLVVTLWYRAPELLLGAKTYDAAVDMWSVGCIFGELLTREPLLQGKNEVDQVSRIFELCGVPTEETWPGFRRLPNARSLRLPKTQVATGSVVRARFPSLTSAGAGLLGDLLSLNPERRPSAQEMLQNEYFRQDPKPKPESMFPTFPSKANQERRRRVEPHAPVRGGQAASLGDADLSGIFQGRDKEEKGAGFQLRMI

SEQ ID NO: 11869 - protein, 591 aa, Solanum dulcamara
MGTPKEEATDEVFSENLEQKPDPDPATSKSELKETTSKSISGELQKRLSQCDKGINMSQSNQEAISLSRVQENQSENVQKQLGLKSEADASGSSQLSSLPKDSDAKSRGSESSVKDKVVSVLSGMASDSSDQMQTSNMEVFVSQSDQQRVSYQIKREKALDKLQPRRNPDTSVHGLTSDQGMTLSKAPEKPSEDGYNWRKYGQKLVKGNEFTRSYYKCTYPNCLAKKQVERSHDGHITDIHYIGKHEHPETLSVPQMSPELVLPLQMIQQDIPIITALEAEGEKSTTPRETCEPSKPSEVPLALDVVSACGGVKVTPLKQHKLENEVDKDDVPDSKRQKKDIVATDYTPPVKSHSEPRHIVQTMSEVDIINDGQRWPKYGQKIVKGNPNPRSYYRCSVAGCPVKKHVERASHDPKLVITTYEGHHVHDFPTSKAIGQISAAPDTGTAGVREDSRIESGESKHVVESKSESGENKHIREPKTEAGGNKRVGESIPESGENKHIREPKTEAGENKHIGESRIESGGNKHVEKSKLELGGNKHVGESIPKPGGNKHVGESIPESGGNKHVGESIPESGENKHVGLDMAVHIGAN

SEQ ID NO: 11870 - protein, 450 aa, Tropheryma whipplei str. Twist
MDYDLIVLGAGSAGYATAIRATQLGMKVALAEGDKVGGTCLHRGCIPTKSLVQCAKAAHIAKNASKFGVINSFSGVDINAVNVFKNGIVESKYRGLQSLLRSYGIHVYPNFATLSSQNSVRIGTEDITGKNIVIATGSRPKGIPGLSGGCIFDSDSILEIDHLPSSLAIIGGGVIGVEFASIFNYLGVDVSILEAQETLIPSEERGVSKQLERVFRRRGIKLYLGHKIMDVSQTDGVVVSLDSNEKVNADLLLVAIGRAPATDAIGKVGIEIDGGAISVDEKLRTSVPNVFAAGDVVGGLQLAHRGYQQGIYLAEQIAGLDPSAVADINIPRVIYTSPEVASVGYTEAGAAEIYGVNEIVTYEYNLAGNAKSSIMGAAGSIKVVQHKNKDVLGVHMVGDGVSELVSEAQLIVNWEANPSDVASLIHPHPTQAEAIGEAMLALAGKPLHGI

SEQ ID NO: 11871 - protein, 154 aa, Arabidopsis thaliana
  misc_feature (32)..(32): Xaa can be any naturally occurring amino acid
  unsure (1)..(154): unsure at all Xaa locations
MPVPLAPYPTPPAPALAPSYNTPPANGSTSGXSQLVCSGCRNLLMYPVGATSLCCAFCNAVTAVPPPGTEMAQLVCGGCHTLLMYIRGATSVQCSCCHTVNLALEANQVAHVNCGNCMMLLMYQYGARSVKCAVCNFVTSVGGSTSTTDSKFYN

SEQ ID NO: 11872 - protein, 363 aa, Nocardioides sp. JS614
MSATASADVFELGSEHEQVVFANDPATGLKAVIAIHSTALGPALGGTRFYPYASTADAIHDVLNLSRGMSYKAALAGLDLGGGKAVIIGDPATQKTEPLLRAYGRHVQSLGGRYFTACDVGTFSADMDVIARECSFVTGRTVAHGGAGDSSVLTAYGVFQGMRAAATVAWGSASLDGRVVGVAGVGKVGHHLVRHLVEDGATVVVTDPYAPSIERVRAEHPSVRVVGSTEELVASTLDVYAPCALGGALTDEVVETLSARIVCGAANNQLAHPGIEKALEERGVLYAPDYCVNAGGLIQVADELEGFSFERAQQRATGIFDTTLSVFERAASDGVPPAIAADRLAEQRMREVSRLRGMWMPQR

SEQ ID NO: 11873 - protein, 231 aa, Staphylococcus aureus subsp. aureus MSSA476
MQSKILIIEDDHAITHLLDVALTLDYYNVTTADNATQAHFKIQIDKPDVILLDLGLPDKDGLCLISEIRQHTDIPIIVISARQEEQTIIQALDNGANDYMTKPFNVDELRARIRVIERIAKSHQETNIVFTNGLLSIDFGSKSVVINNQEVHLTPNEFSLLELLSNHKGKVLTYEMILKRIYGYVNKTEMPSLRVHMTSLRQKLSQCHEDAKDIIKTHPRIGYQMLQWKEK

SEQ ID NO: 11874 - protein, 491 aa, Nicotiana tabacum
MGFENEKNSSILSKLATNEELGENSPYFDGWKAYDNDPFHPLKNPNGVIQMGLAENQLCFDLIEEWIKRNPNASICTTEGIKSFRAIANFQDYHGLPEFRSAIAKFMEKTRGGRVTFDPERVVMAGGATGANETIIFCLADTGDAFLVPSPYYPAFNRDLRWRTGVQLIPIPCDSSNNFQITTKAVREAYENAQKSNIKVKGLILTNPSNPLGTTLDRDTLKNLLTFTNQHNIHLVCDEIYAATVFNTPQFVSIAEILDDETSHCNKDLVHIVYSLSKDMGLPGFRVGIVYSFNDAVVNCARKMSSFGLVSTQTQYLLAEMLSDERFVSNFLTESSKRLAKRHKHFTNGLEEVGIKCLRSNAGLFCWMDLRPLLKESTFDSEMSLWRVIINDVKLNVSPGSSFDCQEPGFFRVCFANMDDETVDIALARIRSFVGVKKSGDESTPILMEKKQQWKKNNLRLSFSKRMYDESVNLSPLSSPIPHSPLVRART

SEQ ID NO: 11875 - protein, 444 aa, Haemophilus influenzae Rd KW20
MTNNNKTMEILMKSGDLNKYDLVKNALVLVLAGGRGSRLHELTDKRAKPALYFGGNRRIIDFALSNCINSDLNRIGVVTQYAAHSLLLHLQTGWSFLPQERGEFVDMLPARQQIDDSTWYRGTADAVYQNMAIIKNHYRPKYILILAGDHIYKQDYSVMLMDHVNSGAKCTVGCIEVPRSEAHEFGVMAVNENLKVKAFVEKPKDPPAMVGKPDVSLASMGIYVFDADYLYKMLEQEVNTPQTSHDFGKDVLPKCLEEGALYAHPFSRSCMGRNTEGEIYWRDVGTLDSFWQSNIDLVSENPQLDIYDQSWPIRGNPIQAYPSKFFYKHSNVHPVDNSLIGGGCVITDASISNSVLFDHIKIDAFSKVDHCVVLPQVKIGKNCVLKNCIIDRECEIPDGMQIGVDMEEDKKRFRISSTGKVILVTSKMLKILEGHEIGEEGHLD

SEQ ID NO: 11876 - protein, 319 aa, Chromobacterium violaceum ATCC 12472
MFTWLKNRLQRNGLTAYVTHPDCLQHNMGVGHPECPERLTAIRDQLMASQIFDSLQEIEAPEVSYEQLARVHPPRYVEYLEACAPSVGTFRMDPDTAMSPGTLKAARRAAGAVVKAVELVAEDKAPNAFCAIRPPGHHAESDKAMGFCFFNNLAVGVTHALAHYKFERVAVVDFDVHHGNGTEEILHDDPRVLMVSVFQHPFYPYSGDEPMGPNMHNVPLKAGSGGREFREAVENVWLPQLHEFQPQMLFISAGFDAHREDDMGSLGLTESDYEWVTRHLVQIADQYCAGRVVSVLEGGYDLSALGRSVAAHIRVLSDG

SEQ ID NO: 11877 - protein, 524 aa, Bradyrhizobium japonicum USDA 110
MISAITHTARLMRAAFVFAREGVFGSVDPSLVPPPGQLALKLARIVERRGPKHGPRLSRALTRMGPAYLKLGQFLATRPDVVGVIMARDLESLQDRLPPFSQAEAEAAIAASLERPLKDVFASLGPPVAAASIAQVHRGEVVRDGIRKAVAVKVLRPNVASRFRRDLSDFFYVAHKAETYSAEARRLRLIEVINTMSRSVAMEMDLRLEAAAMSEMAENTGDDLDFRVPTVDWDRTTHNVLTMEWIDGIALNDHKRLAEAQVDLPDLGRKVIQSFLRHALRDGFFHADMHPGNLFLDDTGRLVAVDFGIMGRLGMKERRFLAEILLGFITRDYRRVAEVHFEAGYVPAHHSVENFAQAIRAIGEPIHNRTAEEISMARLLTLLLEVTGLFDMTTRPELILLQKTMVVVEGVARGFDPRLDIWKTADPVVREWIERNLGPIGRVQGALTGGGDLARVLMRLPDIAQRSVAVLEQLETMTREGLRLSPESIAAMGRSEGRKNRWRTVALWIIAATFIGILIAVRNL

SEQ ID NO: 11878 - protein, 539 aa, Arabidopsis thaliana
MAGDGVENAKPPQKQEDLQPHPVKDQLYGITYCLTSPPPWPETILLGFQHYLVMLGTTVLIPTMLVSKIDARNEDKVKLIQTLLFVSGINTLFQSFFGTRLPAVIGASYSYVPTTMSIVLAARYNDIMDPQKRFEQIMRGIQGALIIASFLHILVGFSGLWRNVTRFLSPLSAVPLVAFSGFGLYEQGFPMLAKCIEIGLPEIILLVIFSQYIPHLMQGETCSNFFHRFAVIFSVVIVWLYAYILTIGGAYSNTEINTQISCRTDRAGIISASPWIRVPHPIQWGGAPTFNAGDIFAMMAASFVSLVESTGTYIAVSRYASATPIPPSVLSRGIGWQGFGILLCGLFGAGNATSVSVENAGLLAVTRVGSRRVIQVAAGFMIFFSILGKFGAIFASIPAPIVAALYCLFFSYVGAGGLSLIQFCNLNSFRTKFILGFSIFMGLSIPQYFYQYTTLETYGPVRTSATWFNNIINVPFSSKAFVSGILAFFLDTTLPPKDKTTKKDRGLVWWKRFKSFQSDNRSEEFYSLPLNLSKYFPSH

SEQ ID NO: 11879 - protein, 295 aa, Brassica napus
VDPRVRRILAVLGTLPCIVLIPGLFFIPESPRWLAKMGMTDDFETSLQVLRGFETDITVEVNEIKRSVGTSTKRSSTVRFVDLKRRRYYFPLMVGIGLLVLQQLGGINGVLFYSSTIFESAGVTSSNAATFGVGAIQVVATAISTWLVDKAGRRLLLTISSVGMTISLVIVAAAFYLKGFVSHDSDMYSMLSILSVVGVVAMVVSFSLGMGPIPWLIMSEILPVNIKGLAGSIATLANWFISWLITMTANLLLAWSSGGTFTLYGLVCAFTVVFVTLWVPETKGKTLEELQALFR

SEQ ID NO: 11880 - protein, 606 aa, Campylobacter lari RM2100
MGLADIMSVLSTHLVHNPKDPTWLNRDRLVFSGGHASALLYSFLHLSGYDVSLDDLKNFRQLHSKTPGHPEIFTPGVEIATGPLGQGVANAVGFAMAAKKASLLLGEDIINHKVYCLCGDGDLQEGISYEACSLAGLHKLDNLIIIYDSNNISIEGDVAIAFNENVKERFRAQNFEVLEIDGHDFEQIDLALKTAKQSQKPCLIIAHTKIAKGALELEGSHHSHGAPLGEELIKKAKEALGFDPQKTFEIPEDVKIRFGAAVELGDLAQAKWNQKVQNLDESKKALLKELLEPDFSKINFPDFKGKDLATRDSNGMILNAIAKALPGFLGGSADLGPSNKTELKDMGDFPNGKNIHYGIREHAMAAISNAFARYGLFLPYCATFFIFSEYLKPAARIAALMKIKHFFIFTHDSIGVGEDGPTHQPIEQLSTFRAMPNSLTFRVADGVENVKAWQIALKTNMPSVFVLSRQKLSALNEPVFGDVLNGAYLLEENENANFTLLASGSEVALCVKAAKILKEKGVSVNVVSMPCYELFIKQEKSYKDRILQGKVIGVEAANSNELYRFCDELYGIESFGESGKDKDVFEHFGFSEEKLSSYILSLCNEK

SEQ ID NO: 11881 - protein, 333 aa, Bradyrhizobium japonicum USDA 110
MSVKKKPLVVVTRKLPDSIETRMRELFDARINLDDTPMSADQIAEAARTADVLVPTVTDHITADIVNQPDCKLRLIANFGNGVDNIDVEAAHARGITVTNTPKVLTEDTADMTMALILAVPRRMIEGASILTEGKPWPGWSPTWMLGHRIGGKRLGIIGMGRIGQAVARRARAFGLQIHYHNRRPVAPKIAEELGATYWESLDQMLARMDILSVNCPHTPATYHLLSARRLKLIRKDAYIVNTARGEVTDEDTLIKLIEGGEIGGAGLDVYEHEPAVNPKLVRLAKAGKVTLLPHMGSATIEGRVEMGEKVIINIRTFLDAHKPPDRVLPSML

SEQ ID NO: 11882 - protein, 435 aa, Deinococcus radiodurans R1
MHFGGRVPLFLSCCRLHLSGVPMKPRVLGMILAGGQGSRLAPLTQKRSKPAVPFGSKYRIIDFAINNFINSGMFSVYVLTQYKAQSLTEHIQRGWRFGTFLSDYFITLVPAQMYRFEELGDAWYRGTADAVYQNMHLIDNFEADYVAIFSGDHIYKMNVEHMLEKHIETRADVTIAAYPMPQSQAHQFGVMQVDERWRVTEFHEKVPDPPTIPGQADLSLTSMGNYIFSRRALEELLEASISGQETGYDFGHNVIPRALSDGYHVQAYDFHKNPIPGQERPNTYWRDVGTLDAYFEANMDLVSVNPEFDIYNPEWPLRTSSEFSPPAKFVHESEGRKGQAFNSIMAGGAIISGGTVRDSVLGRNVRTHSYSLVESCVLFDDVQVGRHSHLRRVIVDKDVVIPPGTTIGLNREHDEQRGFTVTEHGVVVVPKGYVF

SEQ ID NO: 11883 - protein, 201 aa, Chlamydomonas reinhardtii
MLLTRKNVAVRPARAARRDVRAMSLLGNLFGGGSKPTSSTSNFHQLSALDIDKKNVDFKSLNNRVVLVVNVASKCGLTAANYKEFATLLGKYPATDLTIVAFPCNQFGGQEPGTNAEIKAFASARGFSGAGALLMDKVDVNGANASPVYNFLKVAAGDTSDIGWNFGKFLVRPDGTVFGRYAPTTGPLSLEKYIVELINSR

SEQ ID NO: 11884 - protein, 441 aa, Pseudomonas syringae pv. syringae B728a
MVNRLHGKSLTALLALGAFAPIAQAADAPVLNTGSTAWMVTAAVLVLFMCLPGLALFYGGLVRAKNMLSLFTQCFGIAGVVGVLWVIYGYSMVVDTSNMVEGQVSFNSFVGGLSRAFLAGMTPDSLVGDIPEGVFVTFQMTFAIITPALIAGAFAERMKFSAALLFMALWFTLVYAPVAHMVWGGAGALMHNWGVLDFAGGTAVHINAGVAALAACLVLGKRKGYQNTPMPAHNLSLTMAGAAMLWVGWFGFNIGSGGGLNGTSGIVMLNTQVGACAGILGWMFTEWFKVGKPSALGLASGALAGLVGITPACAYVGVGGALAIGVLCGVFCYLSVTVLKKRLGYDDSLDVFGLHGIGGMIGAILTGVFCVPALGGLVPDVSMGAQVIAQIKGVLFTTAYCFAVSWIILKAVQALIGLRAHESVEEMGLDLAEHNERAYNH

SEQ ID NO: 11885 - protein, 807 aa, Frankia sp. EAN1pec
PARTVDTLAIWGDRRTLAGQPPYRVEQAEDLATFTAYARLRREVFVDEQGLFSATVAGDLDEVDSDPRSIVLVARVVGGPDDGTVIGGVRLAPIWRGEDIGAWQGGRLVVAAAARGRYAGIGAALVRAACARAENEGVLRFDAAVQPDRARFFGRLGWMIAGTTTVAGRPHVLMRWPINRLAAVAASIKAPLATLLAGMRPGGPGFVGDDGAPVPGTDVVAACDAIVPSMVERDPYWAGWCGVLVNLNDLAAMGARPVGMLDAVAGPTASRVARVIGGLRAAAERYGVPILGGHTQLGVAAALSVTALGRSERPIPAGGGLPGHAVTLTADLGGDWRPGYSGRQWDSTSNRRTAELRALLDLPRRHRPCAAKDVSMVGIVGTLGMLAEASGCAAELDVAAVPRPAGATVGDWLTCFPGYAMLTADVDDRPVPAPSPATSQRCGRLLNGTGVTLRWPDGVLTPALSGPCDGAGPRVSADRGDGARGGPEPASHAVTIAAVTAPFTRDLDECLAAISRLVDGARRRGVDLLVLPEGALGGYLRALPPRGDDLAPRGGPPALDPDGPEITRLAAIAGDMVVCAGYAERDGRYRYNSAVCVHGDGVLGRHRKVHQPLGESLAYEAGRSFTAFDSPLGRMGMMICYDKAFPESGRSLALAGADIIACLSAWPASRTHAADDIAADRWRHRFDLYDQVRALENQVVWVSSNQAGTFGSLRFVGNAKIVHPDGSVLASTGTGAGMAVATVDVTAALRAARSGLNHLRDRRGASYEKQCLLAGKPYDPRRAARPAAPRPTAEHGSRPSRPAGPAH

SEQ ID NO: 11886 - protein, 343 aa, Vibrio parahaemolyticus RIMD 2210633
MKIKALSKLKPEQGIWMTEVDKPEVGHNDILIKIKKTAICGTDVHIYNWDEWSQKTIPVPMVVGHEYVGEVVAIGQEVRGFEIGDRVSGEGHITCGHCRNCRGGRTHLCRNTIGVGVNREGAFAEYLVIPAFNAFKIPDEISDDLASIFDPFGNAVHTALSFDLVGEDVLITGAGPIGIMAAAVAKHVGARHVVITDVNEYRLELARKMGVTRAVNVAEEKLEDVMAELGMTEGFDVGLEMSGNPAAFNSMLTTMNHGGRIALLGIPPSDMGIDWNQVIFKGLVIKGIYGREMFETWYKMASLIQSGLDLSPIITHHYKIDDFQEGFDVMRSGMSGKVILDWE

SEQ ID NO: 11887 - protein, 1287 aa, Nostoc sp. PCC 7120
MLEFNHLRLHNMHGSLVAKIASAIATLVSSSILIGWLLDIQLLKTFFWSSSAIMKPNTALCFTLCGISAWLLVTKPLGEPHFSQRHKPYKKLSRAFSVSTTIIAGLKICEYLFGWELGIDKLLLGDVLTTINTPYPGRMGLNTAINFLLIGIALELLIYPRNHRSYWYAQMLVLFTTVISLQVVVSYAYKVKFSYTINPNITSMSLQTALLFIVLCIGILSGRAEKGLMKIVFSDSYGGLIARRLLVAAIAVPLFLGWLILEGQRAGRYGPAFAVSVFAVILIVIFAIIIWQNAVVIELLSQQRDRAQETLKAYEEKLASLVDANIIGIIFSDIYGGIQQANEAFLMMVGYSQEDLLTGRLNWKNITPPEYIYLDEQGIAEAQVNPKGACTPYEKEYIHQDGSRIPVLIGYVLLGEKREESVAFILDLSERQQAQQKILQLNKDLQRRVVELQTLLDVIPIGIGIAEDPECQHIKINPAFAKQLQLSTDVNASLSAPPDQRPTTFKVFHEGRELLPAELPMQYSAAHGAEVLDYEVDIVHDNGEIIKLLEYVAPLFDEDGNTRGCIGAFVDITERKQAEELLRNEQKWLEDVLNLMPRPLLFIEPETARVTFANRAADELAGGEFPRGVAAEEYHTVYHFTDINGNPVPNEQMPGVRVARGERLEGLELDWHTNDEVLSLLIFADTLPAMHGYPATCVVVFQNITQIKQAEKALSLGYQRLKLLFSTANDLLSSQEPVALIDSCFQKLAQQIGLDVYLNYLVEDNPQSMRLASYRGICPELAQEIEFLRFGEAVCGTTAQERHSIALENVQQSTDPKTQLIRSVGINAYYSYPLIAQGRLLGTLSFGSRSRANFTDNQKGMMQAVCDQIAIAMERVELINSLQRQTEQLTEANRMKDEFLAILSHELRSPLNAILGWAQLLQARRLSEAQTAKGLETIERNAKAQTQLIEDLLDISRMIRGKLRLNVRTCNLIPIIETAIENINLAAQAKEIDLTFFLENPATENLPFQVSGDSERLQQVIWNLLTNAIKFTPSGGKVEVRLTKNPGCEQNELITNNYAQIQVIDTGIGINSSFLPYVFDRFRQADSSITRSHGGLGLGLAIVRHLVELHGGTVHVHSPGEEQGSTFTVKLPLLSENKATSIEPISPRGENLTPLPLCPSLLGVRVLVVDDESDSRDFISTVLEQCQAQVRAVATAKEALQIISQWKPDVLVSDIGMPEEDGYSLIRKLRSLPPEQGGNIPATALTAYARAEDRTRAIQEGFQLHLPKPIEPTELATVVASLIKRGQ

SEQ ID NO: 11888 - protein, 397 aa, Vibrio parahaemolyticus RIMD 2210633
MSSAFYQQIQQQIEEVKAEGLYKAERIITSQQQAAVKISTGEEVLNFCANNYLGLANHPALIEAGKAGMDEHGFGMASVRFICGTQDIHKELEQKLSKFLGKEDTILYTSCFDANAGLFETILGKEDAIISDALNHASIIDGVRLCKAMRFRYSNNNMEELEQQLIAAKEAGARHILIVTDGVFSMDGVVANLPAICDLAEKYGALTMVDDSHAVGFMGKTGAGTHEHHNVVDRIDIITGTLGKAMGGASGGYTSGKAEVIDWLRQRSRPYLFSNSVAPAIVNASIRVLDLLEESGDLRDRLWENAAHFRARMEAAGFTMGGADHAIIPIMLGDAKVAAEFAERALEKGIYVIGFSFPVVPKGQARIRTQMSAAHTREQLDRAIDAFIQVGKDMGII

SEQ ID NO: 11889 - protein, 279 aa, Sinorhizobium meliloti
MIKIAMEAPYLERDEEHALAQAWRNDNDQEARNKIAMSHMRLVISMAAKFRSFGLPMGDLVQEGHIGLLEAAARFEPSREVRFSTYATWWIRASMQDYVLRNWSIVRGGTSSAQKALFFNLRRLRARLAQGDRQLTSQAMHEEIAAALGVSLADVQTMDARLSGNDASLQAPIGSGDPDAGARLDFLASEAPLPDEQVSDLIDGERARRWLQVALGELSEREMKIIRARRLTEDGATLEELGVALGISKERVRQIETRALEKLRAALTAKAPALTASMH

SEQ ID NO: 11890 - protein, 373 aa, Vibrio sp. Ex25
MSIQSFIPPHRILMGPGPSDIYPQVLQALSRPTVGHLDPLFIGMMDELKQLLKYAFQTDNEFTIAVSAPGSAGMETCFVNLIEKGDKVIVCRNGVFGERMRENVVRAGGEVVIVDDEWGTPVSIDKVEQALEQHPDTKILAFVHAETSTGAVSDAQALGKLAKQHNALSIVDAVTSLGGVPLKVDEWQLDAVYSGSQKCLSCVPGLSPVTFSPAAIEKIQARTTPVQSWFLDQSLVLGYWSGEGKRSYHHTAPVNSLYALHEALLILKNEGLENAWARHQLMHEKLKNGLQKLGFEFVVDEAHRLPQLNAIYVPEGIDEAKVRAHLLETYNLEIGAGLGALAGKAWRIGLMGYGARPENVALCLKALEESLTE

SEQ ID NO: 11891 - protein, 415 aa, Kluyveromyces lactis NRRL Y-1140
MKVGELLESSGAGGSRSIIAYTNDKNAGFETEMDSILPSDDLKQGSLHSKNSHGNDVKIVPDEDEVITRRTVVKGHSNPEESVVISCGTPEIVGNGSFGVVFRTKVKETGEDVVIKKVLQDRRFKNRELEIMKLISHPNLIDLKYYFLEQSDQELYLNLIVDYMPMSLYQRLKEFISLHQPMDRYEIKIYMFQLFKSLNYLHQVVNVCHRDIKPQNILVDPDTLLLKICDLGSAKQLKPNEPNVSYICSRYYRAPELIFGATNYTTKIDIWSAGCVMAELLLGQPIFPGESKIDQLVEIIKVLGTPTREEICSMNENYSEHKFPQIRPIPLNRIFKKETQETIDLLYHIMKYDPNIRYSALQCMFNSTYFTDIVSNTGSDSNLSLIDSLPLLHFEESELQGLSSNDIYRLTGKLI

SEQ ID NO: 11892 - protein, 461 aa, Magnaporthe grisea 70-15
MREIISINGKRVSKQNSQDSSPHQPRTRHSSNTLYCLEHGIKPDGFLTDERKAADPDHGFSTFFSETGQGKYVPRTIYCDLEPNVVDEVRTGTYRSLFHPEQMITGKEDASNNYARGHYTVGKELIDQVLDKVRRVADSCSGLQGFLVFHSFGGGTGSGFGSLLMERLSVDYGKKSKLEFCVYPAPQTATSVVEPYNSILTTHTTLEHSDCSFMVDNEAIYDICRRSLGLERPNYENLNRLIAQVVSSITASLRFDGSLNVDLNEFQTNLVPYPRIHFPLVAYSPIVSAARAAHEANSVQEITMSCFEPNNQMVKCDPRNGKYMATCLLFRGDVVPKDAHAAVAMLKTKRSIQFVDWCPTGFKLGICFEPPQQVPNGDLAKVNRAVCVLSNTTAIADAWSALSNKFDLMYSKRAFVHWYVGEGMEEGEFSEAREDLAALERDYEEVATDSLGDEEGIEAEY

SEQ ID NO: 11893 - protein, 397 aa, Novosphingobium aromaticivorans DSM 12444
MSITPLMPVYPRCGVRPVRGEHCHLISEDGTRYLDFASGIAVNLLGHSNEHLIGAIQKQAATLMHVSNLYGSPQGEHLAQRLVDLTFADTVFFTNSGAEAVECAIKTARAYHSSVGNDHKYELITFKNAFHGRTMATISASKQEKMHKGFLPLLEGFKYVDFDDLEGAKAAMGPNTAGFLVEPIQGEGGIRDASDEFLKGLRALCDEHDLVLIFDEVQCGVARTGTLYAYEQYGITPDVMATAKGIGGGFPIGACLATEKAARGMVAGTHGSTYGGNPLAMAAGEAVLDVVANEEFLGEVRAKGERLRGRIEQFIGNYPDLFIGVRGRGLMLGLMMKVEPRPFVAHMRDNHQLLTVSAGDNTVRVIPPLVIDDSHIDEFMERLSAAAASYAPEAPVT

SEQ ID NO: 11894 - protein, 367 aa, Cucurbita moschata
  misc_feature (37)..(37): Xaa can be any naturally occurring amino acid
  misc_feature (64)..(64): Xaa can be any naturally occurring amino acid
  misc_feature (194)..(194): Xaa can be any naturally occurring amino acid
  misc_feature (215)..(215): Xaa can be any naturally occurring amino acid
  misc_feature (257)..(257): Xaa can be any naturally occurring amino acid
  misc_feature (281)..(281): Xaa can be any naturally occurring amino acid
  misc_feature (339)..(339): Xaa can be any naturally occurring amino acid
  unsure (1)..(367): unsure at all Xaa locations
ASHSRKFLDVRSEEELLSCIKKETEAGKLPPNVAAGXEELYQNYRNAVIESGNPKADEIVLSNXTVALDRILLDVEDPFVFSSHHKAIREPFDYYIFGQNYIRPLIDFGNSFVGNLSLFKDIEEKLQQGHNVVLISNHQTEADPAIISLLLEKTNPYIAENTIFVAGDRVLADPLCKPFSIGRNLICVYSKKHXFDIPELTETKRKANTRSLKEXALLLRGGSQLIWIAPSGGRDRPDPSTGEWYPAPFDASSVDNXRRLIQHSDVPGHLFPLALLCHDIXPPPSQVEIEIGEKRVIAFNGAGLSVAPEISFEEIAATHKNPEEVREAYSKALFDSVAXQYNVLKTAISGKQGLGASTADVSLSQPW

SEQ ID NO: 11895 - protein, 427 aa, Dechloromonas aromatica RCB
MNAPLLPSYISAQNIGPWHIFLQQVEQVAPLLDKSLWPWVETLRRPKRSLIVDVPIRLDSGEVAHFEGYRVHHNTSRGPGKGGVRFHQDVTLSEVMALAGWMTIKNAVVNVPFGGAKGGVRVDPRQLSISELEGLTRRYTSEISSMIGPDKDIPAPDMNTNAQVMAWMMDTYSMGEGRTVTGVVTGKPLSLGGSLGRQDATGRGVFVTAREAARKLNLPIEGARVAVQGFGNVGEASARIFAQAGARIVAVQDVSATLYCEAGLDIAALKRYLAENKTLLGAPGCEVIDNAAFWAVPCDFMVPAALESQINRYNAGQITARIVVEGANGPTTPEADVILAERGITVVPDVLANAGGVTVSYFEWVQDFSSFFWSEDEIYQRLERIMSEAFNAIWQLAEARQMSLRSAAFVIGCTRVLEARATRGLYP

SEQ ID NO: 11896 - protein, 243 aa, Arabidopsis thaliana
MYGQCNIESDYALLESITRHLLGGGGENELRLNESTPSSCFTESWGGLPLKENDSEDMLVYGLLKDAFHFDTSSSDLSCLFDFPAVKVEPTENFTAMEEKPKKAIPVTETAVKAKHYRGVRQRPWGKFAAEIRDPAKNGARVWLGTFETAEDAALAYDIAAFRMRGSRALLNFPLRVNSGEPDPVRITSKRSSSSSSSSSSSTSSSENGKLKRRRKAENLTSEVVQVKCEVGDETRVDELLVS

SEQ ID NO: 11897 - protein, 404 aa, Saccharomyces cerevisiae
MCERINFLGMSTEEQNGGGQKSLDDRQGEESQKGETSERETTATESGNESKSVEKEGGETQEKPKQPHVTYYNEEQYKQFIAQARVTVGSIVYKNFQILRTLGTGSFGRVHLIRSRHNGRYYAMKVLKKEIVVRLKQVEHTNDERLMLSIVTHPFIIRMWGTFQDAQQIFMIILKVERLFSLLRKSKDFPNPVAQIFAAEVCLALEYLHSKDIIYRDLKPENILLDKNGHIKITDFGFAKYVPDVTYTLCGTPDYIAPEVVSTKPYNKSIDWWSFGILIYEMLAGYTPFYDSNTMKTYEKILNAELRFPPFFNEDVKDLLSRLITRDLSQRLGNLQNGTEDVKNHPWFKEVVWEKLLSRNIETPYEPPIQQGQGDTSQFDKYPEEDINYGVQGEDPYADLFRDF

SEQ ID NO: 11898 - protein, 285 aa, Zea mays
MGNANAKEGENGHMAASPEPAAPNGGGGSSSSAGGAAARPPPLSPPDDVMLERPPPVPYLFVPQVPETPLHRPTELSPLLNHSPVNESTDHHSQDQGIPTLITWSQGGDEVFLEGSWDNWTSRRALERSGKDHAVLLVLPSGVYHYRIIVDGELRYIPELPHAADERGRVANVLDVHDYVPESLDSVAEFEAPPSPVHSYDLHCPGDEEFAKEPPTLPPQLLVSVLGGDVDSAGHGNQALKPQHVVLDHLFIEKGWGSQSLLALGVTHRFESKYVSFVLYKPLER

SEQ ID NO: 11899 - protein, 451 aa, Triticum aestivum
  misc_feature (7)..(7): Xaa can be any naturally occurring amino acid
  misc_feature (249)..(249): Xaa can be any naturally occurring amino acid
  unsure (1)..(451): unsure at all Xaa locations
ILAELPXDCFGAYIISMATAPSDVLAVELLQRECHIKKPLRVVPLFEKLADLEAAPAAVARLFSVDWYMDRINGKQEVMIGYSDSGKDAGRLSAAWQMYKAQEELIKVAKHYGVKLTMFHGRGGTVGRGGGPSHLAILSQPPDTIHGSLRVTVQGEVIEHSFGEEHLCFRTLQRFTAATLEHGMHPPISPKPEWRALMDEMAVVATKEYRSIVFQEPRFVEYFRSATPETEYGRMNIGSRPSKRKPSGXIESLRAIPWIFAWTQTRFHLPVWLGFGAAFKHIIQKDIRNIHTLKEMYNEWPFFRVTLDLLEMVFAKGDPGIAALYDKLLVAEDLQSFGEQLRQNFEETKQLLLQVAGHKDVLEGDPYLKQRLRLRESYITTLNVCQAYTLKRIRDPSFEVTPQQPPLSKEFSDKEPAELVQLNRGSEYAPGLEDTLILTMKGIAAGMQNTG

SEQ ID NO: 11900 - protein, 495 aa, Alkaliphilus metalliredigenes QYMF
MYFLGIDLGTSSVKILAINDNNEILGDTTKEYPVYFPQDKWAQQDPIDWWEQTVLAIKELIHNLSIPRNEVGAIGFSGQMHGLVALDGDNKVLTPAILWCDQRTKKECDEITDFFSQDKLSQLTGNKALTGFTAPKILWVKKNMPEVFAKIKHILLPKDYIRLMLTGDYATDMSDASGMLMLDVKNRQWAKEMLDFLEIKEEQLPKLYESYEVTGVVTESVKAELGLEGEILVVGGAGDQAAGAIGTGTVEEGIVSVTLGTSGVVFASHEAYAVDERNRLHSFCHANGKYHSMGVMLSAANCLKWWADLVQPNVDLETLLEEAAATEIGSKSLIFLPYLMGERTPYSDPDAKGSFVGMTATTTRGHMTRALLEGVAFGLYDSLKILEMLEVPIKQVRVIGGGAKSSLWKQILADVFSSEIQEINTNQGGALGAAILAAVGAQRYVTVEEGCQAMIKVVNKISPINKNVEKYKDIHTLYVELYGHLKEWFKKSSRI

SEQ ID NO: 11901 - protein, 425 aa, Arabidopsis thaliana
MNRRQQVKRRVGKYEVGRTIGEGTFAKVKFARNSETGEPVALKILDKEKVLKHKMAEQIRREIATMKLIKHPNVVQLYEVMASKTKIFIILEYVTGGELFDKIVNDGRMKEDEARRYFQQLIHAVDYCHSRGVYHRDLKPENLLLDSYGNLKISDFGLSALSQQVRDDGLLHTSCGTPNYVAPEVLNDRGYDGATADMWSCGVVLYVLLAGYLPFDDSNLMNLYKKISSGEFNCPPWLSLGAMKLITRILDPNPMTRVTPQEVFEDEWFKKDYKPPVFEERDDSNMDDIDAVFKDSEEHLVTEKREEQPAAINAFEIISMSRGLNLENLFDPEQEFKRETRITLRGGANEIIEKIEEAAKPLGFDVQKKNYKMRLENVKAGRKGNLNVATEVCYMRLDIQESVGDGLLNQCVFCLYGVTTSRYSK

SEQ ID NO: 11902 - protein, 170 aa, Zea mays
MSMSKTGQAAEKDEQQQSRGIALMQGICAVVYRKADNTPCPIKQGLYLGSVGAAFNKDALKSLNITHILIVAKSLDPVFPAEFNYKKIEDEAISSGGNVLVHCFAGRSRSVTIVVAYLMKKHQMSLESALSLVRSKRPQVAPNGGFISQLEKFQKSLQVEQEWRMQPVQH

SEQ ID NO: 11903 - protein, 517 aa, Zea mays
  misc_feature (362)..(362): Xaa can be any naturally occurring amino acid
  misc_feature (373)..(373): Xaa can be any naturally occurring amino acid
  unsure (1)..(517): unsure at all Xaa locations
MQPDPQGPGRGKAGGANAHPRLPPPVTAGSAGRPASVLPHKTDNVRDHYRIGKKLGQGQFGTTYQCVGKADGGEYACKSIPKRKLLCREDYEDVWREIQIMHHLSEHPNVVRIRGAYEDALFVHLVMELCAGGELFDRIVAKGHYTERAAAQLIKTIVGVVQGCHSLGVMHRDLKPENFLFASTPEDAPLKATDFGLSVFYKPGDKFSDVVGSPYYVAPEVLQKCYGPESDVWSAGVILYILLCGVPPFWAESEAGIFRQILRGKLDLESEPWPSISDSAKDLVRKMLIRDPTKRFTAHEVLCHPWIVDDAVAPDKPIDSAVLSRLKNFSAMNKLKKMALRVIAESLSEEEIGGLKELFKMXETDITGTRTSXHDELKDGLKRVGSDLMEPEIQALMDAADIDNSGTIDYGEFLAATLHMNKLEREESLVSAFAFFDKDGSGFITIDELSQACEQFGLSDVHLEDMIKDVDQNNDGQIDYSEFAAMMRKGNAGGAGRRTMRNSLHVNLGELLKPTET

SEQ ID NO: 11904 - protein, 363 aa, Glycine max
MGIYLSTPKTEKASEDGENDKLRFGLSSMQGWRASMEDAHAAHPYLDESTSYFGVYDGHGGKAVSKFCAKYLHQQVLKSEAYLAGDLGTSLQKSFLRMDEMMRGQRGWRELAVLGDKIEKLSGMLEGFIWSPRSSEANDRVNDWAFEEGPHSDFTGPNSGSTACVAVIRGNKLVVANAGDSRCVLSRKGQAHNLSKDHKPELEAEKDRILKAGGFIQVGRVNGSLNLARAIGDMEFKQNKYLPVEKQIVTADPDITSVELCDDDEFLVIACDGIWDCMSSQQLVDFIHQQLKTENKLSAVCEKVFDRCLAPTAGGEGCDNMTMILIQFKKPSSSPDASSVTNQPQSSAQPSEADRSSETIESK

SEQ ID NO: 11905 - protein, 216 aa, Triticum aestivum
  misc_feature (204)..(204): Xaa can be any naturally occurring amino acid
  unsure (1)..(216): unsure at all Xaa locations
MRRFLTDRARRAVAASLRGATRPAAPSPAPAPAAALSRPSPSAPSAMAAYMARAMSTSAAGTPPVSLDTINPKVLEFKYAVRGEIVTHAQNLEQELHKNPESLPFDEILYCNIGNPHSLGQQPVTFFREVLSLCDHPALLDKSETHALYSSDAIERAWQILEKIPGRATGAYSHSQGVKGLRDEIAAGIAARDGFHASGETSFXTDGASPQSHDDA

SEQ ID NO: 11906 - protein, 346 aa, Vibrio cholerae O1 biovar eltor str. N16961
MPNTPLKVGVIGYGYSAKTFHLPFIDTLESLTLSAISSSQQQVVQEDWPQIAYFDSAQRLITESDVDLVIITAPNNVHFPLAKLALEHGKHVIVEKPFVTQIEQGRTLIELARQQGLLLSVFHNRRWDGDFLTVKKLIEQGQLGDVKVFESHFDRYRPVVRQRWREQAQEGGGILFDLAPHLLDQALVLFGLPQSLSADCRMMRPDATTLDYFDLQLYYPQHVVRLHANLYSPEPNVRYQVLGSLGKYVKYGLDPQEDRLKAGERPTHPQWSQEMPEQYGILYHAEGNENVITELGGYQHYFTQVVEAIRNGASNPVSAESALQSIQLIELALESSAKGQRLAVTL

SEQ ID NO: 11907 - protein, 535 aa, Bacillus cereus G9241
MTKYIFVTGGVVSSLGKGITAASLGRLLKNRGLNVTIQKFDPYINVDPGTMSPYQHGEVFVTDDGAETDLDLGHYERFIDINLNKYSNVTTGKIYSSVLQKERRGEYLGGTVQVIPHITNEIKERVYRSGRETNADVVITEIGGTVGDIESLPFLEAIRQIKSDIGRDNVMYIHCTLIPYLKAAGEMKTKPTQHSVKELRSLGIQPNIIVVRTEMPVSQDMKDKLALFCDIDTKAVIEARDADTLYAVPLSLQEQNMDQIACDHLKLDNPAADMTEWTALVEKVRNLSKKTKIALVGKYVELQDAYISVVEALRHAGYSFDTDVEVKWVNAEHVTAENVQELVGDTDGILVPGGFGDRGVEGKIVAIQYARENKVPFLGICLGMQLASIEFARNVLGLEGANSSEINPDTPYAIIDLLPEQKDVEDLGGTLRLGLYPCKLSEETNAYNAYNEPVVYERHRHRYEFNNQFRPDMEKAGFVFSGTSPDGRLVEIIELKDHPWFVAAQFHPELVSRPNRPQPLFHDFVRASITNKESK

SEQ ID NO: 11908 - protein, 248 aa, Pediococcus pentosaceus ATCC 25745
MNNNEVELNDKIELILSRERKELAKLVLIRHGESTANRDNIYTGWSDVPLTPLGIKQAQRAGKLIAKLGINFDMVHTSMLKRAIVTANIVLDDLNQNWLPINKTWRLNERHYGALRGQNKDETRQIYGKEQVALWRRSFDAVPPLLEHPDDDRRYAVNGILNEPLGESLHMAYNRLLPYWIDQIAPRLMEGQNQLVVAHGSSLRALIKYLENISDQGIDGVEVENGEPIIYELKSDLSIQNKIILKEA

SEQ ID NO: 11909 - protein, 485 aa, Prochlorococcus marinus str. NATL2A
MKILDLARRTKIVATIGPATESASQISKLVEAGATTFRLNFSHGDHEEHAQRIKTIRKVSDDLGIHIGILQDLQGPKIRLGRFKNGPVNVKNGDKFILTSKNIDCNQDQANVTYDKLAEEVNVGNRILLDDGRVEMKVEEVDLKEQRLICSITVGGVLSNNKGVNFPDVQLSIRALTDKDKKDLAFGLKQGVDWVALSFVRNPSDLIEIKDLIRNHGYDTPVVAKIEKFEAIDQIDAVLKLCDGVMVARGDLGVEMPAEEVPLLQKQLIKKANSLGIPIITATQMLDSMASSPRPTRAEVSDVANAILDGTDAVMLSNETAVGDYPIESVATMATIAKRIERDYPQKALESHLPSTIPNAISAAVSSIARQINAAAIIPLTKSGATAKNVSKFRPPTPVLAVTNEKSVASTLQLVWGVTPLLIENQTSTSKTFDDAMNMAKKMKILKQGDLVVETAGTLSGVSGSTDLVKVGIVSSEDENESLFI

SEQ ID NO: 11910 - protein, 652 aa, Cryptococcus neoformans var. neoformans JEC21
MTTHETGEFVEDQDGKAEDDGLHTHDEEHEHGHEEGDQEHLEQSHKTLRSEKGKEDNREQGKDEEAEIEGKKSGQKKTFELQDQTNLLPTKQVIFVFVGLTCALFCSLLDQTIVTTALPTLGQVFGRADISPWVGTAYLLTSTATQPVYGRLSDIFGRKFTLLGCLFIFLMGSLACALAQTMIQLIIFRAIQGLGGGGILTLAMIIISDVVSLKERGKYQGITGCVVALANSCGPIVGGAFTENASWRWCFYINLPLTSISMIIIVFLLPLRRVRGSMVAKIKKLDFYGSILTLAWAAPFLIALSWAGSQYAWDSAAVLVPLLVGLALLGLFIFVEAKVVSLPLVPMHIFKNASVSACFFTTFMNGLSFYATLYYLPQYFQIVRGASAIRSGVLTLPLMLVQTVTSFTSGIIQSKTGDYWWNLVVGYTIWTIGLGLISSITSTTSIAKLSGYQIIVGIGAGQTFQTSLVAIQAGVERKDMATATGLRNFLRQLGGTIALAACNSIVNNCVRRNLSGVLPGTAYKAILEDPTRATSLGLSASELSAVTDAYGNADREGGDLNVARGINEVFWFCAPCVGICIPITIFLIKKVTLNRSDDAVKKAEAKAWVESKKAKRAKKRKGSEETVVDSGASTMVSGEEKKRDGRRIGKEQ

SEQ ID NO: 11911 - protein, 198 aa, Bradyrhizobium japonicum USDA 110
MIKLYWSPRSRSFTTLWLMEESGLPYERVLTDISTGAQKAPDYLKVNPMGKVPALSDGDAALGEAAAICAYIADRYPETKLAPAVTDPRRARYLQWLFFSPGCIEPAIIQIFTKIEIPTSTAAWGSATQVFDVLEAALAKGPWILGEEFSAADITVGSGLNFAVRLFKMVPSRPAFDAYLARCMARPAFQRAEKIAAG

SEQ ID NO: 11912 - protein, 533 aa, Neurospora crassa
MRSSLLTGAIAAALSFSGYAAAADADAWKSRSIYQVMIDRFARDDGGSVDCKLYEFCGGTWKGLTNKLDYIQGMGFDAIQISPVIKNEDKNTAVGEPYHGYWSQDLTQVNPKFGTEEDLKNLIAEIHKRDMFLMVDVVVNHMAQEFDNVVPPKVDYSVFKPFNDKKYFHPYCNVTEWENATNIQDCWLYPYGIALADLKTESPDVVSLFTKWIKNLVSTYSIDGLRIDAAKHVNDEFLPQFVQASGVFALGEVLTGVTEDMCRYQNKSKNLLPGMPNYLDYYPLNAAFNGGSFERLGEIRAQAQDSCNDTLALGTFIENHDMPRFASQNQDMALAKNAMTYVIMNDGIPTVYQGQEQHFTGGATPENREPLWKSNYNTSAPLYVLAQTLNKVRKNAIKQSPTYVKQTSNVLIADTNHFCQQKGPAENSVVFCVTNKSSKGDSYQMPVGGFRDSDEVVEVLSCATTTADGLGQITAYMGAGEPKVWVKKSALEGTDICTKTTVDGPKEENGAVSKGAATGVLMAAVLGTASLLL

SEQ ID NO: 11913 - protein, 157 aa, Arabidopsis thaliana
MQIFVKTLTGKTITLEVESSDTIDNVKAKIQDKEGIPPDQQRLIFAGKQLEDGRTLADYNIQKESTLHLVLRLRGGAKKRKKKTYTKPKKIKHKHKKVKLAVLQFYKVDGSGKVQRLRKECPNATCGAGTFMASHFDRHYCGKCGLTYVYQKEGAQE

SEQ ID NO: 11914 - protein, 446 aa, Shewanella sp. MR-7
MADSPYNTTHEHPSLEHYWMPFTANRQFKASPRLLAQAEGMYYTDINGNKVLDSTAGLWCCNAGHGRREISEAVSKQIREMDYAPSFQMGHPLAFELAERLTELSPEGLNKVFFTNSGSESVDTALKMALCYHRANGQASRTRFIGRELGYHGVGFGGISVGGLSNNRKAFSGQLLQGVDHLPHTLDIQNSAFSRGLPSLGAEKAEVLEQLVTLHGAENIAAVIIEPMSGSAGVILPPQGYLKRLREITQKYGILLIFDEVITAFGRVGAAFASQRWGVIPDIITTAKAINNGSIPMGAVFVQDFIHDTCMQGPTELIEFFHGYTYSGHPVAAAAALATLSIYENEQLFERSFELERYFEDAVHSLKGLPNVIDIRNTGLVAGFQLAPNSQGVGKRGYSVFEHCFHQGTLVRATGDIIAISPPLIVEKHQIDQIVNSLSDGIRAVG

SEQ ID NO: 11915 - protein, 449 aa, Emericella nidulans
MREVISLNVGQAGCQIANSCWELYCLEHGIQPDGYLTEERKKEDPDHGFSTFFSETGQGKYVPRTIYADLEPNVVDEVRTGTYRSLFHPENLITGKEDASNNYARGHYTVGKEMIDQVLDKVRRMADSCSGLQGFLVFHSFGGGTGSGFGALLMERLSVDYGKKSKLEFCVYPAPQNATSVVEPYNSILTTHTTLEHSDCSFMVDNEAIYDICRRNLGIERPSYENLNRLIAQVVSSITASLRFDGSLNVDLNEFQTNLVPYPRIHFPLVAYSPVISADKASHEANSVQDITMSCFEPNNQMVKCDPRNGKYMATCLLYRGDVVPRVDHAAVATLKTKRTIQFVDWCPTGFKIGICYQPPQQVPNGDLAKVNRAVCMLSNTTAISEAWSALDHKFDLMYSKRAFVHWYVGEGMEEGEFSEAREDLAALERDYEEVASDSLEEEGEEVEY

SEQ ID NO: 11916 - protein, 217 aa, Oryza sativa
MAKVRGKAGAGAGAAAAAATRTKWRSGAQERIYGRRLLDALRATRDGAAGGGGGAPPQPRAVKAAADSALALTARGQSRWSRAILLAGAASSRRRVLVKAGGKIRRGGGGNSCRRPQARAAAAAAAKAAAAASSAGEPPMLKERKVKERLRVLGRLVPGCRKLPAPALLEETADYVAALEMQVKAMRALADALAAAQLSSSTPQQAEAAADETEMER

SEQ ID NO: 11917 - protein, 647 aa, Synechococcus elongatus PCC 7942
MAAEQTAIAPLAVAVESQQWRIEDSEALYRIQGWGEPYFGINAAGHITVSPQGDRGGSLDLYELVEALRRRGLNLPLLIRFPDILEDRIERLNACFAKAIARYNYAGEYRGVFPVKCNQQRHLIESLVNYGRPFQFGLEAGSKPELLIALAHLDTPGALLICNGYKDRDYIETAILGRRLGKTPILVIEQLEEVDVAIAASQRLGIEPILGVRAKLNARGMGRWGSSAGDRAKFGLTMPEIVAAVEKLQAANLLHCLQLLHFHIGSQISDISVLKDAIQEAAQIYVQLAALGADMRYLDVGGGLGVDYDGSKTNFHASKNYNMQTYANDVVATIKDACQAHRLAVPTLTSESGRAIASHQSVLVFDVLGSSEVPRAAVEPPQEEDSAIVRTLYEVLEAIALENLQECYHDAFKLKEDAVSAFRLGYLSLTERAKAERLFWSCCHRIQEFLKQLDRIPEDLEDLERVMASIYYVNLSVFQSAPDTWAIDQLFPIMPIHRLNEEPNQRVTLADLTCDSDGKIDRFIDLLDVKSTLELHSLQPDQPYVLGMFLGGAYQEIMGNLHNLFGDTNAVHIKLTPKGYSIEHVVKGDTMGEVLGYVQYDTEQLLERLRQQTEAALQQDQISLDEAQRLLRHYEEGLQRYTYLSLD

SEQ ID NO: 11918 - protein, 83 aa, Picea glauca
MADKGVCSRLSALFLLVLLVISIGMMQLELAEARTCKTPSGKFKGVCASSNNCKNVCQTEGFPSGSCDFHVANRKCYCSKPCP

SEQ ID NO: 11919 - protein, 89 aa, Zea mays
MAIASRATKRALSTFAAAKLPEEAVAAAAAGEAIAARSHQAVPLPPAPASSVRPLQFEDTGRLFAGEPTSALLRTLAALQALNVGPFGT

SEQ ID NO: 11920 - protein, 205 aa, Oryza sativa
MVQPKKKFRGVRQRHWGSWVSEIRHPLLKRRVWLGTFETAEEAARAYDEAAVLMSGRNAKTNFPVQRNSTGDLATAADRDARSNGGSRNSSAGNLSQILSAKLRKCCKAPSPSLTCLRLDPEKSHIGVWQKRAGARADSNWVMTVELNKEVEPTEPAAQPTSTATASQVTMDDEEKIALQMIEELLSRSSPASPSHGEGEGSFVI

SEQ ID NO: 11921 - protein, 391 aa, Kluyveromyces lactis NRRL Y-1140
MTFMETMTASLAQKGSQSPKSGSISSSATPTSRTPQSLSQSVSYHSVASIPNLLNYDRQNDSSIRTNKTSQTNITVSTTGNFLSSSNSSPQISPRQRDYHYGGHYRSGSLDFLADTAIDQDMNQEEFKRILKRLSEYNEQLTFHLLTWSSQKIKDVLVNDLTQLSNETRSMLKVTNRLLELKNMNDWNRKKPQLPSINQLRNELQKPMTEFQFPMRPRSKNVFNVTVRKSEVEIPTAATNTKMEKPVIQVVGHRGSKSDSSIGGTSHTFKVDKVKPRKRNSVSQQQRMISVAAGDGTESCKHCHETVTPEWRRGPYGNRTLCNACGLFYCKLIRKFNTKDANILMHYRKMKGPEDRRVPESLNVPRSFIESLENNDNLDDNFNIKSKTTPE

SEQ ID NO: 11922 - protein, 250 aa, Sphingomonas paucimobilis
MSDLSGKTIIVTGGGSGIGRATVELLVASGANVAVADINDEAGEAVVAASGGKPAYFRCDIAQEEDVKALVAQTLAAFGGLDGAFNNAAIPQAGLPLAEVSLERFRQSMDINVTGTFLCMKYQILAMIERGTKGSIVNTASVAGVVGVPMHGEYVGAKHAVVGLTRVAAADYGKHGIRVNALVPGAVRTPMLQRAMDNDAGLEPYLNSIHPIGRFSEPHEQAQAAVWLLSDAASFVTGSCLAADGGFTAI

SEQ ID NO: 11923 - protein, 315 aa, Crocosphaera watsonii WH 8501
MSQTSINSPRIFWKTPLAWLSSLWEFSRPHTIVGTSLSVLALYLIALATVDSTVNLENIQYLLIALFPCLCGNVYIVGLNQLEDQEIDKINKPYLPLASGYFSQIQGRYIVSITGLLAIITSWLGGSWLGITVVLSLLIGTAYSVPPIRLKRFPLLAAFCIFTVRGVVVNLGVFLYFIHSFTSTSFLVPEVLILTAFVVIFTVAIAIFKDVPDLEGDQEYNITTFTILIGKKAIFKISCGVIIFCYLGMIIIGLLSSFNINQPLLIGSHVALLTLLLWRSQRVDLEDKNSIAQFYQFIWRLFFLEYLLFPLACLV

SEQ ID NO: 11924 - protein, 141 aa, Zea mays
MKHPRDAGAVPLSLALSLGGGGGVATKHGISKKPRRAAGGEFVCKTCSRAFGSFQALGGHRTSHLRARHGLALGVPAAAPAKEDTATKPAAAEPAPASHLCHVCGLGFDMGQALGGHMRRHREEAAAAAAQAPPVLLQLFV

SEQ ID NO: 11925 - protein, 256 aa, Pseudomonas fluorescens PfO-1
MHPYFSLQGRTALVTGGTRGIGKMIAKAYVEAGARVYVCSRDAEACHQTAEELSALGTCLGIAANLATEEGVKELAARLGEQITHLDILVNNAGTTWGAPLESYPVKGWEKVMQLNVTSVFSCIQQFLPLLRKSGSAANPARIINIGSVAGISSFGEQAYAYGPSKAALHQLSRILARELVSQHINVNVIAPGRFPSKMTQHIGSDQQALADDTALIPMKRWGREEEMAALAISLASTAGAYMTGNIIPLDGGFSL

SEQ ID NO: 11926 - protein, 342 aa, Oryza sativa (japonica cultivar-group)
MDRKKAGVPLVCHGHSRPVVDLFYSPVTPDGCFLISASKDSNPMIRNGDTGDWIGTFEGHKGAVWSCCLDTNALRAASGSADFSAKVWDALTGEELHSFEHKHIVRACAFSEDTHLLLTGGLEKILRIYDMNRPDAAPREIDKSPGSVRTVAWLHSDQSILSCCTDMGGVRLWDVRSGKIAQTLETKATVTSAEVSQDGRYIITADGSSVKFWDANYFGLVKSYNMPCNVESASLEPKYGNKFIAGGEDMWVHVFDFFTGEEITCNKGHHGPVHCVRFAPGGESYASGSEDGTIRIWQLGPATSDEQESPPNANGKLKVNTVSDAARKIEGFHLPKDGQTEG

SEQ ID NO: 11927 - protein, 433 aa, Crocosphaera watsonii WH 8501
MVTTTSLKTTKSEEIFAAAQKLMPGGVSSPVRAFKSVGGQPIVFDHVKGAYIWDVDGNQYIDYVGTWGPAICGHAHPDVIAALHNSLDKGTSFGAPCSLENTLAEMVIDAVPSIEMVRFVNSGTEACMSVLRLMRAFTGRDKIIKFEGCYHGHADMFLVKAGSGVATLGLPDSPGVPKNTTANTLTAPYNDLEAVKALFAENPDQIAGVILEPVVGNSGFVVPDGGFLAGLRELTQENGALLVFDEVMTGFRISYGGAQAKFGVTPDLTTLGKVIGGGLPVGAYGGRQDIMSMVAPAGPMYQAGTLSGNPLAMTAGIKTLELLQKPGTYQQLEQITQQLSEGLIKIGKDAGHSVCGGYVGAMFGLFFTEGPVKSYDDAKKSDTAKFGRFHRGMLEKGIYLAPSQFEAGFTSLAHTSEDIDKTLAAAKEVFADL

SEQ ID NO: 11928 - protein, 486 aa, Xylella fastidiosa 9a5c
MMHHNVHQSEILADPCDLQRAERWLQRDLRVLWHPCTQMREHPDTLPLVPIVRGEGAWLVGHDGRRYLDAVSSWWTNLFGHADPRISAAIAAQARTLEQVMLAGFSHEPAVRLAEALLRLAPRQDGREPLSKVFYADNGSAGVEVALKMAFHYFRNRGEEQRTRFIALHNGYHGETIGALAVGDIPLYRRVYAPLLTEVLFAPSPDAYLAEPGQSAAEYALQAAEALEVLFKRYSGQICALILEPLLQCAGGMRMHHPVYLHRVRELCDAHGALLICDEIATGFGRTGTLFACEQACPVILTDTDDKQLGIMPDLLCLSKGLTGGFLPLAAVLTTQQLYEEFLDDSRERAFLHSHSYTGNPLACIAALTTLDIFENDCIIERNQVTAARMTQLAASLSGHPHVADVRQAGMVVAFELTRDGNKRTPFPLQARLGLHVYRAALARGVILRPLGDVVYWMPPYCVDEEQLHLLAETTRVAIDEAIACV

SEQ ID NO: 11929 - protein, 411 aa, Methanococcus maripaludis S2
MDAIILCAGKGTRLHPITESRPKPMIPIAGKPIIEHIIEKIENHVEKIYLIVGYQKEKIIDYFKDNPKIEYILQEKQLGTGHAVLTAKNFIKGDFLVLNGDVIFEDSIDEILNYENAVSLSNVDNPENFGVIELGYDNKIINLLEKPKKEEITSNLINAGIYKLQNSVFGILENLAPSERGEIELTDALKKLIENGKLHGVELKGYWNDIGHPWDVLSANNHFLNKIISKVSGKIENTVSITGNVIIEEGAVIKPNSVIEGPAIIKSGSIVGPLAYVRPNTVLMKNTFVGNSSEIKGSIIFENTKIPHLSYVGDSIIGANCNFGCNTITANLRFDDKPVIVNIKGKPVKSVRKLGAIIGDCVKTGIQVSFMPGVKIGSNSLIGANCLIDRDIEQESFVYKKDELVITKKRN

SEQ ID NO: 11930 - protein, 512 aa, Arabidopsis thaliana
MVSHPMEKAANGASALETQTGELDQPERLRKIISVSSIAAGVQFGWALQLSLLTPYVQLLGIPHKWASLIWLCGPISGMLVQPIVGYHSDRCTSRFGRRRPFIVAGAGLVTVAVFLIGYAADIGHSMGDQLDKPPKTRAIAIFALGFWILDVANNTLQGPCRAFLADLSAGNAKKTRTANAFFSFFMAVGNVLGYAAGSYRNLYKVVPFTMTESCDLYCASLKTCFFLSITLLLIVTFVSLCYVKEKPWTPEPTADGKASNVPFFGEIFGAFKELKRPMWMLLIVTALNWIAWFPFLLFDTDWMGREVYGGNSDATATAASKKLYNDGVRAGALGLMLNAIVLGFMSLGVEWIGRKLGGAKRLWGIVNFILAICLAMTVVVTKQAENHRRDHGGAKTGPPGNVTAGALTLFAILGIPQAITFSIPFALASIFSTNSGAGQGLSLGVLNLAIVVPQMVISVGGGPFDELFGGGNIPAFVLGAIAAAVSGVLALTVLPSPPPDAPAFKATMGFH

SEQ ID NO: 11931 - protein, 280 aa, Arabidopsis thaliana
MGRPPCCDKIGIKKGPWTPEEDIILVSYIQEHGPGNWRSVPTNTGLLRCSKSCRLRWTNYLRPGIKRGNFTPHEEGMIIHLQALLGNKWASIASYLPQRTDNDIKNYWNTHLKKKLNKSDSDERSRSENIALQTSSTRNTINHRSTYASSTENISRLVEGWMRASPKSSTSTTFLEHKMQNRTNNFIDHHSDQFPYEQLQGSREEGHSKGINGDDDQGIKNSENNNGDDVHHEDGDHEDDDDHNATPPLTFIEKWLLEETSTTGGQMEEMSHLMELSNML

SEQ ID NO: 11932 - protein, 431 aa, Synechococcus sp. CC9605
MKRVLAIILGGGAGTRLYPLTKMRAKPAVPLAGKYRLIDIPISNCINSDINKMYVMTQFNSASLNRHLSQTYNLSNSFGGGFVEVLAAQQTPDSPTWFEGTADAVRKYQWLFQEWDVDEYLILSGDQLYRMDYSLFIGHHRRSGADLTVAALPVDPKQAEAFGLMRTDENGSIKEFREKPKGDSLLEMSVDTSRFGLSVESAKERPYLASMGIYVFSRQTLFDLLDKHPGHKDFGKEIIPEALARGDKLQSYVFDDYWEDIGTIGAFYEANLALTQQPTPPFSFYDEKFPIYTRPRYLPPSKLVDAQITNSIVGEGSILKSCSIHHCVLGVRSRIESDCVLQDTLVMGADFFESPDERAVLKERGGIPLGVGKGTTVKRAILDKNTRIGSGVSIINKDNVEEADRSDQGFYIRNGIVVVQKNATIADGTVI

SEQ ID NO: 11933 - protein, 209 aa, Arabidopsis thaliana
MSASKFIKCVTVGDGAVGKTCMLICYTSNKFPTDYIPTVFDNFSANVAVDGQIVNLGLWDTAGQEDYSRLRPLSYRGADIFVLAFSLISKASYENVLKKWMPELRRFAPNVPIVLVGTKLDLRDDKGYLADHTNVITSTQGEELRKQIGAAAYIECSSKTQQNVKAVFDTAIKVVLQPPRRKEVPRRRKNHRRSGCSIASIVCGGCTAA

SEQ ID NO: 11934 - protein, 245 aa, Yarrowia lipolytica CLIB122
MLRVARIMKCLTSSKAAALDAELMAPSGGFSIDQLMELAGLSVAQAVYKYDKSLAQGKQVLVLVGPGNNGGDGLVAARHLCHLGAKPVIYYPKRTDRPLFNGLVTQLHNLDIKFLDDVNKSTFDSSAHVIDSLFGFSFKPPIREPFPKVIELLKETKTPTTSVDIPSSWDVDRGPEDDNAFQPSSLVSLTAPKGASRHLLPSTRHFLGGRFVSKHIADKYDLEVPAYEGLDHIVELTQNNKEAQI

SEQ ID NO: 11935 - protein, 283 aa, Neurospora crassa
MLSTRLGLSPLLHSSKQASSALSRLAVPRTTSTPLPRRRLTIVPSATPRRSFCSSHTADDKDRSKKDITMYLQETHDKVFENNKSWAAEQVAKDPDFFKKLAAGQNPEYLWIGCSDSRIPAEQITGLQPGDAFVHRNIANLVCNTDLNVMSVIEYAVKHLQVKHIVVCGHYGCGGVKAAMTPKDLGLMNPWLRNIRDVYRLHEKELDAIADEEARYERLVELNVYEQCRNVVKTAALQQSYAENGFPIIHGWVFNFRDGMLKDLNVDFKTILKDIQKIYNLTN

SEQ ID NO: 11936 - protein, 265 aa, Triticum aestivum
MGRSPCCEKAHTNKGAWTKEEDDRLTAYIKAHGEGCWRSLPKAAGLLRCGKSCRLRWINYLRPDLKRGNFSDEEDELIIKLHSLLGNKWSLIAGRLPGRTDNEIKNYWNTHIRRKLTSRGIDPVTHRAINSDHAASNITISFETAQRDDKGAVFRRDAEPTKVAAAAAAITHVDHHHHHRSNPLHQMEWGQGKPLKCPDLNLDLCISPPSHEDPMVDTKPVVKREAVVGLCFSCSMGLPRSADCKCSSFMGLRTAMLDFRSIEMK

SEQ ID NO: 11937 - protein, 237 aa, Synechococcus sp. CC9605
MTNYRIERAKDAQDLARQACETVAAQIDLALDHRDRCQIALSGGSTPASAYSLLGQERLPWDRVDVVLGDERWVAADDASSNAGMLRRTLLAPGPGASAAFHPMPTLELESPEASAQAFADQLSQLCPGAPPVFDVMLLGLGDDGHTASLFPGTEAPAVLDRWTTIGRGKGLDRITLTAPVLSAARQVIFLVSGAGKQEALRRLVDPSESSDRTPARLVQPASDVLVLADQDAAAGL

SEQ ID NO: 11938 - protein, 347 aa, ASPERGILLUS NIDULANS FGSC A4
MSKLKVAISQSHTRQTLADTLIALKHTALAAAARGADILLFPEAYLGGYPRTATFGTRFGFREAHGREQFLHYFNGAVDLGDTPAGAGDDWVDKKLPVAKGKQYRGDGTRETLEQIANETGLLIIVGVIERAGGSLYCSALYVDPQRGVLGKRRKVMPTGSERLVWAQGSPSTLKAVTTEIKGVKLTLAAAICWENYMPLLRQSLYSQNVNLYLAPTVDSRETWLPLMRTIALEGRTVVLSASQSGRHKELPSWVTQAPEGEKIDADPEEWTSGGGSCIVGPLGEILAGPIWNVNDDSDPDTALQIVEVDFDDCVRGRLDLDVAGSYSRNDSFTLKVEGLDLSPPAL

SEQ ID NO: 11939 - protein, 328 aa, Glycine max
SARVEMYQIWSRRIALGAFAFVLLFLSASADDVVVLSEDNFEKEVGQDRGALVEFYAPWCGHCKKLAPEYEKLGSSFKKAKSVLIGKVDCDEHKSLCSKYGVSGYPTIQWFPKGSLEPKKYEGPRTADSLAEFVNTEGGTNVKIATAPSNVVVLTSENFNEVVLDETKDVLVEFYAPWCGHCKSLAPTYEKVATAFKLEEDVVIANLDADKYKDLAEKYDVSGFPTLKFFPKGNKAGEEYGGGRDLDDFVAFINEKSGTSRDVKGQLTSQAGIVESLDVLVKEFVAASDEEKIMKEEEEEEESKKEEEERKKKEEEEEEEEKKKKKKK

SEQ ID NO: 11940 - protein, 393 aa, Arabidopsis thaliana
MASLDSLVIFLFSTLFVTIVSSETPCRNFKSIISFGDSIADTGNLVGLSDRNQLPVTAFPPYGETFFHHPTGRSCDGRIIMDFIAEFVGLPYVPPYFGSKNRNFDKGVNFAVAGATALKSSFLKKRGIQPHTNVSLRVQLKSFKKSLPNLCGSPSDCRDMIGNALILMGEIGGNDYNFPFFNRKPVKEVEELVPFVIASISSTITELIGMGGKTFLVPGEFPIGCSVVYLTLYKTSNKDEYDPTTGCLKWLNKFGEYHSEKLKAELNRLRKLYPHVNIIYADYYNSLLRIFKEPAKFGFMDRPFPACCGIGGPYNFNFTRKCGSVGVKSCKDPSKYVGWDGVHMTEAAYKWIADGILNGPYANPPFDRSCLRSEIKKESLYNQSTLTQACVKL

SEQ ID NO: 11941 - protein, 157 aa, Bacillus halodurans C-125
MSIHEFSARLINGEEKALSDYKDQVLLIVNTASKCGLTPQYEELQILYETYKDQGFTVLGFPSNQFMNQEPGDHNEIAAFCERNYGVSFPIFEKVKVNGKEAHPLFQYLTSQQGGLFTEKIKWNFTKFLIDRSGNVVKRYAPSTSPIKIKDDIEELL

SEQ ID NO: 11942 - protein, 466 aa, Tropheryma whipplei TW08/27
MRTNFEWFEEAKRFIPGGVNSPVRAYAAVGGTPRFLAKAQGAYVTDIEGREYVDLVSSWGPLILGHAHPKVIDAVINTAHRGMSYGAPTTLEVELAELVCNRICNAQGIKPVERLRLVSTGTESCMTAIRLARCFTGRDLIVKFSGHYHGHADPFLIDAGSGLVGHPSSGGVPESVAKNTLVVPYNDLAVLEYLFEAYPNQIACIITEACPANMGVIPPDPGFNARVADLGHSHGALIIFDEVITGFRVGSGGFWALETSLASQQPTQAVSEGSVSDSAYSAYVPDLFTFAKVLGGGLPIGAIGGRAEIMDLLSPSGPVYQAGTLSGNPLATAAGLATLRLADSNIYEHMNRVARALINEIQSAFHDAGVPCTVQSAGNLFGISFSAIAPRDFTQATSQEHWRYSNFFHSMLNSGVLLPPSVYEAWFVSAAFDDRAIERVVNALPDAVRAAGSAPARPKGFEPPTF

SEQ ID NO: 11943 - protein, 201 aa, Candida glabrata CBS138
MEKMEKTYGQEPGQEPGQEPGQEQEQALEQSREQEQGRGAGMKGEELDVQFDNGAHEDGLEFEEDEDVFRNVGLGLEGHYKEIMIEYWQQLINEIESTNEPGSEYQDDFKSHSLPFARIRRVMKTDEEVKMISAEAPIIFAKACEVFITELTMRAWCVAEKHKRRTLQKADIAEALQMSDMFDFLIDIVPRSTIGAQNNSS

SEQ ID NO: 11944 - protein, 121 aa, Zea mays
MAKTSSFKLEHPLEKRQSEANRIRGKYPDRIPVIVEKAERSDIPDIDKKKYLVPADLTVGQFVYVVRKRIKLSAEKAIFIFVKEPPFPPTAALMSSIYEENKDEDGFLYMTYSGENTFGLL

SEQ ID NO: 11945 - protein, 520 aa, Ustilago maydis 521
MTASVSSNQTSLSRRSSHNRHSRISSGSSSASSGSSRPRSSRGRSTSPINPTKQEAAVQMAAKRASVSSVGSTISSSYSTLTADSKVADTTAATSTVSASASSNKVPAGLRAMLFEEEYQEEAIEHMHHMELQTVAAVELMDVQPELKWFMRPYLVDFLIEIHQTFRLRPETLFLTMNIVDRYVSKRIVYKRHYQLVGCAALLIAAKFEDAKDRVPTVKELSQMCCNAYDESAFAQMEGHVLSTIGWTLGHPTAEAWLRIESVRGGEDLKTVNLARFFLEVSLFHRDFISLKSSALTTGALILARFICGLPQSTQLSLNAEAAKAAHMLDAYVWENLQDLSLILIKKYSYAYFSSASTVACEWYRARVAAAKSSPPSGLLPAQALTRNAGAVAQEVDDDDSMCSQPTTPASSVQSTPSRSMDEDEDEDEEDDMPVTPLSLYSLHDPLVAAANAAGLPVPMPSSRASAQDKERRLSSSSASTEKPMPSSKSASTHLTVQQPMLGARKPLGNVVWNVNVQQF

SEQ ID NO: 11946 - protein, 239 aa, Zea mays
  misc_feature (147)..(147): Xaa can be any naturally occurring amino acid
  unsure (1)..(239): unsure at all Xaa locations
MGRSPCCEKAHTNKGAWTKEEDERLVAYVRAHGEGCWRSLPKAAGLLRCGKSCRLRWMNYLRPDLKRGNFTDDEDELIIRLHSLLGNKWSLIAGQLPGRTDNEIKNYWNTHIKRKLLARGIDPKTHRPLGAGADAAAPPGVVAHRAXAPRRRSPRRARREAGAGGVIRRRRPEQRHQQRRRRRRQRGGAAVPRPQPRPVRGPASGRRHAHLDLAVAAGGVPVLPPGPPRRGRVRMPGSG

SEQ ID NO: 11947 - protein, 364 aa, Zea mays
MERYELLKDIGSGNFGVARLMRNKDTKELVAMKYIPRGLKIDENVAREIINHRSLRHPNIIRFKEVVLTPTHLAIVMEYAAGGELFDRICSAGRFSEDEARYFFQQLICGVSYCHFMQICHRDLKLENTLLDGSPAPRLKICDFGYSKSSLLHSKPKSTVGTPAYIAPEVLSRREYDGKMADVWSCGVTLYVMLVGAYPFEDPDDPKNFRKTIGRIVSIQYQIPEYVHISQDCRQLLARIFVANPAKRITIREIRNHPWFLKNLPRELTEAAQAKYYKKDNGAPTFSDQTVEEIMKIVEEARTPPQSPAPVAGFGWAEEEEQEDGKKPEDDEQDGEDEQYDGEDEYDKQVKQVHASGDFRHLIK

SEQ ID NO: 11948 - protein, 220 aa, Sulfolobus tokodaii str. 7
MKYKAVLVDFGNTLVGFKPVFYEKVYQVLKDNGYDLDLRKVFRAYAKAMGMINYPDEDGLEHVDPKDFLYILGIYPSERLVKELKEADIRDGEAFLYDDTLEFLEGLKSNGYKLALVSNASPRVKTLLEKFDLKKYFDALALSYEIKAVKPNPKIFGFALAKVGYPAVHVGDIYELDYIGAKRSYVDPILLDRYDFYPDVRDRVKNLREALQKIEEMNKE

SEQ ID NO: 11949 - protein, 108 aa, Glycine max
MDYFNAPGRNHLFVPGPVNIPDQIIRAMNRNNEDYRSPAIPAMTKTLLEDVKKIFKTTTGTPFLIPTTGTAWESALTNTLSPGDRIVSFLIGQFSLLLPVHTYRTLFL

SEQ ID NO: 11950 - protein, 487 aa, uncultured bacterium 561
MNIELTNPTLFRTEAYVNGEWIGADNGARLPVTNPATGALITDVAKTGAAETRRAIAAAETAMLSWRQKPAKQRAQVMRRWFDLIMANQEDLARIMTLEQGKTLAESRGEVAYGASYIEWFAEQAKRIDGDVIPAPSGDKRIICIKQPVGVCAAITPWNFPNAMITRKAAPALAAGCTIVIKPASETPLSALALAELAHQAGIPPGVLNVLAGSSSDIGAELTSNPTVRKLSFTGSTPIGKMLEAQCVPTLKKTSMELGGNAPFIVFDDADIDSAVQGALISKYRNSGQTCVCSNRLLVQAGIAEEFTAKLVAATESLKLGNGLDENVDLGPLVNAKAVNDVHELVQGSISAGAKLVLGGAPSNLGVCFYQPTILTGVRPEMPVFRNEIFGPVAPIISFETEAEAIELANDTEFGLASYFYTRDIGRVWRVAEALEYGIVGINEGIISNEMAPFGGVKESGSGREGSKYGIDDYLEIKYMLMGGLNQ

SEQ ID NO: 11951 - protein, 588 aa, Cryptococcus neoformans var. neoformans B-3501A
MAATLRQRTAMSETPDQLATRVQNLSTAPTTTQRTGSGSAVLENGTNIGSAAGRKASIPAQVDPERIISTSGSGRTSRRGSGLVMTPGGVQTVYHTRTNEDIEFPHAGKTDVPPPRLDCKPEILAVTPQRMRMIVHAIEETLDNGLQKNGQVVPMITFPVPTYVFGWPTGNEVGDFLALDLGGTNLRVCLVTLLGSGKFEVTQTKYRLTEEQKQGEGQALCVPCHFIHCIPNTKNSLDFCAECLNSFIRDTLGRTEKDGILPLGFTFSYPCSQDRIDHGVLIRWTKGFGAPNIEGYDVAAMFKDSLKRMDVPAELTALINDTTGTLIASNYVDPHTKIAVIFGTGCNAAYMETAGSIPKIDYVGLPEEQGMAINCEWGAFDSFDHQHLPRTKYDIIIDESSNKPGEQSFEKMIAGLYLGEIFRLVLCELIDSGDLFLGQNTYKLEKAYAFDTAFLSLMEADVTEELLTIIGVFAHFFGLETTLEERQFFKKLAVLVGTRSARLSACGIAAIVSKKGYLEEGCAVGADGSLYNKYPNFADRVHEALTDIFGESGKKIVTHHAEDGSGVGSAIIAAMTKARKDSGFFVEY

SEQ ID NO: 11952 - protein, 454 aa, uncultured bacterium 561
MLLGQAMTAMIYPTTNPAATEVMVVSRGEGPYIYDQAGKQYLEGMAGLWCTSLGYGNQEIIETATRQMEQLSFSHMFSGKTHPSAIELADKLAAMAPIDDARVFLGASGSDANDTLVKLIRYYAVASGQPDRVKIIARDKGYHGVSVASAALTGLHANHAHFQLPFDALGVLRTGAPHYYRCAEAGETEADFVARRASELEALILDEGPDTIAAMIAEPVNGAGGVIIPPEGYFEAVQAVLDKYGIMLWDDEVICGFGRLGAAFGAEKLNMKPRMMACAKALTSAYVPLSAAIVAGDIADAIAGPAADMGVFGHGYTYSGHPLGCAVASKVLDIYVRDRLFEHAATLGAYMSKRLDEFSDHPLVGEVSAMGLLGALELVANKDSKQPFEGMRVAQFCAKAAEDNGLIIRPLGGNRMALCPPLIIQEAHVDEIMDKLSRALDSTLDFVTAEGLTV

SEQ ID NO: 11953 - protein, 448 aa, Nostoc punctiforme PCC 73102
MSVEITAPKGTILVVDDNPTNIQVLFDVLSEIGYRVAIAKSGEAALQRVQSYHPDIILLDVMMPGIDGFETCQRLKADCATCDIPVIFMTALSDTVDKVKGLSLGAVDYITKPIQHEEALARIRVHLQLRESQKSSQQKTTELSQALDILKQAQVHLVQSEKMSSLGQMMAGVAHEINNPMTFIHANLAPAKEHIQDLLNFIELYRQCHPQPHPKIQDWMDEVDIDYLEADLPKLMNSLKLGSDRIRQIVLSLRNFSRLDESGTQTVDLHENIESTLLLLQHRLKARPEHPGIQVVRDYGHLPHVECYPSQLNQVFMNIFGNAIDALEQRDQQRSSDEIRANPSNIAIRTEHLANESIAICIADNGCGVKENVCSQMFEPFFTTKPINKGTGLGLSISYQIVTQKHGGKIYCQSTLGKGTEFTIEIPVRQAGFVKLTQMATSKPVRFS

SEQ ID NO: 11954 - protein, 421 aa, Streptococcus mutans UA159
MSQELKLDVQERPRFGMLLGLSFQHLFAMFGSTVLVPILVGIDPAVALLSCGLGTLVHLSVTKYKIPAYMGSSFAYIGAMQTLMKTDGIAAVAQGAITGGLVYFIVALVIKWIGNSWIDKILPPVVVGPIVMVIGLSLAGSAVSDVMTKDGHYHLTYVFIGLITLFAVVLFNVYGKGMFGLMPILFGLIFGYLFAVAVGILTGQEIVSFSGVSKASWIQIPTIHLPILNDGFKLYPSAILTMAPIAFVTMTEHFGHIMVLNSLTGRDFFKKPGLDKTLTGDGLAQVVAGILGAPPVTSYGENIGVMALNKIFSVYVIAGAAFLAVLMSFIGKISALLQSIPTPVIGGISIALFGVIASSGLKILIENKTDFDNKKNLLIASIILVSGIGGLTLQIQSLQITGVAFSTLLGIILYQILPEKD

SEQ ID NO: 11955 - protein, 371 aa, Synechococcus sp. CC9605
MAKRLPVTVITGFLGAGKTTVLRHLLTRGGQRLAVMVNEFGSVGLDGDLIRSCGFCPEEDVDGRLVELNNGCLCCTVQDDFLPTMETLLERADQLDGIVVETSGLALPRPLLQALDWPAIRSRVHVNGVVTLVDGEALAAGSPVAHADALERQRAEDPSLDHLTAIDELFEDQLQAADLVLISRADCLDASAMAEVQGLIQGKVRPGTALLPVSQGQVETSVVLGLEHKPTAQAHTHHDHDDHDHDDHDHHDHRHVAMVGSNVRVEGALDRQALEQLLPSLVSNHQVVRLKGRVWLPSKALPLQIQMVGPRLNSWFEAAPSHAWRPDQGCGADLVVLALNEAAAPALESGLQRLVQATPAKASPAAATPES

SEQ ID NO: 11956 - protein, 562 aa, Dictyoglomus thermophilum
MIYDDKIFGDLCHKEFLVEREVKKLEEIYLEEVLPEDPKPEDEIEFTFNCPLKFHITSGKIVKDNREIYTFNIQERKTQWNDSIFNFSEIIKIKIPPLKENGLYQIHLYEMNEKIYEQYLSIDSFEAPLWSEESIIYHIFIDRFAKDEKEVEYSENLKEKLGGNLKGILSRLDYIENLGINTIWISPIFKSTSYHGYDIEDYFEIDPIWGTKEDLKKLVREAFNRGIRIILDFVPNHMSYKNPIFQKALKDKNSNLRSWFIFKGEDYETFFGVKSMPKINLKNKEAIDYIINAAKYWIREFGISGYRMDHATGPDINFWSIFYYNLKSEFPETFYFGEIVETPKETKKYVGKFDGTLDFYLFKIIRDFFIGKRWSTKEFVKMIDLEEKFYGNKFKRISFLENHDSNRFLWVAKDKKLLRLASIFQFSINAIPIIYNGQEMGCSQYRDILEGNRTLHEHARLPIPWSDDKQDKELIDFYRQLVKIRKSHPALYKGTFIPIFSDMISFIKETQEESILVLINIEDKEEIFNLNGTYRDLFSGNIYTNSLKLGPMSAHLLLRIDH

SEQ ID NO: 11957 - protein, 247 aa, Broussonetia papyrifera
MATNGEGKQNEAGRHQEVGHKSLLQSDALYQYILETSVYPREPEAMKELREITAKHPWNIMTTSADEGQFLNMLLKLINAKNTMEIGVYTGYSLLATALALPDDGKILAMDINRENYELGLPVIEKAGVAHKIDFREGPALPVLDQMIEDGKYHGSFDFIFVDADKDNYLNYHKRLIELVKVGGVIGYDNTLWNGSVVAPPDAPLRKYVRYYRDFVLELNKALAADPRIEICMLPVGDGITVCRRVS

SEQ ID NO: 11958 - protein, 498 aa, Dictyoglomus thermophilum
MKIKFFIKRTLIFIFILVTFLTYIHGYNEPWYKNAIFYEVFVRSFADSDGDRVGDLNGLIDKLDYFKNLNITALWLMPIFPSVSYHGYDVTDYYDIHPGYGTMEDFENLIRKAHEKNIKIILDLVVNHTSSRHPWFVSSASSYNSPYRDYYIWSTEKPEKNSNLWYKKPTGYYYALFWSEMPDLNFDNPKVREEVKKIAKFWIEKGVDGFRLDAAKHIYDDDSKNIQWWKEFYSYLKSIKPDVYLVGEVWDNEYKIAEYYKGLPSNFNFPLSDKIMNSSSKSKRLRNYRISRLKRLFGENNTDFADAIFLRNHDQVRVRTFFGGSIDKSILAGSIYLTLAGNTFIYYGEEIGMEGSKPDEYIREPFKWTDDMKSKYQTYWIIPRYNLPGNGIALDTEEKDPNSIYNHYKKLLEIRVKCRALSNGKIERIKTQDRSILAYKLELEDEKIMVVHNLNRIENTFNFNNEIKEKDILYIRNAKTEKNKIILGPYSTVIVKIP

SEQ ID NO: 11959 - protein, 369 aa, Triticum aestivum
  misc_feature (214)..(214): Xaa can be any naturally occurring amino acid
  misc_feature (220)..(220): Xaa can be any naturally occurring amino acid
  misc_feature (246)..(246): Xaa can be any naturally occurring amino acid
  misc_feature (258)..(258): Xaa can be any naturally occurring amino acid
  misc_feature (275)..(275): Xaa can be any naturally occurring amino acid
  misc_feature (278)..(278): Xaa can be any naturally occurring amino acid
  misc_feature (289)..(289): Xaa can be any naturally occurring amino acid
  misc_feature (300)..(300): Xaa can be any naturally occurring amino acid
  misc_feature (316)..(316): Xaa can be any naturally occurring amino acid
  misc_feature (331)..(331): Xaa can be any naturally occurring amino acid
  unsure (1)..(369): unsure at all Xaa locations
MASAMELSLLNPAMHHHGIAAKTASHLPLLPARRGAVRFRVRAAAAAPPAPAAKPGSPKKRGKTEVNESLLTPRFYTTDFDEMEQLFNAEINKQLNQDEFDALLQEFKTDYNQTHFIRNPEFKEAADKMQGPLRQIFVEFLERSCTAEFSGFLLYKELGRRLKKTNPVVAEIFSLMSRDEARHAGFLNKGLSDFNLALDLGFLTKARKYTFFKXKFIFYXTYLSEKIGYWRYITIFRHLKANPEYXVYPIFKYFENWXAKDENRHGDFFSALLKXQPXFLNDWEGKLWXSRFFCLSVYIXMYLNDGNVVPSQGIGXNTKNSHHVIIDNDTXRISLRTDKPINRTKWILISINPRTKGPYCTYVHTVQPW

SEQ ID NO: 11960 - protein, 826 aa, Oryza sativa (japonica cultivar-group); identical to SEQ ID NO: 1076

SEQ ID NO: 11961 - protein, 165 aa, Oryza sativa
  misc_feature (11)..(11): Xaa can be any naturally occurring amino acid
  misc_feature (52)..(52): Xaa can be any naturally occurring amino acid
  misc_feature (90)..(90): Xaa can be any naturally occurring amino acid
  misc_feature (116)..(116): Xaa can be any naturally occurring amino acid
  misc_feature (124)..(124): Xaa can be any naturally occurring amino acid
  misc_feature (135)..(135): Xaa can be any naturally occurring amino acid
  unsure (1)..(165): unsure at all Xaa locations
MSLIRRSNVFXPFSFDLWDPFDGFPFGSGSRSSGSIFPSFPRGTSSETAAFXPGARIDWKETPEAHVFKADVPGLKKEEVKVEVEDGNVXSRSAASAARSQEEKTDKWHRVERSSXGKFLRRFXRLPENTKPEQXKASMENGVLTVTVPKEEPKKPDVKSIQVTG

SEQ ID NO: 11962 - protein, 391 aa, Yarrowia lipolytica CLIB122
MSLTSREIRMIALLIIDTCFFLLEAIVGYAVHSLALVADSFHMLNDVFSLIIALWAVRVAKSRGADSKYTYGWQRAEILGALANAVFLLALCLTILLEAIQRLFEPQIITNPKLIAVVGTAGLCSNIVGLLLFHEHGHAGHSHGHDHDHDHDHAHDEEEAVDTVLASQFTAPTEQTSLLQHPTSHRRSISNIDSSEHATHFHAKKKNEQKKKVSLNMQGVFLHVMGDALGNIGVIATAFFIWKTDYSWKYYADPVISLVITVIIFSSALPLCRSTSSILLQAVPQNINAEDVKNEIVALDGVEELHDLHIWILKEDTFVATLHVGVASDPSEFMTLSNDIKKIFHEHGINSVTIQPEFNVATGSTTPDKHQYHVSVGGLRSANSNGCLAPQ

SEQ ID NO: 11963 - protein, 95 aa, Oryza sativa
RGAARGISAAAGKPPDQSRKPDRVTVRATTPNRLGATHFKYGLGNAHFEVTRFALLETIKEAVPVDMWSPPIKSAWSEAYNQLVAALKQEMKPAE

SEQ ID NO: 11964 - protein, 459 aa, Neisseria meningitidis MC58
MLLDLNRFSFPVFLKEVRLLTTLALPMLLAQVAQVGIGFVDTVMAGGAGKEDLAAVALGSSAFATVYITFMGIMAALNPMIAQLYGAGKTDEVGETGRQGIWFGLFLGVFGMVLMWAAITPFRNWLTLSDYVEGTMAQYMLFTSLAMPAAMVHRALHAYTSSLNRPRLIMLVSFAAFVLNVPLNYIFVYGKFGMPALGGAGCGLATMAVFWFSALALWIYIAKENFFRPFGLTAKFGKPDWAVFKQIWKIGAPIGLSYFLEASAFSFIVFLIAPFGEDYVAAQQVGISLSGILYMIPQSVGSAGTVRIGFSLGRREFSRARYISGVSLVLGWMLAVITVLSLVLFRSPLVSMYNNDPAVLSIAATVLLFAGLFQPADFTQCIASYALRGYKVTKVPMFIHAAAFWGCGLLPGYLLAYRFNMGIYGFWTALIASLTIAAIALVWCLELCSREMVRSHKAV

SEQ ID NO: 11965 - protein, 451 aa, Shewanella sp. ANA-3
MAQHFDYICLGAGSGGIASANRAAMRGAKVLLIEAKHVGGTCVNVGCVPKKVMWYGAHIAEAMNLYAKDYGFDVSVNKFDWNTLVNSREAYIGRIHEAYGRGFTNNKVTLLNGYGRFVNGNTIEVNGEHYTADHILIATGGAPTIPNIPGAEYGIDSDGFFALREQPKRVAVVGAGYIAVEVAGVLHALGSETHLFVRKHAPLRNFDPMLIDALVDAMKTEGPTLHTNSVPQSVVKNADDSLTLNLENGESVTVDCLIWAIGRSPATGNIGLENTDVQLDSKGYVITDAQQNTTHKGIYCVGDIMAGGVELTPVAVKAGRLLSERLFNGMSDAKMDYSQIPTVVFSHPPIGTMGLTEPEARAQYGDDNVKVYTSGFTSMYTAVTSHRQACKMKLVCAGKEEKVVGIHGIGFGMDEILQGFGVAMKMGATKADFDAVVAIHPTGAEEFVTMR

SEQ ID NO: 11966 - protein, 368 aa, Shewanella sp. ANA-3
MTDSPRKRIVVKVGSALIAPHKQGCSSHYLLGIAQFITYCRVQGIQVVLVSSGSVAAGWHHFEGQAQPSVTVKKAMAAAGQADMMATWNKLFDFPTAQLLLTHGDLRNRERYISIRDTIFSLLEHGLMPIINENDAVTADKLKVGDNDNLSAMVAAAADADTLVICSDVDGLYDQNPHEHPNAKLIKQVTEINADIYAMAGGVSSDVGTGGMRTKIQAAEKAISHGIETFIINGFNADSFSQLLKGQNPGTLFTPYEKPMQEHLHWMTHTSQAQGEVIVEDDFDLALDQHSEQLTSDDVVEVKGDFSVGDTILVRKGDGTKLAKAKSNYSSCLLSFITEQDDQAFASEFQQKTGPIISDKNIAILKSI

SEQ ID NO: 11967 - protein, 307 aa, Kluyveromyces lactis NRRL Y-1140
MVPVRIPREVLKNGSLQHSRPKIITFDAYNTLYSIKKPVMEQYCIVGAKYGINGNPQELTKRFPGVFSNIRKKYPLYGKNSGITAEQWWEYLIRDMFEPIQIPNEMVEEILERFEGDAAYTVYPDVREFLETMRRNHPEVSLGIVSNTDPIVLTLLENLDLKKYFDGNIYLSYDLEIKKPDPAMFNYAVSHMLKRHNTSGQRENLENIRPHVWHVGDEEKTDLGGAFQAGVNGILVDRSNSFGYFDITTPDVCKKELSEDDLSLRKVLHHSEVILQESDAVTDVVQLNSRQYVLPNFKSLEALLFQQ

SEQ ID NO: 11968 - protein, 415 aa, Shewanella sp. ANA-3
MNLIKQISADAAHAARTLAQLDESLKNTVLLDMARSLREKSYEIQSANLIDVHRATQDNLSPAMVDRLTLNQHRIEAMAQGIETIAALPDPVGRERFIGKRPNGLSISKMRVPLGVVCMIYEARPNVTADAGALCFKSGNAVILRGGKEALHTSQVIASILQAVLTAYGLPKALISVIPDPDRALMLELMQQREFIDVIIPRGGEGLINYVTENSSIPVIQHFKGVCHLYVDKDANQDIALDLLLNGKTQRTGVCNALEGLLVHKDIAPRFLPRVAKALAEHQVKINACPPAAAYFDACTYMAEEDFGQEYLDLEIAIRQVDSFEVATQHIAKFGSHHTEVICTDNELTAARFQRAVDASVVMVNASSRFSDGSELGLGAEIGIATTKLHAYGPMGLEALTTEKYLVSGTGQIRA

SEQ ID NO: 11969 - protein, 121 aa, Glycine max; identical to SEQ ID NO: 1299

SEQ ID NO: 11970 - protein, 600 aa, Mycobacterium tuberculosis H37Rv
MREISVPAPFTVGEHDNVAAMVFEHERDDPDYVIYQRLIDGVWTDVTCAEAANQIRAAALGLISLGVQAGDRVVIFSATRYEWAILDFAILAVGAVTVPTYETSSAEQVRWVLQDSEAVVLFAETDSHATMVAELSGSVPALREVLQIAGSGPNALDRLTEAGASVDPAELTARLAALRSTDPATLIYTSGTTGRPKGCQLTQSNLVHEIKGARAYHPTLLRKGERLLVFLPLAHVLARAISMAAFHSKVTVGFTSDIKNLLPMLAVFKPTVVVSVPRVFEKVYNTAEQNAANAGKGRIFAIAAQTAVDWSEACDRGGPGLLLRAKHAVFDRLVYRKLRAALGGNCRAAVSGGAPLGARLGHFYRGAGLTIYEGYGLSGTSGGVAISQFNDLKIGTVGKPVPGNSLRIADDGELLVRGGVVFSGYWRNEQATTEAFTDGWFKTGDLGAVDEDGFLTITGRKKEIIVTAGGKNVAPAVLEDQLRAHPLISQAVVVGDAKPFIGALITIDPEAFEGWKQRNSKTAGASVGDLATDPDLIAEIDAAVKQANLAVSHAESIRKFRILPVDFTEDTGELTPTMKVKRKVVAEKFASDIEAIYNKE

SEQ ID NO: 11971 - protein, 358 aa, Oryza sativa
MGRAPCCEKVGLKRGRWTTEEDEKLAGYIAKHGEGSWRSLPKNAGLLRCGKSCRLRWINYLRAGVKRGNISNQEEDVIIKLHATLGNRKSYVVKRMDYVCLGARDYCFQQNTHVRWSLIASHLPGRTDNEIKNYWNSHLSRQIHTYRRTYTAPSEAAVTIDVTKLQAAGKRRGGRTAGQSRKGDKKRAEDDPPKETAAADTPLPESSPRRAQSDEARSGSVVVDPEEPSSQPNNGSSGGGGGTPDGPCSEETATGPTSLDPMEMGLWEVESEFAEMEALLCGGVAPDGPGIPGLEPLDVAAQADDLLDMDWDGFAADLWGDPAQRGGLVQDAGEPNGSMGCSSDELESFASWLLSDSC

SEQ ID NO: 11972 - protein, 183 aa, Zea mays
  misc_feature (46)..(46): Xaa can be any naturally occurring amino acid
  misc_feature (52)..(52): Xaa can be any naturally occurring amino acid
  misc_feature (124)..(124): Xaa can be any naturally occurring amino acid
  unsure (1)..(183): unsure at all Xaa locations
MSPYAYKPQIKCTTLSSSSTSEYHHATARQRLRPILMKGHERPLTXLRYNRXGDLLFSCDKDHTPTVWYRDNDDRLVTYRAHHGAVWTCDVSHDSAGLINVSADHTDNVWDVSTENEIISFRFXDPVMSVQNDIEDANLVVTTEQLYGPRAHRSGPGYRRRHRRPEGGHCTHHQRHQGQEQQG

SEQ ID NO: 11973 - protein, 200 aa, Triticum aestivum
  misc_feature (158)..(158): Xaa can be any naturally occurring amino acid
  unsure (1)..(200): unsure at all Xaa locations
MTFSVSPAMAGGQGHEYMIRFHSHFDDPSPSTATAEPPPFAGRAISPEQEHGAMVAALLHVISGYTTPPPDFFFPAAASKEVCPVCRVDGCLGCEFFGAAEATGATAAALDAPKSAPAAVTAGGPQRRRRNKKNKYRGVRQRPWGKWAAEIRDPRRAXVRVWLGTFDTAEDAARAYDRAAVEFRGPRAKLNFPFPEQQQQ

SEQ ID NO: 11974 - protein, 306 aa, Methanococcus maripaludis S2
MIKKYTYYFIFGEILKILVTGGAGFIGSHIVDMLIENGHDVSILDNLSTGNEKNLNSSAKFINGDILDKNLDLTGFECVIHEAAQINVRTSVENPSLDANINILGTVNILEKMKEYGVKKIIFSSSGGAVYGEPEYLPVDEKHSLKPLSPYGLSKFCAEEYIKLYNMLYDIEYCILRYSNVYGERQDPLGEAGVISIFIDKMKKGEVPVIYGDGNQTRDFVNVKDVARANLMALNWKNEIVNIGSGKETSVNELFKIISSEIGFDKDPIYKKEREGEVYKIYIDYSKAKSLGWMPEVELDDGIKKI

SEQ ID NO: 11975 - protein, 305 aa, Oryza sativa
MASPAAGTPPFLTKTYAMVEDPSTDETISWNDSGTAFVVWRPAEFARDLLPKHFKHSNFSSFVRQLNTYGFKKVVADRWEFANDCFRRGEKHLLGGIQRRKGSGTGGAGAAPAGGIPTAIPISSPPTSSGGEPAVSSSPPRGAAGIAAGVSGAVAELEEENARLRRENARLARELARARRVCDGVRRLVSRYDHDHGGGEEEAGEGDVKPMLFGVAIGGKRSREENGEDEEEEEEEGADEDGEDDEVEEDDEERERHAARRVPVREGKVRRTTELSDLDVLALSVRAAAAARPGGASRDRKSSVS

SEQ ID NO: 11976 - protein, 98 aa, Beta vulgaris subsp. vulgaris
PHRYRPGTVALREIRKYQKSTELLIRKLPFQRLVREIAQDFKTDLRFQSHAVLALQEAAEAYLVGLFEDTNLCAIHAKRVTIMPKDIQLARRIRGERA

SEQ ID NO: 11977 - protein, 605 aa, Escherichia coli
MLLKTSRRTFLKGLTLSGVAGSLGVWSFNARSSLSLPVAASLQGTQFDLTIGETAVNITGSERQAKTINGGLPGPVLRWKEGDTITLKVKNRLNEQTSIHWHGIILPANMDGVPGLSFMGIEPDDTYVYTFKVKQNGTYWYHSHSGLQEQEGVYGAIIIDAREPEPFAYDREHVVMLSDWTDENPHSLLKKLKKQSDYYNFNKPTVGSFFRDVNTRGLSATIADRKMWAEMKMNPTDLADVSGYTYTYLMNGQAPLKNWTGLFRPGEKIRLRFINGSAMTYFDIRIPGLKMTVVAADGQYVNPVTVDEFRIAVAETYDVIVEPQGEAYTIFAQSMDRTGYARGTLATREGLSAAVPPLDPRPLLTMEDMGMGGMGHDMAGMDHSQMGGMDNSGEMMSMDGADLPDSGTSSAPMDHSSMAGMDHSRMAGMPGMQSHPASETDNPLVDMQAMSVSPKLNDPGIGLRNNGRKVLTYADLKSRFEDPDGREPGRTIELHLTGHMEKFAWSFNGIKFSDAAPVLLKYGERLRITLINDTMMTHPIHLHGMWSDLEDENGNFMVRKHTIDVPPGTKRSYRVTADALGRWAYHCHLLYHMEMGMFREVRVEE

SEQ ID NO: 11978 - protein, 380 aa, Cucurbita maxima
MNPEVLSTDENDKLATRKTEKEQNDAPNSKEKLKKPDKILPCPRCNSMETKFCYYNNYNVNQPRHFCKACQRYWTEGGTIRNVPVGAGRRKNKNSASHYRHITISEALRAAQIDVPIEVNHLASKGNGRVLNFSVSPPVCESMVNVSHPAERKVLNGTRNEFEGAKGPCEGGETGDDCSSASSVTMSSSMKNGARRFPQEPHMQNINGFPSQIPCLPGVPWPCSWTAPIPPPALCPPGVPLSFYPATYWSCSASGSWNIPWVTPQPCPPIPGPNSPTLGKHSRDGDELQADNSEMKDPPKQKNGSVLVPKTLRIDDPNEAAKSSIWETLGIKNDSIKAVDLSNVFQSKGDLKSNVSEVLSPVLQANPAALSRSLTFHERS

SEQ ID NO: 11979 - protein, 1043 aa, Nostoc punctiforme PCC 73102
MYQNQQTQNNLTEKSIFLNEEYLTGCNYPNRNSLPKVKELDNQPKIDWQQILYSLTELSPFPIGIVCLESQQVLFKNELLASFLEIEPSQRFDKIIPSFYDQPTLWAKLVNNLKSGNLIKNCAVEVKKANGDIFKAEISAKVVKYEDKLAALFIFMNSTEHLNEHLKTQHEDFSLTAAVQEIADPIDFTYSRCNLVDVNLSIVSTTNNPNVQSVEKISPLQEPEVDLHLMERAIAASSNGIILTDPNQPDNPIIYVNPAFELITGYCASEVIGRNCRFLQGNDLEQVALQELRSAIQEQRECHVILRNYRKDNFLFWNELYLAPVFDNSGYLTNFIGIQTDITHHLQALEALGKQEEQYRRIVQTATEGIWLLDKDNCTTFVNQQMATMLGYTIEEMLGATLFSFMDSEGLEIANSCLSRRYQGIQEAHDFKFRCQDGSDLWAIISCAPLLDDQGNYAGALGMVTNITDRKLAEAALQESKQRLDGILCSLEDVIWSISADTFETLYLNPAALKVYGYSVSEFFENSNLWFEVIHPEDQQQVHAAIQPLFLTEKQELEYRIVRPDGQVRWLLNRSHLIYNASGLPIRIDGIATDITERKLLEEKLVHNAFYDALTGLPNRILFIDRLEQAIAQMKHNPDDLFAVLFLDLDRFKVVNDSLGHLVGDQLLVTLAQRLQQCLQPDDTVARLGGDEFTILLSHIQTIEDATDIAKHIHQALKPPFNLCGYEVFMTASIGIALGTNKYVQPADLLRDADTALYRAKEQSQAGHIVFDTTMYDRAVELLQLETDLRWAVERQELCIFYQPIICIKTGKITGFEALVRWQHPERGLISPTEFIPVAEETGLIIPIGQWVLTESCKQLRQWQLQFPAIKPLTLNVNLSGKQFSQPHLIEQISQILQDTGLSSSNLKLEITETAIIASPQKATSILKQLKAFGLQLCIDDFGTGYSSLAYLHNFPIDVLKIDRSFVNRIDSDTEQFAIVRAIVTLADNLGMSVVAEGVETINQLAQLQLLQCQQAQGYLFSKPLDQEQARNLLASGQSFLRI

SEQ ID NO: 11980 - protein, 333 aa, Zea mays
  misc_feature (126)..(126): Xaa can be any naturally occurring amino acid
  misc_feature (267)..(267): Xaa can be any naturally occurring amino acid
  unsure (1)..(333): unsure at all Xaa locations
MAKEPMRVLVTGAAGQIGYALVPMIARGVMLGADQPVILHMLDIPPAAEALNGVKMELVDAAFPLLKGVVATTDVVEACTGVNVAVMVGGFPRKEGMERKDVMSKNVSIYKSQASALEAHAAPNCXVLVVANPANTNALILKEFAPSIPEKNVTCLTRLDHNRALGQISERLNVQVSDVKNVIIWGNHSSSQYPDVNHATVKTSTGEKPVRELVSDDEWLNGEFITTVQQRGAAIIKARKFSSALSAASSACDHIRDWVLGTPEGTXFVSMGVYSDGSYGVPSGLIYSFPVTCSGGEWKIVQGLPIDELSRKKMDATAQELSEEKSLAYSCLE

SEQ ID NO: 11981 - protein, 437 aa, uncultured bacterium 561
MDRKTLEAHWMPYTGNRQFKKDPRIITSAEGVWYTDDKGRKVLDGHSGLWTSGLGHGRKEISAAVSQQINTLDFAPSFQFGHPPAFELADRIKGLMPEDLDYVFFTNSGSESADTSLKMARAYWRLMGQPTKTRFVGRMKGYHGVNFGGISVGGIAANRKFFGQGVEADHLRHTMLPQNRFCRGMPQDGAELADELNEMIALHDASTIAAVIVEPMAGSAGVIPPPVGYLQKLRDICDANDILLIFDEVITGFGRCGAMTGADAFGVVPDILNVAKQITNGAIPMGAVIARAGIYDTFMAHGGPDYALEFAHGYTYSAHPVACAAGLAALDVLTGEALPQRVADEAPFFEALLHDALSDKPHVSDVRNYGFAGAITLEPYPGEPLRRPFEVAMKMWEKGFLVRYGGDTIQLAPMFVMERPEMESLVGALADSLQELA

SEQ ID NO: 11982 - protein, 193 aa, Triticum aestivum
MECARAFPLASFYVHGQAVAPPLWPFGHPPWVLWRGLNARSGLPVSRRFKGVSLGSVSTGGRIRCIQVWPIEGIKKLETLSYLPPFSTEALLKQVEYLIRSKWVPCLEFSKVGFIFREHNASPGYYDGRYWTMWKLPMFGGTDATQVINEVEEVKKEYPDAYVRIIGFDNMRQVQCVSFIAFKPPGCEESGKA

SEQ ID NO: 11983 - protein, 745 aa, Streptococcus mutans UA159
MTKVSSLGYPRLGENREWKKLIEAYWAGKVSKNDLFAGAKELRLDFLKKQLNAGLDLIPVGDFSLYDHILDLSVQFNIIPKRFAKEPIDIDLYFAIARGNKENVASSMKKWFNTNYHYIVPEWSKQRPKLNNNRLLDLYLEAREVVGDKAKPVITGPITYVALSTGVEDFTAAVKSLLPLYKQVFTELVKAGASYIQVDEPIFVTDEGKDYLQAAKAVYAYFAKEVPDAKFIFQTYFEGLIDSQVLSQLPVDAFGLDFVYGLEENLEAIKTGAFKGKEIFAGVIDGRNIWSSDFVKTSALLETIEEQSAALTIQPSCSLLHVPVTTKNETDLDPVLRNGLAFADEKLTEVKRLAEHLDGREDPAYDLHIAHFDALQAADFRNVKLEDLSRVATKRPSDFAKRRDIQQEKLHLPLLPTTTIGSFPQSREIRRTRLAWKRGDISDAEYKQFIQAEIERWIRIQEDLDLDVLVHGEFERVDMVEFFGQKLAGFTTTKFGWVQSYGSRAVKPPIIYGDVQHLEPITVEETVYAQSLTDRPVKGMLTGPITITNWSFERTDIPRDQLFNQIGLAIKDEIKLLENAGIAIIQVDEAALREGLPLRKSKQKAYLDDAVHAFHIATSSVKDETQIHTHMCYSKFDEIIDAIRALDADVISIETSRSHGDIIESFETAVYPLGIGLGVYDIHSPRVPTKEEVVANIERPLRQLSPTQFWVNPDCGLKTRQEPETIAALKVLVAATKEVRQKLGN

SEQ ID NO: 11984 - protein, 194 aa, Hyacinthus orientalis
ATSGIFFRQTSLAGIHQSEDAIRKLFRIPADAPMGKSVATAIELCKEAPVEGQTRRCVTSAEDMIDYVVSSLGAKSSLTAKSTSNSNGLGSDVLIGEVKAAGGGELGRVVSCHHTTFPYLMYRCHSVPKTVLYDVEILDPETKGRINLAAAICHFDTSVWSPRHATFQALVYERGMDACHWVFPMDMAWTAAAE

SEQ ID NO: 11985 - protein, 147 aa, Pyrobaculum aerophilum str. IM2
MVDVKRLAADILGVGVSRIKISPEAAERLEEVVTKDDVRALIDQGLIWAEPERGVSRGRWRVRHIKKKKGRRRGHGSRKGPRTDEEEAWKEKVRAMRRFLNTLKRKGKLEPRVWRQLYRMVKGNYFRDLDHLKTYINEHKLAKEPVR

SEQ ID NO: 11986 - protein, 1002 aa, Cryptococcus neoformans var. neoformans JEC21
MASLAAAPSPTSSTPPPSSPYARLSAPTMARNSSSSSSRSTASCSSTSSVQAVPMRPPPIETSTAATSRSQLPSSRHSENEAERDTSYTSPGLSVGGRGGLARNGPRSNRLGTSPQARHVPPSIVALSPSPSPILNMVPKRQSNTETVSGTSPSTPLGKSFLAQQDLSPNSNTIPLRVTISVDPNERLSHDRESHSVERPRSTGNSPVRGRHGHLSTPSSPTSSYRALGGKPRTLSVDAGQNWGRSQRNRLRDGDDRERRQSQVSSASSGALKKHSLDDWVLGEELGVGSYSTVYCVTPSANTHSPTSPQPARKYALKVINQAHLIQEKKVKYAMVERDALIRLSDPRPSKGHKRGVSSSSSSGYTQTGSAGKRKSTASIGGQSSVASVSGGAASSSKKDTRDRLSIVTTSSAASSPVLTASSGSTQLSPTATSGGGGNNKGRRPSRSAEPPTRVQEQTEMLIHDRGDRQETPSREWDRDRDWDNMTRSRPPSPVREESTEGGEKDKDEEEPGASSEDLGAAIHLTLPPPQIPSTPEPRSSPLLSVDGQRTSREAARDRPHSTPKRRRQSLAPSERSMKSGSTTGKSPAAAAHPGVVRLFSTFNDSSSLYFVLSLASNGELASMIRKYGSLDITSARYYAAQLIDTLEFVHSRGVIHRDLKPENILLDEDMRIKITDFGSAKIIAREEPVADDSSRSRSFVGSADFVSPEVLRNEVATTASDIWAFGCILYQFICGKPPFRGATDYLTFQKILKREMEFPECIDKDAKSLIDTILNLEPNLRPSITFIKTHPFFQSVDFSTLWTIPAPPISSGLREPSKSTTLAQLEASDIWGVFEGSDVGEEDEDGFEYDDDLSSRAGDGAEGTGPMSGRQVAANAVHHVDNPKLSTRSRNHIDLGQDLDHPRSAYAGSGAGRRGKKQKQKEKEKGNNARGWSHGSENPGGNRSALGGWLGEMWGEVATFARDTFATGKTFLPGGGGRALENRSGKSPQQKPADTAARMRK

SEQ ID NO: 11987 - protein, 264 aa, Hyacinthus orientalis
QQCVPSIKEVISLGISVNVTLIFSLSRYEAVIDAYLDGLESSGLSDLSKLTSVASFFVSRVDTLVDKMLEKIGTPEALNLRGKAAVAQAALAYKLYRKKFSGPRWEALVKKGAKKQRLLWASTSVKNPAYSDTLYVAPLIGPDTVSTMPDQALQAFIDHGVVSRTIDANVSDAEGIYSALEKLGIDWNEVGTILDADGVESFKKSFDSLLVSLQENGDSLKLVSHYETPLSWSAITISTRALACGWAPGKLVELNKRYRSFNPL

SEQ ID NO: 11988 - protein, 166 aa, Glycine max
  misc_feature (142)..(142): Xaa can be any naturally occurring amino acid
  unsure (1)..(166): unsure at all Xaa locations
MERGDCQFTVVPPRQYDEAQFMHQLMVAGDQQDPAGAGRGAAAAGGERKRRFTEEQVRSLETTFHARRAKLEPREKAELARELGLQPRQVAIWFQNKRARWRSKQLEHDYAALRAQFDAMHARVESLRQEKIALAAQVDELXGRLNERQDQSGSCEVNDAEAAADD

SEQ ID NO: 11989 - protein, 581 aa, Triticum aestivum
MAAPTSSAASTLAPFAHPKTLAAAAASSISSVAFSPAASHPACALSASTRRRAVAAMVAAPAKVGAAMPSLDFDTAVFNKEKVSLAGHEEYIVRGGRNLFPLLPEAFKGVKQIGVIGWGSQGPAQAQNLRDSLVEAKSDIVVKIGLRKGSKSFEEARGAGFTEENGTLGDIWETVSGSDLVLLLISDSAQADNYEKIFSHMKPNSILGLSHGFLLGHLQSHGLDFPKNISVVAVCPKGMGPSVRRLYVQGKEVNGAGINASFAVHQDVDGRATDVALGWSVALGSPFTFATTLEQEYKSDIFGERGILLGAVHGIVEALFRRYTEQGMDEELAYKSTVEGITGIISKTISKKGMLEVYNSLSEEGKKEFNKAYSASFYPCMDILYECYEDVASGSEIRSVVLAGRRFYDKEGLPAFPMGKIDQTRMWKVGEKVRSTRPDGDLGPLHPFTAGVYVALMMAQIEVLRKKGHSYSEIINESVIESVDSLNPFMHARGVAFMVDNCSTTARLGSRKWAPRFDYILTQQAFVTVDKDEPINQDLISNFMSDPVHGAIEVCAELRPTVDISVTADADFVRPELRQSS

SEQ ID NO: 11990 - protein, 229 aa, Arabidopsis thaliana
MSSRDRGSPSSSSSSSSLPGIEKYNEKVKNQIQALVRVIKVARTYRDDNVPSLIEQGLYLGSVAAASNKNVLKSYNVTHILTVASSLRPAHPDDFVYKVVRVVDKEDTNLEMYFDECVDFIDEAKRQGGSVLVHCFVGKSRSVTIVVAYLMKKHGMTLAQALQHVKSKRPVASTKNGFIRQKQKKKKSIKKKQVTIAQCQACRSLIVPLGDTCKSHTKHQSKCFVVSSP

SEQ ID NO: 11991 - protein, 607 aa, Klebsiella pneumoniae
MRMLLKTSRRTFLKGLTFSGVAGSLGVWSFNARSSLSLPVAASLQGTQFDLTIGETAVNITGSERQAKTINGGLPGPVLRWKEGDTITLKVKNRLNEQTSIHWHGIILPANMDGVPGLSFMGIEPDDTYVYTFKVKQNGTYWYHSHSGLQEQEGVYGAIIIDAREPEPFAYDREHVVMLSDWTDENPHSLLKKLKKQSDYYNFNKPTVGSFFRDVNTRGLSATIADRKMWAEMKMNPTDLADVSGYTYTYLMNGQAPLKNWTGLFRPGEKIRLRFINGSAMTYFDIRIPGLKMTVVAADGQYVNPVTVDEFRIAVAETYDVIVEPQGEAYTIFAQSMDRTGYARGTLATREGLSAAVPPLDPRPLLTMEDMGMGGMGHDMAGMDHSQMGGMDNSGEMMSMDGADLPDSGTSSAPMDHSSMAGMDHSRMAGMPGMQSHPASETDNPLVDMQAMSVSPKLNDPGIGLRNNGRKVLTYADLKSRFEDPDGREPGRTIELHLTGHMEKFAWSFNGIKFSDAAPVLLKYGERLRITLINDTMMTHPIHLHGMWSDLEDENGNFMVRKHTIDVPPGTKRSYRVTADALGRWAYHCHLLYHMEMGMFREVRVEE

SEQ ID NO: 11992 - protein, 485 aa, Vibrio vulnificus YJ016
MATNPLSILFVASEVEGLIKSGGLADVAKALPEALVNLQHDARIAIPAYTAIPNVCDDEVILDTHLETWPHTHYQVKKRFLGDNPVYLIACGHYFDRPSMYAENNQAYTDNGERFAFFSAACLDMLPKIGFQPDIVHANDWHTGLVPFLLKHRYGQDPFFAQTKSILSIHNAVFKGVFHYDEMQCLPEFHCRNVPDAAVSSTHMTMLKAGVMNADKINAVSPTYAEELKTELGSHGMAWEFQQRAGDLVGILNGCDYSAWHPDTDSYLPINYKATKQSMVRGKNGCKRALQEQVGLPVKDVAMFGMVCRLTHQKGVHYLLPVLTEFLKLDVQLVLVGTGDPLLAAQLRDVAAQFGEKFVFVEAYNNQLAHLVEAASDFFLMPSEFEPCGLNQIYSMAYGSLPIVRGVGGLKDSVCDYDVNPETATGFVFYEPTAQALLITMQRALLLYAQNLTELRRVQLYAMERDFCWNKAAEQYVELYRSALK

SEQ ID NO: 11993 - protein, 458 aa, Listeria monocytogenes str. 4b F2365
MEEQKEELQRGLKNRHIQLIAIGGAIGTGLFLGAGKSIHLAGPSIMLVYLIIGAILFFVMRALGELLIHNPTTGSFTEFAEQFIGPWAGFITGWTYWFCWIVTGIAEITAVGMYVKFWVPDLPQWIPALACVLILLLFNLATVKAFGEIEFWFAIIKVVVIIALIVIGFVLVFIGYKHGTSTASFSNLVDYGGFFPNGIAGFLLAFQMATFSFVGIELVGVTAGEADDPERTLPKAINNIPIRILIFYIGALLVLMSIYPWSNIDPNTSPFVSVFTMIGIPAAAGIINFVVLTAAMSSCNSGIFSTSRMLYTLSAEGKAPKKMHHLSSNGVPATALITSTACLLIGVFLNYFLPEQVFILVTSIATICFIWVWGVILVAHLRFRHKHPEIAEKSKFKMPLSPLMNWVSLIFFGGLLVILGFAADTRIALFVTPVWFLILGIAYQVLKASNRKTKIRHN

SEQ ID NO: 11994 - protein, 641 aa, Aeromonas veronii bv. Sobria
MVFIVKMDLTLRYLEELFVKGIAAGGVIATIPLSVNAKEDYPQKVYSSVLSGCSYRSGSRRSRCHFTGSTRIATVVNRSIPAPTLRLKEGDEVTLRVTNKLSETTSIHWHGIILPFEMDGVLGISFNGIKPGETFTYKFKLEQSGTYWYHSHSGSQEPQEQTGMYGALIIEPKDGEIISADRDYVVLLSDWTDEHPMRILAKLKSQSDYYNFNQPTAIDFVKDVSNSGLKVAFTKRQMWNEMRMNSTDLADLSSETLTYLMNGQAPSGNWTGVFNKGERVRLRFINGAGGSFYDVRVPGLKMTVVQTDGVDIEPVDVDEFRFGPGETYDVIVEPIKEAHTIFAQSMDRTGYARGTLSTAIGLSAPIPPVDKPEPLSMEDMMGSMEGMDHSSMAGMDHGSMPGMSSGEMPAMDHSSMPGMTSGAMPAMDHSSMPGMTFRCNASMDHGSMPGMEGMDHSAMLGMNTTAQPSVVRHASTEFGPSVDARVDTPRRNLNDPGVGLRNNGRRVLTLADLKTKGGPIDPRPAEREIELHLTGNMERYTWSFDGVEFGKSTPIHFNYGERVRITLHNDTMMTHPMHLHGMWSELENENGSFLVRKHTIAVQPAQRISFLVTADAIGRWAWHCHIMFHMDAGMFREVVVS

SEQ ID NO: 11995 - protein, 95 aa, Rhodobacter capsulatus
MAFKPLHDRVLVKRVQSEEKTKGGLIIPDTAKEKPAEGEVVAVGAGARKDSGELIAPAVAVGDRILFGKWSGTEVTLDGVEMLIMKESDIMGIIS

SEQ ID NO: 11996 - protein, 278 aa, Clostridium thermocellum ATCC 27405
MKLTAEHKKRLLIQAADIRTKTAELVYHGNGGHIGGDLSEIDILTVLYDYMKHDPKNPDWDERDYFILSKGHAAEAYYVLLHEYGYIDKSDLDAFGSFQAKLGGHPTKKIKGVEANTGSLGHGLGLATGMALALKMSKKNNRVFVLTGDGELAEGSNWEAAMAASKFKLKNLTWIIDRNYLQISGNTEDIMPLENLKQKTEAFGFHTLVINGHDLDEIREALEIQDPDGRPMCIIANTIKGKGLYCAENKAEWHHKTPSAEQIEQMKRDMSMYKRSLI

SEQ ID NO: 11997 - protein, 545 aa, Rhodobacter capsulatus
MAAKEVKFSTDARDRMLKGVNILADAVKVTLGPKGRNVVIEKSFGAPRITKDGVSVAKEIELADKFENMGAQMVKEVASRTNDEAGDGTTTATVLAQAIVREGMKAVAAGMNPMDLKRGIDLATTTVVEAIKAAARPVKDSDEVAQVGTISANGEAQIGRFIADASQKVGNEGVITVEENKGMDTEVEVVEGMQFDRGYLSPYFVTNPDKMIADLEDAYILLHEKKLSSLQPMVPLLEAVIQSTRPLIIVAEDVEGEALATLVVNKLRGGLKIAAVKAPGFGDRRKAMLQDIAILTGGQVISDDLGMKLENVTLDMLGRAKKVTISKENTTIVDGHGDKAEINARVAHIRTQIEETTSDYDREKLQERVAKLAGGVAVIRVGGMTEVEVKERKDRVDDALNATRAAVQEGIIVGGGVALVQAAKKLNDLTGANSDQDAGISIVRRALEAPLRQIAENAGVDGAVVAGKVRESADPAFGFNAQTEEYGDMFGFGVIDPAKVTRTALEDAASIAGLLITTECMIAEKPEPKAAPAGGMGGMGGMDMM

SEQ ID NO: 11998 - protein, 461 aa, Arabidopsis thaliana
MISGSMENLDEIRTDIVESTAPLLQESSSESNGGGEFNGASFSGAVFNLATTIIGAGIMALPATMKILGLIPGITIIVLMAFLTDASIEFLLRFSNIGNQRSYGGVMDDSFGKCGRIMLQVSILVSNIGVLIVYMIIIGDVLAGKNEYGIHHAGMLEGWFGISWWNRRTFVLLVTTLTVFAPLTCFKRIDSLRFTSAISVALAVVFLVITAGITIIKLFTDGLMMPRLLPNVTDLSSFWKLFTVVPVLVNAYICHYNVHSIQNELEDPSRIKPVVRSALAMCSSVYVMTSLFGYLLFGDGTLDDVLANFDTDLGIPFGSVLNDAVRFSYAAHLMLVFPVVFYPLRINIDGLIFPTAPPLTSSESDLRFGSITAGLIAVIFLGANFIPSIWDAFQFTGATAAVCIGFIFPAAVILKDRHNQATKRDKTIAICMIVLAVFSNAIAIYSDAYALFKKHTYVYPI

SEQ ID NO: 11999 - protein, 477 aa, Nocardioides sp. JS614
MSSGLWIDGGWQESRGDRGEFAVVDPATTGVLARVVDGSVEDMAAAVDAASRTHETWAETPARERSVVLRRAWELMTERSEELARLIVLENGKALPDARSEVVYAAEFFRWFSEEAVRAHGDMRRSPSGQNWIMVTEEPIGVALLVTPWNYPAAMATRKIAPALAAGCTAVLKPAAETPLTALALAELLADAGLPDGVLNVVCTTRAGQLVEHALGDPRVRALSFTGSTEVGRKLLALAARNVVRASMELGGNAPFVVLDDADLEEAVEGLMVAKLRNGGSACTAANRIYVADRVADEFVERFTARMAGVRHGNGLDEGVELGPLVNEDTQRKVGELVDGALREGASLATGGGHDGLPGYSYRATVLTDVKPDAEILKHEIFGPVAPIVRFGEDAEAVALANDSEFGLISYLYTRDLDRGLAVSRRLRSGMVGVNRGVVSDPAAPFGGVKQSGIGREGAAEGLREFTEMKYTAIPYR

SEQ ID NO: 12000 - protein, 265 aa, Digitalis lanata
PTCGVKCLLEEEAIKVGGANHSHATQDLYDSIAAGNYPEWKLFIQTIDPDHEDRFDFDPLDVTKTWPEDILPLQPVGRMVLNKNIDNFFAENEQLAFCPAIVVPGVYYSDDKLLQTRIFSYSDTQRHRLGPNYLQLPANAPKCAHHNNHHEGFMNFMHRDEEVNYFPSRYDPCRHAERFPHPPVALNGKRDRICIEKENNFKQPGEKYRSFPPDRQERFIKRWVDALSDPRLTHEIRSIWVSYWTQADKSLGQKLASRLNIRPTM

SEQ ID NO: 12001 - protein, 496 aa, ASPERGILLUS NIDULANS FGSC A4
MGSIGTGSGVDLSHHINRKSKARHPSPLKDIIRFMSQDTMISLAGGLPHPTLFPLHTARFDCLPPSSSIPDPDKGGTPDDPVSLMLGRNSGPGELDLTQFLQYGSGTGNEHLISLCKEITNKVHSPPCEYECLLHPGNTNAWAKVVGMLCEDDDYILVEEYTYPSAQVLWIPLGVRAVPVSADAQGISAIVLRDVLANWDEKSRGAKRPTVLYLVAVGSNPTEYPTPDIIIVEDDPYYFLQYPPYSPSANFSATEFQPLDTASSLKSLTPSFLSLDTQSRVIRLESFSKTVFPGLRLGYFVANPLFTERLLRATEVETQDPAGLSQAFILALLKKWGRQYRVRRDWIVGAFHKHFTILPAANSRLLKADGYVACLADCTGQLKPVFSFIDPGAGMFIWSKWYFAGVKRFAELSASDKLDPEQAFATELWNSWASELFLLTPGSYYHHWQGKNKVTRRERGAEKGTAHFRFSFATPTEKQINAEVERVKTVVDRYWN

SEQ ID NO: 12002 - protein, 391 aa, Vigna radiata var. radiata
YFDGWKAYDENPYDELTNPSGVIQMGLAENQVSFDLLEKYLEAHSEASTWGKGAPGFRENALFQDYHGLKTFRTAMASFMEQVRGGRAKFDPQRVVLTAGATAANELLTFILANPGDALLVPTPYYPGFDRDLRWRTGVNIVPIHCDNSNNFQITPEALEAAYKDAEAMKYKVRGVLITNPSNPLGVTIPRSVLEEILDFVTRKNIHLVSDEIYSGSVFSSSEFTSVAEILEGRQYRNAERVHIVYSLSKDLGLPGFRVGTIYSYNDKVDTTARRMSSFTLISSQTQHLLASMLSDKNFTENYIKTNRERLRKRYEMIIEGLKSAGIECLKGNAGLFCWMNMSPVLEKPTREGELELWNAILHEVKLNISPGSSCHCSEPGWFRVCFANMD

SEQ ID NO: 12003 - protein, 394 aa, Staphylococcus aureus subsp. aureus MSSA476
MSEKQQILDYIETNKYSYIEISHRIHERPELGNEEIFASRTLIDRLKEHDFEIETEIAGHATGFIATYDSGLDGPAIGFLAEYDALPGLGHACGHNIIGTASVLGAIGLKQVIDQIGGKVVVLGCPAEEGGENGSAKASYVKAGVIDQIDIALMIHPGNETYKTIDTLAVDVLDVKFYGKSAHASENADEALNALDAMISYFNGVAQLRQHIKKDQRVHGVILDGGKAANIIPDYTHARFYTRAMTRKELDILTEKVNQIARGAAIQTGCDYEFGRIQNGVNEFIKTPKLDDLFAKYAEEVGEAVIDDDFGYGSTDTGNVSHVVPTIHPHIKIGSRNLVGHTHRFREAAASVHGDEALIKGAKIMALMGLELITNQDVYQDIIEEHAHLKGNGK

SEQ ID NO: 12004 - protein, 441 aa, uncultured bacterium 561
MSIRYLVGALFLVLLLPASFSAADELDARIDSLYDQELKELFLWLHQNPELSHMEHKTSARLASELESFGYDVHTGIGGTGIVALLENGEGPLVMFRADMDGLPVEEKSGLPYASKAKQVDWDGNEVFVMHACGHDVHVTSLVGTARIMAERRDSWQGTLMLIGQPAEERVGGARLMREDNIWGRFGQPDYAMALHVTSSVPTGMLIADPAPYSGADTVDILIKGVGAHGASPHSGVDPVLLGSQIVVALQSVVSRNLPPRRPGVITVGSFHSGTKHNIISDAAKLQITVRSESATDRALLLDGIRRVAENTGRMMGLSGDMLPEVIVYENEGVPPTLNDIAMLERVRGVWTDTLGEGIFYNEQRLAMGAEDFPFFTVDPYIPSVYFAVGGTDQADFDRAAAGGPPVASHHSPLFKIEPEPSVELSIKASVTGLTDLLQLP

SEQ ID NO: 12005 - protein, 1038 aa, Bifidobacterium longum DJO10A
MERCDRVMQQRVKPHIHTTLAACTLRSFHNPGEPVPSSEFLAKVRNGQVPFEPFRVPGVWGTTWGTTWFEVNGHIDMAAVKGRKVELMVDLGWLDHRGPGFQSEGLVYRADGTAIKSANPRNHWIPLVYADGSSTVELDEHGDFTVYIEAAANPFVEGPTPFSPTELGEEATGTCDFPYTLSRMDITIFNEDVFAYDMDLETVSSLIRELKDDDPRYWQLAKALQRSLNIYDERDLETVPAARAALAGVLAEPAASSAINHIAIGHAHIDSAWLWPVRETRRKVARTVSNVLALMDEDPDFTYAMSSAQQYAWLEEEHPDLFARMKRRIEEGRFIPVGGMWVESDNMIPSGESLVRQITFGRRYFKEHLGVTPRGIWLPDSFGYTGSWPQIARRAGFDWFLTQKISWNDTTKFPHHSFMWEGIDGTRILTHFPPSDTYCSSMSMRELMYSQRNFLDKDLSRNAILLYGFGDGGGGPTREMTARIRRDHDLAGAPKIDFGTPDQLFDRVRKDIVDDARGETPVFHGELYLELHRGTLTAQQDMKRGCRQEESMLRVVEYLCAVASIKNPGYVYPREELDRIWKTLLLNQFHDILPGSAIAWVHRQAREEYARDIARLRDIAAAAGQAVKEADPGIATVKHAVIAPYASNPQYSWAVRDGGGTAVEESVIPVSVERDGNAIILDNGRLRVRIEADGTVSSLIDLALRRELVPSGVRMGRYELLKDEPFHWDAWDIQRDAFLAADTLTDAMVEHVEDMPDGSAAIHVVTRARGVEIHTVITLRPGSGSLDFTADVDWHAVEKFLKVDMPVTVQAVNAQYECQYGLVERPINKNTRSDDAKFESCTHRFVRIADAGYAAAVVNASTYGSDVSPIHAAAAHGAGRGTMVRLSLLSAPLYPDPRTDQGEHFFAWSLVAGAGMESVLAEASRLNAPIMDELPAVRPLATLTDVAGTPVLDWVKLADDGSGDLIVRLYEAAGGDAKATLRLDDTFAGCTVEEVNLMEEPVLADDLPRALVAGGPVPAEGASVSFTPFQIVTLRIRR

SEQ ID NO: 12006 - protein, 426 aa, Anabaena variabilis ATCC 29413
MPTLPLEGASPAHICPFDQACSYLEAAAKELRLDQGTLEILSHPRKVVTVSIPVRLDNGDIRVLAGHRVQHSDILGPYKGGTRYHPAVTLREVSALAMLMTWKCALLGIPYGGAKGGIAINPQHYSVGELEKITRRYTSELIKDIGPAVDIPAPDVGTSAREMAWMMDTYSVNVGHAVPGVVTGKPISIGGSRGREMATGRGVMIIVREALADMGRTLEGVKVVIQGFGNVGGAAAELLYQAGAKILAVSTGAGGLFAADGLDIPALKAYAAENHRSIVGFPQAVAISNAELLTLPCDVLIPAALENQITEENVDQIQAQIVAEAANGPVTLEANRVLEGRGVTVLPDILANAGGVVVSYLEWVQGLSYLFWDEERVNREMEHLMVQAYHQVIKQSQMRQVPLRLAAYTLGVGRVAQALSDRGLYP

SEQ ID NO: 12007 - protein, 346 aa, Bacteroides fragilis YCH46
MLAYTYVEHGKFELLEKLRPQIKDARDVIVRVTLGSICTSDLHIKHGSVPRAVPGITVGHEMVGIVEEVGSGVISVRPGDRVTVNVETFCGECFFCRHGYVNNCTDPDGGWALGCRIDGGQAEYVRVPYAEQGLNRIPDNVSDEQALFVGDVLATGFWATRISEISEDDTVLIIGAGPTGICTLLCVMLKKPRRIIVCERSAERIRFVREHYPDVLVTEPENCRDFVLCNSDHGGADVVLEVAGSEETFRLAWECARPNAIVTIVALYDKPQFLPLPDMYGKNLIFKTGGVDGCDCAEILSLIEQGRIDTTPLITHRFPLNEIEEAYRIFENKLEGVIKIAITGGR

SEQ ID NO: 12008 - protein, 405 aa, Brassica napus
MQSSAVFSLSPSLPLLKPRRLSLRHPVTASSNLNVSPPNVVSVPPLPRRSWRLASSDSPLRAWSGLPSVSSPSLDTNRFKTAATAVPENAEEGEGSGKMTKVLELGLLFAMWYLFNIYFNIYNKQVLKALHAPMTVTLVQFAVGSVLITFMWALNLYKRPKISAAQLAAILPLAVVHTLGNLFTNMSLGKVSVSFTHTIKAMEPFFSVVLSAMFLGEVPTPWVIGSIIPIVGGVALASVTEVSFNWAGFLSAMASNLTNQSRNVLSKKVMVKKDDSLDNITLFSIITLMSLFLMAPVTFFSEGIKFTPSYIQSAGVNVQQIYTKSLIAALCFHAYQQVSYMILARVSPVTHSVGNCVKRVVVIVSSVIFFKTPVSPVNAFGTGIALAGVFLYSRVKRIKPKPKTA

SEQ ID NO: 12009 - protein, 481 aa, Streptococcus mutans UA159
MPIINKTMLITYADSLGKNLKELNENIENYFGDAVGGVHLLPFFPSTGDRGFAPIDYHEVDSAFGDWDDVKCLGEKYYLMFDFMINHISRQSKYYKDYQEKHEASAYKDLFLNWDKFWPKNRPTQEDVDLIYKRKDRAPKQEIQFADGSVEHLWNTFGEEQIDLDVTKEVTMDFIRSTIENLAANGCDLIRLDAFAYAVKKLDTNDFFVEPEIWTLLDKVRDIAAVSGAEILPEIHEHYTIQFKIADHDYYVYDFALPMVTLYSLYSSKVDRLAKWLKMSPMKQFTTLDTHDGIGVVDVKDILTDEEITYTSNELYKVGANVNRKYSTAEYNNLDIYQINSTYYSALGDDDQKYFLARLIQAFAPGIPQVYYVGFLAGKNDLELLESTKEGRNINRHYYSSEEIAKEVKRPVVKALLNLFTYRNQSAAFDLDGRIEVETPNEATIVIERQNKDGSHIAKAEINLQDMTYRVTENDQTISFE

SEQ ID NO: 12010 - protein, 527 aa, Arabidopsis thaliana
  misc_feature (82)..(82): Xaa can be any naturally occurring amino acid
  misc_feature (103)..(103): Xaa can be any naturally occurring amino acid
  misc_feature (137)..(137): Xaa can be any naturally occurring amino acid
  misc_feature (151)..(151): Xaa can be any naturally occurring amino acid
  misc_feature (182)..(182): Xaa can be any naturally occurring amino acid
  misc_feature (191)..(191): Xaa can be any naturally occurring amino acid
  misc_feature (290)..(290): Xaa can be any naturally occurring amino acid
  misc_feature (298)..(298): Xaa can be any naturally occurring amino acid
  misc_feature (314)..(314): Xaa can be any naturally occurring amino acid
  misc_feature (332)..(332): Xaa can be any naturally occurring amino acid
  unsure (1)..(527): unsure at all Xaa locations
MESQLWNWILPLLISSLLISFVAFYGFFVKPKRNGLRHDRKTVSTVTSDVGSVNITGDTVADVIVVGAGVAGSALAYTLGKXKRRVHVIERDLSEPDRIVGEXLLQPGGYLKLLELGIEDCVEEIDAQRVYRYALFXNGKVIRISSAMEHXDTGLCMKGTCAKEVSLTNCELELLPVVSFRXENGNINGLXYRIRAGEVLTAFAALTIVCDGCFSNLRRSLCNPQVEVPSCFVGLVLENCNLPYANHGHVVLADPSPILMYPISSTEVRCLVDVPGQKVPSIANGEMKNXYLKTVVAXPQMPHEVYDSFIAAVXDKGNIKSMPNRSMPASPXPNPGALLLAYALSMRHPLSGGGMTVALADIVVLRNLLRPLRDLSDGASLCKYLESFYTLRKPVAATINTLANALYQVFCSSENEARNEMREACFDYLGLGGVCTSGPVSLLSGLNPRPLTLVCHFFAVAVYGVIRFYLSRFPSPKRIWLGAKFISGASGIIFPIIKAEGVRQMFFPATVPAYYYKAPTVGETKCS

SEQ ID NO: 12011 - protein, 536 aa, Streptococcus mutans UA159
MQKHWWHKATVYQIYPKSFMDTNGDGIGDLKGITSKLDYLQKLGVMAIWLSPVYDSPMDDNGYDIANYEAITDIFGNMADMDNLLTQAKMRGIKIIMDLVVNHTSDEHAWFIEAREHPDSSERDYYIWCDQPNDLESIFGGSAWQYDDKSDQYYLHFFSKKQPDLNWENANLRQKIYDMMNFWIDKGIGGFRMDVIDMIGKIPAQHIVSNGPKLHAYLKEMNAASFGQHDLLTVGETWGATPEIAKQYSNPVNHELSMVFQFEHIGLQHKPEAPKWDYVKELNVPALKTIFNKWQTELELGQGWNSLFWNNHDLPRVLSIWGNTGKYREKSAKALAILLHLMRGTPYIYQGEEIGMTNYPFKDLNELDDIESLNYAKEAFTNGKSMETIMDSIRMIGRDNARTPMQWDASQNAGFSTADKTWLPVNPNYKDINVQAALKNSNSIFYTYQQLIQLRKENDWLVDADFELLPTADKVFAYLRKVREERYLIVVNVSDQEEVLEIDVDKQETLISNTNESAALANHKLQPWDAFCIKIN

SEQ ID NO: 12012 - protein, 439 aa, Arabidopsis thaliana
MDTSEARNRKVVAVEQFDLEVPETAHQISSDSWFQVAFVLTTGINSAYVLGYSGTVMVPLGWIGGVVGLILATAISLYANTLIAKLHEFGGKRHIRYRDLAGFIYGKKMYRVTWGLQYVNLFMINCGFIILAGSALKAVYVLFRDDSLMKLPHFIAIAGVVCAIFAIGIPHLSALGIWLGVSTILSIIYIIVAIVLSAKDGVNKPERDYNIQGSSINKLFTITGAAANLVFAFNTGMLPEIQATVKQPVVKNMMKALYFQFTVGVLPMYAVTFIGYWAYGSSTSTYLLNSVSGPVWVKALANISAFLQSVISLHIFASPTYEYMDTKYGVKGSPLAMKNLLFRTVARGSYIAVSTLLSALLPFLGDFMSLTGAISTFPLTFILANHMYLVAMNDELSLVQKLWHWLNVCFFGLMSLAAAIAAVRLISVDSKNFHVFADV

SEQ ID NO: 12013 - protein, 549 aa, Pyrobaculum aerophilum str. IM2
MSQAVLTQIGGVPVLVLKEGTQRAFGKEALRLNIMIARAIAEVMRTTLGPKGMDKMLIDSLGDITITNDGATILDEMDVQHPIAKLLVEISKSQEEEAGDGTTTAVVLAGALLEEAEKLLEKNIHPTVIVSGFKKALDVAAEHLRKVAIPVNRTDVDTLRKIAMTSMGGKISETVKEYFADLAVKAVLQVAEERNGKWYVDLDNIQIVKKHGGSLLDTQLVYGIVVDKEVVHAAMPKRVVNAKIALLDAPLEVEKPEIDAEIRINDPTQMRAFLEEEERILRGYVDKLKSLGVTVLFTTKGIDDIAQYYLAKAGILAVRRVKRSDIEKLVRATGARLVTSIEDLTEADLGFAGLVEERRVGDEKMVFVEQCKNPKAVSILVRGGFERLVDEAERNLDDALSVVSDVVEDPYILPAGGAAEIEAAKAVRAFAPKVGGREQYAVEAFARALEVIPKALAENAGLDPIDILTELTHKHEQTDGWKYGLDVYQGKVVDMVSLGLVEPLTVKINALKVAVEAASMILRIDEIIAASKLEKEKEEKKEEKKEEFD

SEQ ID NO: 12014 - protein, 394 aa, Glycine max
  misc_feature (112)..(112): Xaa can be any naturally occurring amino acid
  misc_feature (169)..(169): Xaa can be any naturally occurring amino acid
  misc_feature (339)..(340): Xaa can be any naturally occurring amino acid
  misc_feature (353)..(353): Xaa can be any naturally occurring amino acid
  misc_feature (366)..(366): Xaa can be any naturally occurring amino acid
  unsure (1)..(394): unsure at all Xaa locations
MGNSEEDQSTKTEKPSSPVTMDQANQTNQTNIHVYPDWAAMQAYYGPRVTMPPYYNSAVASGHAPHPYMWGPPQPMMPPYGPPYAAIYPHGGVYTHPAVPIGPLTHSQGGPXTMQAGTPLSIETPPKSSGNTDQGLMKKLKEFDGLAMSIGNGHAESAERGGENRLSQXDGEGKTEIQGSPISKETAASNKMLGVVPASVAGTIVGHVVSSGMTTALELRNPSSVHSKTSAPQPCPVLPAEAWVQNERELKRERRKQSNRESARRSRLRKQAETEELARKVESLNAENATLKSEINRLTESSEKMRVENATLRGKLKNAQLGQTQAITLKIIDSQRATXXVSTENLLSRVNNXSGSNDRTVEDEKXFCENKPNSGAKLHQLLDTSPKADAVAAG

SEQ ID NO: 12015 - protein, 493 aa, Arabidopsis thaliana
MSRHFLFLGIIILLFSAFVASAPSSTSPATVPTKSMVKFENGYSVETVLDGSKLGIEPYSIQVLSNGELLILDSQNSNIYQISSSLSLYSRPRLVTGSPEGYPGHVDGRLRDARLNNPKGLTVDDRGNIYVADTVNNAIRKISEAGVTTIAGGKMVRGGGHVDGPSEDAKFSNDFDVVYLGSSCSLLVIDRGNQAIREIQLHFDDCADQYGSGFPLGNIYIPKFSVWVPSCILQSSLSQLLFNVSLIQCFNIAGIAVLVAAVFFGYMLALLQRRLSSIVSYHTDQEVFEAVPDQDPIKPVRPPLILTGDEQEKQEESFLGTLQIFISNAWVFSVELFSGMFPGLRKKQTVGLNFNHQETKHSAFSTTSWPIQESFVIHNKDEPPPVESRNATPGKIYPFMSKDATEKMQQLRQSRALYRSLDAEFLQEQQQEKHQQYHHRHHSTIPYTLYEQSSEKTNEIVFGPGQEQDQMNTHQNIHHRAHQFVSYPYGYYS

SEQ ID NO: 12016 - protein, 257 aa, Solanum melongena
PDCIFYDLYFPWTVDIALELKIPRLLFNQSSYMYNSILYNLRLYKPHKSKTITSTGKFSVPGLPDKIEFKLPQLTDDLIKPDDEKNAFDELLDQTRESEDRSYGIVHDTFYELEPAYADYYQKVKKTKCWQIGPISHFSSKLFRRKELINAADESNSRAIVEWLNAQKHKSVLYISFGSVVKFPEAQLTEIAKALEASSVPFIWVVKKDQSAETAWLREEEKLKKKGLIIRGWAPQLTILDHSAVGGFMTHCGWNSV

SEQ ID NO: 12017 - protein, 944 aa, Candida glabrata CBS138
MYGAVLMDSDTRNNEGKSGRRRDSVSTTPRMFSTNTEQTGAQIDTAREKHSKSSQPRVFHRKSLSGWDFMETVGAGSMGKVKLAKNKNSNEVCAIKIVHRATKAYMHKAQQLPPPADENEAKERQKRLNKEISRDKRTVREASLGQILFHPNVCKLYEMQTLSNHYYMFFEFISGGQLLDYIIQHGSLKENHARKVSRGILSALQYLHANNIVHRDLKIENIMLSKTGEIKLIDFGLSNMYDPRKSLQTFCGSLYFAAPELLKAHPYLGPEVDVWSFGVVLYVLVCGKVPFDDENSSALHEKIKKGKVTYPQFLSIDVISLLSKILVVDPQKRATLQQVVNHQWMLKGYDFPPQSYLPRRVPLTVDDINIDVIKEMYRFEFVESIDAAYKTIIDIITEPEYKQLADQYWELADKSSFSEDSKFFTDDFKDPTQAYHPLISLYYLTFEKMQRDAKKENKDWLSTKSSEITNSDVGLNKEYKFTPKKMESIQKEPSPSELLEEQGNVTPEDISPQISNDKEQSPIAGQSGSKAPRSSIKALTNRADQSAQVGKNAGISPKPSVENTEKSGFTNIFRRFSQRHQRPSNINNSIASKNNNIRTHTRAVSDYMSVAPNELQKPVEIVSQNLPDLPTDAKLIIEKTRNSSKNKSDENETLQPVPHAKGKKLHPTARAKSVGHARRESLNFTRPAVVPPNMADIEEVVDTGFLQTPDEEKLVKDKAFGEALSNTIVEDLTDDEILKEASKAPPGSMPSIDYPRTLFLKGFFSVQTTSSKPLPIVRYKIISVLKKHNIEFVEVKGGFVCSKSPTVTILNTKTAPEKVDVYSGYDNDDTPDWSSQQSPKSMNDARLVFSDLDKSSNPHLTEGHSNSSLNDFENDNLSVGGKGDYLDNIQGPRAKVMDRAPIKFEIHIVRVRIVGLAGIHFKKLSGNTWMYKELATRILHDLKL

SEQ ID NO: 12018 - protein, 486 aa, Listeria monocytogenes str. 4b F2365
MKKETHGEIRRDLKTRHLSMIAIGGSIGTGLFLASGNAIHTAGPGGALVAYIAIGIMVYFLMTSLGEMATYMPVSGSFSTYASRFVDPAFGFALGWNYWFNWAITLAVDISTAAIIVQFWLPNTPAWLWSAIFLILIFGLNALSVKAYGESEYWFSIIKVATVIIFLIVGVLTIVGILGGEVIGFSNFTAGDAPFKGGFFAILGTFLIAGFSFQGTEMVGIAAGESATPETSVPKAIKQVFWRILLFYIFAIFIIGMIIPYTNPNLLSAEATDVAISPFTLVFEKAGLAFAASVMNAVILTSVLSAGNSGLYASTRMLWAMARDKKAPKFLGKVNRRGIPMAALIVTTIVGAMTFITTLTENGTVIYTWLLSASGLTGFIAWVGIAISHYRFRKAFIKQGHDLSELKYKAKFFPFGPILALILCILVIVGQDYAAFLKPEFTNPAWWQKIGISYIGLPIFLVFWLSFKFTNKTKVIPLEDCKFDQK

SEQ ID NO: 12019 - protein, 167 aa, Kluyveromyces lactis NRRL Y-1140
MRAATHFQQFCVQHNNLYSMSFVLVSGASGYIAQHTIRILLEKGYKVIGTVRTQEKADSVAQLFNSDNLVLELVPELAKIDAFDHVFEKYNTQIKHVIHTASPVRYNMTDFENEMLLPAINGTRSVLESIKKFSADSVETVVYTSSISALANPAGIFKPETTLTEET

SEQ ID NO: 12020 - protein, 173 aa, Arabidopsis thaliana
  misc_feature (78)..(78): Xaa can be any naturally occurring amino acid
  misc_feature (91)..(91): Xaa can be any naturally occurring amino acid
  misc_feature (124)..(124): Xaa can be any naturally occurring amino acid
  misc_feature (134)..(135): Xaa can be any naturally occurring amino acid
  unsure (1)..(173): unsure at all Xaa locations
MNREKLMKMANTVRTGGKGTVRRKKKAVHKTNTTDDKRLQSTLKRIGVNSIPAIEEVNIFKDDVVIQFINPKVQASIXANTWVVTGSPLGXKIWPRFPFPQVHPAHLWPQANLGQPWRRLWQAXFPGTGVFSGXXNAASAPIQEEDDDDVPELVGETFETAAEEKAPAAAASS

SEQ ID NO: 12021 - protein, 997 aa, Bifidobacterium longum DJO10A
MPTDEFFEKLNRGDIDFKPFTLGGEWGTTWGTVWFRLTGTVPAGYPKGKPLELILDLGWYPHSCGGHIEGLVYRADGTAIKAVHPLNYWVPFMDAEGNAQVPVAEDGSFTLYLEAASNPLLLGVPPFIETELGDHATGKPDEPYVFKSADLAEFDERYENYSVDLDVVSSLMEFADKQSPRYWQLAKALQRSLNAYDERNPESVEAARAALAGVLAKPANASAMNVSAIGHAHIDSAWLWPVRETRRKVARTVSNALALMDADPDFKYAMSSAQQYAWLEEDHPDIFKRMKRRIEEGRFIPVGGMWVEADGMLPAGESLIRQIAYGRKYFKEHLGVEPKGVWLPDSFGYTGAWPQIARRAGYEWFLTQKISWNDTTKFPHHSFMWEGIDGSRIFTHFPPADTYAAWCKVQELDYAEKNFQDKDLSDRSLLLFGFGDGGGGPTRNMMEHLHRYENLEGVSKVSVEEPNDFFDKAHRQLAENAGPEMPVWKGELYLELHRGTLTSQQDMKRGCRQEESLLRTVEYLGAAATLADPNYAYPREELDRIWKTLMLNQFHDVLPGSSIAWVHREAREDYRRDLKRLAEIAQDMCAVLRKANPQADLLAEARISQFRNDGAAWRASRINEPTNALSVLTQALENGRVLLANGVLSVTIEADGTISSLLDEEHGRELVPAGTRLGRCELLKDEPAVWDAWEIERESLLMANAMTGSIESVDTENGAARVRVRTADDDTVITTTITLRPGSHTLDFHADIDWHERERFLKVDLPLGIVADQATYDCQYGLIRRPIVKNTASDEAKYESSTNRFAIIGDAGYAAAVINGSVYGSDASPIAGNAAEGRDSGTMFRLSLLSAPTFPDPRTDIGSHEFDWSVVADATVDRALDAAGVLNAPVLHDVPDITPLASIESVNGTVVLDWMKLADDGSGDLIVRAYEAAGGQADAMLHVCPALAGASVHETNVLEGDDLAADLPVALQDGRQNAEGATLHFGPFQLATLRITR

SEQ ID NO: 12022 - protein, 345 aa, ASPERGILLUS NIDULANS FGSC A4
MKYMSLDQRGSVMAEYIWIDAHGGTRSKTKTLSKAPSSVDELPEWNFDGSSTAQAPGDNSDVYLRPVAMYPDPFRRGDNILVLCETWDSDGSPNKFNYRHDCARLMETHAKEEFWFGLEQEYTLLGPDGWPYGWPKGGFPGAQGPYYCGVGTGKVYCRDIVEAHYRACLYAGVKISGINAEVMPSQWEYQVGPCHGIEMGDHLWISRFLLHRVAEEFGVKISFDPKPIKGDWNGAGLHTNVSTTSTRAEGGIKAIESYMKKLEARHVEHIAVYGEGNEERLTGRHETGNIDKFSYGVADRGGSIRIPRQVAKDGKGYFEDRRPASNADPYQITGIIAETVSFSNR

SEQ ID NO: 12023 - protein, 447 aa, Paxillus involutus
MSREIINIQAGQAGNQVGERFWKMLLAEHGLDDSGMYVGDDPLQIARAGVYFSPVDSAGPTKYVPRSVQIDLEAGVCNHIRSGPLGALFRPDTFFTGESGAGNNWAKGYYTEGAELIDGIFDVIRRQSEACDALQGFQIIPSLGGGTGAGLGSLLLSKLREEFPDRMLQTFSVLPSPNVSETVVEPYNALLSIHQLIDNCDLTICIDNEALYDIAVRTLKIKTPNFDDLNQLISKVMCGVSTSLRFPGQLNGDLRKLGMNLIPFPRLHFLMPSFAPFYDPKARAFQKMSIPELTASLFDRRNLLVACDPRFGRYLTAACIFRGKVSSNEVETSVAQLQRKNSNLFVEWIPDNVSVSMCSVPPVGQPQAGIALANSTSMQELFKRNLAQFSVMFKRRAFIHWYTGEGMDLMEFTEAESNTNDLISEYQQYQEAGAEDEEEAMEEAEDQ

SEQ ID NO: 12024 - protein, 390 aa, Anabaena variabilis ATCC 29413
MYQTKHESLKETMNIAELGTMEIIESVVEHEEHSLDALELIIEEEPPITDNLDSEERDSGDEMAAARPSGYNKTEHDDAVGAFFKEMARYPLLKPDEEVELARRVRFLEEVRDLQADLQLQLGLHPTKAQVAAQLEITEKQLENRLYQGRVAKRKMIRSNLRLVVSIAKRYLNRGVPFLDLIQEGAMGLNRATEKFDPDKGYKFSTYAYWWIRQAITRAIANDARTIRLPIHIVEKLNKLKKAQRELKQKFSRNPSEAEMAEALEISVPQLRQLQQLRRQALSLNHRVGKEEDTELMDLLEDEDNLSPEAKMNENMMRQEIWEVLGDVLTPREKDVISLRYGLTTSEPCTLEEVGNMFNLSRERVRQIQSKAMRKLRRPHIAKRLKGWLI

SEQ ID NO: 12025 - protein, 149 aa, Paxillus involutus
MADQLSEEQISEFKEAFSLFDKDGDGTITTKELGTVMRSLGQNPTEGELQDMINEVDADGNGTIDFPEFLTMMARKMRDTDSEEEIKEAFKVFDKDGNGYISAAELRHVMTNLGEKLTDTEVDEMIREADVDGDGQINYDEFVKMMLSK

SEQ ID NO: 12026 - protein, 312 aa, Methanococcus maripaludis S2
MKGTKKGMREAYGETLAELGEVNENIVVLDADLSGSTKTGIFAKKYPERFFNAGIAEQNMMGMAAGLSRTGKTVFASTFAMFATGRAWEQIRNSIAYPGLNVKICATHSGVTVGEDGASHEMTEDIAIMRAIPKMIVISPSDYLETKSAVRWAADYEGPVYVRMPRGNTEIIFEGEEEAKFEFGKARVLKDGTDITLIATGELVPEALNASKILSEKGISAQVIAIATIKPIDKDAIKNSKDFIVSIEDHSIIGGLGGAISEVIAEDGLNKKLLRVGINDEFGKSGKAGDLLKYYKLDSESIAETVMNAYKK

SEQ ID NO: 12027 - protein, 451 aa, Pseudomonas aeruginosa PAO1
MNATALSPNPAPAISRRTMLIAFVFCFLGLLADGVDLMFLAYSLNSLKAEFGLSNFEAGSLGSLTLAGMAVGGIYGGWCCDRFGRVRVVTWTIVLFSIGTALLGLTQNYWQFALIRFVASLGLGSLFVACNILMSECVGTRYRTTILAAMQAGWTVGYLVATLLAGQIIPEFGWRTLFFTAVAPALVCLALRPWVPESPSWLAAQAGRQRPGAAPQSHAEAGGAGPLGRMLGDPETRGMFLLWSLTSCFLLFGYYGTNNWMPSYLESELGMNFKSMTGYMVGTYSAMILGKVAAGVCADLFGRRLTFAAGAIGSAAFMPLIVFYHSPSNILWILITFGFIYGVPVGVLATYMTESFSTRVRGSAVGTAYNLGRIGAAVAPAGIGLLATHVSIGAGFLVMGITYVLTGLIPALFIADRLYDPNRESRDAESASRRQAPGSAVDTAERRAAKA

SEQ ID NO: 12028 - protein, 275 aa, Methanococcus maripaludis S2
MKNTKNLNFEELAVKSKSLRYNIVKMIGLAESGHPGGSLSAIDIVSSLYYNIMNYDPKDPKQDSRDRFILSKGHACPALYVTLADLGYFKEEELWSLRQLGALLQGHPTIEIPGIEVNTGSLGQGFSSSVGVAIGCKLNKYENNVFVLLGDGECQEGQVWEAAMAAAHYKLDNLIGFVDRNKLQIDGCTEDVMCLMDLKAKFSAFGFDVFEIDGHNFEEIVKTAELAKTMKNGKPKMIIANTVKGKGVSFMENNVGFHGKAPNKEELEKALAELQ

SEQ ID NO: 12029 - protein, 354 aa, Streptococcus mutans UA159
MQVSASSFLFCSVVYGLGILIMAILVLGGAGYIGSHMVDRLIEKGEEEVVVVDSLVTGHRAAVHPAAKFYQGDLADREFMSMVFRENPDVDAVIHFAAYSLVAESMKKPLKYFDNNTAGMIKLLEVMSEFGVKYIVFSSTAATYGIPDEIPIKETTPQRPINPYGESKLMMETIMKWSDRAYGIKFVPLRYFNVAGAKPDGSIGEDHSPETHLLPIILQVAQGVREKIMIFGDDYNTPDGTNVRDYVHPFDLADAHLLALNYLRQGNPSTAFNLGSSTGFSNLQILEAARKVTGQKIPAEKAARRSGDPDTLIASSEKAREVLGWKPQFDDIEKIIASAWAWHSSYPKGYDDRD

SEQ ID NO: 12030 - protein, 649 aa, Chlorobium tepidum TLS
MITFKAFLSRRPLLDILVDRLRQSRLPRFSSHHSGIKHSFMGLINPDFQTLPELFTSVFSHFKGQPDKAPIARKINGAYSPISYDSLAEDCRHFAAYLKERGIEPGDRVAILSENRPGWYLADIAILSLGATDVPLYPSLPPNQIEYILNNCSAKGIIVSNMLQLGKILSIWPKLPELNMVIVMNKLDEPVEDVIDLSQAKTEGKKVLEAKPWLLDGIKSNPDDVATLIYTSGTTGLPKGVMLTHRNICENVKSCSTVIRIDQTDSSLSFLPLSHAYERTGGYYLMFACGARINLAESVETISLNISEAKPTIIFTVPRLFDRMKASILKSVTSEGGVKEKIFFWAVSTGEKYHKQLATGKVSPLLAVQHNLADKLVYSKIRKKFGGKLRYFVSGGAALPQKTGEFFQSIGITILEGFGLTETSPVTNVNRPEKVKFGTVGLPVKNVEVKIAPDGEIMLKGPNIMKGYWKDEAASAEVLRDGWLYTGDIGEVDSEGYLKITDRKKHIIVTSGGKNIAPLQIENLILDSPYVDQAMIVGEKRPFLIALIVPDFLKLRDFAAEHQIKASSTKELINTKEVIEVYEKLLKSISRQLATHEKVRKFLLLEEPFSIENGMMTPTLKLKRKEITTKFSAEIDNLYNTLNMVYNTE

SEQ ID NO: 12031 - protein, 170 aa, Zea mays
MAPTVMMASSATAVAPFQGLKSTASLPIARRSSRSLGNVSNGGRIRCMQVWPAYGNKKFETLSYLPPLSTDDLLKQVDYLLRNGWIPCLEFSKVGFVYRENSTSPCYYDGRYWTMWKLPMFGCNDATQVYKELQEAIKSYPDAFHRVIGFDNIKQTQCVSFIAYKPPGSD

SEQ ID NO: 12032 - protein, 253 aa, Listeria monocytogenes str. 4b F2365
MTAYPQFDVILKALNLSSVGVIITDPEQKDNPIIFVNTGFENITGYAKEEALGSNCHFLQGDDTDKKEVAKIRHAINEKSTANVLLKNYRKDGTSFMNELTIEPIYDDHNHLYFVGIQKDVTTEHDYQLELEKSLTEIEKLSTPIVPIKENICVLPLIGSLTHDRFQHMSEYVSEYMDHGKEDYLIMDLSGLAEFNEDAVMNLVKFHGFMKLTGVELIITGISPKFAMTLIRYEENLASLTTYSTIKEALQFY

SEQ ID NO: 12033 - protein, 607 aa, Arabidopsis thaliana
  misc_feature (149)..(149): Xaa can be any naturally occurring amino acid
  unsure (1)..(607): unsure at all Xaa locations
MENYEVLEQIGKGSFGSALLVRHKHEKKLYVLKKIRLARQTGRTRRSAHQEMELISKIHNPFIVEYKDSWVEKGCYVCIIIGYCKGGDMAEAIKKTNGVHFTEEKLCKWLVQILLALEYLHANHILHRDVKCSNIFLTKDQDIRLGDFXGLAKVLTSDDLASSVVGTPSYMCPELLADIPYGSKSDIWSLGCCMYEMTAIKPAFKAFDMQGLINRINRSIVPPLPAQYSAAFRGLVKSMLRKNPELRPSAAELLRQPLLQPYIQKIHLKVNDPGSNVLPAQWPESESARRNSFPEQRRRPAGKSHSFGPSRFRGNLEDSVSSIKKTVPAYLNRERQVDLSTDASGDGTVVRRTSEASKSSRYVPVRASASPVRPRQPRSDLGQLPVSSQLKNRKPAALIRRASMPSSRKPAKEIKDSLYISKTSFLHQINSPDVSMNAPRIDKIEFPLASYEEEPFVPVVRGKKKKASSRGSYSPPPEPPLDCSITKDKFTLEPGQNREGAIMKAVYEEDAYLEDRSESSDQNATAGASSRASSGVRRQRFDPSSYQQRAEALEGLLEFSARLLQDERYDELNVLLRPFGPGKVSPRETAIWLSKSFKETTTTKLGD

SEQ ID NO: 12034 - protein, 142 aa, Brassica napus
YFLDDRINRAEVLFPGVACFLIAVCFGSAVHKSNAADNKSKLQGFKSLETTSSFQIETGPADSGLAKGKAKEGTAAYLIELEKQRAIKVFGKSTIIGLAITFFAGICFSLFSPAFNLATNDQWHTLKHGVPKLNVYTAFFYF

SEQ ID NO: 12035 - protein, 289 aa, Lycopersicon esculentum
MLLQQLSVLALLLLLCPVWADNFYQDATVTFGDQRAQIQDGGRLLALSLDKISGSGFQSKNEYLFGRFDMQLKLVPGNSAGTVTTFYLSSQGAGHDEIDFEFLGNSSGQPYTVHTNVYSQGKGNKEQQFRLWFDPTSPFHTYSIVWNSQRIIFLVDNIPIRVFNNHEKLGVAFPKNQAMRVYASLWNADDWATQGGRVKTDWSMAPFTASYRNFNTNACVWSAASSTSSCGGSKTDSVNNDQAWQTQELNGNDRNRLRWVQQKYMIYNYCADAKRFSQGLSPECKRSRF

SEQ ID NO: 12036 - protein, 641 aa, Streptomyces avermitilis MA-4680
MHNFGLPPSATPVMTGGLADSVFETALGNPGLPQIARRSHDSPGTWTQVSAAQLRDEVVDLARGLIASGIRPGNRVAIMSRTRYEWTVLSCALWSLGAEIVPLYPNSSHEQVAWILKDADCVGVLVEDEQGVMTVGSVCAGLPRLRHVWQLDSGSLDELVERGRPVPAATVDSLRRIVLPDSTAVIAYTSGTSGHPRGCALSHRSLASTCDTLLDGWRHTAASPGEQPAVLAFLPFSHVYGLMVQGLCLRGGLLMGHEPDLRAESLAAAFRSFRPTYLYAVPSVFEKIYKSFLTAAERTGRGTLFERAARTAQDYAEAAEQQRLGTGPGPGFDLKLQHALYERAVYRKLRDSLGGRICGAVSGGSPLNRELTLFYAGIGIMVHDGYGLTETSGGITAQPVGREKFGTVGRPLPGTDIQVAEDGEILVRGPSVFQGYVNDIPGTRASLRDGWLATGDLGRLDSEGYLSITGRKKDTIVTSSGKSVAPSVLEERLRVHPLIHQAVIVGENRPCVGALITLDPDYLPHWRTMVAAQADAPSREAREQNAVLQEVTRAVAAANSFVSRSESIRVFRILPEPFDPANGLLTPSMKLRRDVIVRRYATEIDAMYQSSARTRVKSLSDEPVSWEEHEENEDDVFRRVR

SEQ ID NO: 12037 - protein, 252 aa, Solanum tuberosum
PVGIFSDMFLPWTADSAAKFDIPRIVFHGTSYFALCVVDSIRRNKPFKNVTSDTETFVVPELPHEIKLTRTQLSPFEQSDEETGMTPMIKAVRESDAKSYGVIFNSFYELESDYVEHYTKVVGRKNWAIGPLSLCNRDTEDKAERGRKSSIDEHECLKWLDSKKSSSVVYVCFGSTADFTTAQMQELAMGLEASGQDFIWVIRTGNEDWLPEGFEERTKENGLIIRGWAPQVLILDHEAIGAFVTHCGTNSV

SEQ ID NO: 12038 - protein, 415 aa, Nicotiana tabacum
MGNSEDGKPSKPEKSSSPTPDQSNLHVYPDWAAMQAYYGPRVAVPTYFNSAVAPGHTPHPYMWGPQPMIPPYGAPYAAIYAHGGVYAHPGVPIGSHPPGHGMATSPAVSQAMDGASLSLDASAKSSENSDRGLLAMSLGNGSADNIEGGTDHGNSQSGDTEGSTDGSDTNGAGVSERSKKRSRGTTPDNSGDSKSHLRRCQPTGEVNNDSEKTIVVVRPGKVEEKVMGTVLSPSMTTTLEMRNPASTHLKASPTNVSQLSPALPNEAWLQNERELKREKRKQSNRESARRSRLRKQAEAEELAIRVQSLTGENMTLKSEINKLMENSEKLKLENAALMEKLNNEQLSPTEEVSLGKIDDKRVQPVGTANLLARVNNSGSLNRANEESEVYENNSSGAKLHQLLDSSPRTDAVAAG

SEQ ID NO: 12039 - protein, 206 aa, Glycine max
MVVVSPKMANATPNGSVPHNHVGAVLLTIPTIKIDGKQTLATEDHTSIDYLQRAQWLRAAILGANDGLVSVASLMMGVGAVKRDAKAMLLAGFAGLVAGACGMAIGEFVAVYTQYEVEVGQMKRDMNMSVGGERDLEMEMERRTLPNPLQATLASALCFSIGALVPLLSAAFIENYRTRIIVVVAMSCLALVVFGWVGAKLGKTPK

SEQ ID NO: 12040 - protein, 287 aa, Lycopersicon esculentum
MLLQLSLLTLVLLSPVSADNFYQDAAVTFGDQRAQIQDGGRLLTLSLDKISGSGFQSKNEYLFGRFDMQLKLVPGNSAGTVTTFYLSSQGAGHDEIDFEFLGNSSGLPYTVHTNVYSQGKGNKEQQFRLWFDPTSSFHTYSIVWNSQRIIFLVDNIPIRVFNNHEALGVAYPKNQAMRVYASLWNADDWATQGGRVKTDWSMAPFTASYRNFNTNACVWSAATSTSSCGGSKTESVNNDETWQTQQLNANGRNRIRWVQQKYMIYNYCADANRFSQGFSPECKRSRF

SEQ ID NO: 12041 - protein, 427 aa, Nicotiana tabacum
MGNSEDGKSCKPEKSSSTAPDQSNIHVYPDWAAMQAYYGPRVAVPPYVNSPVAPGQAPHPCMWGPLQPMMPPYGIPYAGIYAHGGVYAHPGVPIVSRPQAHVMTSSPAVSQTMDAASLSMDPSAKTSGDTNQGLMSKLKGSDGLGMSIGNCSVDNGDGTDHGPSQSDSGQTEGSSDGSNIHTAEVGEKSKKRSRETTPNTSGDGKSRTRSSPQPREVNGATKKETSIAFNPGNIAEKVVGTVFSPTMTTTLELRNPVGTLVKASPTNVSRISPAVPGEAWLQNEREMKREKRKQSNRESARRSRLRKQGEAEELAIRVQSLTSENLGLKSEINNFTENSAKLKLENSALMERLQNKQRGQAEEVTLGKIGDKRLQPVSTADLLARVNNSGPLDRTNKDDEIHENNTSGAKLHQLLDASHRTDAVAAR

SEQ ID NO: 12042 - protein, 310 aa, Kluyveromyces lactis NRRL Y-1140
MSTSNESPSLKLNTGASIPVVGLGTWKSPEEDAYNAVVSALQNGYRHIDTAAIYGNEEAVGKGIRDSGVPREEIFVTTKLWGTQQRDPEAALDLSLQRLGLDYVDLYLIHWPVPLNASSITDGNYLTFPRTADGKIDIDIEEWNFIKTWEKMQHLPKSGKTKAIGVSNFSIKNIEALLAANPDFIVPAANQIEIHPQLPQTELIDYCKSKGILIEAYSPLGSSSSTILTDPTIEGIASKYNAEPANILISWGASRGYVVLPKSVNPQRIKTNLKLLDLSTEDLEKINKLTESVGAKRYVAPDFSPFAIFE

SEQ ID NO: 12043 - protein, 471 aa, Kluyveromyces lactis NRRL Y-1140
MTVTAAPEQSYVFQAAIDKTGTQVVGGKGVRIDIERDGKVYKNILDAITGAAVGAIGWADEEALEIINKAALESTYSYPCLISNKNAEKLAKFYIDNSPEGAFASALWCTSGSESNENALRIVRQYYLERGLPKKLKLISREDSYHGFTLGAQSISNNPRIEKFKDYFIDQKNICLSMPSAYTYRNKLKSESEEDYANRLLKILEDKIITEDPDTVAAVIVETLPGSSLGTTPPPKGYLKGIRDLCNKYDIIFYLDEVMCGTGRCNPNGKLNCWENFLAPEDAPDIQTVGKTLGSGYVTIAGVLIGPKIRDAYLQGSGTVVGGHTYASHAFNCAVALGIQEKIQRENLTANVFKMGNLMGEKLKDALLSEDNIAGDVRGVGGFWSVEFVADRDTKKPFEPSQDIAGRVKELCFQNGLNVMAMGVTPTASCSDRILLAPSFIITEDDVNEIVEKVVKSVTELSKTLKEEGSI

SEQ ID NO: 12044 - protein, 309 aa, Arabidopsis thaliana
MYSTNIANSITSYARHVFVLYKTPEAWLSHVEEEGLPQRFATLLKDRKSDLLVQTKLNVCEGGGSDGDVLIFPDMIRYKGVKDTDVEGFFEDVLVNGKPWSSGIQEEISGTFVFVCTHASRDKRCGVCGPVILERFKQEIGSRGLSDQITLKRCSHVGQHKYAGNLIIFCPDSAGKITGNWYGYVTPDDVPELLDQHIAKGEIIQRIWRGQMGLPGGEAEKVHEQKVIPNGHGVVKEESKGFTGGCCQGSNGVSCCQDETPKPEPIKKEVKKCTIWFQPLDKEELYIGAAVVGAIATIAMAFTFFKRSG

SEQ ID NO: 12045 - protein, 390 aa, Polaromonas sp. JS666
MSPLLEELHAQADEFIGLRRDIHRHPELAFDEHRTSALVAEKLQGWGYAVERGLGGTGLVGRLVRGDGQRRLGLRADMDALPIHEATGLPHASCHAGVMHACGHDGHTAMLLAAARHLAEHGRFSGTLNLIFQPAEEGGGGALHMMDDGLFEKYPCDAVFAMHNMPGIPQGRLVLREGPAMASSDYATVTLTGVGGHGAMPHRAADPVVAAASIVMALQTIVSRNIDPLQMAVVTVGALHAGKANNVIPQSATLELSVRALDREVRSKLEQRIRALIAAQAESFEVQAQIAWRPGYAVLVNTPGETAFAREVALELVGAGRVTLQGPAVSGSEDFAFMLERVPGSYLFIGNGDGDSAGACMVHNPGYDFNDANLPVGAAYWVLLAQRFLV

SEQ ID NO: 12046 - protein, 294 aa, Brassica napus
MDQYEKVEKIGEGTYGVVYKARDKVTNETIALKKIRLEQEDEGVPSTAIREISLLKEMQHSNIVKLQDVVHSEKRLYLVFEYLDLDLKKHMDSSPDFSKDLHMIKRYVYQILRGIAYCHSHRVLHRDLKPQNLLIDRRTNSLKLADFGLARAFGIPVRTFTHEVVTLWYRAPEILLGSHHYSTPVDIWSVGCIFAEMISQKPLFPGDSEIDQLFKIFRIMGTPTEDTWPGVTSLPDYKSAFPKWKPTDLESFVPNLDPNGIDLLSKMLLMDPTKRINARAALEHDYFKDIGVMP

SEQ ID NO: 12047 - protein, 168 aa, Magnaporthe grisea 70-15
MAASGSSNSSTRTMQSRTGRSKQRYNSKGERLVAGVVALSEDKEYVLLTQSTRRKGWVLPKGGWETDEECTEAAEREAWEEAGIVVTIDYDLGQIEETRVKTSSKSAKSGKREKAIYHFYEATVTSEEQDWPEKDKRQRKWMTFVDAWESLKDRPELQEALNRSTMKR

SEQ ID NO: 12048 - protein, 421 aa, Kluyveromyces lactis NRRL Y-1140
MSRTILNNIQELPGDALFAIKQRLAEDPRSAKVDLGIGAYRDEDGKPWVLPAVRKAETLIHSDASFNHEYLGIAGLPALTSGAAKVILGDDSSALAEKRVVSAQSLSGTGALHIAAKFIQKFLPGKLLYVSDPTWANHVSIFESQGVKTATYPYWDAATKSLDLEGFIKAIESSPRGSVFLLHACAHNPTGLDPTEAQWEKILSACVKNDIIPLFDSAYQGFASGSLTNDAFAVRLGVKKFAESAPIFICQSFAKNVGMYGERCGCIHLIVPRQESNVNVSTITKAVASQISKITRSEVSNPPAYGAKIVAKILNNAELTEQWHKDMVTMSQRITKMRHSLRDKLLELQTPGNWDHIVNQCGMFSYTGLTKPMVERLEKEHGVYMVASGRASIAGLNEKNVEHVAKAINEVVRHFNESSKL

SEQ ID NO: 12049 - protein, 211 aa, Zea mays
  misc_feature (123)..(123): Xaa can be any naturally occurring amino acid
  misc_feature (185)..(186): Xaa can be any naturally occurring amino acid
  misc_feature (189)..(191): Xaa can be any naturally occurring amino acid
  unsure (1)..(211): unsure at all Xaa locations
MDSDLWISRLTAAKRQFALQRAQRQHAAPASHHDRFGYDDIEPEDDLHSDFPCPYCYEDHDVASLCAHLEDEHPFESKIVKHQRVRRVTGNGNHNLSYAGRDLQLQETYLKVLLGNSSRSSSXNASSTVTDSLLSSLVLNLSSLEVEDASKSSAPSVVENNWFKRSLPSKTWKLSAVDSSLSHEXXERXXXRAAVRSAFVQHLLVTTIFED

SEQ ID NO: 12050 - protein, 553 aa, Escherichia coli
ASIFGVFDIKTDAVELRKKALELSRLMRHRGPDWSGIYASDNAILAHERLSIVDVNAGAQPLYNQQKTHVLAVNGEIYNHQALRAEYGDRYQFQTGSDCEVILALYQEKGPEFLDDLQGMFAFALYDSEKDAYLIGRDHLGIIPLYMGYDEHGQLYVASEMKALVPVCRTIKEFPAGSYLWSQDGEIRSYYHRDWFDYDAVKDNVTDKNELRQALEDSVKSHLMSDVPYGVLLSGGLDSSIISAITKKYAARRVEDQERSEAWWPQLHSFAVGLPGSPDLKAAQEVANHLGTVHHEIHFTVQEGLDAIRDVIYHIETYDVTTIRASTPMYLMSRKIKAMGIKMVLSGEGSDEVFGGYLYFHKAPNAKELHEETVRKLLALHMYDCARANKAMSAWGVEARVPFLDKKFLDVAMRINPQDKMCGNGKMEKHILRECFEAYLPASVAWRQKEQFSDGVGYSWIDTLKEVAAQQVSDQQLETARFRFPYNTPTSKEAYLYREIFEELFPLPSAAECVPGGPSVACSSAKAIEWDEAFKKMDDPSGRAVGVHQSAYK

SEQ ID NO: 12051 - protein, 614 aa, Methanococcus maripaludis S2
MRRSRIGMIGTKLLIFSIIIVLIPIVMMSYVSTDTISDLMTSNQESELDINLGILNERMDSVLVEFDTMTAYTADLPVVVNAVKNNDKDTLQDFANGLEDQSWIDLAVFTDADGNVICASYGDDNAEISSYVKKLLEKNTIYAYDILPNEEASKYSEYELDGNDALTIFTVAPIYDGNSLIGTVTYVDIMNKDDYWVDRVKEVTGDEASIYLNNVRISTTCIKDGVDFVGELADEDIYETVSKKQDVRSTVTINGVPYLAKYSPIYNIDGEVIGMTCVGTPKSPFTALLNSVIQKIFFIAFSSLIIAVFVAVILNKKIVDSIKKLKNSAESFGRGNYDERASIDTGDELEELAESFNKMADEIGKSDKKLKSDAHTLKTSFDELKEVDNLKSEILSIVSHELRTPLTAILGYVELLKDETAGKLSEKQKEFISVISENSDRLKRITDNMSDLVTVDNKILDIKRDRINLKKEVNDILRSFDYFAESKNIVLLEDVDNLDIKGDKSKIHQVLSNLIENAIKFSKKQTKVTVMGFEDKGNIHLEITDQGPGIPKEHLGKIFDKFYQIDSSSKREVGGSGLGLAVCKKIVESHGGSIWVESKIGKGTTVHVMFPLIK

SEQ ID NO: 12052 - protein, 161 aa, Arabidopsis thaliana
MSLIPSIFGGRRSNVFDPFSQDLWDPFEGFFTPSSALANASTARDVAAFTNARVDWKETPEAHVFKADLPGLKKEEVKVEVEDKNVLQISGERSKENEEKNDKWHRVERASGKFMRRFRLPENAKMEEVKATMENGVLTVVVPKAPEKKPQVKSIDISGAN

SEQ ID NO: 12053 - protein, 224 aa, Solibacter usitatus Ellin6076
MIFNFLDTTCYAEVSPLMSDPQAIFFDFDGVLLDTEPVHWACWADRLATLDVTLTWEYYRDCCIGIDDRVMLRNIACEAKPARDWETLWALYPAKKKLFQVRMTTPPFEAALVDLLPELRRTHRLAVVSSSSCSEIEPLLISAGIRGHFETIVGGDDVQRHKPAPDPYLLAAERLGVSHALVLEDSEAGLASGRAAGFEVLRVGHPSEVVGLLRRRLSGSGTSA

SEQ ID NO: 12054 - protein, 239 aa, Triticum aestivum
  misc_feature (188)..(188): Xaa can be any naturally occurring amino acid
  unsure (1)..(239): unsure at all Xaa locations
VTFQNKFVQKSRFPPVRNSRDIVDPRVRLLSKDNNIRLADFGLAKLLMEDLASSVVGTPNYMCPEILADIPYGYKSDIWSLGCCMFEILAHRSAFKATDMATLVNKINRSSISPMPPIYSSSLKQIVKSMLRKNPEHRPTAGELLRHPYFQPYLAESVNCSPIYLPVEPNKSNLGDKQSRKPSGGRKXVGKASGSSETLQAAPKQTSRNKRQARQTIQILSTGWYPRMPCIFEYVRWDP

SEQ ID NO: 12055 - protein, 720 aa, Oryza sativa (japonica cultivar-group)
MLLLHPRPLPAPAPARRFEPAVRVPPPRRRRRRRRPPLPPLASASASAAIYSVGSSDEDAFTRCSGYLFEEGAATEGELPTAYDLAGIGAVYRRRPLLVVRRALQIGTSFGRWFTLRYLDRVNERSDDMFEIRAAQLRRILLELGPTFVKIAQAVSSRPDVIPPAYLDELSLLQDRIAPFSTEVAFNIIETELGLPLDMIFSEISPEPVAAASLGQVYQARLRSNRKVVAVKVQRPGVQAAISLDIYILRFLAGVARKAGKLNTDLQAVLDEWASSLFREMDYRAEARSGLKFRELYGKFRDVLVPEMYLEQTRRRVLIMEWVEGEKLSEVRDQYLVEVGVYCSLSQLLEYGFYHADPHPGNLLRTVDGKLAYLDFGMMGEFRQELRDGFIEACLHLVNRDFDGLAKDFVTLGLLPPTAQKDEVTKALTGVFQNAVDRGVQNISFGDLSGNLGRTMYKFKFQIPSYFSLVIRSLAVLEGIAISFNPNYKVLGSSYPWIARKVLTDSSPKLRSTLQTLLYKDGTFQIDRLESLLTESLRARTEQSLTRDQQEETDSSKFAIKQVLSFTLTEQGAFVKDLLLQEIAKGLDALGAATLSSATSAAASRLPFAVPSPSPSLDNEDATNLRNLHRLLLLLSKVPQKEDSSPIPGYNSTEENEGDSTDEISLVLYEMRSLPELLPVLSVIPELPPESQQQFLLLPADLTNRLLSRAVARTIRRIFI

SEQ ID NO: 12056 - protein, 271 aa, Azoarcus sp. EbN1
MSKIQSTFQRLQVTGRRALIPFITAGDPAPELTVPLMNALVEGGADIIELGVPFSDPMADGPTIQRASERALANGMTLRRVLDTVREFRTGNAETPVVLMGYANPIEAMGVERFVSAAREAQVDGVLIVDYPPEECESFARAAKDAGLDPIFLLAPTSTEQRFRDVARVGSGYIYYVSLKGVTGSATLDFDEVAARIPQIRAQVGMPVGVGFGIRDAESARRIGEVADAVVIGSRIIEEIERSPRDRLAANVTAFLREVRTALDQVEGSVR

SEQ ID NO: 12057 - protein, 357 aa, Arabidopsis halleri subsp. gemmifera
MMSRFRKTLISAFVLYLVILPLLVSAAEEEENECGGSNGGSAGEKATALKYKIIAFFSILFAGIFGVCLPIFGLKSESNFFMFVKAFAAGVILATGFVHILPDATESLTSPCLGEEPPWGDFPMTGLVAMAASILTMLIESFASGYLNRSRLAKEGKTLPVSTGGDKEEHAHTGSAHTHASQGHSHGSLLVPQDDHIDMRKKIVTQILELGIVVHSVIIGISLGVSPSVSTIKPLIAAITFHQLFEGFGLGGCISEAKFKVKKIWVMLMFFALTAPLGIGIGIGVAEIYNENSPMALKVSGFLNAAASGILIYMALVDLVAPLFMNPKAQSSMRIQVACSVSLVLGAGLMSLLAIWA

SEQ ID NO: 12058 - protein, 438 aa, Neurospora crassa
MALNRINGREDLFVGGIFGVNRARLIEENKITHILSVINYTLPADPAFRNVQHLSIDIDDVEEADILVHFPKMVRFIERGLYGDEAASIAFGGDNAPVVVPTPASASAKINGDDETAHDADAITAAPPITTTTITSQQQQTKPGAVLVHCAMGKSRSVSAIVAYLLWKHPHRFGRSDPSTPARRAVTQAINWVRQTRPIAEPNDGFMEQLELWWTMGCPLESGDDAVENHPAYQRWLYKREVEDATRIGRVPDWIRFEDEEAAKLASENNNKEAEAGGGAASLSLRCKKCRRTLATKPFIVPHHQGKGNKERDCGHYFVEALSWMRPTLEQGELEGRLTCPNQKCLASVGRYTWQGFRCSCGDWIAPAFSLQKSKVDEATSAPHPGGAGRGPGGGGGGAAAVAARMAALGIRMPPGGLAGQRGAGEGAGAAGGPKENL

SEQ ID NO: 12059 - protein, 240 aa, Triticum aestivum
MGRGKIVIRRIDNSTSRQVTFSKRRNGIFKKAKELGILCDAEVGLVIFSSTGRLYEYASSSMKSVIDRYGRAKEEQQLVANPNSELKFWQREAASLRQQLHNLQENHRQLTGQDLSGMGVKELQTLENQLEISLRCIRTKKDQILIDEIHELNHKGSLVHQENMELYRKINLIRQENAELQKKLSETEAATEVNRDSRTPYNFAVVEDANVSVDLELNSPQQQNDVEHTAPPKLGLQLHP

SEQ ID NO: 12060 - protein, 118 aa, Zea mays
LLTRPVQHRMGCVIRPLADTLGRRNVEKRNHRILQREEDLTHEEKNISEQRPKTMRETVIERVHNRGRMDEATNEDDEMMNKDQTADVHAELPPEGQIKLGTLHTIGNHGAPAKEGDE

SEQ ID NO: 12061 - protein, 180 aa, Triticum aestivum
  misc_feature (25)..(25): Xaa can be any naturally occurring amino acid
  misc_feature (68)..(68): Xaa can be any naturally occurring amino acid
  misc_feature (74)..(74): Xaa can be any naturally occurring amino acid
  misc_feature (111)..(112): Xaa can be any naturally occurring amino acid
  misc_feature (115)..(116): Xaa can be any naturally occurring amino acid
  misc_feature (118)..(118): Xaa can be any naturally occurring amino acid
  misc_feature (133)..(133): Xaa can be any naturally occurring amino acid
  misc_feature (137)..(137): Xaa can be any naturally occurring amino acid
  misc_feature (139)..(139): Xaa can be any naturally occurring amino acid
  misc_feature (141)..(141): Xaa can be any naturally occurring amino acid
  misc_feature (152)..(152): Xaa can be any naturally occurring amino acid
  misc_feature (166)..(166): Xaa can be any naturally occurring amino acid
  unsure (1)..(180): unsure at all Xaa locations
MGRGKIEIKRIENTTSRQVTFCKRXNGLLKKAYELSVLCEAEIALIVFSARGRLYEYASNSTRTTIDXVPEVLXASASGSAPAIDVNSQQYFQQESAKLRHQIQSLQNADXXLMXXNXVGNLTLKELKSLENXLDKXHXAXIRAKKHELLFXEIEYMQKLEADLQXENMYLRAKVAGRGG

SEQ ID NO: 12062 - protein, 304 aa, Brassica napus
DVINQATRTGAAPNISDAYTINGQPGDLYNCSNKETVVVPVKSGETSLLRVINAALNQPLFFTVANHKLTVVGADASYLKPFTTKFLMLGPGQTTDVLLTADQPPKRYYIAARAYQSAQNAPFDNTTTTAILHYRNTSKTSPPIAASLPAFNDTNTVTSFSRKFKSLRNVVVPKTIDENLFFTIGLGLDNCPKNFPKNRCQGLNGTRFTASMNNVSFVLPSNFSLLQAHSNGIPGVFTTDFPAKPPVKFDYTGNNISRGLFQPVKGTKLYKLKYGTRVQIVLQDTNVVTSENHPIHLHGYDFYI

SEQ ID NO: 12063 - protein, 372 aa, Cryptococcus neoformans var. neoformans
MPVAPTVKSARTTSVYDRSCRASASPKSSRRLSSQTKAKIQAVAAPVSQARAVPQHRKVEEVMYFEEDYSEEIIAYMNSMDNSTLASAELMDMQPELQWFMRSYLIDFIIEVHQQFRLRPEVLYLAMNIVDRYISKRVVYKKHYQLVGCAALWIAAKFEDAKDKVPLVHELSEMCCKAYDESAFIQMEGHVLSTIGWVLGHPSAEAWLRVFTTGIRYEDQKVANMARFLMEITLFHREFIGIQSSIIAAGALMLARFICGKPYKPCFPNVPETVAARVSIAIDKRFSQELEKVSEIVISKICADVLRPCLYRLPGMVSVRPTIHLQPCYAFHPRLRSFNSGPCSFMLIILGQAWFMGNRLSRGFLRFVGSWR

SEQ ID NO: 12064 - protein, 399 aa, Bordetella pertussis Tohama I
MDKPFEPECSFSERAKQLTSSAIREILKVTERPEVISFAGGLPAPGGFPVEVVQAAFDKVLVTNDRAALQYGPTEGYAPLRQWVADDLNAAGANVTADQILIVSGSQQALDLLGKVLIDKDSPILVEDPSYLGALQSFSLYQPKYVPIPTDDGGLVPEAITAELAEGARFLYALPNFQNPTGRTLNLERRKALVRQAAQFGVPIIEDDPYGELRYAGEPQPGLLALAGECGATVIRLGTFSKVLAPGLRLGYIAAPRNIINKLVQAKQATDLHTPTLTQMAVYEVVKTGFLAEHLPRVREIYRVQGRCMLEAIEREFPASVSWTKPEGGMFIWVTLPEHIDSTKLLAQAVEQNVAFVPGGPFYAGTPRQNTLRLSFATVPEAKIREGIAILGKLLKAAI

SEQ ID NO: 12065 - protein, 252 aa, Solanum khasianum
PVAIVSDLFFPWTVDSAAKFNIPRIVFHGTSYFSLCVGDSIRRNKPFKNVTSDSEAFLVPDLPHEIKLTRTQLSPFQQSDEESSMSHMIKAVGESESNSYGVISNSFYELEPDYVEHYTKVLGRKNWAIGPLSLCNRDIEDKAERGSNSSIDKHECLEWLDSKKSSSIVYVCFGSTADFTASQMQELAMALEAYGKDFIWVVRTENEDWFPEGFEERTEGKGLIIRGWAPQVLILDHESVGSFVTHCGSNSV

SEQ ID NO: 12066 - protein, 117 aa, Glycine max
MFRSMTTRRGYERLGKESATTALLHEGFKRSTSLPSWGSNSSRKMALGSTYGEINLKRNPTKKGNNSDKKSHPLLSFLALRRKKKTTARPEFARYLEYLKEGGMWDLNSNKPVMYYK

SEQ ID NO: 12067 - protein, 176 aa, hyperthermophilic archaeon G1-H
PYGGGKGGIIVDPKKLSDREKERLARGYIRAIYDVISPYEDIPAPDVYTNPQIMAWMMDEYEAISRRKTPAFGIITGKPLSIGGSLGRNEATARGASYTIREAAKVLGWGDLKGKTIAIQGYGNAGYYLAKIMSEDYGMKVVAVSDTKGGIYNPDGLNADEVLKWKQEHGSVKDFP

SEQ ID NO: 12068 - protein, 258 aa, Solanum khasianum
PDCIFYDLYFPWTVDIALELNIPRLLFNQSSYMYNSILHNLRLFKPHKSKTTTSNDDISVPGLPDKIEFKLTQLTDDLIKPEDEKNAFDKLLDQTRESEDRSYGIVHDTFYELEPAYADYYQKVKETKCWQIGPISHFSSTLLRRRKELVNAVDESNSCAIAEWLNEQKHKSVLYISFGSVVKFPEAQLTEIAKALEASSIPFIWVVRKDQSAETTWLPEENKLKKKGLIISGWAPQVTILDHSAVGGFMTHCGRNSV

SEQ ID NO: 12069 - protein, 420 aa, Methanocaldococcus jannaschii DSM 2661
MWGENIATADLFANATDIHSIVQALTTLANASDVFFLVVMGVLVFMMQWGFAMLEGGQVRKKNVNNVMMKNMVDWLIGCVAWLFIGGILCSKGFDLSAFIDWWKQILGTNWPNNGLDLASWFFGLVFCATAATIVSGGVAERIKFSAYVLISLIITGLLYPLFVYLGPWGASIVPWHDYAGSLVVHGLGGFLALGAIAALGPRIGRFVDGRPVPILGHNIPMAVFGAFALAIGWYGFNVGSSLALGDISGLVCATTTMAMAGGGIGALIASRNDVLFTANGIVAGLVAICSGTDVVSPIGGLIIGLIAGLQVPIVYKLVEKAGLDDVCGVVPVHGTAGVIGAILTGILGLKIFGGAGGVSLIDQIIGAVFCIIYGTGLGYILAKIVGIALGGLRVSEEEEKMGLDMAEHKMPAYPEETVI

SEQ ID NO: 12070 - protein, 491 aa, Solanum aculeatissimum
MDNGSNQLHVLFLPYFATGHIIPLVNAARLFVFHAGVKVTILTTHHNASLFRSTIDNDVEDGHSVISIHTLRFPSTEVGLPEGIENFSSASSPELAGKVFYAIYLLQKPMEDKIREIHPDCIFSDMYLPWTVNIALELKIPRLLFNQSSYMYNSILYNLRLYKPHKSKTITSTDSISVPGLPDKIEFKLSQLTDDLIKPEDEKNAFDELLDRTRESEDRSYGIVHDTFYELEPAYADYYQKVKKTKCWQIGPISHFSSKLFRRKELINAVDESNSCAIVEWLNEQEHKSVLYVSFGSVVRFPEAQLTEIAKALEASSIPFIWVVKKDQSAETTCLLEEEKLKNKGLIIRGWAPQLTILDHSAVGGFMTHCGWNSILEAIIAGVPLVTWPVFAEQFYNEKLVEVMGLGVKVGAEVHESNGGVEISSLVIESEKIKEAIEKLMDDSKESQKIREKVIGMSEMAKNAVEEGGSSWNNLTALIDDIKNFTSTTNV

SEQ ID NO: 12071 - protein, 428 aa, Ehrlichia canis str. Jake
MLLNNMYINTCAWFNKGYQNIWMPYTQMKNSPLPLSVKSASGCYIILEDGKRLLDGISSWWSVCHGYSHPHIVQKVQDQVAKLSHVMFSGLAHEQSYVLASRLVKISPEQKKVFFSDSGSTAVEVAMKMAVQYHQNLGNKNKYNFVSFVNGYHGDTMGCMSISDPTKIHGTKFKKYHPSQFILPLPSTEEEIKNFANTIYSIRDQVAAVILEPILQAAGGMLIHSANILKKIYDIAKANNILFIADEVATGFGRTGTMFGCNQANIVPDIIVIGKALTGGFCTLAATLTTQEVYDAFLSDNIDDAFMHGPTFMANALACAAANASLDIFESQDLIRNIGLIENQLKSELGVFKQLDCVTDIRVKGATGVIELKDGLIDKHDIINKGVELNIWIRPLNNVIYVMPPFIINSNELTQLITSIYKILKSNI

SEQ ID NO: 12072 - protein, 470 aa, Triticum aestivum
  misc_feature (303)..(303): Xaa can be any naturally occurring amino acid
  misc_feature (323)..(323): Xaa can be any naturally occurring amino acid
  unsure (1)..(470): unsure at all Xaa locations
MAAIISRRGAARALALAMARRGMCSAPAPAAALSSEELIRMEQDCSAHNYHPIPMVFSKGEGSHILDPEGNKYIDFLSAYSAVNQGHCHPKVLRALIEQAERLTLSSRAFYNDKFPVFAQYLTSMFGYDMMLPMNTGAEGVETAIKLARKWGYEKKNIPKNEALIVSCCGCFHGRTLGVISMSCDNDATRGFGPLVPGHLKVDFGDIDGLEKIFKEHGDRICGFLFEPIQGEAGVIIPPDGYLKAVRDLCSRHNILMIDDEIQTGIARTGKMLACDWEDVRPDMVILGKALGAGVVPVSAVLXADKDIMLCIKPGEHGSTFGXGNPLASAVAIASLKVVKDEGLVERAAELGQEFRDQLRKVQQKFPDIIREIRGRGLLNAVDLSSKALYPASAYDICIKLKERGILAKPTHDTIIRLAPPISISPEELTEASKALSDVLEHDLPQLQKQIKKPESEAKTPVCDRCGRDL

SEQ ID NO: 12073 - protein, 427 aa, Solanum aculeatissimum
MEFNTRIHTLRFPSTEVGLPEGIENFSSASSPELAGKVFYATYLLQKPMEDKIREIHPDCIFSDMYFPWTVDIALELNIPRLLFNQSSYMYNSILHKLRFYKPHKSKTTTSNDDISVPGLPDKIEFKLTQLTDDLIKPEDEKNAFDELLDRTRESEDRSYGIVHDTFYELEPAYADYYQKVKKTKCWQIGPISHFSSTLLRRRKELVNAVDESNSCAISEWLNEQKHKSVLYISFGSVVKFPDAQLTEIAKALEASSIPFIWVVRKDQSAETTWLPKENKLKKKGLIIRGWAPQVTILDHSAVGGFMTHCGWNSILESITAGVPLVTWPVFAEQFYNEKLVEVMGLGVKVGAEVHISDGLEFSSPVIESEKIKEAIEKLMDDSNESQKIREKAMATSEMAKSAVGEGGSSWNNLTGLINDIKNFTSS

SEQ ID NO: 12074 - protein, 268 aa, Bifidobacterium longum DJO10A
MLNNGTVIPQVGLGVFQTPDGDTTVNAVQTALENGYRHIDTAMIYHNEASVGEGIRRAGVPRSDFFLTTKLWNDDIRARCGKDAFQESLDRLGVDYVDLYLIHWPADGWQQAWDDLQEIYASGRAKAIGVSNFQKHHIDELLTHSDVVPAVDQVESSPQFTNQELIGQLRAKGIHTEAWSPLGGTGGNLLSNPVLAGIGAKYGRSAAQVVIRWHIQRGIVVLPKSTHAERIKQNFEVFDFNLSVDDMTAISAINTGKRNGADPDNFNF

SEQ ID NO: 12075 - protein, 925 aa, Nocardioides sp. JS614
MRQLISAPLVLAGAMTLGVTLAAPAGAAAPARADGPGHRPSAYAQHAPRPGVTDEDFYFVMGDRFENGDPDNDRGGLTGDRLTTGFDPAAKGFYNGGDLDGLRSRLDYIQGLGTDSIWLTPIFKNKPVQLEDGPSAGYHGYWITDFTTVDPHLGTNQDLADLVDAAHDRGMKVYFDIITNHTADVIGYEEGDRTAYVSKDAVPYRDAAGNPFDDRDYAGTSQFPVLDPATSFPYTPVLDAGEQDLKVPAWLNDLTNYHNRGNTTFSGEDSQYGDFFGLDDLFTEKPAVVDGMIDIYRTWVEDFDIDGFRIDTMKHVDDAFWQRFGPTMQQLAAADGNPGFFMFGEVALDGSDAAAKAFTSRYTTTDRMQAVLDFPFQDAARGFASKSLDSDRLARFFRNDDWYTDADSNAYSLPTFLGNHDMGRIGHFLEADNPGADDAELVARDRLAHELMYLSRGNPVVYYGDEQGFTGDGGDQLARQTMFASQVPEYRDDDQIGTDRTGADDNFVTDAPLYRAIRDLADLTERDPALRDGAQQVRYSSPGAGLFAFSRVDREHRVEYVVALNNSEQADSGRVPTYLKKGEFRKVYGPGPARLVSRADRGLDVALPALSTSVYRSVDRIPRAERAPQISVARPVPSSIAHGRMHVRAKVSGSSFYEVTFQRRIGDGAWQTIGVDDNAPYQVFDDVADQTPGTAVSYRAAVLDNAGHTRGSRARTTAVPRTSVVVTGPADGGTVSVVDPVTVTASVDPERPLQSVAFERSVGDGPWTSLGTDSSAAAYTVTDDVSDLPLGTEVRYRATLSEAGVVQGTSAPVRVTTAEPAPAVDSVTVAGSLQSELGCPEDWQPGCAATHLTFDRTDGRWHGTFTVPAGDYEWKVAINDSWDVNYGAGGAAGGSNLALPVPAGGATYVFTWDQVSHEPSVAPAG

SEQ ID NO: 12076 - protein, 174 aa, Triticum aestivum
  misc_feature (9)..(9): Xaa can be any naturally occurring amino acid
  misc_feature (28)..(28): Xaa can be any naturally occurring amino acid
  unsure (1)..(174): unsure at all Xaa locations
PLKDCNGKXEVCLDTYKGKVLLIVNVAXSKCGFTETNYTQLTELYQKYREKDFEILAFPCNQFLRQEPGSDQQIQDFACTRFKAEYPVFQKVRVNGPDAAPLYKFLKASKPGLFGSRIKWNFTKFLVDKNGKVINRYATATTPFSFEKDIQKALEEEPSDSQTKKEEESSDSQK

SEQ ID NO: 12077 - protein, 3982 aa, Streptomyces neyagawaensis
MTDGTLNDDKLRDYLKRVAADLHRTRRRLQEVEGRQQEPVAIVGMGCRYPGGVDSPEKLWQLVASGTDAVDAFPADRGWDLGALYDPTRERPGTTYAAEGGFLTGAADFDPGFFGISPREALAMDPQQRLLLETTWEAFERAGLDPGALRGSDTGVFVGVMYQDYGLRLRQVPDDIQGYIGNGNSDSVASGRLSYTFGLEGPAVTVDTACSSSLVALHLAAQALRRGECGLALAGGAMIMSTPVPFVEMSRQGGLAADGRCKSFAAGADGTGWGEGVGMLLLERLSDARRNGHPVLALVRGTAVNQDGASSRLTAPNGPAQQRVIRRALADAGLTPADVDVVEAHGTGTPLGDPIEAQALLATYGQDRPADRPLLLGSLKSNLGHTQAAAGVGGIIKMVMAMRHGTVPPTLHAERRTPTVDWSAGAVELVTEAVAWPETGAPRRASVSSFGISGTNGHIVLEQAGTEPDSAPEGEADPSGTADEPGLPTALPWSVSARSREALRAQARRLAAHLDTHPGQRPLDIGHALATTRAALEHRAVVVAADEEGFLRGLRALAEDTPEPGLVRGTGTPGADTVFVFPGQGSQWTGMAAELLDTAPVFAERIADCARALAPHTDWSLTDVLRDAPGTPPLDRVDVVQPALWAVMVSLAALWQSYGVEPSAVAGHSQGEIAAAVVAGALSLEDGAKVVALRSRAIVALAGAGGMASVPLPVDEVRALLSDGDGRLSVAAVNGPASVVVSGDRSALDDLIDRLTARDLRVRRIPVDYASHSAHVERIHDELLRLLADITPRPCDIPFYSTVTAEPLDTTGLDAGYWYRNLRRTVEFEQTTRALLAAGHHVLVEVSPHPVLTVPMEETARAAGADEAVVIGTLRRDDGGRARFLAAVGELYVHGVRVDWRAAYAGWRTRRADLPTYAFQRRRYWLEDSAAPQGDMASAGLAAADHPLLGAVVALADGDGLLLTGRLATRTHPWLADHAVRDAALLPGTAFLELAVRAGDQVGCGQVEELTLEAPLVLPPEGGVAVQLAVGAPDRDGRRPLSLHARPDGIDDVPWTCHARGLLSPAAEEAAPGDPAVWPPAGAVPVELDGLYERFAEGGFAYGPAFQGLRAAWRLGEEVFAEASLPSELQAEAARFGLHPALLDGALHATGLGEAAEGRMPFVWNGAVLHAQGATGLRMRITPAGPDTVTLRALDQAGRPVLTVAGLALRPVGAGNFTAPAAGRHHDSLFRLDWTPVRPVPGPTAASWAVLGPTEDTPGVAHHADLAALRDTDGPLPEFVLADLGAAPDDRADELADTTRTAVHDALALVQDWLADDRFTGARLVLVTRGAIAARPGEDVPNLPHSAVWGLVRSAQTEHPDRLHLVDLDPDADLPAALAAVLTATGETQFAVRGSEVLVPRLARIPVQDDDAAPPLDPDGTVLITGGTGLLGARVARHLVTAHGVRHLLLTSRGGPDAPGADGLRDELAALGAQVSVVACDAADAERLAEVLADIPVGHPLTAVVHAAGVLDDGVVSSLTPERVDAVLRPKTDAALNLHRLTADMDLAAFVLFSSAAGTFGGPGQGNYAAANAFLDALAHHRRAQGLAGRSVAWTLWERRSAMTGHLGDDEVRRIARSGLPPLTDTQGLALLDSALTVDEPLLVALRLDTAALRARAESEPVPRLLHGVVRLPARRQAALASATDGDGDRGPLAERLAALDAPGRRRELLDLVRGQVAAVLGHPSPEAVEAGRAFRDLGFDSLAAVDLRNRLGNATGLRLPATLVFDHPTPEVLAAHLGGELLGADTGRVSTSVPAAGGGGAATDEDPIAVVAMGCRYPGGVRSPEDLWNLVSSGTDGIAAFPADRGWDLDALYDPDSERHGTSYAREGGFLYDAAEFDAGFFGISPREALAMDPQQRLLLETSWETLERAGIDPATLRSTATGVFVGVMHQDYAARLLPHIPEEVEGFLGAGNSGSVVSGRVAYVLGLEGPAVTVDTACSSSLVALHLAVRALRSGECGLALAGGVTVMSSPELFVEFSRQRGLASDGRSKPFAAAADGVGFGEGVGMVLLERLSDARRNGHRVLALVRGSAVNQDGASNGLTAPNGPSQQRVIRAALADARLSPGDVDVVEAHGTGTRLGDPIEAQAVLATYGQDREEPVWLGSLKSNIGHTSAAAGVGGVIKMVEAMRHGVLPRTLHVDAPTPQVDWSSGAVELLTEERSWPAGPDRPRRAGVSSFGMSGTNAHLVLEHVEEDVAQPAPPEGPAVPWVLSGHTPEALRAQAERLADHIDAHPEHGAAAIGLALATTRTRHDHRAVLVGDREQLTAGLRALAADAPLATVARGTATAVGRTVFVFPGQGAQWTGMALDLLDSSPVFAARMAACERALAPHVDWSLTGVLASATDLERVDVVQPALWAVMVSLAETWRSCGVEPDAVLGHSQGEIAAAVVAGALTLEDGAKVVALRSRLLRAVAGHGGMASVALPADRTRELLSGWGEKISVAAVNGPRSTVVAGEAAALAELLAWCEKDGVRARRIEVDYASHSAEMDPLRAELLDVLADITPATAGTRMFSTLEADWIEGPELTADYWFRNLRGTVEFEPAVRALTGAGFTTFVESSPHPVLAPAVQEVLEDGAVTGVVVGSLRRDDGGRDRLLLSLGEAHVQGVPVDWPAALGRVPEVPSAPRRLARSPKLFEQGVPPLAAPGADPSTSSTRAYDRHAESTHQTPQGPPSGRTTGLCGHDLGRTSRPVDLPTYAFQRTRYWLDAPVRTGDVAAAGLGATDHPLLAAAVDLADSGERVLTGRLSTRTHPWLADHVVSGTNLLPGTAFLELALRAADEADSALVDELTLQAPLILPERDAVHVQLRLGPPDDSGRRTLGLYSRAETDPGADWTPHATGTLAPGDGADGPSAPATWPPAGTEPVDLDGVYDRFAEAGYRYGPAFQGLRAAWRDGTDVYAEVALERQSDTDGYLVHPALLDGALQASALLDDRPGPARLPFSWNGVTAHATGAAALRVRIGPAGPDAVSLDAWDPTGQPVLSAESLVLRPLSPDLLAAAVAGRDGLYRLDWTPAPGAAATAPLTGWADLDDTGSGAQPTAVVWTCPTATGPDEAARVRDTATATLAVVQRWPSDPRSGDAPLVVVTRHAVATGPGGHPADPAQAAAWGLVRAAQTEHPDRFVLLDLDDTADSADALPHLLGLALATREPQLAARAGNPLVPRLARAGRPGTLTPPAGEAVWRLDTTGEGSLDALALVPSPEAAAPLAPGEVRVAVRAAGLNFRDIAVCLGLAPDQRILGSEGAGTVLETGPGVTDLAPGDRVFGVFGGAFGPVAVADRRTLAPIPPGWSYARAATVPIAFLTAHYGLFDLGGLKAGETVVVHSAAGGVGMAAVQLARHAGAEVYGTASPGKWDVLRGLGLDDAHIASSRTLDFADRFLDATGGRGADVVLDCLAREFVDASLRLLPRGGRFLEMGKTDIRDADTVAAAHPGVHYRAYDLAEAGPERIARTLDLILDLFRQGTLTPLPLTCWDVRRAPGAFRYVGQARHTGKNVLLPPTAPNPDGTALITGGTGTLGRLVARHLVTEHGMRHLLLTSRGGPDAPGAAELCDELAALGAEVSVVACDAADRDRLAEVLAGIPAEHPLTFVVHAAGVLDDAVVSSLTAGQLERVLRPKTDAAVNLHELTRDHDLAAFVLFSSAAALLGGGGQANYAAANAALDALAERRRAEGLPGLSIGWGMWEERSGMTGHLGDVDLRRMSRSGVTPLTSEEGLALFDAALRSEDAYLLAARLDTAALRAGGGQDVPALLSGLVRAPRRRAAAANGDGGGRAAGLAERLAGLSEADAHAALLDLVRGHAAAVLGHPSPELVQPTRAFKELGFDSLTGVELRNRLSSATGVRLPAGMVFDHPTPDVLARHLAATTGRPAPAKASAPLVELDRFAELVAGLAPDAPDRDRLSQRLREVLARLEATEPAGQVTADHIESASHDEIFDLIDNQLGIS

SEQ ID NO: 12078 - protein, 425 aa, Streptomyces rimosus
MSKIHDARRVVITGIGVVAPGDVGTKPFWEMLTAGRTATRPISSFDASPFRSQVAAECDFDPAAEGLSQRQVRAWDRTMQFAYVAAREALADSGVTGEADPLRTGVMAGTACGMTMSLDREYAVVSDEGRLWQVDDAHGVPYLYDYFVPSSMAAEIAWLAEAEGPAGVVSAGCTSGIDVLTHAADLVRDGAAEVMVAGASDAAISPITVACFDAIKATTPRNDEPETASRPFDRTRNGFVLGEGAAFFVLEEYAHARRRGARAYAEIAGYAGRCNAYSMTGLRSDGRELAEAVSRALDIARVDPSEVDYVNAHGSATKQNDLHETAAFKRSLGPHAYSVPISSIKSMIGHSLGAICALEVAASALRIEHGVIPPTANLREPDPDCDLDYVPLVAREAEVSTVVSVASGFGGFQSAIVLTEPGRQR

SEQ ID NO: 12079 - protein, 469 aa, Arabidopsis thaliana
MSSRSDLKIKRVSLIIFLLSVLVEFCYGGFTSEYVRGSDLPDDMPLDSDVFEVPPGPNSPQQVHVTQGNHEGNGVIISWVTPVKPGSKTVQYWCENEKSRKQAEATVNTYRFFNYTSGYIHHCLIDDLEFDTKYYYEIGSGKWSRRFWFFIPPKSGPDVPYTFGLIGDLGQTYDSNSTLSHYEMNPGKGQAVLFVGDLSYADRYPNHDNNRWDTWGRFVERSVAYQPWIWTAGNHEIDFVPDIGEIEPFKPFMNRYHTPHKASGSISPLWYSIKRASAYIIVMSCYSSYGIYTPQYKWLEKELQGVNRTETPWLIVLVHSPFYSSYVHHYMEGETLRVMYEQWFVKYKVDVVFAGHVHAYERSERVSNIAYNIVNGLCEPISDESAPIYITIGDGGNSEGLLTDMMQPQPKYSAFREASFGHGLLEIKNRTHAYFSWNRNQDGNAVAADSVWLLNRFWRAQKKTWLDAF

SEQ ID NO: 12080 - protein, 365 aa, Glycine max
MGSAAETQITPTHVSDEEANLFAMQLASASVLPMVLKSALELDLLEIIAKAGPGVHLSPTDISSQLPTQNPDAPVMLDRILRLLACYNILSFSLRTLPDGKVERLYGLAPVAKYLVKTEDGVSIAALNLMNQDKVLMESWYYLKDAVLEGGIPFNKAYGMTAFEYHGTDPRFNKVFNKGMADHSTITMKKILETYTGFEGLKSLVDVGGGTGAVVNMIVSKYPTIKGINFDLPHVIGDAPSYPGVEHVGGDMFVSVPEADAIFMKWICHDWSDEHCLKFLKNCYEALPDNGKVIVAECILPVAPDSSLATKGVVHIDVIMLAHNPGGKERTEKEFEALAKGSGFQGFRVLCCAFNTYVMEFLKKV

SEQ ID NO: 12081 - protein, 422 aa, Streptomyces rimosus
MTGQLAPAPETGTGRPGGSVRPVVTGLGVVAPNGLGTERYWAATLRGDSGIGRITRFDPSGYTSSLAGEIADFDPARLPNRLLPQTDLMTRLALVAAEEALDDAGADPRTMPDFAAGVVTAASAGGFDFGQRELEALWSKGGAHVSAYQSFAWFYPVNSGQISIRHDMRGPGGALVAEQAGGLDAVAKARRHVRDGTPLMLTGGVDGSLCPWGWLCMTRSGALTTRTDPRRAYLPFSPDASGYVPGEGGALLVLEDPRAAAERGAPQVYGRIAGYAATFDPRPGSGREPGLRRALRLALDDAGIGPADVDVVFADAMGVPALDAVETQVLAAEFGPRGVPVTAPKTMTGRLLAGGASLDLAAALLSLRDQVVPPTVHVDGGEIPDSLDLVTGAPRPARLRHALVLARGHGGFNSAMVVSGRD

SEQ ID NO: 12082 - protein, 612 aa, Streptomyces rimosus
MCGIAGWIDFERNLAQERATAWAMTDTMACRGPDDAGLWTGGHAALGHRRLAVIDPAHGRQPMHSTLPDGTSHVITFSGEIYNFRELRVELESQGHRFRTHCDTEVVLHGYTRWGRELVDRLNGMYAFAVWDEARQELLLVRDRMGVKPLYYHPTATGVLFGSEPKAVLAHPSLRRRVTAEGLCEVLDMVKTPGRTVFSGMREVLPGEMVTVGRSGVARRRYWTLQAREHTDDLETTIATVRGLLTDRVRRQLVSDVPLCTLLSGGLDSSAVTALAARAGDGPVRTFSVDFSGAGTRFQPDAVRGNTDAPYVQEMVRHVAADHTEVVLDSADLAAPEVRAAVLGATDLPPAFWGDMWPSLYLFFRQVRQHCTVALSGEAADELFGGYRWFHRTAAIDAGTFPWLTAGSARYFGGRGLFDRKLLDKLDLPGYQRDRYAEARKEVPVLPGEDAREAELRRVTYLNLTRFVQTLLDRKDRMSMATGLEVRVPFCDHRLVDYVFNVPWAMKSFDGREKSLLRAAVRDLLPESVVTRVKTPYPATQDPVYERLLRDELAALLADSQAPVRELLDLGRARDLLRRPVGAVSQPYDRGSLELVLWMNTWLAEYGVSLEL

SEQ ID NO: 12083 - protein, 509 aa, Arabidopsis thaliana
MGRDFLVLSILILLLSGIVSSAPSANSPAKILNGFISNHGSSLMKWLWSLKTTTKTTIATRSMVKFENGYSVETVFDGSKLGIEPYSIEVLPNGELLILDSENSNIYKISSSLSLYSRPRLVTGSPEGYPGHVDGRLRDAKLNHPKGLTVDDRGNIYVADTVNNAIRKISEGGVTTIAGGKTVRNGGHVDGPSEDAKFSNDFDVVYVGSSCSLLVIDRGNKAIREIQLHFDDCAYQYGSGFPLGIAVLVAAGFFGYMLALLQRRVGSIVSSHNDQEMFEADPDQKPMKHSRPSLIPAGDEQLEKQEETFVVSLGKLVSNAWESVMEILRKKQTGTRFQQYHGTTKQSAAFSTSTPWPIQESFVIRDEDGPPPVEPRNPTPRKTYAFMSKDAEKMQQLRQSRAFYSSWDAEFPNQQQQQQKQHQKHQHQQQQQQQHRRHYSSIPHTYYEQDSEKSNEIVFGAVQEQSSKRVAKPKPKPIESGDQMNNNTQQNLHYRSHSVSYPYGYYPNT

SEQ ID NO: 12084 - protein, 418 aa, Streptomyces rimosus
MTGHPRPPADGAHTDVCVVGGGPAGLTLALLMLRSGARVTLVERSRSLDRAYRGEILQPGGQALLDALGVLEGARRRGCHEHDGFRLEERGRTLINGDYRRLPGPYNCLLSLPQQHLLTDLLERCRAHPRFTCLTGTKVNGLVEEGGVVRGVVCGGGADGLVVRADCVVGADGRYSTVRKLAGIPYDRIELFDQDVLWCKLTAPATRTVRIFRAGGNPVLAYTSFPDCVQLGWTLPHKGYQALAERGFAHVKERIRAAVPEYADTVDQQLNSFKDVSLLDVFAGSARRWARDGLLLIGDSAHTHSPIGAQGINLAIQDAVAAHPVLCEGLRRRDLSERFLDAVAARRRPETERATRVQVMQSRMMLSTGRVSAAVRPKAAMLVSRTPAYRSVLRRIAYGDQTLRVRSDLFEEGEPATV

SEQ ID NO: 12085 - protein, 519 aa, Cryptococcus neoformans var. neoformans B-3501A
MSGKSKFTPLTIVIKLGTSSIVSPTYPFVPHLRLLSSIVETVVKLRTQGHRVVLVSSGAIGVGLRRMDLKERGKGLHQKQSHDQQALAAVGQGRLIALWDNLFSQLDQPIAQILLTRMDISDVTQRTRYLNAQNTFSELLQMGVIPIVNENDTVSVSEIKFGDNDTLSAISSAICHADYLFLLTDVDCLYTDNPRTNPDAKPVRVVRDIEKVKQQVSTSTLGTSLGTGGMSTKLIAAELATAAGTTTVVMHSINVTDIFKVIENGPSPCREVAETPELFEGPLCTRFLRRESALKDRKWWIAHGLHAAGTVVIDEGACRAIRRKESGGRLLPAGVVRVVGPFASHQAVRLVVRRRRHDDIAALSSVDESTPGSPTPDLSQVPQPATFASPALRHLTIGTTNPITVMSDANNTEPDTPQLQPSMSLSSSIASLDPLSRSVPPSPAITALAERLGTTSLTSIGRGVAEGESDEWEEVEVAKGLAQYNSVEIDRMKGRKSSEIEKLIGYVESEHVVDSITFL

SEQ ID NO: 12086 - protein, 449 aa, Streptococcus mutans UA159
MTTGKEYVASVFEKVKAQNAHEPEFLQAVEEVFESLIPVFDNYPKYIEENLLERLVEPERIVSFRVPWVDDKGQVQVNRGFRVQFSSAIGPYKGGLRFHPSVNQSIIKFLGFEQIFKNSLTGQPIGGGKGGSNFDPKGKSDNEIMRFCQSFMTELSKHIGADTDVPAGDIGVGGREIGYLYGQYKRLRNEYTGVLTGKGLTWGGSLARTEATGYGAVYFAEQMLKARGQDFAGKTAIVSGSGNVAIYATEKLQTLGAKVVAVSDSSGYVYDPDGIDVALLKELKEVQRARIIKYADARPNASFTPAGGDSIWTIKADLAFPCATQNELNEADAKTLVANGVIAVSEGANMPSTLEAIDVFLKAGVSFGPAKAANAGGVAVSALEMAQNSQRTAWTFEEVDRKLYDIMKGIYDNSAAAAKSFGQEGNLVVGANIAGFLKVADAMSAQGIV

SEQ ID NO: 12087 - protein, 295 aa, Lycopersicon esculentum
MTYMFKYDSVHGQWKHHELKVKDEKTLLFGEKAVTVFGFRNPEETSMDRLGADYIVESTGVFTDKDKPAAHLKGGAKKFIISAPSKDAPMFVVGVNEKEYNPELNIVSNASCTTNCLAPLAKVINDRFGIVEGLMTTVHSITATQKTVDGPSAKDWRGGRAASFNIIPSSTGAAKAVGKVLPALNGKLTGMAFRVPTVDVSVVDLTVRLEKEATYDEIKAAIKEESEGKLKGILGYTEDDVVSTDFVGDNRPSIFDAKAGIALSKNFVKLVAWYDNEWGYSTRVVDLIIHMSSVQ

SEQ ID NO: 12088 - protein, 234 aa, Pyrococcus abyssi GE5
KISEEALEFLKRPQRIVEVTIPVEMDDGSVKVFTGFRVQYNWARGPTKGGIRWHPEETLSTVKALAAWMTWKTAVMDLPYGGGKGGIIVDPKKLSDREKERLARGYIRAIYDVISPYEDIPAPDVYTNPQIMAWMMDEYETIARRKTPAFGIITGKPLSIGGSLGRNEATARGASYTIREAAKVLGWDDLKGKTIAIQGYGNAGYYLAKIMSEDYGMKVVAVSDSKGGIYNPDG

SEQ ID NO: 12089 - protein, 283 aa, Pediococcus pentosaceus ATCC 25745
MNNLTDTYTLNNGVKIPVVGFGTWQSKDGDEAYNAVKAALEAGYRHIDTAAAYGNEESVGKAIKDSGIDRKELFITSKLWNRDHGYESAKKALDTSLAKLGTDYLDLYLIHWPNPVQFRDEWQQRNADSWRAMEEALDAGKVRAIGVSNFRAHHLDELLKTAKVTPAVNQIFLNPSDTEDEVVAYNKEHGILSEAYSPLGTGKIFTIPELKDIAAKYNKSVAQVVLRWSLQHGFLPLPKSVHADRIKQNTEIFDFELSDDDIKKIDGFHGVAGLAQDPDATDF

SEQ ID NO: 12090 - protein, 159 aa, Triticum aestivum
  misc_feature (66)..(66): Xaa can be any naturally occurring amino acid
  misc_feature (86)..(86): Xaa can be any naturally occurring amino acid
  misc_feature (90)..(90): Xaa can be any naturally occurring amino acid
  misc_feature (92)..(92): Xaa can be any naturally occurring amino acid
  unsure (1)..(159): unsure at all Xaa locations
RSDKVRALREAFYRQNLPNVTNLLATVLVFLIVIYFQGFRVVLPVRSKNARGQQGSYPIKLFYTSXNMPIILHSALDYQLYFISQXLYRXYXGNFLGNFLGVYGKEPGISWASYPGWVACLLSWHNKWLISRAIQAWSKWPQSCLSSKTGMEPVIQGVG

SEQ ID NO: 12091 - protein, 739 aa, Mycobacterium smegmatis
MPEDRPIEDSPPIGEAQTDAPAGGCPAGFGRIKPPVAGGSNRDWWPNQLNLKILQKNPDVINPLDEDFDYRSAVQNLDVDALRADIVEVMHTSQDWWPADFGHYGPLFIRMAWHAAGTYRVSDGRGGAGAGMQRFAPLNSWPDNASLDKARRLLWPVKKKYGKNLSWADLIVYAGNVALEDMGFRTAGFAFGREDRWEPEEDVYWGPEQEWLDDKRYTGERDLENPLAAVQMGLIYVNPEGPNGNPDPQASAIDIRETFGRMAMNDVETAALIVGGHTFGKTHGNGDASLVGPEPEAAPLEEVGLGWRNPQGTGVGKDAITSGLEVTWTHTPTKWDNSFLEILYGNEWELTKSPAGANQWKPKDNGWANSVPLPTRTAKTHPSMLTSDLALRVDPIYEQITRRWLDHPEELAEEFAKAWFKLLHRDMGPVTRYLGPEVPKDTWLWQDNIPAGNDLSDDEVAKLKELIADSGLTVSQLVSTAWKAASTFRSSDLRGGANGGRIRLQPQLGWEANEPDELAQVVRKYEEIQKASGINVSFADLVVLGGNVGVEKAAKAAGFDVTVPFTPGRGDATQEETDVDSFAYLEPKADGFRNYLGKGSDLPAEFKLIDRANLLGLSAPEMTTLVGGLRVLDVNHGGTKHGVLTDKPGALTTDFFVNLLDMSTAWKPSPADDGTYIGTDRATGSPKWTGTRVDLVFASNSQLRALAEVYAEDDSKEKFVKDFVAAWTKVMDADRFDVA

SEQ ID NO: 12092 - protein, 662 aa, Shigella flexneri
MSDDMSMGLPSSAGEHGVLRSMQEVAMSSQEASKMLRTYNIAWWGNNYYDVNELGHISVCPDPDVPEARVDLAQLVKTREAQGQRLPALFCFPQILQHRLRSINAAFKRARESYGYNGDYFLVYPIKVNQHRRVIESLIHSGEPLGLEAGSKAELMAVLAHAGMTRSVIVCNGYKDREYIRLALIGEKMGHKVYLVIEKMSEIAIVLDEAERLNVVPRLGVRARLASQGSGKWQSSGGEKSKFGLAATQVLQLVETLREAGRLDSLQLLHFHLGSQMANIRDIATGVRESARFYVELHKLGVNIQCFDVGGGLGVDYEGTRSQSDCSVNYGLNEYANNIIWAIGDACEENGLPHPTVITESGRAVTAHHTVLVSNIIGVERNEYTVPTAPVEDAPRALQSMWETWQEMHEPGTRRSLREWLHDSQMDLHDIHIGYSSGTFSLQERAWAEQLYLSMCHEVQKQLDPQNRAHRPIIDELQERMADKMYVNFSLFQSMPDAWGIDQLFPVLPLEGLDQVPERRAVLLDITCDSDGAIDHYIDGDGIATTMPMPEYDPENPPMLGFFMVGAYQEILGNMHNLFGDTEAVDVFVFPDGSVEVELSDEGDTVADMLQYVQLDPKTLLTQFRDQVKKTDLDAELQQQFLEEFEAGLYGYTYLEDENLLI

SEQ ID NO: 12093 - protein, 555 aa, Oryza sativa
  misc_feature (79)..(79): Xaa can be any naturally occurring amino acid
  unsure (1)..(555): unsure at all Xaa locations
MTTSSSGSVETSANSRLGTFSFASASFTDLLGGNAGAGGGGVSRYKAMTPPSLPLSPPPVSPSSFFNSPIGMNQADFLXSPVLLTSSIFPSPTTGAFASQHFDWRPEVAAAQSADQGGKDEQRNSYSDFSFQTAPASEEAVRTTTFQPPVPPAPLGDEAYRSQQQQQPWGYQQQPAGMDAGANAASFGAAPFQATSSEMAPQVQGGGGYSQPQSQRRSSDDGYNWRKYGQKQVKGSENPRSYYKCTFPNCPTKKKVERSLDGQITEIVYKGTHNHAKPQNTRRNSGSSAAQVLQSGGDMSEHSFGGMSGTAATPENSSASFGDDEIRVGSPRAGNGGGDEFDDDEPDSKRWRKDGDGEGISMAGNRTVREPRVVVQTMSDIDILDDGYRWRKYGQKVVKGNPNPRSYYKCTTAGCPVRKHVERASHDLRAVITTYEGKHNHDVPAARGSAALYRPAPPAAAATSSHPYLPNQPPPMSYQPTGPQPYALRPDGFGGQGPFGGVVGGSSFGGFSGFDDARGSYMSQHQQQQRQNDAMHASRAKEEPGDDMFFQNSLY

SEQ ID NO: 12094 - protein, 134 aa, Glycine max
KYRLYLVLDFVNGGHLFFQLYHQGLFREDLARIYTAEIVCAVSHLHSNGIMHRDLKPENILLDADGHVMLTDFGLAKQFEESTRSNSMCGTLEYMAPEIILGKGHDKAADWWSVGILLFETLTGKVCILFLVNL

SEQ ID NO: 12095 - protein, 467 aa, Rhizobium sp.
MTIDIKDISEKDRNTVLHPFTQLKDFATGKLREPTIVETGKGIRIQDARGNQLIDGFAGLYCVNVGYGRTEVAEAISRQAYRLAYYHSYAAHTTDELAILSDRLVKMAPGKMSKVFYGMSGSDANETQAKLVWYYNNLRGKPTKKKIISRERGYHGCSVVSGSMTGMSFYHDHMDLPLPQICHTGVPHHYWGANPGETEREFSARRAAELDEMIETLGPDNVGAFIAEPVLGTGGITPPPEGYWEAIQAVLKKHDVLLIADEVITGFGRTGSMFGSQHYGIEPDLITVAKGLTSAYFPLSASIVGEKVYKVLEDGADRVGAFSHGYTYSGHPIGAAAANAVLDIVEKEDLPGNAREVGGYFQAQLKEKFAQLPIVGEVRGVGLMGAIEFVGDRENKKRFDPLLKVGARVSKAARDRGLIARAMPHGDILGFAPPLVTTKEEVDEIVAMAEKAVRSVMDELVRDGQKL

SEQ ID NO: 12096 - protein, 752 aa, Medicago sativa
MANADPCREFVKDVKRIIIKVGTAVVTRQDGRLAVGKLGALCEQIKELNILGYEVILVSSGAVGLGRQRLRYRKLIQSSFADLQKPQVELDGKACAAVGQSSLMATYDILFSQLDVTSAQLLVTDNDFRDQDFRKQLSETVRSLLALKVIPIFNENDAVSTRKAPYEDSSGIFWDNDSLSALLALELKADLLILLSDVDGLYNGPPSDPLSKLIHTYIKEKHQNEITFGDKSRVGRGGMTAKVKASVHAADAGIPVIITSGNAAENLTKILQGQRIGTLFHKDAHKWVPSKEVDVREMAVAARDCSRRLQVSLISEQLENVSRIPGYYQASVYRSFQNMLISNLTLQAVSSEERKQILLNIADALQSREKEIRIENEADVVAAQEAGYEKSLVARLVLKSEKIVGLANNIRIIANMEDPIGRVLKRTELAEGVILEKTSSPLGVLLIIFESRPDALVQIASLAIRSGNGLLLKGGKEANRSNAILHKVITEAIPDTVGSKLIGLVTSRAEIPELLKLDDVIDLVIPRGSNKLVSDIKSSTKIPVLGHADGICHVYVDKSANLEMAKQIVLDAKTDCPSGCNAMETLLVHKDLVEKGWLNSISDDLRSEGVTLYGGPKASSLLNVPLARSLHHEYCSLACTLEIVDDVYAAIHHINLYGSAHTDSIVTEDHEVADVFLRQVDSAAVFHNASTRFSDGARFGLGAEVGISTSRIHARGPVGVDGLLTTRWLLKGSGQVVDGDKTVTYTHKDLTT

SEQ ID NO: 12097 - protein, 357 aa, Zea mays
MASLTDLVNLDLSDCTDKIIAEYIWVGGSGIDLRSKARTVKGPITDPSQLPKWNYDGSSTGQAPGEDSEVILYPQAIFKDPFRKGNNILVMCDCYTPQGEPIPSNKRYKAATVFSHPDVAAEVPWYGIEQEYTLLQKDLSWPLGWPVGGYPGPQGPYYCAAGADKAFGRDVVDAHYKACLYAGINISGINGEVMPGQWEFQVGPSVGISAGDEIWVARYILERITEMAGIVLSLDPKPIKGDWNGAGAHTNYSTKSMREAGGYEVIKEAIEKLGRRHREHIAAYGEGNERRLTGRHETADINTFKWGVANRGASIRVGRDTEKEGKGYFEDRRPASNMDPYVVTGMIADTTILWKGN

SEQ ID NO: 12098 - protein, 150 aa, Bifidobacterium longum DJO10A
  misc_feature (133)..(149): Xaa can be any naturally occurring amino acid
  unsure (1)..(150): unsure at all Xaa locations
MTEFKETELDERAIKMAKVLSADAVEKAGSGHPGSPISLAPVAYTLYQHFIKHDPNDPNWEGRDRFILSGGHASLTQYVQLYFSGYGVTLDDLKNFRGGAATRTPGHPEYGLTPGIEMTTGPLGQGFASAIGXXXXXXXXXXXXXXXXXP

SEQ ID NO: 12099 - protein, 604 aa, Sinorhizobium meliloti 1021
MAFTRFTARNRAFRSVFRFSWDHWKKQPVRLAALLLTVLLSTLADVLTPLYSGRLVDAVISGAASDDVAWNAAMAAFMMLMALSFGAIILRHVTFMGIVSLTLKMMSDIAAAAFHHIQRFSSDWHANSFAGSTVRKVTRGMWALDLLNDTLLVALFPSIVMLVGSTALMAWYWPMMGVIIGLGSIAFIAVTVSLSLGYVAPMASLANSWDTRLGGALADAVSCNTVVKAFGAEGREDARLAKVLRKWENRTRRTWSRGTLNGTAQGAMLLVLRAAVIGFALLLWARGQATAGDITFVLTSFFILQGYLREVGMHIRNLQRSINDMEELVAIHAQPLGVEDRPGAKPIRITEGEIEFRDVTFHYGAHRAPLYEGFSVNIAAGERVGLVGHSGSGKTTFIKLIQRLHDLNAGEIRIDGQNIADFTQASLRQQIAIVQQEPILFHRSLAENIAYARPGATQRDIEEAARLASAHDFIAALPKGYGTLVGERGVKLSGGERQRVAIARAFLADAPILILDEATSSLDSESEVLIQQAMERLMTGRTTLVVAHRLSTVRALDRLLVFDRGRIAEEGDHGALIRVKGGIYRSLFERQALELTKGLILSEG

SEQ ID NO: 12100 - protein, 108 aa, Hyacinthus orientalis
LTVSVASGQYFCLHFEAFQLGMAPVYRAFLRFMGDDSEAKNYSYSREVGATGRKMIWQGVPRSIRDSHRKVRDSYDAIVIQRNIALFFSGGDRKELKLRVTGRIWKEQ

SEQ ID NO: 12101 - protein, 320 aa, Bifidobacterium longum DJO10A
MLNAIAAVMPELWGGSADLGGSNKTDLKGAATFAPAECATKQWPNCNEFGRQLHFGVREFTMGCITNGILLGSHTRPFGGTFFMFSDYERSAVRLAALMEIPNLYIWSHDSVAVGEDGPTHQPVEHLASFRAIPQLEVIRPADAFETAEAYRYFFEKKNTLPGAMVLTRQGVPVLAETAAKAKDGVKKGAYVLVDTEGTPDVILMASGSEVQWAVAAAKTLAGEGVKARVVSVPSMEWFEEQDAEYKEAVLPAAVKARVSVEAGVAMPWYKYLGSYGKPVSIEQFGLQGDGAQNMIDLGITAEHVVEAAKASIAEVEAAK

SEQ ID NO: 12102 - protein, 446 aa, Candida glabrata CBS138
MEELCDIPNESLEALKIEACTTTTTRVCDLEVEENKFNVVVEDEEKIICESEEVVQDMDHKKAGYLFQRTLGAGSFGVVKRAKQLHSDEDVAVKILLKRALEKNGGLEPIYDELNIIQHLDHPNIVKFKDWFETESKFYIVTQLASGGELFDRIMHDGKYTEEDAVNIVVQILKAVEYLHSQNIIHRDLKPENLLYLDKSKDSRIVLADFGIARQLENDDDVIYRPAGSLGYVAPEVFTSDGHGKPSDIWSVGVITYTLLCGYSPFKAESVDGFLDEVTSDENPVKFQRPYWDGISELAKNFILRILDLDPACRPSATELLNDPWIQSKCSLRTDLYHNMRKNLSAKKKLQKAVELIKLNQRIKKLRQLYLLANETDSDLEEEERSSSASLSSLPSSQSSLSLSNEYGSKSKREQDEFISSLRQQTLAQIIKVATVNKDTVRKFEK

SEQ ID NO: 12103 - protein, 367 aa, Bifidobacterium longum DJO10A
MTEATQRTSDNGVSIWLDDLSRSRIESGSLQDLIANKNVVGVTTNPSIFQKALSQVGPYDAQLKELGKVDVETAVRELTTTDVRNATDIFREIAEKTDFVDGRVSIEVDPRLAHETEATEKQAEELWAKVNRPNVMIKIPATLEGLPAITATLAKGISVNVTLIFSLERYEQVIDAYIEGIAQAAANGHDLKHIGSVASFFVSRVDTAVDKLLEANGSDEAKALEGKAAVANARLAYELFEKKFAEDPRWADLAAKGAKVQRPLWASTGTKNAAYSDCKYVDELVAKHIVNTMPEKTLNALADHGNGAPSIEGTYEESHAIINKLAELGINLKDVTDKLEADGVAAFIKSWDSVLADVQSGIDRVNA

SEQ ID NO: 12104 - protein, 328 aa, Sinorhizobium meliloti 1021
MQNNNILVVGGAGYIGSHTCLQLAAKGYQPVVYDNLSNGHEEFVKWGVLEKGDIRDRQRLDEVLARHKPRAILHFAAMIEVGESVKDPAAFYDNNVIGTLTLLSAALAAGIDAFVFSSTCATYGLPDSVPMDESHKQAPINPYGRTKWICEQALKDYGLYKGLRSVILRYFNAAGADFEGRIGEWHEPETHAIPLAIDAALGRREGFKVFGTDYDTRDGTCVRDYIHVLDLADAHVRAVDYLLEGGESVALNLGTGTGTTVKELLDAIEKVAKRPFNIGYAERREGDSTTLVANNDKARQVLGWEPQYDLAAITESAWNWHSRRNQGG

SEQ ID NO: 12105 - protein, 397 aa, Shewanella sp. ANA-3
MASTSFYAQINQQLADVKAEGLYKSERVIASPQQTAIQVNHQEVVNFCANNYLGLANHPELIKAAQQGLDSHGFGMASVRFICGTQDIHKQLEASLSEFLGMEDTILYSSCFDANAGLFETLLDAEDAIISDALNHASIIDGVRLCKAKRFRYANNDMADLETQLIAAKAAGARNILIATDGVFSMDGVIANLQGVCDLADKYGALVMVDDSHAVGFVGLNGRGSHEHCGVMGRVDIITGTLGKALGGASGGFTSGKKEVIDWLRQRSRPYLFSNSLAPSIVTASIHVLEMLKSGQALREAVWENSRYFREKMSAAGFTLGGADHAIIPVMIGDAKLASDFANRLLAEHIYVIGFSFPVVPKGQARIRTQMSAAHTREQLDKAIEAFTRIAKEMAII

SEQ ID NO: 12106 - protein, 339 aa, Ashbya gossypii ATCC 10895
MGYNETEPAIDGDNNEQRINEDMSTLEHTSNNNGNGLEPVEAGPDSGIPAVEGGGSVSGQSPQHEPPAYELSYVVGVAENKNAKFRRTMEDVHTYVENFASRLDWGYFAIFDGHAGNQASKWCGSHLHTIIEERILQGDDRDVRDILNDSFVYVDQQINSTLEGNSGCTAAVGILRWEAPTPIPNMPINLEQHKRMLYTANVGDTRIILFRNGRSVRLTYDHKASDIIEMQRVEKAGGLIMKSRVNGMLAVTRSLGDKFFDSLVVGNPFTTSVEIPTSDQFLIIACDGLWDVVDDQEACEMIKDIEDANEAAKTLVRHALEHGTTDNVTVMVVFFDNNQ

SEQ ID NO: 12107 - protein, 443 aa, Rhizobium sp.
MSFLDLPEGLPERIIQCNSPYTVRFGVRLRGRMYSFIGWRSVREHCEPVKGDIRYASNADAEEVEALAALMTLKCSLVDVPFGGSKGALKIDPRGWTPQELEHITRRFTQEMNKRPDRARRQCVGSDIGTGEREMAWMMDEFRRANPTDVVTSGACVTGKPLSKGGIAGRAESTGRGVQFAIQSSLRDTRTPGLDGRRNLKGASTVIQGFGNVGYHAARFLSEEDDARVTVLAERDGYVANPEGLSIEALKQHQIRTGSILGFDGAKSIAGDMCGVEQPCDVLIPAAMENAIHAENAERMKAHLVVEAANGPVTFEADEILRSRGVTILPDLYVNAGGVVVSYFERVKNLTHIPFGLMERRRRERGNHTIATALERMTGKESPADMRDEFLEGGAEIDLVRSGLEDVMRSTWTRIADLMEQQPELGDYRTAAYVASIRQVADL

SEQ ID NO: 12108 - protein, 478 aa, Leptospira interrogans serovar lai str. 56601
MPCMKILNRKKTKIVCTIGPASSSEETILSILKAGMDIARMNFSHGTHDSHKRVYDTLRKCEQIFGFPLGIMADLQGPKIRTGKLKLNSILLHKNQEIEIVPDSDILGDEHKIGCTYPNLIRDIQEEDKILIDDGKLILKVISKKSNSAILKVIVGGILWSNKGINLPGTPISAPALSEKDIEDLKFALSLGVDYAALSFVRTGADLELARSYLEGTYTGLIAKIERPEAIGNIEEIIERADGIMIARGDLGVEIDTEKVPILQKELIYKLNQAGKPVITATQMLESMIENPRPTRAEASDVANAVMDGTDAVMLSAESANGHYPVESVEIMSKIIQETETIDHIYEIHWNIKKTFLESERTALGNAAREIAHGIHAKAIVNFTRSGYSALITSEMRPKVPIYSFTPFATTARKMKLYRGVVPFVMPFFTRLEDMIAYMNQKLKEDEFLFPGDKVVILSGAPGTTVRSVDFLQVYKIH

SEQ ID NO: 12109 - protein, 696 aa, Candida glabrata CBS138
MPRDLQNHLLFEVATEVANKVGGIYSVLKSKAPVTVAQYQDNYTLIGPLNKGTYQGEVEELDWEDPSIFSEELQPVQQALKYMREKGVYFVYARWLIEGAPRVILFDLDSVRYKLNEWKADLWSLVGIPSPENDWETNDAILLGYTVVWFLGELTQLDHKHAIIGHFHEWLAGVALPLCRKKRIDVVTIFTTHATLLGRYLCAAGDVDFYNHLQYFDVDQEAGKRGIYHRYCIERAAAHTADVFTTVSQITALEAEHLLKRKPDGILPNGLNVVKFQAVHEFQNLHALKKEKINDFVRAHFHGNFDFDLDNTLYFFIAGRYEYKNKGADMFVEALARLNYRLKMAGSKKTVVAFIIMPAQNNSFTVEALRSQAVVKSLENTVNEVTSLIGKRIFEHAMKFPHNGITNEIPNNLEELLKPSDKVLLKKRVLALRRPYGELPPIVTHNMADDANDPILNQIRHVQLFNNHSDRVKVIFHPEFLNANNPILGLDYDEFVRGCHLGVFPSYYEPWGYTPAECTVMGVPSITTNLSGFGAYMEDLIETNQAKDYGIYIVDRRYKAPDESVEQLVDYMEEFVNKTRRQRINQRNRTERLSDLLDWKRMGLEYVKARQLGLRRAYPDQFKEIVGEDVNDSSMEALAGGKKLKIARPLSVPGSPRDAAKSPSTVFMTPGDLGTIQDANNVDDYFHLSVNDNEEE

SEQ ID NO: 12110 - protein, 164 aa, Oryza sativa (japonica cultivar-group)
MNVDKLKKMAGAVRTGGKGSVRRKKKAVHKTTTTDDKRLQSTLKRVGVNTIPGIEEVNIFKDDVVIQFLNPKVQASIGANTWVVSGTPQTKKLQDLLPSIINQLGPDNLDNLRRLAEQFQKQAPGASGEEAGASAGAAQGDDDDVPELVPGETFEEAAEEKKES

SEQ ID NO: 12111 - protein, 341 aa, Shewanella sp. ANA-3
MKALSKLKAEKGIWLVDAPKPEMGHNDLLIKIKKTAICGTDMHIYNWDEWSQKTIPVPMVVGHEYVGEVVDIGQEVRGFKIGDRVSGEGHITCGHCRNCRAGRTHLCRNTSGVGVNREGSFAEYLVIPAFNAFKIPDDISDDLASIFDPFGNAVHTALSFDLVGEDVLITGAGPIGIMAAAVCRHVGARHVVITDVNEYRLELARKMGATRAVNVAQESLKDVMKELGMTEGFDVGLEMSGVPSAFHAMLDTMNHGGKIAMLGIPGGEMAIDWSKVIFKGLVIKGIYGREMFETWYKMASLIQSGLDISPIITHHYKIDDFQKGFDAMGSGQSGKVILSWD

SEQ ID NO: 12112 - protein, 160 aa, Zea mays
  misc_feature (127)..(127): Xaa can be any naturally occurring amino acid
  unsure (1)..(160): unsure at all Xaa locations
MAEQTEKAFLKQPKVFLSSKKSGKGKKPGKGGNRFWKSIGLGFKTPREAIEGTYIDKKCPFTGTVSIRGRIIAGTCHSAKMNRTIIVRRNYLHFVKKYQRYEKRHSNIPAHISPCFRVKEGDHVIIXGQCRPLSKTVRFNVVKVIPAGSAAAGKKAFTAA

SEQ ID NO: 12113 - protein, 137 aa, Desulfovibrio vulgaris subsp. vulgaris str. Hildenborough
MTKTESGRSLLLIDDEDGFLAVMRRRFERRGYDVATAGSGAEALRLLRERRFEAAVLDLKMGDMDGFELLRIFRRMAPEMPVVMLTGHGGETEAAEGLRLGAAGYLLKPCDFEALVECLDGALTQDDSGGATDGQAT

SEQ ID NO: 12114 - protein, 587 aa, Glycine max
  misc_feature (121)..(121): Xaa can be any naturally occurring amino acid
  unsure (1)..(587): unsure at all Xaa locations
MYRFATSLASKARIARSSTQQIGSRVSWNRNYAAKDIKFGVEARALMLKGVEELADAVKVTMGPKGRNVVIEQSFGAPKVTKDGVTVAKSIEFKDKVKNVGASLVKQVANATNDVAGDEYXGREHFNCLAGTTCATVLTRAIFTEGCKSIAAGMNAMDLRRGISMAVDAVVTNLKSRARMISTSEEIAQVGMISANGEREIGELIAKAMEKVGKEGVITISDGKTLYNELEVVEGMKLDRGYISPYFITNDKNQKCELEDPLIIIHEKKISSINAIVKVLELALKRQRSLLIIAEDVESDALATLILNKLRAGIKVCAIKAPGFGENRKSGLQDLAVLTGGQLITEELGLKLEKVDLDMLGTCKKITVSKDDTVILDGAGDKKALEERCEQIRSAIENSTSDYDKEKLQERLAKLSGGVAVLKIGGASEAEVGEKKDRVTDALNATKAAVEEGIVPGGGVALLYASSELDKLQTANFDQKIGVQIIQNALKTPVHTIASNAGVEGAVVVGKLLEQNDPDLGYDAAKGEYVDMVKAGIIDPLKVIRTALVDAASVSSLMTTTEAVVSELPNDNKDTPAMAGGMGGMGY

SEQ ID NO: 12115 - protein, 316 aa, Ustilago maydis 521
MSTWNKHYHWKTKGCTPWAKNHITEATVGKSVSVGKSGQVKVDRLSSFEGDVELGNRKGKLITIYDCAITYAWSGTSDDGTEASGTITFPEVSHEIEDEGDEYQFETEMSTKPSAEANQLYDAVRKELAPSLRLVFHAFRQNLIDAHAKDLGHDSPASTPGAATPTASVAASAGAPAAPSSQAKATVSSSSSDVRVSSELAISTSDLWDLLTNPSRIPMWTRAPAKFEPKADAEFALFGGNVIGKVVSVDAPKQLIQKWRTPQFPEGYYGTLAINLTEGGDSTKLELVLSGAPSGDEEIVEKNLETYYIRGLKSMG

SEQ ID NO: 12116 - protein, 196 aa, Zea mays
VLGGVKENPAAANSAESDGLGRFAVDEHNRRENALLEFVRVVEAKEQVVAGTLHHLTLEAVEAGRKKLYEAKVWVKPWLDFKELQEFSHKGDATAFTNADLGAKQGGHEPGWREVPVEDPVVKDAAHHAVKSIQERSNSLFPYELLEILRAHAQVVEDFAKFDILMKLKSLEGAFVLNQHQPAEHDESSSQTDVTV

SEQ ID NO: 12117 - protein, 311 aa, Mannheimia haemolytica
GSHTLVELLNENREIVVLDNLSNSSEVSLERVKQITGKSVKFYQGDILDRDILRKIFAENQIESVIHFAGLKAVGESVREPLRYYQNNVTGSIVLVEEMLKANVNTIVFSSSATVYGDPQIIPIVESCPVGGTTNPYGTSKYMVERILEDTVKAFPQLSAVVLRYFNPVGAHESGLIGEDPNGIPNNLMPFISQVAVGKLPQLSVFGGDYNTHDGTGVRDYIHVVDLALGHLKALDKHQNDAGFHVYNLGTGTGYSVLDMVKAFEAANGITIPYKVVDRRPGDIAVCYSAPQKALEQLGWETERGLEQMMK

SEQ ID NO: 12118 - protein, 311 aa, Mannheimia haemolytica
GSHTLVELLNENREIVVLDNLSNSSEVSLERVKQITGKSVKFYQGDILDRDILRKIFAENQIESVIHFAGLKAVGESVREPLRYYQNNVTGSIVLVEEMLKANVNTIVFSSSATVYGDPQIIPIVESCPVGGTTNPYGTSKYMVERILEDTVKAFPQLSAVVLRYFNPVGAHESGLIGEDPNGIPNNLMPFISQVAVGKLPQLSVFGGDYNTHDGTGVRDYIHVVDLALGHLKALDKHQNDAGFHVYNLGTGTGYSVLDMVKAFEAANGITIPYKVVDRRPGDIAVCYSAPQKALEQLGWKTERGLEQMMK

SEQ ID NO: 12119 - protein, 482 aa, Oryza sativa (indica cultivar-group)
MAQPSPTTGTLPFLMASNAKSTIPSATKMDEDCTFGNDTFSFQPHVGSRRPNFSASEKGPNACHQNQSLSNIHQRESSLQSSFTAVKDITDEKNIKTKTSDSMFGDNHSSDEQDDETNQNGENFMPPLNHRSGVPLSHTNDPEVNVLENRGSQTCHNSASLWDNAKNDCLQDVQSEVIETRTAACLPVSTNCDTSIMESQDAVDVSSTLSNEEDDRATHGTASIECNGDGDETDSKRRKLDALTAATAAITTTSNIDMGAAASRGVREPRVVVQTTSEVDILDDGYRWRKYGQKVVKGNPNPRSYYKCTHQGCSVRKHVERASHDLKSVITTYEGKHNHEVPAARNSGHGSSGSGNAPSAPQSNGSQRRQEQGQASFSQFGGAAPFSSFVLPPRNQFGPSASNFPFGMVPPGMAIPMPSLGSLAPAKMAGHPSTMQGYQGLMIPEGEMKTEPMSQLGFPAVNQSSSSFQQMMNRPPSFGPQM

SEQ ID NO: 12120 - protein, 311 aa, Mannheimia haemolytica
GSHTLVELLNENREIVVLDNLSNSSEVSLERVKQITGKSVKFYQGDILDRDILRKIFAENQIESVIHFAGLKAVGESVREPLRYYQNNVTGSIVLIEEMLKANVNTIVFSSSATVYGDPQIIPIVESCPVGGTTNPYGTSKYMVERILEDTVKAFPQLSAVVLRYFNPVGAHESGLIGEDPNGIPNNLMPFISQVAVGKLPQLSVFGGDYNTHDGTGVRDYIHVVDLALGHLKALDKHQNDAGFHVYNLGTGTGYSVLDMVKAFEAANGITIPYKVVDRRPGDIAVCYSAPQKALEQLGWKTERGLEQMMK

SEQ ID NO: 12121 - protein, 546 aa, Cryptococcus neoformans var. neoformans B-3501A
MPVFSTLINSTESYQRRFDQMARAVLVYWVLKYVLLDGFRHIKARGLCGTANEIRNKIKSLVVRIMLAFPSNRAKLNSELAKTRAELKEKLAPSQYPDGVRLTTVRTLPETGRGREWLESEWENLKKLEKADVDNGRVSGAVYHGGDELNAVINEAMAKFVVTNPLHPDVFPGVRKMESEIVSMCLNLFNGPNGAGTTTSGGTESILMSVKTHRDWARVTKGITRPEMVIPSSAHAAFWKASEYFNIKLHVIPVNQKTRKAEVTAMKRAINPNTIMIVGSAPNFPDGAIDPIPELGALAKRRNVGLHVDCCLGSFIMPFLEKAGFSEGIDPFDFRVPGVTSISCDTHKYAFCPKGTSVIMYRSSELRRFQYYVITDWAGGVYASPSMAGSRPGSVLAGAWAVLNHIGADGYTSSCRQIISAARYLTSSLRTLFPDDLYVLGDPKGPVVAFNSKTINIYAVGDVMSKKGWHLSALGGDGGLHMAFTRLSAKSVDKLIEDLGDALKEVKASPQGAGGDMVALYGLGQTSAGPHVVGKLAETFLDTLYE

SEQ ID NO: 12122 - protein, 431 aa, Bifidobacterium longum DJO10A
MSDELSPEVFDAVCRQADQAARAQERLAQANAEAKNELLLAIADALDEHAADIEAANALDMLESKENGMDAGKLDRLLFDVPRVAAAAQGVRHVATLPDPVGEIVRGYNLPNGLRLTQTRVPMGVIGMIYEARPNVTVDVASLCLKSGNAALLRGGHAAERTNAATLGVIAPVLEAHGFESALVQSVDQYGRAGATAMMEARGHIDVLVPRGGAGLIQAVVRNSKVPVIETGAGNVHIYIDKSGNLAKAIPIIINAKTQRVGVCNAAEKLLVHKDVAAEFLPRIAAALAEANVVLQADTTSYDIISGAAIEGLDLNHATEEDWDTEYLALKMGIKVVSDLGAAIDHINTHSTGHTESIIAEDYAAIEEFTKRIDSAVVMVNASTRFTDGGVFGFGAELGISTQKMHARGPMGLREMTTTKWIGYGTGQVRA

SEQ ID NO: 12123 - protein, 222 aa, Streptomyces neyagawaensis
MAEQIGMTPRLLEYVRQTSLREDDILLELREATAGLPGGVALQVPAEGGQFLALLVRLTRAAAVLEIGTFTGYSTLCMARALPTHGRLVTCDITDRWPSIGAEFWKRAGVDGLIDLRVGDAAETLEKLLADEGPGVFDLVFIDADKANYPRYYELSLELLAPGGLVVVDNTLFFGRVTDPQFTDADTAGIRELNARLRADERVDLSMLTMADGITLARRKDA

SEQ ID NO: 12124 - protein, 224 aa, Brassica napus
RTNVNLPGVGDDLPTLTDKDIEDIMGWGVPNRIDMIALSFVRKGSDLVNVRRVLGSHAKSIMLMSKVENQEGVVNFDEILRETDAFMVARGDLGMEIPIEKIFLAQKLMIYKCNLAGKPVVTATQMLESMIKSPRPTRAEATDVANAVLDGTDCVMLSGESAAGAYPEIAVKVMAKICIEAESSLDYNTIFKEMIRATPLPMSPLESLASSAVRTANKAHAKLI

SEQ ID NO: 12125 - protein, 185 aa, uncultured bacterium 562
MKHYINGLNLLEDYIQDNNKILFGAGCFWGVERKFWDIPGVNITTVGYAGGDTDNPTYEDVCYKNTNHAEVVEVVYDVNKISLKELLKVFWECHDPTQGMRQGNDKGTQYRSVIYCSSNEDLEISLKSKIQYQETLQANGYGDITTEIVLSPKYFLAEEYHQQYLAKNPNGYCGLGGTNCSFPND

SEQ ID NO: 12126 - protein, 347 aa, Glycine max
  misc_feature (274)..(274): Xaa can be any naturally occurring amino acid
  unsure (1)..(347): unsure at all Xaa locations
MMWTVTAVFFLLVGAVVWILEHRLNDDFRGPPKQQMVTILWFSFSTMFFAHRENTVSTLGRFVLLIWLFVVLIINSSYTASLTSILTVQQLSSPVKGIESLISSKEPIGYLQGSFTRTYLIDEIGIDESRLVPLKTPEETTEALKKGPQKGGVAAYVDERAYIELFLSSRCDYSIVGQEFTRNGWGFAFPRDSPLAVDLSTAILELAENGDLQRIHDKWLLSSACLSQGAKLEVDRLNLRSFWGLYLVCGLACVLALLIYCIQTMRQYSKHMAXEELESSGHGSGSSRLRTFLTFVDEKEEIVKSRSKRKKMEGISYRSTSEVGSSITFNKAYSQASLNRIDSVNEI

SEQ ID NO: 12127 - protein, 839 aa, Cryptococcus neoformans var. neoformans B-3501A
MQPPTTPTSNRRSHFPSSRQSFSAGSAAKPRRYQSRQNSFLRLFIGALAITASKTWVIDNHGGEGGGAGWLVLAYWASRVFVEGKQVWDGRRRKAFRLDATSNGIGVKDYILSSFNYVLQSLAFFMSLGSLGPFKTSIIGMTGSLLATAQPTTIRSFGPLLPLILASGYAFAQQLLLKDFQAVIAILVFALTTYVIQGRFLEPKTAGSRETIDGRHSLYRTILSALVATVSVIALYFMGFIPIPVPVSSTASQRFGSFVAAFLVSNIPLSFGQNSPSSAGLRLKTWRDKATFLTCIPILQFFALHPIPTTVDVVILLPISVFSIWAESIFKAQPELAPSWTFSNHNLSTANHSWSFLSLVPSRWRPHFQTIISTPTSSRIFYFLLLNLAYMGVQMGYGVFTNSLGLISDAIHMLFDCLGLGVGLWASVAAMWKPDGRYTFGYSRVETLSGFANGCFLILISVFIIFEAIQRVYNPPEMETHQLLLVSGIGLAINLWGMWATGGHHHHGHSHGHDHAQVHAAPKVEVHKQGVSQNDAHKYEDHHLDLHSHDHHHKPSASSKVSPRPASKLQKRKSSGQLKDSGPSATTPQKTNNGHNHDEHCSHDGEKHSHSHNHHKLTLESSTHNDAHAHEDDYDHAHAHGHGHDHDRGHDHAHSHNMRGVFLHVLADTLGSVGVIISTILIRFTGWTGFDPIASLFIAALIMASVIPLVVDSGRILCLDVGEEKESEIRSALTELSSVDGLASYAAPRFWPRCEGELVGSIHIQLAPSPSSFDPTRLSTPPSSSRPRKGDAIYANSEKVVGRVEKVLKKRIKGLTELVVQVEGSEERSFCTCMTGGDQ

SEQ ID NO: 12128 - protein, 411 aa, Zea mays
MNALAATSRNFKQAAKLVGLDSKLEKSLLIPFREIKVECTIPKDDGTLASYVGFRVQHDNARGPMKGGIRYHHEVDPDEVNALAQLMTWKTAVANIPYGGAKGGIGCSPGDLSISELERLTRVFTQKIHDLIGIHTDVPAPDMGTNSQTMAWILDEYSKFHGYSPAVVTGKPVDLGGSLGRDAATGRRVLFATEALLAEHGKGIAGQRFVIQGFGNVGSWAAQLISEAGGKVIAISDVTGAVKNVGGLDIAEVVKHSAENKGIKGFKGGDAIAPDSLLTEECDVLIPAALGGVINKDNANDIKAKYIIEAANHPTDPEADEILSKKGVLILPDILANSGGVTVSYFEWVQNIQGFMWDEEKVNAELQTYMTRAFGDVKQMCRSHSCDLRMGAFTLGVNRVARATVLRGWEA

SEQ ID NO: 12129 - protein, 680 aa, Arabidopsis thaliana
MLRLPSSMPIVSFPANPNLLINPQPSWPSRRGNSAVVVSAASRDVDSFTSKSGYLFSLSADEADSLSEYNFPRIDGMYKKKPLILLRRLAQIGTTFSYWFGLRLADEALERSDQMFKVRAAELRKLLVELGPAYVKIAQAVSSRPDLIPPIYLDELSLLQDQITPFSTEVAFNMIEDELGLPIDELFSEISPEPVAAASLGQVYQARLRRSGKVVAVKVQRPGVRAAIALDTLILRYIAGLIKKAGRFNSDLEAVVDEWATSLFKEMDYLNEAQNGIKFRKLYGGIKDVLVPKMYTEYSTSKVLVMEWVEGQKLNEVNDLYLVEVGVYCSFNQLLEYGFYHADPHPGNFLRTYDGQLAYLDFGMMGDFRPELRDGFMEACLHLVNRDFKALAKDFVTLGLLPPTAEKSAVTKALTDVFQDAISRGVRNISFGDLLGDLGKTMYRFKFRIPPYFSLVIRSLAVLEGIAIGISPNYKVLGSTYPWIARKILTDSSPQLKSSLQNLLYESLRTETALVQKPVVGTESNIAMKQMLAFTFTEQGSFVREILLREFAKGLDAYGLATLDSFTFSGSGPSSSLTEEDMTNLRTFYRLISLFSGMQKAKSVSTQVKAVSKYGEALTPLDEASLVMYQLPSAQEMLPILSILPELPQESQQRLLQLPGDLVGRLVTRAFARTIRRIFL

SEQ ID NO: 12130 - protein, 241 aa, Treponema pallidum subsp. pallidum str. Nichols
MKKHIFEDARAIAAFLVSVFDSRLKTQEILWLALSGGSTPREIFRTWAHEFRHHLDWKRLRFFWSDERCVPPTDAQSNFNMTHSALLEPLEINPDAVFRVRGEDAPESACAAYSQEIEARLPRQRGVPCFDIILLGMGADGHTASIFPHEIELWDHSGCCVVATHPDTGQKRVSFTGHLINNAHEIYVVVTGREKQDMLASVASDPHASVPLHAWTLPKRSGCWIPLLRGLYPRKQCKPTV

SEQ ID NO: 12131 - protein, 738 aa, Ashbya gossypii ATCC 10895
MLQGMPKRSGSISELHDPFSSPDVYYGPATDPRRQKQPNKYSRTRTMSIIENVSTFKSAGKQYNIRRRGSEDDSMLASSGHRKFYIKDVDKTLEELLESEDTDGNYQITIEDRGPKTLRVGTANSNGFRHVQIRGTYMLSNLLQELTIAKNFGRKQVILDEARLNEDPVNRLTRLITHQFWDSLTRRIDYNSIAAIAADTKVDTPGAKVPRIYVPHGCPEQYEYFIECSQLNPSLNLEVKYLPDVITPEHVQSLNESPGLLALAMESHRDPITGESTLVGFPYVVPGGRFNELYGWDSYLMALGLLDCNKVDIARGMVEHFIFEIEHYGKILNANRSYYLCRSQPPFLTDMALKVFEKFGGDQNPTAVDFLKRAFIAAIKEYKSVWMAEPRYDKTTGLSCYHPDGIGFPPETEPDHFDAICRKFAEKHNVTIPEFRCMYDAGEVHEPELDEFFLHDRAVRESGHDTSYRLENVCAYLATIDLNSLLYKYEKDIAYVVSKYFDDSITDYAGETTTSSHWEALADIRKQRITKYLWDEETGFFYDYNVHIGKRTSYDSATTFWAMWAGLATQEQANAMVEKALPRLEMLGGLVACTEESRGEITMNRPSRQWDYPYGWAPHQMLAWTGLDNYGFTGVARRLAYRWLFLMTKAFVDYNGIVVEKYDVTRGTDPHRVDAEYGNQGADFKGVATEGFGWVNSSYILGLKFMNTYAKRALANCTVPDIFFKHMKPEEKARYALI

SEQ ID NO: 12132 - protein, 210 aa, Ashbya gossypii ATCC 10895
MSQEAKPATPAPTSEEGPKPPTASVFTMFGGKKADDKKADDKKTAEEQTGANSDSKAEDAAAEEDAVESPEVHFEPVVTLEKVEVKTMEEDEQVLFKVRAKLFRFDGEAKEWKERGTGDVKFLQNKSTQKVRLLMRRDKTLKVCANHYISPEYVLKPNVGSDRSWVYSCTADVAEGEPEAFTFAIRFGNKENADKFKEAFERAQAENKKR

SEQ ID NO: 12133 - protein, 1767 aa, Shewanella sp. ANA-3
MDKSKLRTFRSKILSHIALPLILIMTAVYGINAWFNYLSAERKLYDSLAQESNHSAYRLQLLIEHAQANTQGVADFIGFISNKEGINDSEKIKRVLTNRIERNPDFYGSAVAFKPYTFPDKKLFSPYVYRDGNNFHYLDIGAEGYDYTDGSWDWWSKAINQPGGYWSKAYFDEGAGNTLMVTYSVPFGPENDYFGVATVDLALDKLPEQLGVQPSQLVVLDDQGRLIFHSDKEKVLAVTSAEWLDRNTRRNSDFWTLLDKGLNGQARFIDDKSTVYLASVASVAKLKWRVIVMVPEHQLFATLLDDVASVVLNLSLLTLLLLLTCYIAAKRLTRPLEALESGILAFGQGKAQQLAIPKGAVSEIVTLSSTFNQMAELLGEREQAILDSRGNRFARLIDGMSDKSFYCSLDPSGQLAQVSEGVTKVLGMSPELLKRKYQRLFTANPLNEKNWEYTDLALKGENVPSHQVELLDASGHPRMLDLFMLPLVSDTGELMSVEMLFTDVTEQFSAATWSNAVLEAAPEAMLIVEQMGSIVFTNTRCQILFGYDANSMLGLQVESLLPEAMRSNHARDRLQFLREGRDRPMANARHVRALKADGGEFVAEIALSILPADHEGRRQVAASIRDMTQKLAVEQKIRDSELRFRGLVTNIPGAVYRTRIGDVWVMEYVSDNIADITGFAASQFIENRQRTFASLILEEDRELCHQHIDRALAQQETFEVEYRIRHRDGSIRWVHEKGKASYTEEGFPLWFDGSIDDITESKLAMVELEASRLQLTNITESIPCTVYQLRWVSPADHTFTFLSGAAFHMLGLHREDLLKDFNIIAERIFDEERPEVVRALAGKSEDKLQWVREFRYRHPNGSIRWMEAGASGHYNDDGAIIWNGYVMDITERKAIEEELAVSEAHFKALFDGSTIGIVNVDAKGVILDCNDQYCEDMGQTRESLCGVPIFDVLSLQDKETAKAQFRELAEGKVDHYRGERSFIRPNGEPLWMTVNVSALFDSQKQFESAVVSMVDMTELKLLSDELLVAKEEADAASKAKGDFLANMSHEIRTPMNAIIGMSQLCLQTALDKKQKNYVEKIERASKSLLSIINDILDFSKIEAGKLDIESVPFQLDTMLEDLSDMFSEKAAHKQLELLFAVAPNVPRHLFGDSLRLGQVLINLMNNAIKFTERGEVLLSLNLVEQQNDDVVLRFSVRDSGIGLTADQQAKLFKSFSQADTSTTRKYGGTGLGLAICKQLVELMGGTIGVESQFGHGSTFYFTVKLQISSGQKLTVAQELEGMPILVADDNATARDIMRTTLESMGFRVDTVRSGEEAVTRCIQQEYAVALIDWKMPNLDGIETAKQIKQQAKKAPRILMVSAHANQDFLSQIEELGLAGYISKPISASRLLDGIINSLGRAGVLPVRRQSESIDPKLLLPLKGKRILLVEDNEMNLEVATEFLEQVGIILSIATNGQIALDKLEQQSFDLVLMDCQMPVMDGYQATQALRKRPELTELPVVAMTANAMAGDKEMCLRAGMNDHIAKPIEVNLLYQTLLKYLGGSASLVDNTEPSQLVDIPVKPINLDSESVVKWPEHPELDIDRGLQLVQNSTRLYQRSFDRFVTSQRNVVDLINKALANDKRDDAVRMAHTLKGLAGNLSSSKLVELARQLELHLSEKSEYQTELDQIQALVASICDAIERVKPQFEESTTSTSEQLSPEALVTALKQLRQSLEDADSDAVAQIDALKPQVSSKLWLQLSPALTMINQYQFDEAVDLIDEVLAELT

SEQ ID NO: 12134 - protein, 214 aa, Betula pubescens
LGKKQEEKPQEEVLVDEFEKVKVSDQSHPKVGKYYEEDYEVEELKKKDKHGLLEKLRRSGSSSSSSSDEEEGEGEEKKKKRKEKKEKKGTLKEKLAGEKEEEKYEKQHEEKYEKPYEEKYEKPYEEKYEKPYEEKYEKHEDTTVPVHVEKYEEAEATQFPAEPVHVEKYEEAEVAYIPEKPAGVPVHEAKYEEEVAHIPAEPAHPEEKKGFLEK

SEQ ID NO: 12135 - protein, 545 aa, Listeria monocytogenes str. 4b F2365
MELAFPVAVNHVIDTLLPGKDFGLIITAALALLFFYILNTFMQYIVTYFGHMLGLNIETDMRRDLFSHLQKQPFGFYDNQKTGKLMSRMTTDLFEIGEVAHHGPEDIFISIMSLFGAFFLMLNINVKLAISTFILVPILTVLIVYFNKRMTKVTTGIFKDLGNFNAGVENAISGVRVVQAFANEPHEKGRFRVLNQAYRQSKLMFYKVMGLSFSFNYFLMRLISLFALLFGAYFTINGEISYGEFVGFILLTNVFIRPIEKINNVIESYPKGFAGFKRFLEVMDTEPAIQDEKDAKPAKAFRGDIAYNHVSFEYSDGKNVLNHINLSIKAGETVAFVGPSGAGKTTICNLLPRFYDVSAGEITIDGENIKRFTLPSLRAQIGVVQQDVFLFSGTVRENIAYGKLDASDEEIEHVVKLAHLSKVVEEMPDGLDTIIGERGVKLSGGQKQRLAIARMFLKNPPILILDEATSALDTETEQVIQASLEELAEGRTTLIIAHRLATIKHADRIIVVNETGIAETGTHNELLAQDNGAYKRLYDAQFNTI

SEQ ID NO: 12136 - protein, 268 aa, Vibrio sp. Ex25
RCWLWCATTIVYWVMFALLLLYVMTSDRLKSINLFGEWHRPQWKAQVRLFRLGFPVAAALFFEVTLFAVVALLVSPLGPIIVAAHQVAINFSSLVFMLPMSIGAAVSIRVGHRLGEENVDGARVASRVGIMVGLGLSVLTAILTVLSREWIAELYTSNPEVITLAMQLLVFAAVYQCTDAVQVIAAGALRGYKDMRAIFNRTFIAYWILGLPMGYVLGRTDWIVEPMGAQGFWLGFIIGLSSAALMLGVRMRWMHRQEPEVQLNFSVQ

SEQ ID NO: 12137 - protein, 311 aa, Mannheimia haemolytica
GSHTLVELLNENREIVVLDNLSNSSEVSLERVKQITGKSVKFYQGDILDRDILRKIFAENQIESVIHFAGLKAVGESVREPLRYYQNNVTGSIVLVEEMLKANVNTIVFSSSATVYGDPQIIPIVESCPVGGTTNPYGTSKYMVERILEDTVKAFPQLSAVVLRYFNPVGAHESGLIGEDPNGIPNNLMPFISQVAVGKLPQLSVFGGDYNTHDGTGVRDYIHVVDLALGHLKALDKHQNDAGFHIYNLGTGTGYSVLDMVKAFEAANGITIPYKVVDRRPGDIAVCYSAPQKALEQLGWKTERGLEQMMK

SEQ ID NO: 12138 - protein, 613 aa, Bacillus thuringiensis serovar konkukian str. 97-27
MKKVGFFQSIHLKFVLIYMLLILIAMQVIGVYFVRELEKSLVQGFRDSLTQQTNLLSYNLKQEFKKSYTKAETESTDETIKTSIRKFASDRKKDIQEVSVFDANRKLLAISDESKQNKVNRTSTDIAVQRVLVQKKPEVKIEKDGRTGHRVQVMITPIMDDNNKDALGAIYVVASMEDVYKQMKDINQIFATGTVIALLVTAVLGILLAQTITRPISDMRRQAIEMAKGNYSRKVKVHSHDEIGQLALSFNNLSKKLQQARSSTESERRKLSSVLSHMTDGVIATDRKGDIILLNDPAEKMLNVSRETALDQSVLEVLGIQEEFTLDHLYEEPDSVLLDFSTRNEPYILRASFSVIQKETGKANGLIAVLYDVTEQERIERERREFVANVSHELRTPLTTMRSYLEALTDGAWQDPNIAPQFLTVTQEETERMIRLVNALLQLSKLDSTEHRLMKEWVDFTDFFNNIIDRFEMSKEQNVSFKRSFSKKSRFIDMDTDKITQVLYNIISNALKYSPEGGTVTYRLRDRGELLEISVSDQGMGIPKENVDKIFERFYRVDKARSRQMGGTGLGLAIAKEMIEAHGGSIWAKSEEGKGTTIYFTLPMAADEEDEWE

SEQ ID NO: 12139 - protein, 311 aa, Mannheimia glucosida
GSHTVVELLNENREIVVLDNLSNSSEVSLERVKQITGKSVKFYQGDILDRDILRKIFAENQIESVIHFAGLKAVGESVREPLRYYQNNVTGSIVLVEEMLKANVNTVVFSSSATVYGDPQIIPIVESCPVGGTTNPYGTSKYMVERILEDTVKAFPQLSAVVLRYFNPVGAHESGLIGEDPNGIPNNLMPFISQVAVGKLPQLSVFGGDYNTHDGTGVRDYIHVVDLALGHLKALDKHQNDAGFHVYNLGTGTGYSVLDMVKAFEAANGITIPYKVVDRRPGDIAVCYSAPQKALEQLGWKTERGLEQMMK

SEQ ID NO: 12140 - protein, 224 aa, Aristida purpurea var. longiseta
IENKISRQVTFAKRRNGLLKKAYELSLLCDAEVALIIFSGRGRLFEFSSSSCMYKTLERYRSCNYNPQEAKAPQESEINYQEYLKLKTRVEFLQTTQRNILGEDLGPLSMKELVQLENQIEISLKQIRSRKNQMLLDQHYDLKNKEQKLQDLNKDLRKKLQETSGENALHISWEEGGHSGASGNAIEPNQGFLQHPENDSSLQIGYHQQAYMDQLSNEDMGAHH

SEQ ID NO: 12141 - protein, 311 aa, Pasteurella trehalosi
GSHTVVELLKQNREIVVLDNLCNSSKESLNRVKQITGKSVKFYQGDILDRAILRQIFAENPIESVIHFAGLKAVGESVAKPLWYYQNNVTGSITLVEEMLNAGVNTIVFSSSATVYGDPQEIPITENCPVGGTTNPYGTSKYMVERILEDTTKAFPQFSAVILRYFNPVGAHESGLIGEDPNGIPNNLMPFISQVAVGKRSELSVFGSDYDTHDGTGVRDYIHVVDLAIGHLKALEKHQNDAGFHVYNLGTGTGYSVLDMVKAFEQANGIQVPYKLVERRPGDIATCYSNPQKALEQLGWKTERGLEQMMK

SEQ ID NO: 12142 - protein, 448 aa, Pseudomonas fluorescens PfO-1
MNQPQSAVGHCLDVQSFINAQPISRYQWRVVILCFLIVFLDGLDTAAMGFIAPALSQDWGIDRASLGPVMSAALIGMVFGALGSGPLADRFGRKVVLVGAVFLFGAFSLASAYATNVDQLLVLRFLTGLGLGAGMPNATTLLSEYTPERKKSLLVTSMFCGFNLGMAGGGFISAKLIPAFGWHSLLLIGGILPLILTVVLLLWLPESARYLVVRNRGTDKVRKTLAPIDPAIVAQAASFSVPEQKTVKARNVFAVIFSGTYSVGTLLLWLTYFMGLVIVYLLTSWLPTLMRDSGASMEQAAFIGALFQFGGVLSAVGVGWAMDRFNPHKVIGIFYLLAGVFAYAVGQSLGNITLLATLVLVAGMCVNGAQSAMPSLAARFYPTQGRATGVSWMLGIGRFGAILGAWMGATLLGLGWNFEQVLTALVIPAGLATAAVVIKGLVSHADAT

SEQ ID NO: 12143 - protein, 479 aa, Zea mays
MECARELRVRSTFTAAAMASKKQVGPGGAVPAQEQMNGGDAARLVRKPMDTFPQPAAARGRRALVDVGNLMNGRPSLVNHQKQAVAAAATSHKPLNVGNKKPLVPQAAARGLRPLADVTNLMINDRAAPANRQKPLDAVFNRNGKAVKLKECKVKPEVIVSIPDSEKEKKSKFPGGQKVCRRVPTLFDNLTKCSRASDGITTPKKKNPYDIDAPDSCNELAVVEYVEDIYRFYKSTEGTCLPLSSYMSSQAEISERMRAILIDWIIEVQYRLTLMPETLYLTVYIIDQYLSMESVPRKELQLVGISAMLIASKYEEIWAPLVKDLMCLCDNAFTRDQILTKEKAILDMLHWNLTVPTMYMFIVRYLKAAMCDAELENMAFFYSELALVQYAMLVYPPSVTAAAAVYAARSTLGMNPPWTDILEHHTGLAEPQLLDCARRLISFHALAPESKQKAVYRKYSKPKLGSVALQSPDKKLLSG

SEQ ID NO: 12144 - protein, 235 aa, Clostridium perfringens str. 13
MVNQFLAELFGTALLILLGDGVVANIALKKTKGNGADLIVVTVGWAIAVAIPVYIFSRVSGAVFNPAVTIALGITGGLTWSQVIVFCIAQFIGAFIGAVLVYLTYYTHFESTEDHDAKLGTFCTIPAIRNFKWNFFTEFIGTFVLMFGILGLGDAKMADGIMPIAVGLLILVIGVSLGGPTGYAINPARDFSPRLAHFLLPMKNKGGSDWAYAWIPIVGPILGAIAGAMVYTNIF

SEQ ID NO: 12145 - protein, 627 aa, Saccharophagus degradans 2-40
MNRPFSPLVGSLSRRRFVQGLAVGGVLATTPAALLARESVQTALGSAPVLSGTDINLEIGQSLVNFTGVTRMATTINGSIPAPTLRLREGDDVTIRVTNRLSVPTSIHWHGILLPFEMDGVPGISFKGIAPGETFVYRFKLRQSGTYWYHSHSGFQEMTGMYGALIIEPRSGERHEADQDFVVQLSDWTDEDPMQVFSKLKVQGDTYNFNQPTFFDFTRDVSDKGLKAALSKRQMWNQMRMNPTDLADLSTATLTYLMNGTAPAGNWTGVFKKGERLRLRFINAASNSFYDVRIPGLKLTVVQADGQDVEPVSVDEFRFGPGETYDVLVRPDDEAYTIFAQSMDRTGYARGTLATRQGLSAPVPTLDPVEWLTMQDMMGAMNHEGMGDDASMEGMDHSNMNMEKMDHSKMDHSQMDHSQMHGGMAMDHSMHGMQQGSQNPLAKPSTSVNHARTEYGPSVDARVDTPRTNLDDPGIGLRDLAEKGLRPVSHKVLTLADLQSLDGVLDDHRVPEKELELHLTGNMERYSWSFDGLEFGRSTPVSLKHGQRVRIILQNDTMMTHPMHLHGMWSELETDQGELRVRRHTIPVQPAQRISFLTTPHDLGRWAWHCHLLFHMDAGMFREVVVS

SEQ ID NO: 12146 - protein, 559 aa, Legionella pneumophila str. Paris
MCSIGEYLAKRLEELNISEYFAIPGDYNLILLDEVLKNEKLKMINCCNELNAGYAADGYARVKGVSALFVTYSVGGLSTVNAVAGAYAENLPILVISGGPNTNSIQDAEILHHTLATEDNLYVRDIFSRITAHVVCIRKPEQAAMQIDEAIAIAIAKKKPVYIEIACNIANYPISKPTQRAFNTYKISDSSSLAAAVEHAAEKLNSALKPSLIVGSKVRHCNAINSVSELAKCTGYAMAAMPDAKGFISEQHPNFIGIYWGPVSSSGCAEIIDSSDAYLLIGPNENDYTTVGYVWGINPHKSIKTTKGGVIIGETVYTNIFMNDFLRELSKKLKFNDASYKAYKRIAEETVVYPELDQPDAPLSSRYLFGQIQKMLSDKKALLAETGDSWFNCMRLSLPEGCPFEIQMQYGSIGWSVGALLGMQAALHNQKRVIACIGDGSFQMTAQEISTMIRYGYKPIIFLMNNACYTIEVQIHDGPYNVINNWRYAELVNVFRGEQSNAKSFVVKTNKELLTAIKQAEKTDALCFIEVFLDKDDCNKNLLEWGSRVANYNSRPPRR

SEQ ID NO: 12147 - protein, 262 aa, Arabidopsis thaliana
MEEIADKTFFRYCLLTLIFAGPPTAVLLKFLQAPYGKHNRTGWGPTVSPPIAWFVMESPTLWLTLLLFPFGRHALNPKSLLLFSPYLIHYFHRTIIYPLRLFRSSFPAGKNGFPITIAALAFTFNLLNGYIQARWVSHYKDDYEDGNWFWWRFVIGMVVFITGMYINITSDRTLVRLKKENRGGYVIPRGGWFELVSRPNYFGEAIEWLGWAVMTWSWAGIGFFLYTCSNLFPRARASHKWYIAKFKEEYPKTRKAVIPFVY

SEQ ID NO: 12148 - protein, 351 aa, Neisseria gonorrhoeae FA 1090
MTILSDVKALGQQIWLDNLSRSLVQSGELAQMLKQGVCGVTSNPAIFQKAFAGDALYADEVAALKRQNLSPKQRYETMAVADVRAACDVCLAEHESTGGKTGFVSLEVSPELAKDAQGTVEEARRLHAAIARKNAMIKVPATDAGIDALETLVSDGISVNLTLLFSRAQTLKAYAAYARGIAKRLAAGQSVAHIQVVASFFISRVDSALDATLPDRLKGKTAIALAKAAYQDWEQYFTAPEFAALEAQGANRVQLLWASTGVKNPAYPDTLYVDSLIGVHTVNTVPDATLKAFIDHGTAKATLTESADEARARLAEIAALGIDVETLAARLQEDGLKQFEEAFEKLLAPLV

SEQ ID NO: 12149 - protein, 766 aa, Bdellovibrio bacteriovorus HD100
MKKKLTFVHLFLLNQLVTTLVLLTVLGVYGTHLFIQEQRAIRERMEPASAREVDRINNDFATLEANVQRLKSMVELFDVMPKGTRVEKFRQFASATIAGHSTQFNAWVALGPRLAKEYLGRESYVYVVHRDYSLFASPKYNDPTTFVAEVFTEPGYDKDPDVQWWWMNEKSSGVNYSDFYFDKGYMEKVMFSTTTGIFSNAGKLEAVVGIDTLAGDIAHRLGIFKLGDTGGALVVDEHGRPVLPLIAKDTPVLGFKYLRALNQDEFRAMPKLSQKVFNIQNQRQLQEFPGADGKTYLTYSRPIKGKPWHLVIYQEKGEAYSGLYFRLFFFGFVALVAYVVFTLMVWMTGKYVIAQDKEALARLQDSRDRAEAATRAKSLFLSTMSHEIRTPLNAMLGSAELLNETHLNFEQKELLISLQSAGDTLLSMLNNILDFSKFESGRMQLESREFLLSDLVREVQALISTSVLRKNLQFTFHPPEHDRWIVGDSLRLKQVLMNLLGNAVKFTDRGAIELTVQPYPGSEPGKETIFFEVKDTGIGIAKENLKKVFDEFGQEDSSVTRRFGGTGLGLSISQKIVQLMGGELYCESRQFVGSRFHFSVQMTSRRAELWSARFNLELTPPPQLVRPSSEAGRKSILIVDDMEENHTLLKAYIKRLEYVTTDSAYNGYECLEMWERGHYDMIFMDVQMPKMSGLDTIRKLREIERARGLHRTPVVVISANSFTEDIEKSLMAGADQHCGKPVRKQTVLEIVQKYCSEDIETAPANS

SEQ ID NO: 12150 - protein, 493 aa, Photobacterium profundum SS9
MSFWLGYRFHTRSGKSLTDGIEMKLFYNVEDKPPVGASILLALQHMLAAMGAIIAVPLVVGSAIGLPTDQMVTLVNAALMVSGIVTIIQCKGIGPVGIRLPVVMGTSFTFVAISISIGLDAGVSGIFGASLVGSIVMIVGSRFMTQIRKLFPPVVSGTVVVLIGLTILPVSVDWFAGGFVGQEEYGQINNLLLGLLVLVVVIVLSQVGKGIISAAAIVIGMAVGYITAIFMGIVDFSPVRNAEFFALPKLLPFGLSFTVSGIIGMSIAYLVTIMESTGDFLALSDATHTKLTGKKLSRGILCDGLGSALASLFGTTPFSSFSQNVGIVSITGVASRHVVAVTGFIMLIAGLFPKLGGIVVTIPSPVLGGAGLVMFAMIISSGIGILSRISFTKRNMLIIAVGVASGMAVTVRPEILTYLPDSFRVILGSGITTGSLVALGMNAFLSINRADEAESAQEKREALETQIIECEACDKALKEEEALEQKERLESAK

SEQ ID NO: 12151 - protein, 120 aa, Hyacinthus orientalis
GSNYYACLSMLSLLILTPFAIAERAPSMWAVGWQNAMSQIGPNFIWWVAAQSIFYHLYNQVSYMSLDEISPLTFSIGNTMKRISVIVSSIIIFHTPVQPVNALGAAIAILGTFLYSQAKQ

SEQ ID NO: 12152 - protein, 445 aa, Euglena gracilis
MGKEKVHISLVVIGHVDSGKSTTTGHLIYKCGGIDKRTIEKFEKEASEMGKGSFKYAWVLDKLKAERERCITIDIALWKFETAKSVFTIIDAPGHRDFIKNMITGTSQADAAVLVIDSTTGGFEAGISKDGQTREHALLAYTLGVKQMIVATNKFDDKTVKYSQARYEEIKKEVSGYLKKVGYNPEKVPFIPISGWNGDNMIEASENMGWYKGLTLIGALDNLEPPKRPSDKPLRLPLQDVYKIGGIGTVPVGRVETGVLKPGDVVTFAPNNLTTEVKSVEMHHEALTEAVPGDNVGFNVKNVSVKDIRRGYVASNAKNDPAKEAADFTAQVIILNHPGQIGNGYAPVLDCHTCHIACKFATIQTKIDRRSGKELEAEPKFIKSGDAAIVLMKPQKPMCVESFTDYPPLGVSCGDMRQTVAVGVIKSVNKKENTGKVTKAAQKKK

SEQ ID NO: 12153 - protein, 495 aa, Ashbya gossypii ATCC 10895
MGFQSFKPTFRNEDLVRRGAYINGEWITSAKESFNVTDPATDQVIAELPDFDSGEAEAALKAAHASFQSYKKTSPTQRSEWLRNLYDLIMENAEDLAAIVTWENGKSLREALVEIRYGATFFKWFSEEALRLYGTTIQPSNPGNRAFTIRQPVGVCALICPWNFPNAMISRKAAPALAAGCTVIIKPDPQTPLSSLALAHLAEKAGFPPGVINVVPTSKYTKDIGVLLCESSLVRKVSFTGSTAVGKILMQQAASTVKKVSFELGGNAPVIIMGDADMEKTVEEVLATKFRGMGQTCICANRLYVHRSIIDDFSSRLVKKVEGLKLGNGFQEGVTHGSLINNAAIEKVERHAKDAIERGAKVLLPGGRAPELGPHFYSPTVLSDVKPDSVLTREETFGPLCAMIPFDTVEEVVGYANDTQYGLASYVFSENIKTVYSIAEALDFGMVACNTGLFSDSMVPFGGIKESGFGIEGSLHGINDYTVLKTVTIGNVPTL

SEQ ID NO: 12154 - protein, 534 aa, Methanococcoides burtonii DSM 6242
MKYIIVTGGVMSGLGKGITTASVGRNLKNKGYKVTAIKIDPYINIDAGTMSPYQHGEVYVLKDGGEVDLDLGNYERFLDTELTRDHNLTTGKIYQTVIDKERKGEYLGKTVQIIPHITNEIKDRIRRIAAKSGADVCLIEVGGTVGDIESMPFLEAVRQMYREESPENIALLHVTLVPIDSQGDQKTKPTQHSVKELRELGLTPHVIVSRCKKALMESTRSKIALFCDVPVEAVISAHDSADIYEVPLQLENEGLSNYLLKKLILKSTLEDTNWEEMVIRMNNCTGNVNVAIVGKYTHLEDSYISIVESLKHGAIEIGCKFEITWFDAESFDDDPSEVEKLNGFDGILVPGGFGERGTEGKMLAIKYARENNIPYLGLCLGMQLAVIEFARNVVGLDGANSSEFDENTPYPVIDLLPEQEDVVDMGATMRLGDYEATLKAGSLAESIYGASLITERHRHRYEVNPNYVDRIEEHGMIFSGKNKNRMEIAEVPSKDFYFASQFHPEFKSRPGRPSPPFKAFMGAMLKKSKEKKDQ

SEQ ID NO: 12155 - protein, 136 aa, Ajellomyces capsulatus
MARTKQTARKSTGGKAPRKQLASKAARKAAPSTGGVKKPHRYKPGAVALREIRRYQKSTELLIRKLPFQRLVREIAQDFKSDLRFQSSAIGALQESVEAYLVSLFEDTNLCAIHAKRVTIQSKDIQLARRLRGERS

SEQ ID NO: 12156 - protein, 391 aa, Bacillus thuringiensis serovar konkukian str. 97-27
MSFIDGENYRMKRARKKKHKGIVISSIAGTIVGASLFAFGAPLFSNDTDAFPQAEASGSNMAEAQGIKQISFVDAVDRASEAVVGIINIQRDNFSEADSEAGTGSGVIYKKTDGQAYIVTNNHVVAGANRIEVSLSDGKKVPGKVLGTDVVTDLAVLEIDAKYVKKVIEIGDSNAVRRGEPVIAIGNPLGLQFSGTVTQGIISANERIVPVDLDQDGHYDWQVEVLQTDAAINPGNSGGALVNAAGQLIGINSMKIAAKEVEGIGLAIPVTRAVPIMNELEKYGKVRRPYVGIELRSLNEIPNYYWSKTLHLPGNITEGVCILDVKSPSPGTDAGLREHDVIVAVDGKPVRDIIGFRTALYDKKINDKMTLTFYRGTKRATTTVKLGIQKY

SEQ ID NO: 12157 - protein, 456 aa, Haemophilus somnus 2336
MTKHYDYIAIGGGSGGIASINRAASYGKKCAIIEAKYLGGTCVNVGCVPKKVMFYGAQVAEAIAKYAPDYGFDVTLNHFDFAKLVESRQAYIDRIHTSYNNVLAKNNVDVLNGFAKFFDAKTIEVSYANGEKELVTADHILIATGGRPSRPTIPGAEYGIDSDGFFALTELPKRIAVVGAGYIAVELAGVVNSLGAETHLFVRRQTPIRSFDPLIIETLVEVMKQDGIQLHTQAIPQEIIKNADNSLTIKLEDGRTQDVDCLIWAIGREPATDVINLASTGVETNERGFIKVDKYQNTNVEGIYAVGDIIEGGIELTPVAVAAGRRLSERLFNNKPDEHLDYHLVPTVVFSHPTIGTVGLTEPKAIEQYGAEAVKVYTSSFTPMYSAVTSHRQPCRMKLVCVGKEEKIVGLHAIGFGVDEMIQGFAVAIKMGATKADFDNTVAIHPTGSEEFVTMR

SEQ ID NO: 12158 - protein, 238 aa, Avena sativa
IENKISRQVTFAKRRNGLLKKAYELSLLCDAEDALIIFSGRGRLFEFSSSSCMYKTLERYRTCNYNSQEAAPLVENEINYREYLKLKTRVEFLQSSQRNILGEDLGPLSMKELDQIESQIDVSLKHIRSRKNQVLLDQLFDLKSKEQELQDQNKDLRKKLQEMSCGENAVHMSWQDGGGQSSSSGQAVDPYPGPLQHPEHDSSMQIGYHQTYMEQLBNEDHTASHHPNAQPGSSAGWI

SEQ ID NO: 12159 - protein, 212 aa, Zea mays
  misc_feature (21)..(21): Xaa can be any naturally occurring amino acid
  misc_feature (28)..(28): Xaa can be any naturally occurring amino acid
  misc_feature (38)..(38): Xaa can be any naturally occurring amino acid
  misc_feature (57)..(57): Xaa can be any naturally occurring amino acid
  misc_feature (63)..(63): Xaa can be any naturally occurring amino acid
  misc_feature (73)..(73): Xaa can be any naturally occurring amino acid
  misc_feature (112)..(112): Xaa can be any naturally occurring amino acid
  misc_feature (197)..(197): Xaa can be any naturally occurring amino acid
  unsure (1)..(212): unsure at all Xaa locations
EIRRHTHPQRMRYGMSYIHEXCWKGVPXILAPVDTALXNIGINERLPYNVSLIRSLXLVGGDXDGNPRVTPGXDRDVCLLARMMAANLYIDQIEELMFELSMWRCNDELRLXSKVTKYYIEFWKQIPPNEPYRVILGHVRDKLYNTRERARHLLASGVSEISAESSFTSIEEFLEPLELCYKSLCDCGDKAIADGSXLDLLRQVFTFGLSLV

SEQ ID NO: 12160 - protein, 302 aa, Saccharomyces cerevisiae; identical to SEQ ID NO: 1461

SEQ ID NO: 12161 - protein, 403 aa, Verticillium dahliae
MVSKLFAVALAASSLVSAQTFTDCDPTKKSCDPDPAFGKTVDIDFTKSNGEDYLYTLPGTKVTYDKEKGAVFSIQKETDAPTKASHKFIFFGELECTVQAANMQGIVTSIVLQSKDLDEIDWEWTGGDNANVQTNYFSKGDTTTYDRGGKHAVANPLNQFHKYGIVWNQNKIDWTIDGAVVRTLNAADVGDKYPQTPMQIKIGTWPAGNKNTPKGTVEWAGGYSDYEKAPFIGYYQNCKIVDYAGGNDAASGTPNAKEYVYGDKSGKWQSIKIVTGDGSDDDEKDETTTSAPATKTTAAPKTKTEEASETETETEKDDDDKTTSTTAAAAASTTLSSVVVSSTDAAESTGASATTSGADSDSAVASTSAGAASTVATAEPAGGMMNRANVAMGAIGLFFAFML

SEQ ID NO: 12162 - protein, 222 aa, Chasmanthium latifolium
IENKISRQVTFAKRRNGLLKKAYELSLLCDAEVALIIFSGRGRLFEFSSSSCMYKTLERYRSSNYNSQEVKAPLDSEINYQEYLKLRTRVEFLQTTQRNILGEDLGPLSMKELEQLENQIEISLKHIRTRKSQVLLDQLFDLKTKEQELEDISKGLRKKLHETSGENALHISWEEGGHSGASGNAVEPYQGFQQHRENESSLQIGYRQQAYMEQLNNEDMED

SEQ ID NO: 12163 - protein, 410 aa, Skeletonema costatum
MKLAVTFLATIGPTGRFAPAANTVARTSALNMVQQLDLKTGQSQLDTSVVDRFSALPYPDDKVLAEYVWVDAKGECRSKTRTLPVARTEAVDKLPNWNFDGSSTDQAPGDDSEVILRPCRIFKDPFRPRAHGLDNNLVMCDTYTPAGEAIPTNTRAIAAKAFEGKEDEEVWFGLEQEFTPLQPRPTHSPRLAQEPVSQPRSGPYYSSAGPENSFGRAVTDAMYRCCLYAGLEISGTNGEVMPGQQEYQIGPCVGIDAGDQLFMSRYILQRVCEEFQVYCTLHPKPITDEDWNGAGMHTNDSTKSMREAGGLDIIKQAIYKLGAKHKEHIAIYGEGNELRLTGKFETASMDEFSFGVANRGASVRIGRDTEAEEMLGYFEDRKPQFPNADPYLVTGKRSWLPIIMEDIEVS

SEQ ID NO: 12164 - protein, 225 aa, Danthonia spicata
IENKISRQVTFAKRRNGLLKKAYELSLLCDAEVALIIFSGRGRLFEFSSSSCMYKTLERYRTCNFNSQEAKAPLDSEINYQEYLKLKTRVEFLQTTQRNILGEDLGPLSSKELEQLENQIEISLKHIRTRKNQALLDQLFDLKSKEQELQDLNKDLRKKLQETSGENAVHISWEEGGHSGASGNAMEPSQGFLQHPENDSDLHMGYHQQAYMDHLNNEDMAAPHH

SEQ ID NO: 12165 - protein, 342 aa, Streptomyces coelicolor A3(2)
MKALVKENAEPGLWLADVPEPTIGSGDVLIKVLRTGICGTDLHIRAWDGWAQQAIRTPLVVGHEFVGEVVDTGRDVTDIKAGDRVSGEGHLVCGKCRNCLAGRRHLCRATVGLGVGRDGAFAEYVALPASNVWVHRVPVDLDVAAIFDPFGNAVHTALSFPLVGEDVLITGAGPIGLMAAAVARHAGARNVVITDVSEERLELARKVGATLALNVSDATIADGQRELGLREGFDIGLEMSGRPEAMRDMIANMTHGGRIAMLGLPAEEFPVDWARVVTSMITVKGIYGREMFETWYAMSVLLEGGLDLAPVITGRYSHRDFEAAFADAASGRGGKVILDWTA

SEQ ID NO: 12166 - protein, 397 aa, Streptomyces coelicolor A3(2)
MFDSVRDDLRATLDEIRAAGLHKPERVIGTPQSATVNVTAGGRPGEVLNFCANNYLGLADHPEVVAAAHEALDRWGYGMASVRFICGTQEVHKELEARLSAFLGQEDTILYSSCFDANGGVFETLLGPEDAVISDALNHASIIDGIRLSKAKRLRYANRDMADLEAQLKAAGEARRKLIVTDGVFSMDGYVAPLDEICDLADRYDAMVMVDDSHAVGFVGPGGRGTPELHGVMDRVDIITGTLGKALGGASGGYVAARAEIVALLRQRSRPYLFSNTLAPVIAAASLKVLDLLESADDLRVRLAENTALFRRRMTDEGFDILPGDHAIAPVMIGDATKAGRMAELLLERGVYVIGFSYPVVPQDKARIRVQLSAAHSTDDVNRAVDAFVAAREQLAA

SEQ ID NO: 12167 - protein, 595 aa, Verticillium dahliae
MASLRFLLLLLVASAVAQVQLPVSRHRAPFTSTPRRQVQTKTNFVADVLDYVVNVTVGNPPQEISLALDLYSYNTWVPDKEACDGNIFLSGCDYGSFDTFSSKTFIRDAVDSFDEFYASGYYVRGDDIRETISVGDTDITNLTMGLGRQTDLSLGRLALGYNASYGTPSFLDRMTETGLINSTAFSLWTEDEDTASGSLLLGAVDASRYTGRLQRFQVYKYAMQYVGFYALVASINGSRLDTENRILQPLANLGTGTYIAVSPPTLLSNLPWSIAERIWELARAEVDYYSGQATVPCAWRDNMTGQVALELGGVGGYTLTVDLKDLIIPADVWPLDSNSWYLEDGEEANPLCLLGIQSQNTSSGSANDANDSDWVIGGSLLKNTYTVFDLANEELAMAPLSLGGDSQSNIVPFDFYGALVPSSDEVGERNCWSYQPCSDMRPGSGNDREYPSGLQDWQKIAIGASLGGTGLIIAALATWAIVRCRRVRKEEAGLGKIEHPPGMLVVGRAGFPKVPAVTTTTTDVEAEQPPPPLPARPAAAPPADAAVPIVMGEQPEMSEKQRSKQPDMPKETDVASVVREPDVAHVPRAKSPAQG

SEQ ID NO: 12168 - protein, 225 aa, Ehrharta erecta
IENKISRQVTFAKRRNGLLKKAYELSLLCDAEVALIIFSGRGRLFEFSSSSCMYKTLERYRSCNYNSQEAAPENEINYQEYLKLKTRVEFLRTTQRNILGEDLGPLSMKELEQLENQIVVSLKQIRDKKNQALLDQLFELKSKEQELRDLNKDLRKKLQETTGDNVLHMSWQDGGGQHSGSSGLTAEHHQGLLHHQDQGNHSLQIGYHQAYMDHLNNEAEMAGHN

SEQ ID NO: 12169 - protein, 883 aa, Arabidopsis thaliana
MAVSSFAVLPPFGSSYSSTTDRSSSSSFYSSSKLLRISQYRFQSNSRCPNVFVSCSLNQPSDDASDAALFLESNSIADYMRFKRRPDPGNGTSELQTAIVSYKKRFPWILLNPFLQVDLVSTIHIADKEYFTTLQKELEPYDSILYEMVASKETLENRRNPIASKRLKSSRSRGFSILGFIQRQMARVLTLDFQLDCLDYDTENWYHADLDFETFQLLQKEKGESFFSFARDMTIRSTKAMIQPALVTEGRDTWRSKLLWVSRVFPMPLVGLFLIGAFCADFGDQTSDYPELEALSRLDFGAAMKVFLAKRLTSELTLETSDIEEKSVIIGERNRAATEALRRAIEQGHKRIGILYGGGHMPDLGRRLREEFDLVPSEVRWVTAWSIRNPTDLETSSYPILRKMAEALRWPLNRYQTLALLIFSSVLALDLCFWELFFGSTIDWATQIDPLSAISIPCLVMDSVFSNVARAPEDPILGVTVAYNNDPSPVKINLGVGAYRTEEGKPLVLDVVRKAEQQLVNDPSRVKEYIPIVGISDFNKLSAKLILGADSPAITESRVTTVQCLSGTGSLRVGAEFLKTHYHQSVIYIPKPTWGNHPKVFNLAGLSVEYFRYYDPATRGLDFKGLLEDLGAAPSGAIVLLHACAHNPTGVDPTSEQWEQIRQLMRSKSLLPFFDSAYQGFASGSLDTDAQSVRTFVADGGECLIAQSYAKNMGLYGERVGALSIVRNQTSQFLIRFYSFDIMVCKSADVASKVESQVKLVVRPMYSSPPIHGASIVATILKSSDMYNNWTIELKEMADRIKSMRQQLFEAIQARGTPGDWSHIIKQIGMFTFTGLNKEQVEFMTKEFHIYMTSDGRISMAGLSSKTVPHLADAMHAAVTRLG

SEQ ID NO: 12170 - protein, 138 aa, Ehrlichia canis str. Jake
MSYSEVLLEHYKNPKNVGTLPKDDYNVGTGLVGAPSCGDVMKLQIKVDNNGRIIDAKFKTFGCGAAIAASSLATELIKGKTVDEAHQLKNTVLAKELSLPPVKIHCSLLAEDAIKAAINDYNMKQENRKSNTAFSSDE

SEQ ID NO: 12171 - protein, 229 aa, Eleusine coracana
LENKISRQVTFAKRRNGLLKKAYELSLLCDAEVALIIFSAGRGRLFEFSSSSCMYKTLERYRTCNFNSHEVKAPLDSKINYQDYLKLKTRVEFLQTTQRNILGEDLGPLSNKELEQLEKQIEISLTQIRSRKNQMLLVQLLDLKSKEQELQDLNKDLRKKCQLKKTCGENATHISWEEGGHSGTSRNANEPNQGFLQHAENNYSSLQIGYYQQAYMDQLNNQDIGAAHN

SEQ ID NO: 12172 - protein, 484 aa, Proteus mirabilis
  misc_feature (53)..(53): Xaa can be any naturally occurring amino acid
  unsure (1)..(484): unsure at all Xaa locations
MEKKKLTTAAGAPVVDNNNVITAGPRGPMLLQDVWFLEKLAHFDREVIPERRXHAKGSGAFGTFTVTHDITKYTRAKIFSEVGKKTEMFARFSTVAGERGAADAERDIRGFALKFYTEEGNWDMVGNNTPVFYLRDPLKFPDLNHIVKRDPRTNMRNMAYKWDFFSHLPESLHQLTIDMSDRGLPLSYRFVHGFGSHTYSFINKDNERFWVKFHFRCQQGIKNLMDDEAEALVGKDRESSQRDLFEAIERGDYPRWKLQIQIMPEKEASTVPYNPFDLTKVWPHADYPLMDVGYFELNRNPDNYFSDVEQAAFSPANIVPGISFSPDKMLQGRLFSYGDAHRYRLGVNHHQIPVNAPKCPFHNYHRDGAMRVDGNSGNGITYEPNSGGVFQEQPDFKEPPLSIEGAADHWNHREDEDYFSQPRALYELLSDDEHQRMFARIAGELSQASKETQQRQIDLFTKVHPEYGAGVEKAIKVLEGKDAK

SEQ ID NO: 12173 - protein, 3896 aa, Streptomyces hygroscopicus
MAASREDLVKALRTSLMDAERLKRENDRLIAESTEPVAIVAMACRLPGGVTDPESLWELVDEGRDAIGPFPTDRGWDLETLFDSDPDAVGKSYVREAGFLEGAGGFDAAFFGISPREALSLDPQQRLLLETAWETFERAGMDPRSVEGRDIAVFAGGSGQGYGGGPGEAPKGLEGYLGVGASGSVISGRVSYTLGLTGPAVTVDTACSSSLVAAHLAVQALRSGECSMALAGGVAVMGQPTAFVEFSRQRGLAPDGRCKSFGAGADGTTWSEGVGLVLLERLSDARRNGHEVLAVIRGTAVNQDGASNGLTAPNGPSQERVIRQALSNAGLTVADVDAVEAHGTGTALGDPIEAQAVLATYGQSRPEGRPLWLGSLKSNIGHAQAAAGIASVIKTVMALRHGRLPKTLHAEQPTSQVNWTSGAVSLLAEARAWPETGHARRAGISSFGVSGTNAHVILEQAPEEAEATGENTADQEPPVRSAESADPGPVATGHVVPWLLSGHTQEALRAQAARLLTQVRETPSDSPRDVGWSLATTRTRLDHRAVVLCADAEQAVAGLEAVASGTSARSAVTGSVASGKVAVLFTGQGSQRAGMGRELHGAHPVFARAFDAVCAQFGDLRDGDDKVSLAEVIFAEEGSATAALLDRTEFTQPALFALEVALFRLVESWGVRPAYVLGHSIGEVAAAHVAGVLSLPDACTLVRARGRLMQQLTATGAMVAVEAAEDEVAPLLAGKEHKVSIAAVNGPASVVVSGDEDVVTAVAETLARQGRKTKRLVVSHAFHSPHMDGMLDAFREVASRLAYAPPRIPVVSNLTGAVADPEELCSPEYWVRHARGAVRFLDGVRTLADEGVRTHLELGPDGVLTAMGQDCLPEADAAFVPSLRPGVQEPHAVLAGLAGLYVRGVRVDWDAMFAGSGARPVALPTYAFQHEHYWLERAAGSGDVGAVGLGEAGHPLLGAVVQLPETGGVQLSGRLSVRAQPWLGEHVISGAVLVPGTAMVELAVRAGDETGTPVLEELVIGQPMVLPGDTALSVQVVVGADEGGRRTVRIYSRTDGGTDWTEHATGTLAAQGPAPLDGAAGGAAVEWPPAEAEPIPVEDFYRSLVDAGYAYGPAFRGLVAAWRRDGEIFGDVALPEASVAEAERFGIHPALLDAALHAGSFCLPSDPARQVTLLPFAWNTVRLHAGGASAVRVHVRPVGDDAFSVRLTDGSGQTVASVDSLTLRAVDPAQLKIGTADDALWTVRWSETSLPDGAVSWAPLGESATGATGGYGATGDGGGPGGALPDVLVADTRAWAEDLTGPPTARARELTGRLLEEIQRWVADDAMAGTRLAVVTRGAVAVHDDTEVTDPAATALWGLVRSAQAEHPGRVALVDADGACEELPAGVWSGDEPQLAVRGGAVWVPRLTRVEPGLRVPAQASWHLDSAEYGTLDNLALLPDEAEPAPPAAGQVRIEVRAAGLNFRDVLVALGMYPGRSVIGTEGAGVVTEVGPGVTGLAVGDRVMGLFSGSFGPLATADARTVIRMPEGWSFGTAAGVPVAYLTALYALQDLGRVQPGETVLVHAAAGGVGMAAVQLAQHFGATVLGTAHPSKHHALHRLGVPAERLASSRDLAYADTFPTADVVLNSLTGEHIDASLGLLNPGGRFLEMGKTDLREPGEVGARHPEVTYRAFDLGGEAPAERVRELLHQLVELFEAGRIEPLPVRQWDITRAPEAFRWMSQGRHTGKIVLTLPRALDPDGTVLVTGGTGTLGATIARHLLTQHGARHLLLVSRRGPDAPGATDLTTELTELGATVRITACDTADRDQLAALLADIPADHPLTAVVHTAGTLDDGVLTALTPDRLDTVFRPKVDAVTHLHDLTRDHDLAAFVVYSSAAGVLGGPGQGNYSAANAYLDGLAQWRRAHGLPATSLAWGMWAQTSGMTAGLGSGDLHRVRRGGIVGLSTAEALDLFDRSVASGLSLLVPLRLDIAALGAEAAEPPPLLRGLVRPARRTARPVPKAGEGGLAERLAGLSAAEQERLLIELIREQAASVLGFPTVDPIGPEQAFRDMGFDSLTAVELRNRLNTATGLRLPATLVFDHPSPLATAEFLRDQLGGRAVEAAPRPARRDRSAPDGAEDPVVVVGMGCRLPGDVRSPEDLWRLIATGTDAIGPFPQDRGWDLAGLFDSDPDAQGKSYVREGGFLTDAGGFDATFFGISPREALSMDPQQRVLLETAWETLERSGIVPTSLRGQEVGVFVGASGQGYGTGPGAAPEGLEGYLGVGGATSVASGRVSYTFGLTGPAVTVDTACSSSLVALHLAAQALRSGECTMALAGGVAVMGQPGAFVEFSRQRGLASDGRCKSFGEGADGTNWSEGVGLVLLERLSDARRNGHEVLAVIRGTAVNQDGASNGLTAPNGPSQQRVIRQALANAGLTVADVDAVEAHGTGTALGDPIEAQALLATYGQDRPGDEPLWLGSLKSNIGHAQAAAGVASVIKMVLAIRQGTLPRSLHINEPTTQVDWTSGAVCLLTDARPWPETGHPRRAGISSFGVSGTNAHLILEQAPQPEPEPASKADEGTDTPGLVTTGGTTPWVLSAKTPAALRAQARRLLDHLESDMDAHPVDIGWSLATTRTLHDHRAVVITDTEADSDEAAAALTALATGQPHPRLTTGHATTHGKTVFVFPGQGAQWVGMGAQLLKTSPVFAERLHECAAALAPYTDWSLIDVITGTPDAPSLERVDVVQPATFAVVVSLAALWQSVGIHPDAVIGHSQGEIAAACVAGHLTLTNAAKIVTLRSQTIAHHLAGHGGMMSVLTSREQVEEALTPWHGKLWIAAHNSPNATVIAGDTDALHQLHTHYTDQGIRARIIPVDYASHTGHVDTIKNQLHQTLADTTTEPGTIPWLSTVTGQWIEPDTVDSGYWYRNLRQTVQFEHTIHTLANDGYRTFIEISPHPVLTTAIQETLEANDTPNTTITGTLRRDDDTPTRFLTHLAELSTRGTPMDWPTAYTGSQPSQIPLPTYPFEHETFWLDRGGPGDVRAVGLEDTGHPLVGAVVSVPDTGGVLLTGRLSLRSHPWLADHAVSGTVLLPGTAMVELAVRAGDEADTSTLEELVISRPMTVPDEGTLHVQVLVGGEDRGRRKVGVYSRPEGTRQWTEHATGTLTGRATGTLTAGATAPPPEAAQPWPPEGSEPVALEGFYEHLAEVGYEYGPAFRGLRAVWKRDDEVFAEVSVPEEQTGVAGRFGIHPALLDATLHAGNFCFQSDGERPTMLPFAWTDVRLHAVGATTVRVRATVSDGDGLCVRISDPQGVPVATIGSLQLRETTPDQLRALSAASGGNALWAVDWAECGLDATEARWATLGESRLPDSPPSYPDLSTAVEAVESAEAGERPAVLVADVSAWVPEKTGPIDRTHALCARVLDLLRQWVDRRELADTHLVVLTHGAMAAHDTAEVTDPAAAAVWGLVRSAQSEHPGRIRLIDIDDHSHQALPTALATTEAQLALRDATAYTPHLTPAPATTPEPLTLDPEGTVLITGGTGTLGALTARHLITHHHARHLLLVSRQGPDAPGATDLTTELTELGATVHITACDTADRDQLAALLADIPAAHPLTAVVHTAGTLDDALLTDLTPQRLDTVFRPKVDALTHLHDLTRDHDLTAFVIYSSATGTLGTPGQANYAAANTYADALAHQRHATGLPATSLAWGLWETTSSLTAGMTATQQQRTRDSGVVPLTDADGMRLLDTALATRHPHLVPLELDLAALQNNTGPHTLPPLLRTLIRGHHRPTAHTTAQPEDDAPSLAEQLAALDPTQRHQRLTALVRAEAAAVLGHPTPDAVGPDDALFEIGFDSLTAVELRNRLNAATGLQLAAAMLFDYPTPSMAAEHLQEQLALDAATTETHVAAREAAEDDDQSTER

SEQ ID NO: 12174 - protein, 476 aa, Pirellula sp. 1
MQDYRHTKIIATIGPATESPEKLAALIEAGVDVMRLNMAHGTPEWVGEIVARIRKVSKDISRHVAVMMDVKGPEIRTGAVEDAIELKAGDELVLFTEDCADQSAVESDGTPRVSVNYLGLPGAIDLDSTILVDSGLLHWHVLKKDATTVRCRVITPGVLESRRHINLPGVQVNLPAITDKDRTDLAAGVKAGIDFVALSFVRQAEDVRTLRAFLDEHGSPARIISKIEDQAGVRNMKAIIRQSDAIMVARGDLGVEIDYHRLPLVQTDLIRACQEDGKPVIIATHLLESMIQSPVPTRAEVSDVSNAIREQADAVMLSGETTTGKYPLESVGVLQNIVASIEPTVSRQLNSKIVLREPKSMMLRSACTLAQEMGDSGIVVFTRSGFLAYVLGALRPRGVPIFAFTDVEHTFRHLMLPWGVEPFFMEFSEDHDQTITNALEVLKESGWCKPGVWLGVITNALADEKIIDTLQLRQVQ

SEQ ID NO: 12175 - protein, 151 aa, Pirellula sp. 1
MHIRVDGGSKMLATRWEPWNELSQLSREMDRLFSRGGSSPTSVVTFPALNVWEDEGTVYVEAELPGFNSEQLEIYVDANQLTLKGERSAPEMEGGTWHRQERGFGSFHRTMELPADVDADQVSAEFQHGILKITLPKSETAKPRRIEVRSN

SEQ ID NO: 12176 - protein, 317 aa, Olea europaea
MTKDVESHVEPAEEYSAKDYHDPPPAPLIDFDELSSWSFYRALIAEFVATLLFLYVTVLTVIGYKSQIDPAHGGDDCGGVGILGIAWAFGGMIFILVYCTAGISGGHINPAVTLGLFLGRKVSLIRAVLYMVAQCLGAICGVGLVKAFQKSYYHKYGGGANELAPGYNKGVGLGAGLGAEIIGTFVLVYTVFSATDPKRNARDSHVPVLAPLPIGFAVFMVHLATIPITGTGINPARSFGAAVIYNEDKPWDDHWIFWVGPFVGALIAAIYHQYILRAGAIKALGSFSGATLKTIVHLFDDSFSQVHESGEDLENCT

SEQ ID NO: 12177 - protein, 329 aa, Clostridium tetani E88
MYQEALGYEGLRNSINKYFWNNKIDVDNILIVSGAQQGIDIVSKSIINVNDNIIIERPTYGGAIAVFKWRRANIFEVPMEKDGMDLDYLESLVKKNKVKVVYVMSYFQNPTGITYSLQKKQRLLNMAKIYDFYIIEDDYLSELIYNNDEYVSFKSMDRNDRVIYIKSFSKIFLPGIRLGYMITPNKFREVIQSSKINTDIATSSLMQRVLDIYIRKDVWKGYIEKLNSMYKNRYLFIRDNIKYLEKYLDIYIPTGGLHIYAKIKNSNINCLELFKMLKEQGILITPGVIFYKKPEEGMRYFRISFSQTDVEDIEKGFRTIEKILKEWNR

SEQ ID NO: 12178 - protein, 217 aa, Glycine max
MDAIGSGCWGLWKWNPLPQSRRRRIRSNSGSADAAGGGGYRFPVKQAVTAASLALTGDTIAQLSHRWRKAKEGGGSVSQDELWRYLSDHDWLRALRMTSYGFLLYGPGSYAWYQCLDHCLPKPTVQNLVLKVVLNQIVLGPCVIAVVFAWNNLWLQKLSELPEKYRRDALPTLLYGFRFWIPVSVLNFWVVPLQARVAFMSMGSVFWNFYLSSTMTK

SEQ ID NO: 12179 - protein, 594 aa, Thermoanaerobacterium thermosulfurigenes
MAKNTVKQDEDLRRMSNFVILKRLFSYLGKYKLKVFVVIMFLIFEMAVSLVNPVLMKTAIDKNIRNGDINGLFVIGILMVSLNFLSMMASRTRIVKMASVTNDILLNIRHELYSHIQKLSFSFFDSRPVGKILARVIGDVNSLQDLFNNSVTNFIPQILTVICVGTMMFYLNSKLALASMILLPMLVIGLFSIETLSRRRWQEFRRKRSTFNAYTHEDFSGIKVVQEFANEDKTSSVFFKLVKDMMDSFIKAVRLNDLFWPMVDASYGIGAVILYYFSAKFMGYGVTIGTIIAFTMYIGMFWRPILDISNFYNSLVMSFASAERIFEIMDIEPDIVDMKNAIKMPKIKGNVEFKNVTFGYEDGSVVLDDVSFKVNAGETIALVGPTGAGKTTIVNLISRFYDPSKGAVLIDGKDIKHVELESLRSQMGIMLQDTFLFSATIKENIRYGKLDATDEEIIAAAKAVNAHEFIMKMEKGYDTEVNERGSRLSVGQRQLISFARALLANPRILILDEATSNIDTQTERLVQKGIQRLLSGRTSFVIAHRLSTIRDADRIMVIDGGKIVETGTHDELMNLRGLYYDLYMSQYKFLSEGP

SEQ ID NO: 12180 - protein, 261 aa, Thermoanaerobacterium thermosulfurigenes
MPKLLTKEEEKILFERLRNGDESAKDVLVECNIRLVDKVAAGFLKSGVEFDDLVQEGLIGLLTAIDKFDHTKGYKFSTYATWYIQQSMRRYIGNYGKIIRLPIHINEKINRILKARYLIEQKKGSLATTEEISRLTGYTEEEIEGYLSYATDVISLNQYVNDERVDAELINFIQDDTIDVEEMAIEKEIKKEIRKILDSLPERERMILKMRFGFGCNLKTLTEIGNIFGLTRERIRQIQNNTIKELRHNRKVKDRLREIMR

SEQ ID NO: 12181 - protein, 611 aa, Treponema pallidum subsp. pallidum str. Nichols
MMELSRTPAVMRLLEYAREKKAITHDEVENILAHYGVETEELLHDVLDMLEQENIKVFSSEEEELEDEVFAGLKGPAADDGDGSFPLSTERVRDKLCDSSRGARQNLLSNARNIALDDPVKLYLRDIGQEKLLTAEQEVMLSKRMEEGEGIIKDIITQSGLLLPEFYHIGRSLSKKALAVLDPAESGRTRKEISEEMADRRRLKQAYGEVLRSLYPEMRHYMAMKKRLDERGEPVTVLSSDEEVCKQRDKLLSCLQKVDLQLEEIDRFSRKFLDTARKIREYKRRKDRHEKQLMIADLCDMRKIGRGLAVPRQRAKLEETLGMSADCIQEIYTQIQKVTRRLRRIEYDFENTIDGILSMARAIHRGHVMLKKAKDKLINANLRLVVSIAKKYTNRGLLFFDLVQEGNIGLIKAVEKFEYRKGYKFSTYATWWIRQAITRSISDQARTIRVPVHMIEQINKVTRESRQLLQKFGREPSDEEIAQQLCWTVEKVKQVKSVAREPISLETPIGEEEDSSLGDFVPDADVENPSRVTERVLLKEEVRSILSALPAREHEVLRMRFGLDGDYSQTLEEVGLYFDVTRERIRQIEAKALKRLRHPRHSRRLKDFLDS

SEQ ID NO: 12182 - protein, 411 aa, Petroselinum crispum
MGNTDDVKAVKPEKLSSPPPPAAPDQSNSHVYPDWAAMQAYYGPRVALPPYFNPAVASGQSPHPYMWGPPQPVMPPYGVPYAALYAHGGVYAHPGVPLAASPMSMDTHAKSSGTNEHGLIKKLKGHDDLAMSIGNGKADSSEGEMERTLSQSKETEGSSDGSNENSKRAAVNGRKRGRDEAPNMIGEVKIETQSSVIPSPRAKSEKLLGITVATPMVAGKVVGTVVSPSMTSSLELKDSPKEHAVNSPAGGQQPSTMMPNDSWLHNDRDLKRERRKQSNRESARRSRLRKQAEAEELAIKVDSLTAENMALKAEINRLTLTAEKLTNDNSRLLEVMKNAQAERAADVGLGNNNEKKASTLSTANLLSRVDNAGSGDRDEGESDVYEKTTKSGAKLHQLLDANPRTDAVAAG

SEQ ID NO: 12183 - protein, 458 aa, Streptococcus mutans UA159
MENHNFENEGQFKRKMTSRHLFMLSLGGVIGTGLFLSSGYTIAQAGPLGAVISYLVGAIVVYLVMLSLGELAVAMPVTGSFHTYATKFISPGTGFTIAWLYWICWTVALGTEFLGAGMLMGRWVPYVPTWVFAALFALLIFGLNALSVRSFAEAESFFSSIKVLAILVFIILGFGAMLGLVSFNGKHEVFLFSHLTAHGALPKGLPALMSVMLAVNYAFSGTELIGIAAGETNNPKEAVPKAIKTTIGRLVIFFVLTIVVLASFLPMKEAGVSSAPFVDVFDKMGIPFAADIMNFVILTAILSAGNSGLYASSRMLWSLANEGMISPRVVKINEHGVPMRALLLSMAGAVLSLFSSIYAADTVYLALMSIAGFAVVVVWLSIPMAQINFRKEWLKSHAQEDLFYKTPFTPILPYITIMLLLISIIGIAWDASQRAGLYFGIPFILLCYLYYYWRHKTL

SEQ ID NO: 12184 - protein, 211 aa, Triticum aestivum
  misc_feature (121)..(121): Xaa can be any naturally occurring amino acid
  unsure (1)..(211): unsure at all Xaa locations
GNNRSVMPLDVLGRILRTSLGPKGMDKMLQSPDGDVTITNDGATILELMDVDNQIAKLMVELSRSQDYDIGDGTTGVVVLAGSLLEQAEKLLERGIHPIRIAEGYEMASRIAVDHLESISXNMSFSATDIEPLVQTCMTTLSSKIVSRWKRSLAEIAVKAVLAVADLERKDVNWDLIKVEGKVGGKLEDTELVQGIIVDKDMSHPQMPKQN

SEQ ID NO: 12185 - protein, 281 aa, Shigella flexneri
MSQTSTLKGQCIAEFLGTGLLIFFGVGCVAALKVAGASFGQWEISVIWGLGVAMAIYLTAGVSGAHLNPAVTIALWLFACFDKRKVIPFIVSQVAGAFCAAALVYGLYYNLFFDFEQTHHIVRGSVESVDLAGTFSTYPNPHINFVQAFAVEMVITAILMGLILALTDDGNGVPRGPLAPLLIGLLIAVIGASMGPLTGFAMNPARDFGPKVFAWLAGWGNVAFTGGRDIPYFLVPLFSPIVGAIVGAFAYRKLIGRHLPCDICVVEEKETTTPSEQKASL

SEQ ID NO: 12186 - protein, 453 aa, Bordetella pertussis Tohama I
MEKKIVLVKPYSAYERDKTPAENADLTRVEKGSPMGEYLRRFWQPVALSEELGELPTAVRMFGENLVLFRARNGKPGLLEKHCSHRGTSLEFGICEENGLRCCYHGWLFGVDGQILETPGDPPDSQLRFNVCHGAYPLHEYRGIIFGYFGPPADKPEFPVYDTYDIPGDRLVPYCITYPCNWLQVHENVMDPAHAVFLHTRISFTQFAEAWGELPEMDFVPTPTGMIYVTSRRWEDKVWVRSNDIVLPNLAQVGHIWEDGLTPKEFARVAITRWTTPIDDHTCRIIGWRHMHPDADPRGLADESLCGVETVDFFGQNGERPYADRQRMPGDYDAQISQRPIAVHAMENLTRCDRGVAMLRQLLRRESRKIANGEAPAISPLRANGATPTYAHDTVVSIPPADTDDAACVREIGKAITAIVVKGDHHEQADRPEQVRERIRAYAAEQASTATSE

SEQ ID NO: 12187 - protein, 235 aa, Zea mays
MAGADVDVGTELRLGLPGGGADAAKAAKRGFEDTIDLKLKLPTAGMEEAAAAAKPEPAAEKAKRPAEAPAADAEKPPAPKAQAVGWPPVRSYRRNVMTVQSVKSKKEEEPEKQQSAANAGGNGSAFVKVSMDGAPYLRKVDLKMYNSYTELSVALKKMFSTFTTSGNNMNEGKLVDPVSGADVVTTYEDKDGDWMLVGDVPWEMFVESCRRLRIMKSSEAIGLAPRTKDKCKNRS

SEQ ID NO: 12188 - protein, 383 aa, Haemophilus somnus 2336
MVTYGEIFQVKTTMETQKTNKTIVVKFGTSTLTQGSSKLNRPHMMEIVRQITQLHRAGFRIIIVTSGAMAAGRHYLNHPQLPPTIASKQLLAAVGQSQLIQTWEQLFAIYDIHIGQILLTRADIEDRERFMNARDTLHALLDNRIIPVINENDAVATAEIKVGDNDNLSALVAILAQAEQLYLLTDQRGLFDSDPRKNPQAKLISIVDKITDHIRSIAGGSGTTLGTGGMTTKISAADIATRSGVETIIAPGNLENVIVNLAYGKDIGTKFVVQTDRLESRKQWIFAAPVAGIVTIDEGAESAVLIQHKSLLPAGIISVEGCFSRGEVVKICGSNGKKIALGVPRYNSDSLIQIKGKKSQDIEQILGYEYGSGAIHRDDMVVY

SEQ ID NO: 12189 - protein, 235 aa, Leersia virginica
LENKISRQVTFAKRRNGLLKKAYELSLLCDAEVALIIFSGRSRLFEFSSSSCMYKTLERYRSCNYNSQDAAAPENEINYQEYLKLKTRVEFLQTTQRNILGEDLGPLSMKELEQLENQIEVSLKQIRTRKSQALLDQLFDLKSKEQQLQDLNKDLRKKLQETSAENVLYMSWQDGGGHSGSATVLAADQPHHHQGLLHPHPEGDHSLQIGYHHTHHHHQAYMDHLNNEADMVAHH

SEQ ID NO: 12190 - protein, 310 aa, Zea mays
MARHFVLNTGAKIPSVGLGTWQSDPGVVGNAVYAAVKAGYRHIDCARVYGNEKEIGLALKKLFEEGVVKREDLFITSKLWNDHHAPEDVPEALNDSLNDLQLEYLDLYLIHWPFRVKKGTNTSPENFVTPDFPATWGAMEKLYDAGKARAIGVSNFSSKKLGDLLAVARVPPAVDQVECHPGWQQTKLHSFCQSTGVHLTAYSPLGSPGTTWMNGNVLKEPIIISIAEKLGKTSAQVALRWNIQMGHSVLPKSTNEERIKQNLDVYDWSIPDDLLAKFSEIKQARLLRGNFIVNPESVYKTHEELWDGEL

SEQ ID NO: 12191 - protein, 359 aa, Brassica napus
  misc_feature (268)..(268): Xaa can be any naturally occurring amino acid
  unsure (1)..(359): unsure at all Xaa locations
MSAFTSKFADELIANAAYIGTPGKGILAADESTGTIGKRLASINVENVETNRRALRELLFTAPGALPCLSGVILFEETLYQKSSDGKLFVDILKEGGVLPGIKVDKGTVELAGTNGETTTQGLDGLGERCKKYYEAGARFAKWRAVLKIGENEPSEHSIHENAYGLARYAVICQENGLVPIVEPEILVDGSHDIHKCAAVTERVLAACYKALSDHHVLLEGTLLKPNMVTPGSDSAKVAPEVIAEHTVRALQRTVPAAVPAIVFLSGXGQSEEEATKNLNAMNQLKTKKPWSLSFSFGRALQQSTLKTWAGKEENVKAAQEALYVRCKANSEATLGTYKGDAKLGDGAAESLHVKDYKY

SEQ ID NO: 12192 - protein, 225 aa, Lithachne humilis
IENKISRQVTFAKRRNGLLKKAYELSLLCDAEVALVIFSGRGRLFEFSSSSCVHKTLERYRSCNYNTQEANAPVENEINYHEYLKLKTRVDFLQTNQRNILGEDLGPLSMKELEQLDNQIETSLKQIRSRKNQVLLDQLFDLKSKEQELQDINKDLRKKLQETNGDQKVVHINSWQDGGQGSSSGHAIEPYQGLIQHPENDPSMQIAYHQVYMDQLNHEDMAAQH

SEQ ID NO: 12193 - protein, 222 aa, Panicum miliaceum
IENKISRQGTFAKRRNGLLKKAYELSLLCDAEVALIIFSGRGRLFEFSSSSCMYKTLERYRSSNYSSQEVKTPLDGEINYQDYLKLKTRVEFLQTTQRNILGEDLGPLSMKELEQLENQVEISLKHIRTRKNQMLLDHLFDLKSKEQELQDLNKDLRKKLQETNAENVLHVSWEEGGHSGASGNAIEPYQGFLQHPENDPSLQIGYHQQAYMDQLNNEDMAD

SEQ ID NO: 12194 - protein, 222 aa, Pennisetum glaucum
IENKISRQVTFAKRRNGLLKKAYELSLLCDAEVALIIFSGRGRLFEFSSSSCMYKTLERYRSSNYGSQEVKTPSDGEINYQDYLELKTRVEFLQTTQRNILGEDLGPLSMKELEQVENQIEISLKHIKDKKNQMLLNQLFDLKSKEQELQDLNKDLRKKLQETNAESVLHLSWEEGGHSGTGGNAIEPYQGFLQHPENDPSLQIGYHQQAYIDQLNNEDMAD

SEQ ID NO: 12195 - protein, 497 aa, Brucella melitensis 16M
MCLKRHIGEGAATRIRAQCDYAFTNIRGACMNTISKPSVDLHREEEPHLARNLSNRHLQLIAIGGTIGTGLFMGSGKAVSLAGPSILLIYAITGFMLFFVMRALGEILLSNLQYRSFADFAGDYLGPCAQFFTGWTYWLCWIVTAVAEVVAVPGYVSFWFPHLAPWIPALGLITILLILNLPTVRNFGEIEFWFALIKIITIIGLIITGIYMLMTGFVLPNGTQASIAHLWNHGGFFPNGSLGFIAGFQISVFAFVGIELVGTAAAEAENPMRNLPKAINNIPIRIVLFYIGALFVIITVTPWNQVDPNSSPFVAMFSLAGIGIAAHFINFVVLTSASSSSNSGIYSTSRMVYGLATVGLAPKAFSKLSNRKVPVHALIFSCIFLLSSVVLLYAGQSMIQVFTLVTTISALLFIFIWSIILVSYLQYRRKHPERHEKSTFKMPGGRASVVMVFIFFAFVLWALTQEPDTLAAMKVTPLWFVLLGIAYWVMKLKQKQS

SEQ ID NO: 12196 - protein, 218 aa, Streptomyces hygroscopicus
MAQQVDVTEEILGYVRELSLRDDEILAGLRAQTAGLPAAQAMQVMPEEGQLLGLLVRLVGARSVLEIGTFTGYSTLCMARALPADGTLVTCDITAKWPGLGRPFWERADVADRIDVRIGDAKETLAGLRREGREFDLVFIDADKTGYAHYYEESLAMLRRGGLIVLDNTLFFGRVTDPAAQDADTAALREVNKLLREDGRVEISMLTVGDGITLAVKR

SEQ ID NO: 12197 - protein, 222 aa, Setaria italica
IENKISRQVTFAERRNGLLKKAYELSLLCDAEVALIIFSGRGRLFEFSSSSCMYKTLERYRSSNYGSQEIKTPLDGEINYQDYLKLKTRVEFLQTTQRNILGEDLGPLSMKELEQLENQIEIFLKHIRTRKNQMLLDQLFDLKSKEQELQDLNKDLRKKLQETNAESVLHVSWEEGGHSGTSGNAIEPYQGFLQHPDNDPSLQIGYHQQAYMDQLNNEDMGD

SEQ ID NO: 12198 - protein, 250 aa, Arabidopsis thaliana
  misc_feature (198)..(198): Xaa can be any naturally occurring amino acid
  unsure (1)..(250): unsure at all Xaa locations
MMSCGGKKPVSKKTTPCCTKMGMKRGPWTVEEDEILVSFIKKEGEGRWRSLPKRAGLLRCGKSCRLRWMNYLRPSVKRGGITSDEEDLILRLHRLLGNRWSLIAGRIPGRTDNEIKNYWNTHLRKKLLRQGIDPQTHKPLDANNIHKPEEEVSGGQKYPLEPISSSHTDDTTVNGGDGDSKNSINVFGGEHGYEDFGXFCYDDKFSSFLNSLINDVGDPFGNIIPISQPLQMDDCKDGIVGASSSSLGHD

SEQ ID NO: 12199 - protein, 458 aa, Magnaporthe grisea 70-15
MPCTSNVRSTRNYSASSEPDLKTTLKSVIPAKRELLKKVKAHGSKVIGEVKVENTIGGMRGLKAMVWEGSVLDADEGIRFHGRTIKDCQRELPKGKTGTEMLPEAMFWLLLTGQVPSTNQVRVLSRQLAEQAQLPAFVNKMLDDFPRDLHPMTQFAIAVSALNHTSKFAKAYADGLNKADYWEPTFDDSISLLAKLPTIAAKIYHNSYKGGGALPAEVDLEQDWSYNFAAMLGKGGKGNENFQDLLRLYLALHGDHEGGNVSAHATHLVGSALSDPFLSYSAGLQGLAGPLHGLAAQEVLRWIIQMKEAIPATYSEKDVTDYLWSTLNSGRVVPGYGHAVLRKPDPRFQALMDYAASRPEIAKDPVFQLVQLNSQVAPEVLKKHGKTKNPYPNVDSSSGVLFHHYGFHETLYYTATFGVSRGLGPLAQLIWDRALGLPIERPKSINLEGILKIVGDKS

SEQ ID NO: 12200 - protein, 175 aa, Triticum aestivum
  misc_feature (63)..(63): Xaa can be any naturally occurring amino acid
  unsure (1)..(175): unsure at all Xaa locations
MAPTVMAASVTSVAPFQGLKSTAGLPVSRRSSSAGLGSVSNGGRIRCMQVWPIEGIKNFETLXYLPPLSTEALLKQVEYLIRSKWVPCLEFSKVGFVFREHNSSPGYYDGRYWTMWKLPMCGCTDTTQVLKEVEDVKKEYPDAYVRVIGFDNLRQVQCVSFIAFRPPGCEESDKA

SEQ ID NO: 12201 - protein, 237 aa, Streptomyces hygroscopicus
MTVKGALFDFSGTLFRIESAESWLRTVLERSGTAVPDEDVLRYARNLEEAGALPGGAPPLAVPPHLEEVWAVRDRGAEPHRAAFTGMAREVPLPRPELYDALYDRHMEPAAWRPYPDAREVLGELRRRGVRIAVVSNIGWDLRPVFRAHGLDPLVDAYALSYEHGVQKPDPRLFQAACDALGVAPGDAVMVGDDRRADAGAAALGCRVHLVDHLPVDRRPDALRAVLGLPPDAATAP

SEQ ID NO: 12202 - protein, 480 aa, Streptococcus pneumoniae TIGR4
MPIQNKTMLITYSDSLGNNLKDLYDNLEEHFGDAIGGVHLLPFFPSTVDRGFAPVDYDEVDSAFGDWEDVKRLGEKYYLMFDFMINHISRQSKYYKDYQEKHEASEFKALFLNWDKFWPENRPTQSDVDLIYKRKDRAPKQEIVFEDGSVEHLWNTFGEEQIDLDVTKEVTMEFIRKTIQHLASNGCDLIRLDAFAYAVKKLDTNDFFVEPDIWDLLDKVRDIAAEYGTELLPEIHEHYSIQFKIADHDYYVYDFALPMVTLYTLYSSRTERLAKWLKMSPMKQFTTLDTHDGIGVVDVKDILTDEEIDYASNELYKVGANVKRKYSSAEYNNLDIYQINSTYYSALGDDDVKYFLARLIQAFAPGIPQIYYVGLLAGKNDLKLLEETKEGRNINRHYYSNEEIAKEVQRPVVKALLNLFSFRNRSEAFDLEGTTEIETPTAHSIVIKRQNKDKSVTAVVEIDLQNQTYRVIENGVEVSF

SEQ ID NO: 12203 - protein, 129 aa, Zea mays
  misc_feature (20)..(20): Xaa can be any naturally occurring amino acid
  unsure (1)..(129): unsure at all Xaa locations
CLFFAETCERSHHHGRRVNXMQTVVLKVAMSCEGCAGAVRRVLSKMEGVETFDIDLKEQKVTVKGNVKPEDVFQTVSKSGKRTSYWEGEATAPDAAAASGAEAAPGTAAEAPPAAAPAAPEITPAKADA

SEQ ID NO: 12204 - protein, 396 aa, Escherichia coli
MFENITAAPADPILGLADLFRADERPGKINLGIGVYKDETGKTPVLTSVKKAEQYLLENETTKNYLGIDGIPEFGRCTQELLFGKGSALINDKRARTAQTPGGTGALRVAADFLAKNTSVKRVWVSNPSWPNHKSVFNSAGLEVREYAYYDAENHTLDFDALINSLNEAQAGDVVLFHGCCHNPTGIDPTLEQWQTLAQLSVEKGWLPLFDFAYQGFARGLEEDAEGLRAFAAMHKELIVASSYSANFGLYNERVGACTLVAADSETVDRAFSQMKAAIRANYSNPPAHGASVVATILSNDALRAIWEQELTDMRQRIQRMRQLFVNTLQEKGANRDFSFIIKQNGMFSFSGLTKEQVLRLREEFGVYAVASGRVNVAGMTPDNMAPLCEAIVAVL

SEQ ID NO: 12205 - protein, 415 aa, Clostridium perfringens str. 13 [sequence omitted]

SEQ ID NO: 12206 - protein, 161 aa, Azoarcus sp. EbN1
MGAKDYIGSLFLTELIKGLALTGRHLFARKITVQFPEEKTPASPRFRGLHALRRYPNGEERCIACKLCEAVCPALAITIESEQRDDGSRRTKRYDIDLTKCIFCGFCEEACPVDAVVETRVMEYHGEKRGDLYYTKQMLLAVGDRYEAQIAADREADAKYR

SEQ ID NO: 12207 - protein, 163 aa, Arabidopsis thaliana
MGTTHKGNSGATHKLDQLVNSDDSLPPPQFHDRHHFHHQPVQFLFKKTQPDETNRVDPIDKIPEDDVTTEPRFGAPSLLQRVKSIKLPSLYRSDPDPTPEVQTHTRTTSESSKPATKKKKKATKKMMKSASQRHIGREEEETVEAVEKRKPETMRVERTTSIG

SEQ ID NO: 12208 - protein, 492 aa, Hevea brasiliensis
MDPYKNLPSNAYNCSFWTTNSGAPVWNNNSSLTVGARGPILLEDYHLLEKLANFDRERIPERVVHARGASAKGFFEVTHNVSQLTCADFLRAPGVQTPVIVRFSTVIHERGSPETIRDPRGFAVKFYTREGNFDLVGNNFPVFFIRDGMKFPDVVHAFKPNPKSHIQESWRIFDFLSHVPESLHMLTFLFDDLGIPQDYRHMEGSGVNTYTLINNAGKVHCVKFHWKPTCGVKCLLEEEAIKVGGSNHSHATQDLYDSIAAGNYPEWKLYIQTMDPDHEDKFDFDPLDVTKTWPEDILPLQPVGRLVLNKNIDNFFAENEQLAFCPGIVVPGISYSEDKLLQTRIFSYSDTQRHRLGSNYLQLPVNAPKCAHHNNHHDGFMNFMHRDEEVNYFPSRCDPVRHSERFPIPSTICSGRRDKCVIEKENNFEQPGERYRSWAPDRQERFLNRMVGCLSDPRITHELRSIWISYWTQCDRSLGQKLAFRLNVRPSI

SEQ ID NO: 12209 - protein, 269 aa, Clostridium perfringens str. 13
MRKALKDSKRIVVKVGTSTLTYENGSVNLMRIEKLSRVISDICNMGKEVVLVSSGAIGVGVGKLRLEKKPETIREKQAVAAVGQCALMHIYNKFFGEYSHVVAQVLLTRDVLENERMKNNVCNTFDTLLEKGIIPIVNENDAISIDEIQNILNFGDNDNLSAIVSTLVNADTLIILSDIDGFYDSDPRTNEDSKMLKEVYEITPEIEECAGGAGSNRGTGGMVTKLSAAKVATSNGIDMILANGENPEILIDILNGEDIGTMFVAKKGE

SEQ ID NO: 12210 - protein, 363 aa, Triticum aestivum
  misc_feature (73)..(73): Xaa can be any naturally occurring amino acid
  misc_feature (173)..(173): Xaa can be any naturally occurring amino acid
  unsure (1)..(363): unsure at all Xaa locations
LGCREAEEMGSTADEEACMFALQLGSSSILPMTLKNAIELGLLDTLVAADGKLLSPAEVAAKLPSTANPAAAXDMVDRMLRLLASYKVVSCTVEEDKDGRLSRRYGAAPVCKFLTPNEEGVSMAPLALMNQDKVLMESWYYLKDAVLDGGIPFNKAYGMSAFEYHGTDPRFNXRVFNEGMKNHSIIITKKLLELYKGFSGLGTLVDVGGGIGATVGAITAHYPTIKGINFDLHHVISEAPPFLGVTHIGGDMFQKIPSGDTILMKWILHDWSNEHCATLLKNCYDALPAHGKVMLVESILPVNPEATPEAQGGFHLDMIMLAHNPGGRERYEREFEALAKGAGFGAIKTTYIYANTWVIEFTK

SEQ ID NO: 12211 - protein, 307 aa, Ralstonia solanacearum
MLTTMNLPQLVVFGEALTDFIREADGRWRSVAGGSCWNVARVCARLGAPTGFAGTVSRDVFGDELTALSRQAGLDMRFMRQVARPPLLAMVPAAHPPQYFFIGENSADLAFDTGVLPDGWIEAAQIVHFGSLSLARQPLAAHLLETATAVHAAGKRIAFDPNYRDAMAGPDYRPTLRRMAGLASYIKVSDEDLRGLFPELDETSALAQLRAWAPTAAILMTRGAAGMTLITPEGTLFQPALPTLVADTVGAGDASMGGWLASLLTRPEAMPASHLEFSAASAAAVCARQGAYAPTREEIVSALAVSR

SEQ ID NO: 12212 - protein, 444 aa, Treponema pallidum subsp. pallidum str. Nichols
MDQHTRTRDLVSAFFGRFHFDVQGPSVRTVVDVLRADMVRGLEEEAQLPPRMGSALAMIPTWVAPPRVSPCNRRVIVIDAGGTNFRSCLVRFGDSGTPHIENLEKRPMPGTTREYSRTEFFGEIADNLARLKGAADCIGFCFSYPIRIRPDGDGEVIQFAKEIKAAEVIGTCVGAGLTEALSARNWPELRSLKMLNDATSALLAGFFAAPEGCSFSSYVGFILGTGMNSAYLEPDPIPKIPAHHTPQVVVCESGKSNKVPRSVFDELFTQTTAEPDIAHLEKMSSGTYLGPLASVVVRLAAQEGLFSHAVHAALSTVSFTLVDMDRFLFAPSVSTTTLGALLAPGTDTDREILFLLLDAVVARAARIAAGVIAASVLKSGAGYDPLRPVCVLAEGTTFQRTYRLRTRVTSHLQAFLTEERGVYFDIISLENAVTLGSALGGLSS

SEQ ID NO: 12213 - protein, 259 aa, Zea mays
LTRTNQDWKITANDCKCSMDGWMDEPCVCVRVFYKLRIPYSAAWSWLRGCGSRRRRMFASLSADQVVPSGSDEGQATEPKPSGSLFRLSNLGRIVCLGRRDFAPVAQLTRRRSDPDGVIGVGGVGVGHDPVDGRRLLLAVVPEAGRAGHRRQRGGPLLRRLLGLRRHLAPSPPAPGRRLRRLLRRRRRRRQTRGGRLAVPPHPRPRPPPPPGPGPVGGRTPRTPLRVRPAWGRGGAPVSARACVGRERGVVGRGRVVAP

SEQ ID NO: 12214 - protein, 162 aa, Daucus carota
MDLRFMGIDHPLFDTLYHILDDDEHDTTDTGNTKRNKSRHERRYVRDAKAMATTAADVKEYPNAYLFVVDMPGLKSGDIKVQVEDGNVLVVNGERKREEEEGVKYLSMGRKVGRFLKKFVVPENANLENIKAVCQDGVLSVTVEKLPPPEPKKPKTIEVQIA

SEQ ID NO: 12215 - protein, 967 aa, Flaveria pringlei
MANRNLEKLASIDAQLRLLVPGKVSEDDKLIEYDALLLDKFLDILQDLHGEDLKEAVQECYELSAEYEGKHDPKKLEELGSVLTSLDPGDSIVIAKAFSHMLNLANLAEEVQIAYRRRIKLKRGDFADEANATTESDIEETFKKLVLKLNKSPEEVFDALKNQTVDLVLTAHPTQSVRRSLLQKHGRIRNCLAQLYAKDITPDDKQELDEALHREIQAAFRTDEIRRTPPTPQDEMRAGMSYFHETIWKGVPKFLRRVDTALKNIGINERVPYNAPLIQFSSWMGGDRDGKHPRVTPEVTRDVCLLARMMASNMYFSQIEDLMFEMSMWRCNSELRVRAEELYRTARRDVKHYIEFWKQVPPTEPYRVILGDVRDKLYNTRERSRHLLAHGISDIPEEAVYTNVEQFLEPLELCYRSLCDCGDRVIADGSLLDFLRQVSTFGLSLVKLDIRQESDRHTDVLDAITQHLEIGSYREWSEEKRQEWLLAELSGKRPLFGSDLPKTEEVKDVLDTFNVLAELPSDCFGAYIISMATSPSDVLAVELLQRECHVKHPLRVVPLFEKLADLEAAPAAMARLFSIDWYRNRIDGKQEVMIGYSDSGKDAGRFSAAWQLYKAQEEIIKVAKEFGVKLVIFHGRGGTVGRGGGPTHLAILSQPPDTIHGSLRVTVQGEVIEQSFGEEHLCFRTLQRFCAATLEHGMNPPISPRPEWRELMDQMAVVATEEYRSIVFKEPRFVEYFRLATPELEYGRMNIGSRPSKRKPSGGIESLRAIPWIFAWTQTRFHLPVWLGFGAAFKHAIKKDSKNLQMLQEMYKTWPFFRVTIDLVEMVFAKGDPGIAALNDKLLVSEDLWPFGESLRANYEETKDYLLKIAGHRDLLEGDPYLKQRIRLRDSYITTLNVCQAYTLKRIRDPNYHVTLRPHISKEYAAEPSKPADELIHLNPTSEYAPGLEDTLILTMKGIAAGMQNTG

SEQ ID NO: 12216 - protein, 186 aa, Bdellovibrio bacteriovorus HD100
MIRCPLLSQNEISSHTHAAPLRRFPMKKHLYDFTVKAANGQPVSLDQYRDKVVLVVNVASKCGYTPQYKGLEELYQQNKDNGLVILGFPCNQFGAQEPGSNEEIQQFCELNYGVSFPVMGKVDVNGGNADPLYQWLKEEAPGLLGTEMIKWNFTKFLVGKDGAVLKRFAPKDEPKDIADDIKKALA

SEQ ID NO: 12217 - protein, 336 aa, Saccharophagus degradans 2-40
MNTKLEKIQAIPTNIITGFLGVGKTTAILSLLANKPEDERWAVLVNEFGEIGIDGSLLQGQHSENSGLFIREVPGGCMCCAAGLPMQIALNQLLTKAKPQRLLIEPTGLGHPKEILQVLSAEHYRTILDVQTTVTLVDARKVSDKRYTNHDTFNQQIQIADIIVGNKSDLYQSNEKEQLENYVKLQAGPEIKVVYAEQGQLNPSLLKGASKAAKRLIQSSSNHHQTLTSPEELTIPECGYLKSDNTGEGYRSSGWRISAEKIFHRQAIFNCFAGLNVERLKAVLITDEGVFGYNLVDDSLKEVVLDDCLESRIEIIWKEGEDSGAAEDFPFGLLME

SEQ ID NO: 12218 - protein, 246 aa, Zea mays
MDNNKQQPPPPPTSVYPPASAATAIPPPPPPSGSTPIIPGGGASYHHLLQQQLQQLQMFWSYQRKEIEQVNDFKNHQLPLARIKKIMKADEDVRMISAEAPILFAKACELFILELTIRSWLHAEENKRRTLQKNDIAAAITRTDIFDFLVDIVPREEIKEEEEAALGSMVAAPAVSGVPYYYPPMGHPAVPGGMMIGRPAMDPSGVYAQPPSQAWQSVWQNSAAGDDVSYGSGGSSGGHGNLDNQG

SEQ ID NO: 12219 - protein, 510 aa, Listeria monocytogenes str. 4b F2365
MEFWRRSVFYEIYMKSFQDSNGDGLGDFKGLTSRLDYLVDLGIDGIWLTPFYPSPQVDNGYDVSDYCDINPDYGDMTDFRVFMKAADARGIKVIIDLVLNHSSTEHAWFKESRSSKTNPKRDYYIWREKPNNWESFFGGSAWEMDELTGEYYYHSFAKEQADLNWANEAVRAEMEQVLAFWLNEGVAGFRLDVINNLTLVLEFTDNPVTSGEMEHVYDRNQSGLEQALEDIASFCRKERDVFLVGEISSDQLAEIARYSSKKMLDVTFNFNFGSVDQLDAKSVFTTLNEMETALNEGQWPTLFFGSHDMSRFRSRLASGGLVKTQLLAFLMLTAKGVPFIYYGEEVGMPDLTFSSVKEMRDIQGTAAYYQALQTGTDEKQALEIAIEKTRDKARGPMIFPDGKPFTLGEPWIKMATLPEKEARTMWRFYQGLLAFRKENDFKEMEYTFLKLDGEVLSYQRGEFIFLLHFGEEEVTYPLQGNYQLVFGEAVMVGNGIRMGAHTGIALRVEE

SEQ ID NO: 12220 - protein, 548 aa, Saccharomyces cerevisiae
MQRSIFARFGNSSAAVSTLNRLSTTAAPHAKNGYATATGAGAAAATATASSTHAAAAAAAAANHSTQESGFDYEGLIDSELQKKRLDKSYRYFNNINRLAKEFPLAHRQREADKVTVWCSNDYLALSKHPEVLDAMHKTIDKYGCGAGGTRNIAGHNIPTLNLEAELATLHKKEGALVFSSCYVANDAVLSLLGQKMKDLVIFSDELNHASMIVGIKHANVKKHIFKHNDLNELEQLLQSYPKSVPKLIAFESVYSMAGSVADIEKICDLADKYGALTFLDEVHAVGLYGPHGAGVAEHCDFESHRASGIATPKTNDKGGAKTVMDRVDMITGTLGKSFGSVGGYVAASRKLIDWFRSFAPGFIFTTTLPPSVMAGATAAIRYQRCHIDLRTSQQKHTMYVKKAFHELGIPVIPNPSHIVPVLIGNADLAKQASDILINKHQIYVQAINFPTVARGTERLRITPTPGHTNDLSDILINAVDDVFNELQLPRVRDWESQGGLLGVGESGFVEESNLWTSSQLSLTNDDLNPNVRDPIVKQLEVSSGIKQ

SEQ ID NO: 12221 - protein, 316 aa, Bacillus thuringiensis serovar konkukian str. 97-27
MIPVTILTGFLGSGKTTLLNRILSENHGQKLAVIVNEIGQIGIDNQLIMNVEEEIMEMTNGCLCCTVREDLLVALKQLLDVKAEGKMDFDGLVIETTGLANPGPIIQTFFLDPVIQSAYQINGVVTVVDSYHIHKHFEKGLEAKEQIAFADVVLVNKLDLIEESEKENLLHELQGINPTAKLIQSTHCDVDIPSLLKIQTFKTKDTLQIYPHKEHNHLEGVKSFVLREERPLDLQKLNEWMSAVVQELGEYLYRYKGILSIDEVDKRIVFQGVHTLFAASYDREWQEGEDRVSEVVFIGKDINKEWFQEHFEECVK

SEQ ID NO: 12222 - protein, 240 aa, Streptomyces coelicolor A3(2)
MSVSARPRLALVGDRGNHDEPSHPKIDAMREQWDLTTEWIPTTDIHDVSVLDGFDGIWVVPGAPYFNQKGVHVAVRHARENGLPFLGTCGGFFSALIEHAQNVLHLPEAAGVDEDPEKLMPLVTPLKCSFRGEKAPLTVMENSRLAGIYGTTEVEEIFHCDYGLTDTFMNAANQGSLRLSAWDSDGAPRALEITGHPFFLGSLFQPELSSAPGSEHKILKAFLAAVSAKADTDALPMPTT

SEQ ID NO: 12223 - protein, 566 aa, Streptomyces coelicolor A3(2); identical to SEQ ID NO: 1458

SEQ ID NO: 12224 - protein, 153 aa, Lupinus luteus
GVLTDVQVALVKSSFEEFNANIPKNTHRFFTLVLEIAPGAKDLFSFLKGSSEVPQNNPDLQAHAGKVFKLTYEAAIQLEVNGAVASDATLKSLGSVHVSKGVVDAHFPVVKEAILKTIKEVVGDKWSEELNTAWTIAYDELAIIIKKEMKDAA

SEQ ID NO: 12225 - protein, 328 aa, Xylella fastidiosa Ann-1
MKALFRVAVTGAAGQIGYSLLFRIAAGEMFGKDRPVILQMLELPDEKAQAALKGVMMELEDCAFPLLADMVVTDNPDIAFKDADAALLVGARPRGPGMERKDLLMENAKIFTAQGAALNKVARRDVKVLVVGNPANTNAYIAMKSAPDLNPKHFTAMLRLDHNRALSQLSTKLGKPAANIEKLIVWGNHSPTMYPDYRFATADGTPIIEAINDQAWNANSFIPTVSKRGAAIIQARGLSSAASAANAAIEHMRDWLLGSNGKWITMGVPSDGSYGIPEGMIFGFPVTTTNGEYSIVKDLPIDTFSKTYIDKTLAELEEERASIAHLLR

SEQ ID NO: 12226 - protein, 153 aa, Lupinus luteus
GALTESQAALVKSSWEEFNANIPKHTHRFFILVLEIAPAAKDLFSFLKGTSEVPQNNPELQAHAGKVFKLVYEAAIQLEVTGVVVSDATLKNLGSVHVSKGVADAHFPVVKEAILKTIKEVVGAKWSEELNSAWTIAYDELAIVIKKEMDDAA

SEQ ID NO: 12227 - protein, 632 aa, Anaplasma marginale str. St. Maries
MRLDCPLIVWFSFVGFVMDKELVKNLITKGIKQGGVITFDDISDALSDDDVVSSESIDETISLLQDSGIGVLEQSDEEEADAVVSEENAAKDEEDEAGMRSLDFGQTDDPIRMYLCEMSSVELLSREGEIEIAKRIKSEKINMLRSLIEAPLVLRTFMSWRDDLVNQQVMLRDLIDLDANYRGGAPRQEFEEGGEYGEQEMAEPGDSDVGGDGADDEDEGEDSSAGNASILEMESALLPKVISILDATIESAEKILEMKKQKRDSGKYDKKAYNALHENIWELVSQMKLSDPAVLSVTQQIYNLSKAIAAEEAALMSLVESYGVDRKSFLEAYNNNTVFEQANASPEWKNLLEKEKKTLTDIQNKVRLLSGEDSPGNFKALVAKIQKHERTANKAKQEMIKANLRLVVSIAKKYSNRGLQFLDLVQEGNIGLMKAVDKFDYKRGYKFSTYATWWVRQAITRAIADQARTIRIPVHMIETVNKINRTLRQMLHEIGREPTLEELSTRLGMNVEKIRKVMKIVKDPVSLESPIGDDDSSTFGDCIEDKRAVKPENAAVLADLREITTKVLSTLTPKEERILRMRFGIGKGGKDHTLEEVGKLFNVTRERIRQIEAKALRKLRHPSRARKLRGFF

SEQ ID NO: 12228 - protein, 324 aa, Magnaporthe grisea 70-15
MSNSLDQLKSSGTTVVCDSGDFATIGKYKPQDATTNPSLILAASKKAEYAKLIDDAIAYAKKQGGSVDDQVDASLDRLLVEFGKEILKIIPGKVSTEVDARFSFDTKASVDKALHIIKLYEAEGISKDRVLIKIASTWEGIKAAEILQRDHGINCNLTLMFSLVQAIAAAEADAFLISPFVGRILDWYKAAHKKEYKKEEDPGVESVKNIFNYYKKFGYKTIVMGASFRNTGEITELAGCDYLTISPNLLEELLNSSEAVPKKLDAQGAAALDIQKKTYISDEPLFRFDFNEDQMAVEKLREGISKFAADADTLKGILKEKIQA

SEQ ID NO: 12229 - protein, 255 aa, Clostridium tetani E88
MKFMSEGVVKKSSYDYDDNILLLEKAKNGDKKATDKLVELNLPLVSAISKKFLNRGYDYEDIYQIGCMGLVKAINNFDSSYNVKFSTYAVPMIMGEIKRFIRDDGIIKVSRSLKIMARKLYYHRETLCKKLGREPSIEELSEYTGLEIEEIVYAMESSSNLQYLHDVIHQDDGAPIMLIDKISENYSEDSDIINKLALKEALGKLDAKSRQIIMLRYFKDKTQIEVAKMLGISQVQVSRIEKRVLKTMKEKLGNW

SEQ ID NO: 12230 - protein, 648 aa, Flaveria trinervia
MISLNSSFLERSSVTGGSRTQSQSLRLSARRPVVTSMLNSNSLPERNVSVSVDSAVRDVNAPVAVEVDRSVGEKPFAAVGGGVEDMYGEDTATEDHYITPWSVSVASGYSLLRDPHHNKGLAFTEKERDAHFLRGLLPPVVVNHDLQVKKMMHNIRQYQVPLQRYQAMMDLQQRNERLFYKLLIENVEELLPIVYTPTVGEACQKYGSIFENSQGLFISLKDKGRILEILKNWPHKKIQVIVVTDGERILGLGDLGCQGMGIPVGKLALYTALGGVRPSACLPITIDVGTNNEKLLNDDEFYIGLKQKRAAGQEYAELMNEFMSAVKQNYGENLLIQFEDFANHNAFDLLEKYRTTHLVFNDDIQGTASVVLGGLISALKLVGGSLADQKFLFLGAGEAGTGIAELIALEISKQTNIPLEESRKKVWLVDSKGLIVRSRLDSLQHFKKPWAHDHEPVNEFLDAIKTIRPTVLIGSSGTGQTFTKEVVETMSSLNEKPIILALSNPTSQSECTAEQAYTWSEGRAIFASGSPFKPVEYNGKLYVSGQANNAYIFPGFGLGLIISGAIRVHDDMLLAASEAPAEQVTQEHFDKGLIFPPFTSIRKISAHIAAKVAAKAYELGLASRLPQPENLVAYAESCMYSPKYRIYR

SEQ ID NO: 12231 - protein, 225 aa, Xylella fastidiosa Ann-1
MVSAPLSFMPEAVIFDMDGLMLDSERVSIECRCRAAFDLEQQIEPDYWLQMVGVSDIACHAQLSARIGAVPATALLARSDALYEAVVTKGVPHRPGIVTLLEWLFARGIPCAVGTSTRRPLALRKLNTAGLLSRFDVVCTASEVAQAKPAPDIYLLAAHTLGIVPGRCLVVEDSPIGVRAALAAGMTPIQVPDLLMPDAQVSALGHRIVASLTEVQSLLEACFDV

SEQ ID NO: 12232 - protein, 47 aa, Medicago truncatula
MAKDPVRVLVTGAAGQIGYALVPMIARGVMLGPDQPVILHMLDIAPA

SEQ ID NO: 12233 - protein, 157 aa, Clostridium perfringens str. 13
MKKIILAGGCFWGVEEFLSRINGVVSTEVGYANGRTENPTYEDICTKNTYFAEVCLVNYDENIISLKELLAKFWTIIDPTSLNKQGNDVGSQYRTGIYYVDSSDLEDILNSKEELQKSYSKKIVTEVKPLENYYKAEEYHQKYLKKNPNGYCHIKLD

SEQ ID NO: 12234 - protein, 194 aa, Brassica napus
MAEETKNVVHEQEVPKVTTEESSAEVTDRGLFDFLGKKKEETKPEETIDSEFEHKVHISEPVVPEVKHEEEEKKHSLLEKLHRSDSSSSSSSEEEGEDGEKRKKKKDKKKTATTAEGEVKTEEEKKGFMDKLKEKLPGHGKKPEDASPAAPVVAPPVEEAHPAEKKGILEKIKEKLPGYHPKTVDEVKKEKETD

SEQ ID NO: 12235 - protein, 478 aa, Emericella nidulans
MKAATPRPSVRALSSGRSYRTARFVSRTSNARSSLAADTNSLLQQAPPSPKKQLASPLAKLPLSSVLRSLLILSVSSSSILLKPCIYTLSALAHPKTALLDVAKNPLLNLLVKHTIYKQFNAGENKLEVQRSINAIKELGYRGVLLGYAREVLVGESKTDPRDEQASRQEIQTWLDGTLQTVDMAQEGDFVALKFTGMGIQALEYLQNQAPPSPFMDEAIKQVCDLAISRNVRLLVDAEEQAVQPGIEEWATMYQKYCNSRTPGRAIFYNTYQAYLCSTPATLARHLEISRKEGYTLGVKLVRGAYLKTEPRHLIWAKKEQTDECYDGIVEALLTRRYNHMLKPASAEHTTELPPVSVIVATHNRDSVRKAHALRLEQASRGEKSDVELTYAQLQGMADEISCELLQGFQTAGPENTKVAESPNVYKLLTWGSVKECMGFLLRRAVENTEAVGRTKQSQEAMFSELRRRARRAFGLRY

SEQ ID NO: 12236 - protein, 517 aa, Trametes sp. C30
MAKFQSLLTFITLSLVASVYASIGPVADLTISNGAVSPDGFSRQAILVNDVFPSPLITGNKGDRFQLNVIDNMTNHTMLKSTSIHWHGFFQHGTNWADGPAFVNQCPISTGHAFLYDFQVPDQAGTFWYHSHLSTQYCDGLRGPIVVYDPQDPHKSLYDVDDDSTVITLADWYHLAAKVGPAVPTADATLINGLGRSISTLNADLAVITVTKGKRYRFRLVSLSCDPNHTFSIDGHSLTVIEADSVNLKPQTVDSIQIFAAQRYSFVLNADQDVDNYWIRALPNSGTRNFDGGVNSAILRYDGAAPVEPTTTQTPSTQPLVESALTTLEGTAAPGNPTPGGVDLALNMAFGFAGGRFTINGASFTPPTVPVLLQILSGAQSAQDLLPSGSVYSLPANADIEISLPATSAAPGFPHPFHLHGHTFAVVRSAGSSTYNYANPVYRDVVSTGSPGDNVTIRFRTDNPGPWFLHCHIDFHLEAGFAVVMAEDIPDVAATNPVPQAWSDLCPTYDALSPDDQ

SEQ ID NO: 12237 - protein, 967 aa, Flaveria trinervia
MANRNVEKLASIDAQLRLLVPGKVSEDDKLVEYDALLLDKFLDILQDLHGEDLKEAVQQCYELSAEYEGKHDPKKLDELGSLLTSLDPGDSIVIAKAFSHMLNLANLAEEVQIAYRRRIKLKSGDFADEANATTESDIEETFKRLVHKLNKSPEEVFDALKNQTVELVLTAHPTQSIRRSLLQKHGRIRNCLAQLYAKDITPDDKQELDEALHREIQAAFRTDEIRRTPPTPQDEMRAGMSYFHETIWKGVPKFLRRVDTALKNIGINERFPYNAPLIQFSSWMGGDRDGKHPRVTPEVTRDVCLLARMMTSNMYFSQIEDLMIEMSMWRCNSELRVRAEELYRTARKDVKHYIEFWKQIPPNQPYRVILGDVRDKLYNTRERSRHLLVDGKSDIPDEAVYTNVEQLLEPLELCYRSLCDSGDHVIADGSLLDFLRQVSTFGLSLVKLDIRQESDRHTEVLDAITQHLGIGSYREWSEEKRQEWLLAELSGKRPLIGPDLPKTEEVKDCLDTFNVLAELPSDCFGAYIISMATSTSDVLAVELLQREYHIKHPLRVVPLFEKLADLEAAPAAMTRLFSMDWYRNRIDGKQEVMIGYSDSGKDAGRFSAAWQLYKTQEQIVKIAKEFGVKLVIFHGRGGTVGRGGGPTHLALLSQPPDTINGSLRVTVQGEVIEQSFGEEHLCFRTLQRFCAATLEHGMNPPISPRPEWRELMDQMAVVATEEYRSVVFKEPRFVEYFRLATPELEFGRMNIGSRPSKRKPSGGIESLRAIPWIFSWTQTRFHLPVWLGFGAAFKHAIQKDSKNLQMLQEMYKTWPFFRVTIDLVEMVFAKGNPGIAALNDKLLVSEDLRPFGESLRANYEETKNYLLKIAGHKDLLEGDPYLKQGIRLRDPYITTLNVCQAYTLKRIRDPNYHVTLRPHISKEYAAEPSKPADELIHLNPTSEYAPGLEDTLILTMKGIAAGMQNTG

SEQ ID NO: 12238 - protein, 150 aa, Triticum aestivum
YMDAGAPKRFKEDEEKEQLAKELAKDWSAVFERSINTLFLTEMVRGLMLTLKYFFERKVTINYPFEKGPLSPRFRGEHALRRYDTGEERCIACKLCEAICPVDAIVEGPNFEFSTETHEELLYDKEKLLENGDRWETEIAENLKSEALYR

SEQ ID NO: 12239 - protein, 173 aa, Flaveria trinervia
MASIPATVAAVPQTNMVAPFTGLKANAAFPVTKKVNGFSTLPSNGGRVQCMKVWPPVGKKKYETLSYLPELTEAQLAKEVDYLLRNKWVPCLEFELEHGFVYRENASSPGYYDGRYWTMWKLPMFGCTDSAQVMKELQECKKEYPQAWIRIIGFDNVRQVQCVSFIASKPTGF

SEQ ID NO: 12240 - protein, 397 aa, Bacillus cereus ATCC 14579
MAKHHGDAGMSSAFIYSDDFRGYSFSPDHPFNQLRVTLTYDLLQKGGFISPSQIISPRTATDEEIAYVHTEEYINAVKRAGEGKLEKSIAMSYGLGTEDTPMFPNMHEASALLVGGTLTAVDAVLSGKVKHALNLGGGLHHGFRGKASGFCIYNDSSIAMKYIQKKYGLRVLYIDTDAHHGDGVQWSFYDDPNVCTISLHETGRYLFPGTGAVNERGQGNGYSYSFNVPLDAFTEDESFLKSYRTVVKEVAAYFKPDIILTQNGADAHYYDPLTHLCATMNIYREIPKLAREIANEYCDGRWIAVGGGGYDHWRVVPRAWALIWLEMNNIQNISGYLPPEWIEAWKGQAETELPLTWEDPDNMYKPIPRKPEIEEKNALTVAKSLEIIRNNMTKSLY

SEQ ID NO: 12241 - protein, 376 aa, Pyrococcus horikoshii OT3
MALSILFLSIASLTLSSSLIIDHYFHLSFLRNPLKSQSGGGKMKPKVFITREIPEVGIKMLEDEFEVEVWGDEKEIPREILLKKVKEVDALVTMLSERIDKEVFENAPKLRIVANYAVGYDNIDIEEATKRGIYVTNTPDVLTDATADLAFALLLATARHVVKGDRFVRSGEWKKRGVAWHPKWFLGYDVYGKTIGIIGLGRIGQAIAKRAKGFNMRILYYSRTRKEEVERELNAEFKPLEDLLRESDFVVLAVPLTRETYHLINEERLKLMKKTAILINIARGKVVDTNALVKALKEGWIAGAGLDVFEEEPYYNEELFKLDNVVLTPHIGSASFGAREGMAELVAKNLIAFKRGEIPPTLVNREVIKIRKPGFE

SEQ ID NO: 12242 - protein, 1081 aa, Candida albicans SC5314
  misc_feature (736)..(767): Xaa can be any naturally occurring amino acid
  unsure (1)..(1081): unsure at all Xaa locations
MNPTKKPRLSPMQPSVFEILNDPELYSQHCHSLRETLLDHFNHQATLIDTYEHELEKSKNANKAFQQALSEIGTVVISVAMGDLSKKVEIHTVENDPEILKVKITINTMMDQLQTFANEVTKVATEVANGELGGQAKNDGSVGIWRSLTDNVNIMALNLTNQVREIADVTRAVAKGDLSRKINVHAQGEILQLQRTINTMVDQLRTFAFEVSKVARDVGVLGILGGQALIENVEGIWEELTDNVNAMALNLTTQVRNIANVTTAVAKGDLSKKVTADCKGEILDLKLTINQMVDRLQNFALAVTTLSREVGTLGILGGQANVQDVEGAWKQVTENVNLMATNLTNQVRSIATVTTAVAHGDLSQKIDVHAQGEILQLKNTINKMVDSLQLFASEVSKVAQDVGINGKLGIQAQVSDVDGLWKEITSNVNTMASNLTSQVRAFAQITAAATDGDFTRFITVEASGEMDALKTKINQMVFNLRESLQRNTAAREAAELANSAKSEFLANMSHEIRTPLNGIIGMTQLSLDTELTQYQREMLSIVHNLANSLLTIIDDILDISKIEANRMTVEQIDFSLRGTVFGALKTLAVKAIEKNLDLTYQCDSSFPDNLIGDSFRLRQVILNLAGNAIKFTKEGKVSVSVKKSDKMVLDSKLLLEVCVSDTGIGIEKDKLGLIFDTFCQADGSTTRKFGGTGLGLSISKQLIHLMGGEIWVTSEYGSGSNFYFTVCVSPSNIRYXXXXXXXXXXXXXXXXXXXXXXXXXXXXXXXXGIIELGLIPIIVRNIEDATLTEPVKYDIIMIDSIEIAKKLRLLSEVKYIPLVLVHHSIPQLNMRVCIDLGISSYANTPCSITDLASAIIPALESRSISQNSDESVRYKILLAEDNLVNQKLAVRILEKQGHSVEVVENGLEAYEAIKRNKYDVVLMDVQMPVMGGFEATEKIRQWEKKSNPIDSLTFRTPIIALTAHAMLGDREKSLAKGMDDYVSKPLKPKLLMQTINKCIHNINQLKELSRNSRGSDFAKKMTRNTPGSTTRQGSDEGSVEDMIGDTPRQGTVEGGGTSSRPVQRRSATEGSITTISEQIDR

SEQ ID NO: 12243 - protein, 338 aa, Mesorhizobium loti MAFF303099
MKAVICRSPGELVLEDRPAPGAPPAGWALVAVSHVGICGTDYHIFEGKHPFLAYPRIMGHEVSGTVIETGEGPDLAIGEPVVINPYLSCGKCIACRHGKPNCCVKIEVLGVHRDGAMCERILVPAQNLYPANGLSLADAAAVEFLAIGAHAVRRARADSGARALVIGAGPIGLGNAIFARIAGLDVTLLDMSSERLAFAENELGFSILDGSRGAVPDLVKDATSGEGFDVVFDATGNTRSVQSAFAHVAHGGTLVLVSVVKDDIVFSDPEFHKREMTLVGSRNALRADFDHVAASIRNGAVPLAKLVTHRTTLADTPSDLARWAHEKSGLIKAVIEIG

SEQ ID NO: 12244 - protein, 198 aa, Glycine max
PTRPPTRPAAARRRQKGKPKNKISCHSIPLTFAISSSPMAATDESLRKSLAEKHAAVEAQGNAVRALKAAKAAKPEIDAAIEALNALKLEKSSIEHSLLGGSDSRKAFRQSVVNTLERRLFYIPSFKIYRGVAGLFDYGPPGCSVKSNVLSFWRQHFVLEENMLEVDCPCVTPEIVLKASTVVGFVEEESMTRKATQI

SEQ ID NO: 12245 - protein, 333 aa, Trichodesmium erythraeum IMS101
MSQTKPTILVSGGAGYIGSHAVQALQNAGYDIVILDNLVYGHRDIVENVLKVEMIVGDTSDRSLLDKIFATHNIAAVMHFAAYIFVGESVKDPQKYYHNNVVGTLTLLEAMLKASIKKFVFSSTAAIYGKPQTIPIPEDHPKNPINPYGASKRMIEQILADFEIAYDFKSVCFRYFNAAGAHPNGLTGEDHNPETHLIPLVLFAALGKRDSISIFGTNYKTPDGTCIRDYIHVCDLADAHVLGLEYLLNGGESNIFNLGNGNGFSVREVIETVKQVTGREFKVEERDRRPGDPPILVGSSEKARKVLGWSPKYPEVKEIVSHAWQWHQKRHGK

SEQ ID NO: 12246 - protein, 195 aa, Zea mays
MAGKKRKAEAARLEETDRALYGAFRGAANSLSQLYTLGMGAQKASFHAGERHAMEKLYEWILRQHENGLRLTVADVASHIQHEIQYGGDNASASPRSQYPSQSTAPTMHIPNTSNQQPSPSLFAPGNPGLTQSKNSMVFSSALSSPIRRSLQPYHLEQDGDAGYFANGASRDVNPTASNDSSMDMHSDSPAHDSY

SEQ ID NO: 12247 - protein, 330 aa, Bacillus thuringiensis serovar konkukian str. 97-27
MNSILICGGAGYIGSHAVKKLVDEGLSVVVVDNLQTGHEDAITEGAKFYNGDLRDKAFLRDVFTKENIEAVMHFAADSLVGVSMEKPLQYYNNNVYGALCLLEVMDEFKVDKFIFSSTAATYGEVDVDLITEETMTNPTNTYGETKLAIEKMLHWYSQASNLRYKIFRYFNVAGATPNGIIGEDHRPETHLIPLVLQVALGQREKIMMFGDDYNTPDGTCIRDYIHVEDLVAAHFLGLKDLQNGGESDFYNLGNGNGFSVKEIVDAVREVTNHEIPAEVAPRRAGDPARLVASSQKAKEKLGWDPQYVNVKTIIEHAWNWHQKKPNGYEK

SEQ ID NO: 12248 - protein, 261 aa, Physcomitrella patens
MVEKVVVSSLRVKRGGNLLAPLKRNVSSIAKKSSTPKSGKPVGSPKVYKGVRMRTWGKWVSEIREPNKRSRIWLGSFPTAEMAAKAYDAAAVCLRGRSVKLNFPDSPPRCAARCNSPREVQAAATAAAVACIPSATALTVANFQSPAQTLESSPLHSSPSSSDMSSGDEDSGEDSVQSFVAEGSQISPSEVVPVLEWVKVEFGDKETVAAGDVDFDCDYSFISEFAADSLLACSYNSKGRTEYLPIETHDAALYDSTLWFF

SEQ ID NO: 12249 - protein, 229 aa, Alkaliphilus metalliredigenes QYMF
MVYKLLVVDDEPLLVKGLRYSLEQDGYEILSASDGEEALDKFNKGSFDLIILDLMLPKIDGLEVCQTIRQTSQTPIIMLTAKGEDMTKILGLEYGADDYMTKPFNILELKARIKAVLRRAQSKEGNVGERVIHIDDFKINTMGRKVSIHGEEVNLTAKEFDLLLLLASNHGKVYSREALLEIIWGYEYFGDLRTVDVHVRRLREKVESNSSQPKYILTKWGVGYYFRTK

SEQ ID NO: 12250 - protein, 537 aa, Streptococcus pyogenes SSI-1
MKKHWWHKATIYQIYPRSFKDTNGNGIGDLKGITSQLDYLQKLGITAIWLSPVYQSPMDDNGYDISDYEAIADVFGDMADMDELLAAANERGIKIIMDLVVNHTSDEHAWFVEARENPNSPERDFYIWRDEPNDLTSIFSGSAWEYDNASGQYYLHLFSKRQPDLNWENEALRHKIYDMMNFWIAKGIGGFRMDVIDLIGKVPDSEITGNGPRLHDYLKEMNQATFGNHDVMTVGETWGATPEIARQYSRPENKELSMVFQFEHVGLQHKPDAPKWDYAKELDVPALKAIFSKWQTELKLGEGWNSLFWNNHDLPRVLSIWGNDSTYREKSAKALAILLHLMRGTPYIYQGEEIGMTNYPFKDLTEVNDIESLNYAKEAMGNGVSAARVMDSIRKVGRDNARTPMQWSKDTHAGFSKAQETWLPVNPNYQDINVADALADPDSIFYTYQKLIALRKEQDWLVEADYHLLPTADKVFAYQRQLGEETYVIVVNVSDEEQVFAKDLAGAQVIIANTDVDTVLETKHLQPWDAFCLKLKA

SEQ ID NO: 12251 - protein, 131 aa, Zea mays
MEDDKKEGKYRGVRKRPWGKFAAEIRDPERGGSRVWLGTFDTAEEAARAYDRAAFTMKGATAVLNFPTSGGSAAAAPGGRTSGGGSSSSTTSSAPASRGRARVPDSEKVELECLDDRVLEELLAEDKYNKN

SEQ ID NO: 12252 - protein, 430 aa, Haemophilus influenzae R2866
MMDEQSLLAFDTQHIWHPYSSVSSDMPLYAVERADGVMITLKDGRRLIDGMSSWWAALHGYNHPRLNAAAQNQLAKMSHIMFGGFTHDPAVELAQLLVQILPNGLDKIFFADSGSVAVEVAMKMAIQYQHAKGEVQRQKFATIRSGYHGDTWNAMSVCDPTTGMHHLFHHSLPVQYFLPQPNIPFNESWNDCVIEPLADLLKKKGSEIAALILEPVVQGAGGMYFYSPTYLVKAQALCKQYGVLLIFDEIATGFGRTGKLFAAEHAGISPDIMCIGKALTGGYLTLSASITTTEIAQTICSGEAKCFMHGPTFMANPLACAIATESIRLLLESPWQQNIQRIEHYLKQQLSPLSEKDYVKEVRVLGAIGVVEMKSAVNMKTLVPRFVEQGVWIRPFGKLVYVMPPFVIKDDELQKLTEGMILALIQEYEH

SEQ ID NO: 12253 - protein, 446 aa, unidentified bacterium
MEYAVSVESFLSSLQRHNPHQPEYLQAVREVFTSLWPFIERNPAYREQALLERLVEPERIIQFRVSWVDDRGQVQVNRAFRVQFNSAIGPYKGGMRFHPSVNLSILKFLGFEQTFKNALTTLPMGGGKGGSDFDPKGKSQGRIMRFCQALMTELYRHLGPDTDVPAGDIGDGGREVGFMAGMMKKLSNNTACVFTGKGLSFGGSLIRPEATGYGLVYFTDAMLQRHGLGFEGMRVAVSGSGNVAQYTIEKALELDARVITVSDSGGTLVDEDGFTTEKLAHLAEIKNQRYGRVADYAAERGLTYLAGQQPWNVPVDIALPCATQNELDLEAARVIRNGVKAVAEGANMPTTIQATDAFLDAGVLFAPGKAANAAGLATSGLEMAQNAARIGWRAEKVDVRLQHIMADIHHACVEYGGEGKQTHYVHGANIAGFVKVAEAMLAQGVL

SEQ ID NO: 12254 - protein, 689 aa, Magnaporthe grisea 70-15
MFRLNIARLSSGAPNRRLLTATTARIPSCLSCASLARPTRRIPTAILPSIRTLQTQHTPSDFRPAVPPSPSSLGGPRKARTYTRSRKWARRLFIASAVLGTLYAIDSQVYASGMGRSLRTFGTGLLVALDYKINFRPDPLPLIGSSGTIEDLHRRNAERLFELLRKNGGLYLKIGQAIAMQSAVLPPEFQRMFARMFDDAPSVSWDEVERVIREDFGGRSVQDVFGVSFAGADGRGVMERSARASASVAQVHWARLSDGTEVAVKIQKPEIAKQIGWDLWSFKAVTWIYSWWFDLPFYSMVPFITERLELETDFINEAKNSDTMRDLIADEPYLRGRVYIPKVFSELSSKRVLVTEWIEGVRLWDREAMTRPWYGGYGKGSLGVNGTPLPSPDMAAVRAELRRNPESSKLKPERDEWRGRNGKGGLGLSKKDVMTTIVDLFSAQIFKFGVVHCDPHPGNIFIRRLPGGRAELVLIDHGLYVYLTPKFRREYSEFWKALMTFDNKTIARVCDQWGIKGADLFASATLMRPYEGGDGHYRRQLLGMDLPEDMTPKQRRFELQKRSKQAVREMLADENKWPKELIFIGRNMRIVQGNNQHMGSPVNRVKMMGEWASRSMFEDRDRPFRERVANMWRHALFKTVLTASDVVFYFFKLRQFLGLGGGMEDEVEARMRQMAGDFGVELQHDVFAG

SEQ ID NO: 12255 - protein, 220 aa, Anaplasma marginale str. St. Maries
MRSVLSSAQLEQYVDGCFGIDDSDALSVHASAPERWVKGQVGFVEGRLLQFLIRVTGTKSIVEVGTCVGFSAICMARALPPEGRVYTIEKDEQHCAAARQNIAKCGMADKITVLCGDALHVLKKDLEDKSPFDMMFIDANESGYCDYLDWAEVNVRKGGLLVADNVFLYRTVSGDTPSDGVPASAHTSMRRFNERLSNKQDYLASVIPTEEGTLVALKLR

SEQ ID NO: 12256 - protein, 488 aa, Carica papaya
MGFGTNQSLLSKIATNDRHGEDSPYFDGWKAYDRNPFHPTRNPDGVIQMGLSENQLCFDLIEKWVKKNPNASICTAEGVENFKHIANFQDYHGLKEFRQEVAKLMGKARGGRVTFDPERIVMSGGATGASETIMFCLADPGDASLVPTPYYPAFNRDLRWRTGVQIIPVQCSSSNNFTVTREAVEAAYQKAQEANINVKGLIITNPSNPLGTTLDSQTLQSLVNFVNDKTIHLVCDEIYAATVFSSPEFVSIAEIIQEMDVNRDLIHIIYSLSKDMGLPGFRVGIVYSYNDGVLSCGRRMSSFGLVSSQTQYFLATLLSDDEFVDYFLRESSKRLARRHHKLTRGLEQVGIKCLKSNAGLFVWMDLRRLLEGPTSFDAEMKLWRTIVNDVKLNVSPGSSFHVAEPGWFRVCFANMEEETMDVALQRIQAFVCRAKEREAAAAATTNKKRGTMNLRLSFSSRNQVYEEQYYAMSPHMMSPRSPLVEART

SEQ ID NO: 12257 - protein, 635 aa, Saccharomyces cerevisiae
MSGARSTTAGAVPSAATTSTTSTTSNSKDSDSNESLYPLALLMDELKHDDIANRVEAMKKLDTIALALGPERTRNELIPFLTEVAQDDEDEVFAVLAEQLGKFVPYIGGPQYATILLPVLEILASAEETLVREKAVDSLNNVAQELSQEQLFSDFVPLIEHLATADWFSSKVSACGLFKSVIVRIKDDSLRKNILALYLQLAQDDTPMVKRAVGKNLPILIDLLTQNLGLSTDEDWDYISNIFQKIINDNQDSVKFLAVDCLISILKFFNAKGDESHTQDLLNSAVKLIGDEAWRVRYMAADRFSDLASQFSSNQAYIDELVQPFLNLCEDNEGDVREAVAKQVSGFAKFLNDPSIILNKILPAVQNLSMDESETVRSALASKITNIVLLLNKDQVINNFLPILLNMLRDEFPDVRLNIIASLKVVNDVIGIELLSDSLLPAITELAKDVNWRVRMAIIEYIPILAEQLGMQFFDQQLSDLCLSWLWDTVYSIREAAVNNLKRLTEIFGSDWCRDEIISRLLKFDLQLLENFVSRFTILSALTTLVPVVSLDVVTEQLLPFISHLADDGVPNIRFNVAKSYAVIVKVLIKDEAKYDALIKNTILPSLQTLFQDEDVDVKYFAKKSLAECQELLKN

SEQ ID NO: 12258 - protein, 896 aa, Schizosaccharomyces pombe
DHLLSYNRSAFDLFNSEKPLSPEKISTMLQHLQMRLSIEQQCVSGIEKIMSLYSKEQKDKTDVIIKLKEGKQKVNLLKRSLKRYNELHIPFDISTPSSEEKQQASGLNFRGLAKPISGTLKVTIHSLRNIEHTSFLQTHSFTMPSYAVLYVDDAQVAKSRISQTDTWDETFIFDVHRAKEFQIIIYEKKKDFDIPIALILIPTTIIAEELRRKRNIQEMSETSWKPSIAESASRSDEKGSKSDPINAPNSSSSISTNSPLAPTAYYKLLSKSWLSLEPVGQICISLSFSKRTTKRQFPETGLGRQGAIRQKKEDVVASQVGHQFVQRQFYQIMRCAVCAELFSYSPGLQCENCSFVCHKKCVTKVLASCIAQSNSEKSDFGGLRYRIPHRFEPFNSLGAQWCAHCGFFLPLRRKDCFKCVECGITCHGQCAHLIPDYCGMSNDLKHQLLTELEVSKRPKKPELPNQENKTTNEKVYRKPLSSQNTFDTLPTISQGLLAATQPVTSVLNTSPLPKTPEKDRSLNVTPSSSTPTPASVLAPPSSASLSSSKDANRSVPESPRREKKNRVTLDDFTFLAVLGKGNFGKVMLAEYKVNKKFYAIKVLKKEAILKNEELESLKTEKHVFEVANKEKHPFLLNLFASFQTSTRVYFVMEYILGGDLMVHIQRQQFSVKRARFYGAEVCLALKYFHENGIAYRDLKLDNILLCPDGHIRIADYGLCKENMLLGNTTSTFCGTPEFMAPEILLEQQYSKDVDWWAFGVLMYQMLLGQSPFKGEDEEEIFDAILSDEPLFPINMPADAVSLLRGLLTRDPNQRLGSGPKDANEVMAHPFFASIVWDDLYNKLYEPSYKPLINDPRDLNNFDEEFTSACPTLTPVNTVLTRQQQECFRGFSSFATE

SEQ ID NO: 12259 - protein, 458 aa, Pseudomonas fluorescens Pf-5
MGIQEYSAAERLERLPISGYHRVIFIIIALAFFFDSMDLAMMTFLLGSIKTEFGLSSAQAGLLASSSFFGMVLGASLSGMLADRYGRKPVFQWSIVLWGVASYLCSTAQSVDSLTLFRVLLGIGMGMEFPIAQSMLSEMIPAQRRGRYIALMDGFWPLGFVAAGVLSYFLLPLIGWRDIFLVLAVPAVFVLVIRFFIPESPRWLEQAGRHADADRVLCGIEDKVRASLGTAQLPEPLHLPRIDSAPGHFFSALKQIWSPLYRQRTMMIWSLWFFALLGFYGLTSWLSALLQQSGFAVTQSVYYTVLISLGGIPGFLMAAWLVERWGRKPVCIVTLLGGGVMAFFYGQSAVFGGNVSLLIGTGLLMQFFLFGMWAVLYTYTPELYPTSARATGSGFASAVGRIGSLLGPLVTGLVFPLTGQGGVFALGAACFVIAAGVVWLFGMETRGKTLEELSEAGS

SEQ ID NO: 12260 - protein, 356 aa, Nicotiana tabacum
MSPLSDLISLNLSDSTQKIIAEYIWIGGSGMDLRSKARTLSGPVTDPSELPKWNYDGSSTGQAPGEDSEVILYPQVYFKDPFRRGNNILVMCDAYTPAGEPIPTNKRHAAAKIFSNPDVVAEEPWYGIEQEYTLLQRDINWPLAWPIGGFPGPQGPYYCGTGADKAFGRDIVDSHYKACLYAGFNISGINGEVMPGQWEFQVGPSVGISAGDEVWVARYILERIAEIAGVVVSFDPKPIPGDWNGAGAHTNYSTKSMREDGGYEVILKAIEKLGLKHKVHIAAYGEGNERRLTGKHETANISTFKWGVANRGASVRVGRDTYKAGKGYFEDRRTASNMDPYAVTAMIADTNHICKS

SEQ ID NO: 12261 - protein, 217 aa, Brassica napus
MVKMGLKPNPVTPNPTHYNAKEIRYRGVRKRPWGRYAAEIRDPGKKTRVWLGTFDTAEEAARAYDKAARDFRGAKAKTNFLELNEKVLSGGGGFARSPSQSSTLDYASPPAVVTPATDGIVPPRLELSLGGGGACYQIPMARPLYFLDLMGVGNGGRGQLPVSSAFRSPVMQVSTKMACGAQSDSDSSSVVDFEVVMEKRSQPLDLDLNLLPPVEQA

SEQ ID NO: 12262 - protein, 383 aa, Pseudomonas fluorescens Pf-5
MTWCSLSVISCTRFYSRQRTAMLNSLKQEKFLLLALLAAVAAYPLEHLLLGSGQGIALGAGLVLIGFIVMASMRVAHHAELLAEKVGDPYGTMILTLAAVLVEVVILAIMMSNEASPTLVRDTIYSAVMLDINGILGLAALMGGIKHGEQPYNDDSARTYSVMILTAMGVSMVVPEFIPEADWKVYSAFTIGAMVVLYTLFLRMQVGPHSYFFSYSYPEKRRNKEAQEQPHAINLAWSIGILVFGVVVIGALAEVMSKTLDLGLEGTGAPPVITAILVAAISAAPEILTALRAALANRMQSVVNVALGASLSTVILTVPVMEAMALYTGQPFQMAMTPVQTVMVFITLIVSAINLNDGETNAIEGMTHFVLFATFIMLSLLGL

SEQ ID NO: 12263 - protein, 356 aa, Nicotiana tabacum
MAHLSDLVNLNLSDSTQKIIAEYIWIGGSGMDVRSKARTLSGPVDDPSKLPKWNYDGSSTGQAPGEDSEEILYPQAIFKDPFRRGNNILVICDCYTPAGEPIPTNKRHSAAKIFSHPDVVVEEPWYGLEQEYTLLQKDINWPLGWPLGGFPGPQGPYYCGIGAGKVFGRDIVDSHYKACLYAGINISGINGEVMPGQWEFQVGPSVGISAADELWAARYILERITEIAGVVVSFDPKPIPGDWNGAGAHTNYSTKSMRNEGGYEVIKKAIENLGLRHKEHIAAYGEGNERRLTGRHETADINTFKWGVANRGASIRVGRDTEREGKGYFEDRRPASNMDPFVVTSMIAETTILSEP

SEQ ID NO: 12264 - protein, 330 aa, Ustilago maydis 521
MSKLGDYAAVKKDILAVLKQPEYDDGSAGPVLVRLAWHASGTYCARTDTGGSNGAGMRYEAEGGDPANAGLQHARVFLEPIKEKHSWITYADLWTLAGVVAIEAMGGPSIQWKPGRTDFADDSRLPPRGRLPDGAQGADHLRFIFNRMGFNDQEIVALSGAHNLGRCHSDRSGFEGPWVNSPTRFSNQYYKLLLKLKWQPKKWDGPFQYVAKAPGADDDDEQLMMLPTDYALIQDEKMRPWVEKYAEDRDAFFNDFAKVFAKLIELGVYRDESGIARADKMKQFKGEYKSAPQKSPVPGAPGAGKDGEANPLARQNERAHGQAQHALAKL

SEQ ID NO: 12265 - protein, 570 aa, Salmonella typhi
  misc_feature (92)..(92): Xaa can be any naturally occurring amino acid
  unsure (1)..(570): unsure at all Xaa locations
MIPPEIRRSVLLQKAIKLALAGTLLTFASFSATAADPSSDTETPQPPDILLGPLFNDVQNAKLFPDQKTFADAIPNSDPLMILADYRMQRNXSGFDLRHFVDVNFTLPKAGEKYVPPAGQSLREHIDGLWPVLTRSTKNVEKWDSLLPLPESYVVPGGRFREIYYWDSYFTMLGLAESGHWDKVADMVANFGYEIDAWGYIPNGNRTYYLSRSQPPFFAFMVELLVQHEGDDALKEYLPQLQKEYAYWMEGVETLQPGQQNQRVVKLEDGSVLNRYWDDRDTPRPESWVEDIATAKSNPSRPATEIYRDLRSAAASGWDFSSRWMDNPQQLSTIRTTTIVPVDLNALLYQLEKTLARASAAAGDRAKASQYDALANARQKAIEMHLWNNKEGWYADYDLQNNKIRDQLTAAALFPLYVNAAAKDRAAKVAAAAQAHLLQPGGLATTSVKSGQQWDAPNGWAPLQWVAAEGLQNYGQDDVAMEVTWRFLTNVQHTYDREKKLVEKYDVSSTGTGGGGGEYPLQDGFGWSNGVTLKMLDLICPQEKPCDSVPSTRPASLSATPTKTPSAATQ

SEQ ID NO: 12266 - protein, 502 aa, Alonsoa meridionalis
MEVGNEAKSTALPPAQAAPVKNIIVVAAIAAGVQFGWALQLSLLTPYVQLLGVPHVWAAFIWLCGPISGLLVQPIVGYYSDNCTSRFGRRRPFIAAGAGLVAVAVFLIGFAADLGHMGGDSLGKGTKPRAVAVFVVGFWILDVANNMLQGPCRALLADMSAGNAKKMSSANSMFSFFMAVGNVLGYAAGSYTRLYKVFPFSKTEACAVYCANLKSCFFISVALLLTVTIIALCIVRETPYTAPPEEAGTVKKHTVPVFGELFGALKDLPRPMWMLLLVTALNWVAWFPFLLFDTDWMGKEVYGGKVGEGSLYDKGVRVGALGLMLNSVVLGVASLGVQVTARGLGGVKRLWGSVNLLLAICLAMTVLITKMAQHHREYASVGGAAPTLQPPVHGVKIGALALFSVLGIPLAATFSIPFALASIYSSNSGAGQGLSLGVLNLAIVIPQMFVSVASGPWDALFGGGNLPAFVVGAVAATVSGIIALTALPSPPSDVKILATGGH

SEQ ID NO: 12267 - protein, 427 aa, Arabidopsis thaliana
MRYDQEAGSSSHSLPSGSSSHSLPPTEDTPLLGPRTLSSQPKTFANVFIAIVGAGVLGLPYTFKKTGWLLGLLTLLFVSSLTFFCMMLLVHTRRKLESLSGFNSITSFGDLGESVCGPAGRLVVDVMLVLSQSGFCVSYLIFVATTMANLLSRGTEHILGLDAASIYLWGCFPFQLGLNSIPSLTHLAPLSIFADIVDVAATLVVMVQDVFIFLKRRPPLRVFGGVSVFFYGLGVAVYAFEGIGMVLPLELEAKYKDKFGRALGLAMGLISIMYGAFGLLGYMAYGEETKDIITTNLGTGVVSTLVQLGLAINLFFTFPLMMQPVYEVVERRLCSSRYSVWVRWATVLVVTLVALLVPNFADFLSLVGSSVCVVLGFVLPSLFHLQAFKNELSITRIVVDVLVFLIGVMIAITGTWTAVHEILTSKA

SEQ ID NO: 12268 - protein, 367 aa, Glycine max
MVVCDFWELSLAQSQRKTPKSNIIMEPSLDLRLGFVPKPLSLFFGDVSGNRDKCDKVVTLDGFVQRLEEELTKVEAFKRELPLCILLLNDAIARLKEEKVKCSGMQDPPLKTSSGGNENENSEKKNWMSSAQLWSTQKSKSRNEEDDRSVPANSINGNSCVPEKEGSQVPSFGLMARASELSHSNSKSVGGDTSSGSSLLRVEVQSQPQPPQHMQQNPRKQRRCWSPELHRRFVDALQQLGGAQVATPKQIRELMQVEGLTNDEVKSHLQKYRLHVRRFPVFSIGQVDNGSWMTQDECGDKSKGNMSQSGSPQGPLTPLLLGGAGSAKGLSSPGRNSVDAEDEQSSDCRNWKGGLHHQQLETDNHSL

SEQ ID NO: 12269 - protein, 424 aa, Brassica oleracea
MATTPMCTEWQFSGNEAAKEAAAAALGAYTSKLMALCDPNGKPILPPSNKAVETSNSAEKAVVKFILSGTGNAYAPSIGLPLAKSAVAEYLNRDLPKKLTAADVFMTVGCKRAIDLAVDILAKPKANVLLPRPGFPWDVVRCIYKKLEVRYYDFIPEQNFEIDFESVKKVTDKNTFAIFIINPHNPNGNTYSEAHLKQLAELAKELSIMVVSDEVFRWTVFGNNPFVPMGKFSSIVPVVTLGSLSKGWNVPGWRTGWLALHDLDGVFRNTKILQAANEFLQINAKPPTVIQAAMPDILERTPKHFFHERGSFLKHKVDIGYSKVKHIPGLTCYMKPEACTFLWTKLDISCFADIEDDQDFCRKLAMEENLVVLPGIAFRQKNWLRHSIDMETQTVEDAFERLKSFCERHSAERGASLKNVNGVN

SEQ ID NO: 12270 - protein, 434 aa, Glycine max
RADSARVVNRPPPPPPFISSSGGSGSNNSGGEFLPPPSPGISLGFSKSTFTYEELARATDGFSDANLLGQGGFGYVHRGILPNGKEVAVKQLKAGSGQGEREFQAEVEIISRVHHKHLVSLVGYCITGSQRLLVYEFVPNNTLEFHLHGKGRPTMDWPTRLRIALGSAKGLAYLHEDCHPKIIHRDIKSANILLDFKFEAKVADFGLAKFSSDVNTHVSTRVMGTFGYLAPEYASSGKLTDKSDVFSYGIMLLELITGRRPVDKNQTYMEDSLVDWARPLLTRALEEDDFDSIIDPRLQNDYDPHEMARMVASAAACIRHSAKRRPRMSQVVRALEGDVSLADLNEGIRPGHSTMYSSHESSDYDTAQYKEDMKKFRKMALGTQEYGASSEYSAATSEYGLNPSGSSSEAQSRQTTREMEMRKMKNNQGFSGSS

SEQ ID NO: 12271 - protein, 347 aa, Saccharomyces cerevisiae
MTTDTTVFVSGATGFIALHIMNDLLKAGYTVIGSGRSQEKNDGLLKKFNNNPKLSMEIVEDIAAPNAFDEVFKKHGKEIKIVLHTASPFHFETTNFEKDLLTPAVNGTKSILEAIKKYAADTVEKVIVTSSTAALVTPTDMNKGDLVITEESWNKDTWDSCQANAVAAYCGSKKFAEKTAWEFLKENKSSVKFTLSTINPGFVFGPQMFADSLKHGINTSSGIVSELIHSKVGGEFYNYCGPFIDVRDVSKAHLVAIEKPECTGQRLVLSEGLFCCQEIVDILNEEFPQLKGKIATGEPATGPSFLEKNSCKFDNSKTKKLLGFQFYNLKDCIVDTAAQMLEVQNEA

SEQ ID NO: 12272 - protein, 504 aa, Thermoplasma acidophilum DSM 1728
MKYGFLEKLYPVFRRYLKDRKHEREDHEWDYEIERHGEIAVRRFIELGPTFIKLGQILSARPDLLPKEYLKSFRLLQDRVDPDPFPLAREIIERNVGKIEDVFEYFNENAISGASLGQVYEAVYHGKKVAVKVNRYNIEERVRNDLIVIKHLLRLAKGRIDNFLYLSIENVVSDFNRRIFDEIDYRKEASNMRAIAANLKEEDRVIVPGIIEELSGKEVLVMEYIEGIKIDDVQRLKDAGLDTKEIALRYDTIFMRMLLKNEIFHADPHPGNVSVREDGSIILYDFGMIGHINDDMRFRLLSLYDGLLNRDPDEIIDALIALNALSPGANRGVIRKGIELAISNFYGRSAEDLEIRELLDVANDVIFQFPFRLPRALVLYMRMSSLLEGVCQQLDPDFKFIRVLQKLLYDEGLIQTLYKQQLKNFLSDTLRSVEKAVQIVPLMKRRLESEDETVRPQRDYRIPASIFLGFILLSLFIEEKTRPLVFIPLIAIDIVAFLYIMIRK

SEQ ID NO: 12273 - protein, 239 aa, Eriobotrya japonica
MGGGRVQLKRIENKINRQVTFSKRRTGLLKKAHEISVLCDAQVAVVVFSNKGKLFEYATDSCMEQILERYERYSYAERQLVEPEFESQGNWTFEYCRLKAKVEVLQRNHRHYLGEDLDSLTLKEIQNLEQQLDTALKQIRLRKNQLMHESISELQRKRKAIQEENNLLAKKIKEKEKAAAQPQVQDWEQQNIGLDLLPQPLPCLNNGGTQQDEFLQVRRNQLDLTLEPLYSCHLGCFAA

SEQ ID NO: 12274 - protein, 276 aa, Oryza sativa
  misc_feature (199)..(199): Xaa can be any naturally occurring amino acid
  unsure (1)..(276): unsure at all Xaa locations
MHIYKEQEAEPSTGLMMPEPAPVASPGSGGSGGSGSVGAEKIGSRGKIEIKRIENTTNRQVTFCKRRSGLLKKAYELSVLCDAEVALVVFSSRGRLYEYSNNSVKETIERYKKANSDTSNASTVAEINAQHYQQEAAKLKQQITNLQNSNRELKQLEGRLDKGLGKIRARKNELLCAEIEYMQRRETELQNDNMYLKSXEVAESERGLQTVNMMGSASTSEYVQNMIHYDPRNFLQFNIMHQPQYYPEQEDRKAFMSGKKYSQCNIVRVHSSTNEI

SEQ ID NO: 12275 - protein, 270 aa, Zea mays
  misc_feature (250)..(250): Xaa can be any naturally occurring amino acid
  unsure (1)..(270): unsure at all Xaa locations
MASCRMALLLGLLLLVVASPAIADDDSGIYYQLALMWPGAYCEQTSAGCCKPTTGVSPARDFYITGFTVLNATTDAAVTGCSNKVPYDPNLITGIQGLNQYWSNIRCPSNNGQSSWKNAWKKAGACSGLSEKDYFETALSFRSRINPLVRLKAKGIEPDFGLYGLKAITKVFKSGINATPVIQCSKGPFDKYMLFQLYFCAAGNGTFIDCPAPQQYTCSKEILFHPFKKWMLKQQLNQDDDPFQLPGVAXWTTDTPYRRLCLRFCQVCME

SEQ ID NO: 12276 - protein, 209 aa, Vibrio vulnificus YJ016
MLNKQIMVDADNALAGRQEAMAVEPIHFVNGSDITAPATQGQQEILLGMGCFWGAERLFWQLDGVVSTSVGYSGGFTLNPTYQEVCSGQTGHTEVVRVIFDPQVLPLEQLLEKFWERHDPTQGMRQGNDLGTQYRSAIYTFSDQQLDIALASQQAYQAALANQQHNTITTEIRPAGPYFYAETYHQQYLAKNPEGYCGLGGTGVCFPPA

SEQ ID NO: 12277 - protein, 72 aa, Triticum aestivum
  misc_feature (40)..(40): Xaa can be any naturally occurring amino acid
  unsure (1)..(72): unsure at all Xaa locations
PPFDSGTGWPSYYQPVGDNVKSKLDMSIFFMPRTESLCAXCDAHLGHGFDDGPPPTGKRYCINSASLKFKPQ

SEQ ID NO: 12278 - protein, 534 aa, Saccharophagus degradans 2-40
MRRLARLTRIIHTFCRYRLDALLKDVEVKSRYKLLLFPFWFYPKPDISRGRALRNSLEELGPIFIKFGQLLSTRPDLIPDDIIEELNYLQDRVAPFSNEEFKRIVEQALGNNTNALFKEFSEKPLASASVAQVHTATLHTGEDVVVKVVRPNIEKIIQKDVALLELLARTIEKLSPEGRRFKLSEVVADYKDTIFDELDLKREAANASQLRRNFEGSPLLYVPAVHWQYCTNKVMVMERIYGIPVTDMEKINAQSTNLKLLAERGVEVFFKQVFEHNFFHADMHPGNVFVSPANPQNPSYMAVDMAIIGSLTKEDQYYLARNLLAMFRRDYRQVAELHVMSGWVPANTSISGFESAIRTVCEPIFERPLKDISFGESLVNLFRTARRYNMPVQPQLVLLQKTLLNIEGLGRQLYPDLNLWDTAHPYLEKWLKERYQVKTLFNNLKYHAPEWLEKFPEVPHLVFNALEKLNNQPANEHKQQISSATQRTNKALTWLGYGTLMAGLAITLATYTAIPQSAIVLIAAGATLLAVTKR

SEQ ID NO: 12279 - protein, 492 aa, Gossypium hirsutum
MDPYKHRPSSAFNSPFWTTNSGAPVWNNNSSLTVGPRGQYLLEDYHLVEKLANFDRERIPERVVHARGASAKGFFEVTHDISHLTCADFLRAPGVQTPVIVRFSTVIHERGSPETLRDPRGFAVKFYTREGNFDLVGNNFPVFFIRDGMKFPDMVHALKPNPKSHIQENWRILDFFSHHPESLHMFTFLFDDLGVPQDYRHMEGSGVNTYTLINKAGKAHYVKFHWKPTCGVKCLLEDEAIKVGGANHSHATQDLYDSIAAGNYPEWKLFIQTIDPDHEDKFDFDPLDVTKTWPEDILPLQPVGRLVLNKNIDNFFAENEQLAFCPAIVVPGIYYSDDKLLQTRIFSYSDTQRHRLGPNYLQLPANAPKCAHHNNHHEGFMNFMHRDEEINYFPSRYDPVRHAEMFPIPPAVCTGRREKCIIEKENNFKQPGERYRSWAADRQERFICRWVDALSDPRVTHEIRSIWISYWSQADKSVGQKLASLLNVRPSI

SEQ ID NO: 12280 - protein, 576 aa, Gossypium hirsutum
MAASFSVPSMIMEEEGRFETEVAEVQAWWNSERFKLTRRPYSARDVVALRGSLKQSYGSNEMAKKLWTTLKTHQANGTASRTFGALDPVQVTMMAKHLDSIYVSGWQCSSTHTTTNEPGPDLADYPYDTVPNKVEHLFFAQQYHDRKQREARMSMSREERARTPYVDYLKPIIADGDTGFGGTTATVKLCKLFVERGAAGVHIEDQSSVTKKCGHMAGKVLVAVSEHINRLVAARLQFDVMGVETVLVARTDAVAATLIQTNVDTRDHQFILGATNPNLRGKSLANMLAEGMAAGKNGPQLQAIEDNWLAIAQLKTFSECVMDAIKSMNITEDEKRRRMNEWMNHSSYDKCLSNEQAREIAERLGLQNLFWDWDLPRTREGFYRFRGSVMAAIVRGWAFAPHADLIWMETSSPDMVECTRFAEGVKSMHPEIMLAYNLSPSFNWDASGMTDEHMRDFIPRIAKLGFCWQFITLAGFHADALVTDTFARDFARRGMLAYVEKIQREERNNGVDTLAHQKWSGANFYDRYLKTVQGGISSTAAMGKGVTEEQFKETWTRPGAGNIGSEGNLVVAKARM

SEQ ID NO: 12281 - protein, 564 aa, Shigella flexneri
MSTLKITGMTCDSCAVHVKDALEKVPGVQSADVSYAKGSAKLAIEVGTSPDALTAAVAGLGYRATLADAPSVSTPGGLLDKMRDLLGRNDKTGSSGALHIAVIGSGGAAMAAALKAVEQGARVTLIERGTIGGTCVNVGCVPSKIMIRAAHIAHLRRESPFDGGIAATTPTIQRTALLAQQQARVDELRHAKYEGILEGNPAITVLHGSARFKDNRNLIVQLNDGGERVVAFDRCLIATGASPAVPPIPGLKDTPYWTSTEALVSETIPKRLAVIGSSVVALELAQAFARLGAKVTILARSTLFFREDPAIGEAVTAAFRMEGIEVREHTQASQVAYINGVRDGEFVLTTAHGELRADKLLVATGRAPNTRKLALDATGVTLTPQGAIVIDPGMRTSVEHIYAAGDCTDQPQFVYVAAAAGTRAAINMTGGDAALNLTAMPAVVFTDPQVATVGYSEAEAHHDGIKTDSRTLTLDNVPRALANFDTRGFIKLVVEEGSGRLIGVQAVAPEAGELIQTAALAIRNRMTVQELADQLFPYLTMVEGLKLAAQTFNKDVKQLSCCAG

SEQ ID NO: 12282 - protein, 479 aa, Pseudomonas fluorescens Pf-5
MQRPRHLEPQPELHAMQPDASRPSELIYGLDDRPQPLPALLAALQHVLASFVGIITPPLVIGSALGLSTHLPYLISMALMVSGVGTFIQARRPWGIGAGMICLQGTSFAFLGAVLSAGFLVKQRGGSPEDILAMIFGVCFFGALVQIVLSRFIGRLRRVITPLVTGIVITLIGISLIKVGITDLGGGFNAADFGAPGNLGLGLLVLLTIILLNRSNTPWVRLSAIIIGLALGSLAAWFSGKLVPQPLPDLPLISLPLPFRYGFSFDWSAFIPVALIYLISTLETVGDLTANCMLARQPISGPSYISRLKGGVLGDGVSCMIAATFSAFPNTTFAQNNGVIQLTGVASRFVGLYIGLILFCLGLFPLIGALLQQIPKPVLGGATLVMFGSVAAAGVRILAQAPLDRRSMLIIATSFGVGLGIAAQPNLLHLLPKVVQNLFDSAITSGGLTALLMSLLLPESKGAANDANPIPENDTLKAH

SEQ ID NO: 12283 - protein, 214 aa, Methanococcoides burtonii DSM 6242
MENTDQNIEITAETSAAAENTESTSLVPIDEYLAAGVHIGTQQKTQNMMKFVYRVRTDGLYVLDIQSTDERIRSIAHFLSMYDPSRILVVSARQYGQYPATMFSKSVGAVSKVGRFIPGSLTNPVQEGFFEPDVVIVTDPAGDAQVIREAVNVGIPVVALCDTNNMTSNVDLVIPTNNKGRKALSLVYWLLAREIANERDIPFNYEASEFETGL

SEQ ID NO: 12284 - protein, 492 aa, Gossypium hirsutum
MDPYKFRPSSSFDSPFWTTNSGAPVWNNNSSLTVGARGPILLEDYHLVEKLANFDRERIPERVVHARGASAKGFFEVTHDISQLTCADFLRAPGVQTPLIVRFSTVIHERGSPETLRDPRGFAVKFYTREGNFDLVGNNFPVFFIRDGMKFPDMVHALKPNPKSHIQENWRILDFFSHHPESLHMFTFLFDDIGVPQDYRHMDGSGVHTYTLINKAGKSHYVKFHWKPTCGVKSLLEDEAIRVGGANHSHATQDLYDSIAAGNYPEWKLFIQIMDPLHEDRFDFDPLDVTKTWPEDIFPLQPMGRMVLNKNIDNFFAENEQLAFCPSLIVPGIYYSDDKLLQTRIFSYSDTQRHRLGPNYLQLPANAPKCAHHNNHHEGFMNFMHRDEEVNYFPSRYDPVRHAEKHPIPSTVLSGKREKCIIGKENNFKQPGERYRSFSADRQERFINRWIDALSDPRVTHEIRSIWISYWSQADKSLGQKIASRLNVRPSI

SEQ ID NO: 12285 - protein, 343 aa, Synechocystis sp. PCC 6803
MEVNHWIAMADCFFVTGGTGFVGANLVRHLLEQGYQVRALVRASSRPDNLQNLPIDWVVGDLNDGDLHQQMQGCQGLFHVAAHYSLWQKDREALYRSNVLGTRNILACAQKAGIERTVYTSSVAAIGVKGDGQRADESYQSPVEKLIGAYKQSKYWAEQEALTAAQQGQDIVIVNPSTPIGPWDIKPTPTGEIILRFLRRQMPAYVNTGLNLIDVRDVAAGHLLAWQRGKTALTRGDRYILGHENISLQGILAHLSTITGLPAPKNTVPLWLPLTFAWVEEKVLAPLGRSPSVPMDGVKMSAQEMYYDASKAVQELGLPQSSIKQALADAVHWFQNHGYVKTQ

SEQ ID NO: 12286 - protein, 449 aa, Pseudomonas fluorescens Pf-5
MNMPETAPQSLASQLKLDAHWMPYTANRNFQRDPRLIVGAEGSWLVDDKGRKIYDSLSGLWTCGAGHSRKEIQEAVAKQLGTLDYSPGFQYGHPLSFQLAEKITDLTPGNLNHVFFTDSGSECADTAVKMVRAYWRLKGQSTKTKMIGRARGYHGVNIAGTSLGGVNGNRKLFGQAMMDVDHLPHTLLASNAYSRGMPEQGGIALADELLKLIELHDASNIAAVFVEPLAGSAGVLVPPQGYLKRLREICDQHNILLVFDEVITGFGRTGAMFGADSFGVTPDLMCVAKQVTNGAIPMGAVIASSEIYQTFMNQATPEYAVEFPHGYTYSAHPVACAAGLAALDLLQKENLVQSVAEVAPHFENALHGIKGTKNVIDIRNFGLAGAIQIAPRDGDAIVRPFEAGMALWKAGFYVRFGGDTLQFGPTFNSKPQDLDRLFDAVGEVLSKLD

SEQ ID NO: 12287 - protein, 480 aa, Streptomyces lividans
MSAAEGPLVVGRGHVHPVHQGAGRRRATGRVVASGQAPHTVSSGTGRESDPRQWWDALGEALSQCGEAAREAAAVSVGGQQHGLVTLDARGEPVRPALLWNDVRSAPQARRLIDELGGAKAWAERTGSVPSASFTVTKWAWLTEHEPEAARAVKAVRLPHDYLTERLTGEGTTDRGDVSGTGWWASGTEAYDEEILARVALDPALLPRVVRPGEVAGTVRDGHGLPFSKGTLVAAGTGDNAAAALGLGLRPGVPVMSLGTSGTAYAVSQRRPADPTGTVAGFADARGDWLPLACTLNCTLAVDRVASLLGLDREAVEPGTDVTLLPFLDGERTPNLPHFSGLLHGLRHDTTAGQLLQAAYDGAVHSLLGALDLVLDADADPSAPLLLIGGGARGTAWQQTVRRLSGRPVQIPDARELVALGAAAEAAALLTGEDAAAVARRWNTAAGPVLDAVERDEATLNRSPGYSPTGTAAERDAASR

SEQ ID NO: 12288 - protein, 275 aa, Brassica napus
GGAIISDFIPPPSFRRVTSEFLWPDLKKSKGKASKKRSDFFDLDDEFEADFQGFEDDDASFDCEDDDDDVFAKVKPFVFTATTKPLASPPTGSVSGKKIIESGGQAEKSAKRKRKNQYRGIRQRPWGKWAAEIRDPRKGSREWLGTFDTAEEAARAYDAAARRIRGNKAKVNFPEEMVPSVSQKRPSAKKAVAKPNQSPASVQQPTHVSQYCNNSFDNMGHDSSFGDVSFMEEKPQMYNNQFFDVGGNNGYQYFSSDQGSNSLDCSEFGWSDQYP

SEQ ID NO: 12289 - protein, 385 aa, Ralstonia metallidurans CH34
MSEAQPLATPKPKKSVALSGIAAGNTALCTVGRSGNDLHYRGYDILDIADTCEFEEIAHLLVHGKLPTKSELAAYKVKLKALRGLPANVKAALEWVPASAHPMDVMRTGVSVLGTVLPEKDDHNTPGARDIADRLMASLGSMLLYWYHYSHNGRRIEVETDDDSIAAHFLHLLHGEAPSKLWERAMQTSLILYAEHEFNASTFACRVVAGTGSDMYSAICGGIGALRGPKHGGANEVAFEIQKRYDTPDEAEADIRRRVENKEVVIGFGHPVYTISDPRNVVIKEVARKLSKDAGSMKMFNIAERLETVMADAKKMFPNLDWFSAVSYHMMGVPTAMFTPLFVIARTSGWAAHVIEQRVDNKIIRPTANYTGPENLKFVPIEKRA

SEQ ID NO: 12290 - protein, 413 aa, Arabidopsis thaliana
MFRPGGLCFEPITATWLYSELFTNGTLTGLTIHHLKPSKSQRTLADQIRRPSTVASSVMTIECVNPEGLRFNQMKSSSHQTLETRMRPILMKGHERPLTFLRYNRNGDLLFSCAKDHTPTVWFADNGERLGTYRGHSGAVWCCDISRDSSRLITGSADQTAKLWDVKSGKELFTFKFGAPARSVDFSVDDHLAVITTDHFVGTSSAIHVKRIAEDPEDQVGDSVLVLQSPDGKKKINRAVWGPLNQTIVSGGEDAAIRIWDAETGKLLKQSDEEVGHKEAITSLCKAADDSHFLTGSHDKTAKLWDMRTLTLIKTYTTVVPVNAVAMSPLLNHVVLGGGQDASAVTTTDHRAGKFEAKFYDTILQEEIGGVKGHFGPINALAFSPDGKSFSSGGEDGYVRLHHFDSNYFNIKI

SEQ ID NO: 12291 - protein, 439 aa, Solanum tuberosum
MASICKLSNPCFNSTSYGSRSSSTPKFVVHLRTSTFNHRLSAGSKLSLVINPSIRASLCVKCSQADGNGSSVKRTTLHHSSYETQGQSPWYDNLCRPVTDLIPLIDSGVRGVTSNPAIFQKAISTSNAYNDQFRELVQAGKDIDSVYWELVVKDIQDACKLFETIYDKTDGGDGYVSVEVSPRLADDTEGTVEAAKWLHKKVERSNVYIKIPATAPCIPSIKEVISLGISVNVTLIFSLSRYEAVIDAYLDGLEASGLSDLSRVTSVASFFVSRVDTLVDKLLEKIGTPEALDLRGKAANAQAALAYDLYQKKFSGPRWEALVKKGAKKQRLLWASTSVKNPAYPDTLYVDPLIGPDTVSTMPDQALQAFIDHGSVARTIDANLSEAEGIYSALEKLGIDWVFVGSQLELEGVDSFKKSFDSLLDSLQEKANTLKLVNL

SEQ ID NO: 12292 - protein, 139 aa, Solanum tuberosum
NSEKIGEGTYGVVYKARDRVTNETIALKKIRLEQEDEGVPSTAIREISLLKEMQHGNIVRLQDVVHSEKRLYLVFEYLDLDLKKHMDSCPEFSKDPRLVKMFLYQILRGIAYCHSHRVLHRDLKPQNLLIDRRTNVLKL

SEQ ID NO: 12293 - protein, 439 aa, Triticum aestivum
MSTTKVKRRVGKYELGRTIGEGTFAKVRFARNTETGDPVAIKILDKEKLLKHKMVEQIKREIATMKLIKHPNVVRIHEVMGSKTKIYIVLEYVTGGELFDTIVNHGRMREDEARRYFQQLINAVDYCHSRGVYHRDLKPENLLLDSCGNLKVSDFGLSALSQQLKDDGLLHTTCGTPNYVAPEVLEDQGYDGAMADLWSCGVILFVLLAGYLPFEDSNLMALYKKISDAEFTFPPWTSFPAKRLLTRILDPNPMTRITVQEMLEDEWFKKGYKRAEFDEKYDTTLDDVDAVFNDSEEHHVTEKKEEEPVALNAFELISMSAGLNLGNLFDSEQEFKRETRFTSKSSPKEILRKIEEAAKPLGFDIQKKNYKLRLEKVKAGRKGNLNVATEILRVGPSLHMVEVRKAKGDTLEFHKFYKNLSNTLKDVVWKSDDLQIQPS

SEQ ID NO: 12294 - protein, 550 aa, Yersinia enterocolitica
MAAKDVKFGNDARIKMLRGVNILADAVKVTLGPKGRNVVLDKSFGSPTITKDGVSVAREIELEDKFENMGAQMVKEVASKANDAAGDGTTTATVLAQSIITEGLKAVAAGMNPMDLKRGIDKAVIAAVEELKKLYVPCSDSKAIAQVGTISANSDSTVGELIAQAMEKVGKEGVITVEEGPGLQDELDVVEGMQFDRGYLSPYFINKPETGSIELESPFILLADKKISNIREMLPVLEAVAKAGKPLLIIAEDVEGEALATLVVNTMRGIVKVAAVKAPGFGDRRKAMLQDIATLTVGTVISEEIGLELEKTTLEDLGQAKRVVINKDTTIIIDGVGDEAAIQGRVTQIRQQIEEATSDYDKEKLQERVAKLAGGVAVIKVGAATEVEMKEKKARVEDALHATRAAVEEGVVAGGGVALIRAASAITAAGLKGDNEDQNVGIKVALRAMESPLRQIVVNAGEEASVIANNVKAGSGSYGYNAYSEEYGDMIAMGILDPTKVTRSALQYAASIAGLMITTECMITDLPRDDKGADMGAGGMGGMGGMGGMM

SEQ ID NO: 12295 - protein, 220 aa, Ehrlichia canis str. Jake
MKLFLDTVDIDFLKEFSITGLIDGVTTNPSLMSKSNLECQDLILKICSLIPGPVSIEVISTSYKDMIKEGLDISKIADNIVVKLPLTYDGLIACKVLSHEHNVKVNVTLCFSVPQAILSAKSGAYFISPFVGRIDDIGQSGMQLIKDIRDVYTSYNTFNTEILVASVRNITHVIEAAKIGADIVTIPPSIFKQMFTHPLTDKGLESFLQSWNASGKKIFS

SEQ ID NO: 12296 - protein, 308 aa, Zea mays
MAQQLPPRIPTDVHHWPEGGQHGAAAAWADDFAEFAAARRGAHRRSLSDSVAFVEVAPADGGAGEFDRLDDDQLLSMFPPDEAGGSGGGGGSSAAGSRDGGSSDSDGDKRGARGGPAGGASFTGSGGGEQNGVVDAQAPAATGGQAAVVASTELIRDPKRVKRILANRQSAQRSRVRKLQYISELERSVTTLQMANKHETREPGTKPTFWTRPEPDTNEVSVLSPRVAFLDQQRTILSVGNSHLKQRIAALAQDKIFKDAHQEELKKEIQRLRRVYDQQNLRMSAGGAAASDHGPPPPVVRAEKELMS

SEQ ID NO: 12297 - protein, 406 aa, Haemophilus influenzae R2866
MRRTVITGFGIISSIGNNKEEVLASLKAGKSGIEVVPEFVEMNMRSHVAGTIKLNPSEHIDRKVFRFMGDAAAYAYLSMREAIEDAGLTEDQVSNDRTGLVIGAGTGSAHNQLVACDAVRGPRGVKAIGPYAVTKTMASSVSACLATPYKIRGVNYSMSSACATSAHCIGHAVELIQLGKQDIVFAGGAEELSWECATEFDAMGAVSTKYNETPEKASRAYDANRDGFVIAGGGAVVVVEELEHALARGAKIYAEIVGYGATSDGYDMVAPSGEGAERCMKQAMATVDTPIDYINVHGTSTPVGDVKELGAIKNVFGDKIPAISSTKSMTGHSLGAAGAHEAIYTLLMLDNDFIAPSINIETLDEAAEGCNIVTETKENAGLETVMSNSFGFGGTNATLIFKRYNG

SEQ ID NO: 12298 - protein, 455 aa, Solanum tuberosum
KAYDSDPFHPLKNPNGVIQMGLAENQLCLDLIEDWIKRNPKASICSNEGIKSFRAIANFQDYHGLPEFRRAIAKFMEKTRGGRVRFDPERVVMAGGATGANETIIFCLADPGDAFLVPSPYYPAFNRDLRWRTGVQLLPIHCESSNNFKITSKAVKEAYENAQKSNIKVRGLILTNPSNPLGTTLDKYTLKSLLSFTNQHNIHLVCDEIYAATVFDTPQFVSIAEVLDEKEMTYCNKDLVHIVYSLSKDMGLPGFRIGIVYSFNDDVVNCARKMSSFGLVSTQTQYFLAAMLSDEKFVDNFLTESAIRLAKRHKHFTNGLEEVGIKCLKNNAGLFCWMDLRPLLRESTFDSEMSLWRVIINDVKLNVSPGSSFECQEPGWFRVCFANMDDGTVDIALARIRRFVRVEKSGDESSAMEKKQQWKKNNLRLSFSKRMYDESVLSPLSSPIPPSPLVR

SEQ ID NO: 12299 - protein, 451 aa, Penicillium chrysogenum
MATNGSFSHYHAASSAEAIEAEHEYAAHNYHPLPIVFARAQGTSVWDPEGRHYLDFLSAYSAVNQGHCHPKLNAAAVDPSFASTLSSRAFYNDVFPRFAKFVTGYFGFDMVMPMNTGAEAVETGIKIARKWGYKVKGIPENKAVILSAENNFHGRTFAAISLSSDPESRENYGPYLPGIGCTIPGTEKPIAYNDKVALREAFEAAGPNLAGFLVEPIQGEAGIVVPDEDYLQEARALCDKHNVLLICDEIQTGIARTGKLLCHEWSGIKPDLVLLGKAISGGMYPVSCVLGRKDVMLTIEPGTHGSTYGGNPLGCAVAIRALEVVQEENMVERSEKLGHLFRDGLLGIQSPIIQTVRGKGLLNAIVIDESKTNGHTAWDLCMLMKEKGLLAKPTHQNIIRLAPPLVITEEEIQKALDIIKEAVTDLPNLKGASEDKVIPPPEKKVKIALEN

SEQ ID NO: 12300 - protein, 324 aa, Prochlorococcus marinus subsp. marinus str. CCMP1375
MNPNVSSNNNPNWGKEYLWKWKNFSCHWRVLGKQNKKPLILLHGFGASSAHWRNNAQPLAQNGFKVYGLDLIGFGKSEQPGPEKIKKLDNRFWSRQVAAFLHEVVNTENNGKAILIGNSLGGLVAVTTAAFYPELVEAVIAAPLPDPALMNQQSKSLNPRWVLKVKNFLVQAFFKLFPLELLITLIIKTRLINIALQAAYVRSIKKDSDLKRIVIEPTQRKSAAVALRAMCIGMATREELITAPFLLNRINSNTNYPPVLLAWGRQDKFIPLLVGKRLVYKYPWLELIIIENTGHCPHDESPSDFNQYVLDWLRNNSGDHIQQT

SEQ ID NO: 12301 - protein, 454 aa, Vibrio cholerae O1 biovar eltor str. N16961
MEKVMATHFDYLCIGGGSGGIASANRAAMYGAKVALIEAKDLGGTCVNVGCVPKKVMWHGAQIAEAMHLYAEDYGFDVDVKNFNWAKLVESRQAYIGRIHQSYDRVLGNNKVHVIKGFAKFVDAKTVEVNGELYTADHILIAVGGRPSIPNIPGAEYGIDSNGFFELSEQPKRVAVIGAGYIAVEIAGVLNALGTETHLFCRKESPLRSFDPMIIETLVEVMNSEGPQLHTHSVPKQVVKEADGSLTLHLENGQTYNVDTLIWAIGRHPATDAINLAATGVATNEQGYIKVDEFQNTNVAGIYCVGDIMEGGIELTPVAVKAGRQLSERLFNNKLNAKMDYQLVPTVVFSHPPIGTIGLTEPQAIAQYGAENVKVYKSSFTAMYTAVTSHRQPCKMKLVCAGPEETVVGLHGIGFAVDEMIQGFGVAMKMGATKADFDSVVAIHPTGSEEFVTM

SEQ ID NO: 12302 - protein, 437 aa, GIBBERELLA ZEAE PH-1
MSPHAEKTVSRFHATSTDKAIAIEEEYAAHNYHPLPVVFSRAEGVNVWDPEGNHYYDFLSAYSAVNQGHCHPELIKTLTEQAGRLTLSSRAFYNDVFPKWAEKVRSVFGYDMVLPMCTGAEAVETAIKIARKWAYKVKGVPQEKAWIFGVSENFHGRTMTAITLSVDPESRENYGPYVPNVGAINPTTGKAIRYNNIADLEEVLEAHGKETAAFICEPIQGEAGVVVPDDDYLAKVQALCTKHNVLFICDEIQTGIGRTGRMLCSEWANIKPDLVTLGKAISGGMYPVSCVLSSKEVMLVVEPGTHGSTYGGNPLGSAVSIRALEIMEEEDLTAKADKLGNMFRDGLKALNTPILKVIRGKGLLNAVVIDESAANGRTAWDLCLLLKSKGLLAKPTHGDIIRFAPPLVISEEDLKKGLNIIAEAIKELPTVEPAKHH

SEQ ID NO: 12303 - protein, 349 aa, Oryza sativa (japonica cultivar-group)
MKISANFLLNNCARTYTKKKTLKKCKRELVEVVDGLVGVMMTSSNREKPDIESGYDGSSDEDSTENSRAEICPSALCFFDQIVASAQDKKVVLFLDYDGTLSPIVNDPEKAFMSSEMRATVKSVAKHFPTAIVSGRSRDKVFDFVKLTEIYYAGSHGMDILASFADSDSTIEKTKETKLFQPANEFLTMITEVSKSLIEVTKAIKGATVENNKFCVSVHYRNVDKKNWKLVAQVVNNVLKDFPSLKVSTGRKVLEVRPMINWDKGKAVEFLLRSLELDDSETVLPIYIGDDKTDEDAFKVLRERKNGCGILVSQVPKKSEAFFMLRGPSEVVILPVMLNFFAALLIMPS

SEQ ID NO: 12304 - protein, 501 aa, Arabidopsis thaliana
MSCSATDLAVLLGPNATAAANYICGQLGDVNNKFIDTAFAIDNTYLLFSAYLVFSMQLGFAMLCAGSVRAKNTMNIMLTNVLDAAAGGLFYYLFGYAFAFGSPSNGFIGKHYFGLKDIPTASADYSNFLYQWAFAIAAAGITSGSIAERTQFVAYLIYSSFLTGFVYPVVSHWFWSVDGWASPFRTDGDLLFSTGAIDFAGSGVVHMVGGIAGLWGALIEGPRLGRFDNGGRAIALRGHSASLVVLGTFLLWFGWYGFNPGSFNKILVTYETGTYNGQWSAVGRTAVTTTLAGCTAALTTLFGKRLLSGHWNVTDVCNGLLGGFAAITGGCSVVEPWAAIICGFVAALVLLGCNKLAEKLKYDDPLEAAQLHGGCGAWGLIFTALFAQEKYLNQIYGNKPGRPHGLFMGGGGKLLGAQLIQIIVITGWVSATMGTLFFILKKMKLLRISSEDEMAGMDMTRHGGFAYMYFDDDESHKAIQLRRVEPRSPSPSGANTTPTPV

SEQ ID NO: 12305 - protein, 111 aa, Pyrococcus abyssi GE5
MEWEMGLQEEYIELIKRGLKKIEGRLYDEKRRKIKPGDIIVFEGGKLKVRVKALRVYKSFKEMLEKEGIENVLPGVNSVEEGVKIYRKFYDEEREKKYGVVAIEIEPIEEG

SEQ ID NO: 12306 - protein, 213 aa, Triticum aestivum
  misc_feature (143)..(143): Xaa can be any naturally occurring amino acid
  misc_feature (176)..(176): Xaa can be any naturally occurring amino acid
  unsure (1)..(213): unsure at all Xaa locations
MAPLGDAVAPASAAAPGLVVSFGEMLIDFVPDVAGVSLAESGGFVKAPGGAPANVACAISKLGGSSAFIGKFGDDEFGHMLVEILKQNGVNAEGCLFDQHARTALAFVTLKSNGEREFMFYRNPSVDMLLTEAELTLDLIRRXARIFNYGSISLITEPCRSANLAVMGCRQVARIXLCSHDPKGPPVRSCPLGMVPRPRILEHSGREADLHHG

SEQ ID NO: 12307 - protein, 591 aa, Arabidopsis thaliana
METVEAGHDDVIGWFEHVSENACKVQSETLRRILELNSGVEYLRKWLGTVDVEKMDDYTLETLFTSLVPIVSHADLDPYIQRIADGETSPLLTQEPITVLSLSSGTTEGRQKYVPFTRHSAQTTLQIFRLSAAYRSRFYPIREGGRILEFIYAGKEFKTLGGLTVGTATTHYYASEEFKTKQETTKSFTCSPQEVISGGDFGQCTYCHLLLGLHYSSQVEFVASAFSYTIVQAFSFFEEIWREICADIKEGNLSSRITLPKMRKAVLALIRPNPSLASHIEEICLELETNLGWFGLISKLWPNAKFISSIMTGSMLPYLNKLRHYAGGLPLVSADYGSTESWIGVNVDPHLPPEDVSFAVIPTFSYFEFIPLYRRQNQSDICIDGDFVEDKPVPLSQVKLGQEYELVLTTFTGLYRYRLGDVVEVTSFHKGTPKLSFIYRRKLILTINIDKNTEKDLQRVVDKASQLLSRSTRAEVVDFTSHADVIARPGHYVIYWEIRGEADDKALEECCREMDTAFVDYGYVVSRRMNSIGPLELRVVERGTFGKVAERCVGKCGGLNQFKTPRCTTNSVMLDILNDSTIKRFRSSAYD

SEQ ID NO: 12308 - protein, 767 aa, Burkholderia vietnamiensis G4
MVKTHNLGFPRIGAQRELKFGLERYWNGDATRDELTALGAALRRRHWSDQRDLDLAPLGDFAFYDHVLDMSFTLGNLPKRVQDFHGDALDNYFRVARGRSAHSAHEHASCCGGVAAGEMTKWFDTNYHYIVPEFHADTNFSLDPSRLLQQLAEANAQRVNAKPVILGPVTYLWLGKAKDDSDRLALLPKLLPVYGALLDTLTAQGVEWVQIDEPILVTELDADWRRALRTAYEALETRRIKLLLATYFGQLQDNLELAVSLPVDGLHIDAVNARDEVDALARALPPTRVLSVGAIDGRNIWRTDLNAALDWLEPLARQLGERLWLAPSCSLLHVPVDLASEQKLDAEIRSWLAFALQKLAELKLLATALNQGRDTVADALAENAAAIESRRRSPRVHNPAVKSAVARIDARLGNRASAYPQRAAAQSARLKLPLFPTTTIGSFPQTAEIRDARRRFKAGELDEAGYRHAMHAEIERSVREQESLQLDVLVHGEAERNDMVEYFGEQLDGYAFSQFGWVQSYGSRCVKPPILFGDISRPSAMTVEWIAYAQSLTSKPMKGMLTGPVTILNWSFVRDDQPRSVSCYQLALAIRDEVLDLERAGVRVIQIDEAALREGLPLRRAQWPAYLKWAIDAFRIAANGVRDDTQIHTHMCYSEFNDIIASIAEMDADVITIETSRSDMELLDAFDGFRYPNEIGPGVYDIHSPNIPTQEHIVGLMRKAAERIPAQRLWVNPDCGLKTRRWAEVLPALTNMVAAAKTLRSELRNGL

SEQ ID NO: 12309 - protein, 462 aa, Hordeum vulgare
MHAHAAHALGLRVPPPAFPRRRARPRRRPAAAVLATSAAPQRETDPRKRVVITGMGLASVFGSDVDTFYDRLLAGESGVGPIDRFDASSFPTRFAGQIRGFSSEGYIDGKNDRRLDDCIRYCILSGKKALESAGLGAGSDAHVKLDVGRAGVLVGTGMGGLSVFSDGVQNLIEKGYRKISPFFIPYAITNMGSALLAIDVGFMGPNYSISTACATSNYCFYAAANHIRRGEADIIVAGGTEAAIIPIGLGGFVACRALSQRNDDPITACRPWDKERDGFVMGEGAGVLVMESLEHAMKRDAPIIAEYLGGAVNCDAYHMTDPRADGLGVSSCITMSLRDAGVAPEEVNYINAHATSTLAGDLAEVRAIKQVFKNPSEIKINSTKSMIGHCLGAAGGLEAIATIKSITTGWVHPTINQFNPEPEVDFDTVANEKKQHEVNVGISNSFGFGGHNSVVVFAPFKP

SEQ ID NO: 12310 - protein, 379 aa, Bdellovibrio bacteriovorus HD100
MAEVNIYEGALDKGLEGVVACTTKVSFIVGDSLNFRGYTIDDLAANSTFEEVTYLLWNDKLPNAQELAAFSTQLRNEMALSPDFIKVLKAIPTNVHPMGWLRTAVSLMAHWDSDANDNGAEANLRKSVRLTAKMGTLLCAFDAIRKGKEPVAPKADKSMAWNMMYMLGGGAEPKAEHVKVMDTCLILHADHELNCSAFATRVTASSLSDLHSAIVSAIGALKGPLHGGANEQVILMLQKIGTMEKAQQFVKDALAAKEKVMGIGHRVYKNGDPRARILRGMSDKLTKDAGIHHMYEMSTLIDDTMFNEKGLMPNVDFYSATVYFSMGIPTDLFTPIFAASRISGWCAHAFEQYANNRIYRPRGKWAGKEGLKWTPANQR

SEQ ID NO: 12311 - protein, 150 aa, Bacillus halodenitrificans
TKERTFLMVKPDGVQRNLVGEVVKRFESKGLKLAGAKLMVISKDGAAAHYAELGGGPFFGGLVGGATSGPVFAMVWEGLNAAATARQILGATNPSDAAPGTIRGDFGVSAGRNAIHGSDSAGSAAKEIGAFFGGGEAASGTPAAAADIYG

SEQ ID NO: 12312 - protein, 550 aa, Rickettsia typhi str. Wilmington
MTTKLIKHGSKAREQMLEGIDILADAVKVTLGPKGRNVLIEQSFGAPKITKDGVTVAKSIELKDKIRNAGAQLLKSAATKAAEVAGDGTTTATVLARALAREGNKLVAAGYNPMDLKRGMDLAVNAVVEEIKRSSKKINSQEEIAQVGTISSNGDKEIGEKIAKAMEEVGKEGVITVEEAKNFSFDVEVVKGMMFDRGYLSPYFVTNSEKMVAELENPFILLFEKKLSNLQPMLPILEAVVQSQRPLLIIAEDVEGEALATLVVNRLRGGLKVAAVKAPGFGDRRKAMMEDIAILTKGELITEDLGMKLENVNIKNLGTAKRVTISKENTVIVDGNGDKKNIEDRVLQIKSQIAETTSDYDKEKLQERLAKLSGGVAVLKVGGATEVEVKERKDRVEDALAATRAAVEEGVVAGGGVTLLHASQTLTKLKVENKDQQAGIEIVIEALKDPLKQIVKNAGENGGVVVGKLLEHNDKNYGFNAQDMQYVDMIKAGIIDPAKVVRTALQDAASVASLIITTETLIVDEPSDKEEPMPMRGGMGGMGGMGGMDF

SEQ ID NO: 12313 - protein, 755 aa, Oryza sativa
  misc_feature (83)..(83): Xaa can be any naturally occurring amino acid
  misc_feature (95)..(95): Xaa can be any naturally occurring amino acid
  misc_feature (212)..(212): Xaa can be any naturally occurring amino acid
  misc_feature (247)..(247): Xaa can be any naturally occurring amino acid
  unsure (1)..(755): unsure at all Xaa locations
MTVMELKKLPLGFRFHPTDEELVRHYLKGKITGQIRSDADVIPEIDVCKCEPWDLPDKSLIRSDDPEWFFFAPNDRKYPNGSXSNRATEAGYWKXATGKDRVIRSKGDKKKQQVIGMKKTLVFHRGRAPKGERTGWIMHEYRTTEPEFESGEQAGYVLYRLFRKPEEKIERTSTDEVDRSGYSSSSSRSTPDNMEPIEDGNTPLNRESPESXALHESPIDLPALTEAQAAPITMWLADRTDNATTNXSNISHMPHHGLDGGAKASPSAGAFPQLIGSQQNIHDNNELATVSAPMLPHEDFNNFPLGAIGNFDGNMNPRDPVEEFLNQTIADPDEHSSTTSKAQYDSDTGIIPTEFENHGVMQGEFMDDLSGLENLDFWPDDRNPQLSALYEDTPLLPYDSTDQDVLSMDSGAESLQDLFNSMDDSNARNNVWGNEPFLQGTGFPMSWPLQPNSAFPNQGTANRRLMLQLSESLSPDFDVSMTRDECEDEEPGIVVTSKYVNEAPEESTAEKDMPSDGDDAEPTGITILRRRHAPTASSFSDGDDAESTGITILRQHQAPNASLLSDGDDAESTGITILRRRQAPTASSASSFTQQGAAVQRVRLQSNLDAAPCSSVDGSSSCIINEGESERTMEKPEIEENAGSTLAEGGTCHEDDQKEHDASAANAKSVLRLRKTAEGSDKENKQEEEEGVLASHMLVATYPSCSAVDTLKERVERKLKKASCKREDGHLLPSGLWAKADFDLLENDFKGWFGL

SEQ ID NO: 12314 - protein, 95 aa, Rickettsia typhi str. Wilmington
MSFKPLHDRIAIKPIENEEKTKGGIIIPDTAKEKPMQGEIVAVGNGVLNKNGEIYPLELKVGDKVLYGKWAGTEIEIKGEKLIVMKESDVFGIIN

SEQ ID NO: 12315 - protein, 436 aa, Candida albicans SC5314
MSSTPDFKVSSETAREYETKYSAHNYHPLPVVFSKAEGAHVWDPEGKEYLDFLSAYSAVNQGHCHPKIVAALVDQASKLTLCSRAFSSDVFGVYAKYITEYFNYEMVLPMNTGAEAVETGLKLARKWGYDKKGIPSGEAIILSAVNNFHGRTLGVISMSTDPDATTNFGPYLRGVGPQIPGEPEGTLLRYGVIEDVEKAFANAGDKIAAILLEPIQGEAGIVVPPEDYLPRVQELCKKHNVLLICDEIQTGIARTGKMLCYEHSKGVKPDIVLLGKAISGGVMPVSAVLSSKEVMSTLEPGSHGSTYGGNPLACRVAIAALDVVRDENLVERAQKLGALLREKLEELQKESNGMISEVRGKGLLSAIVIDESKTNGRTAWDLCLLMKNHGVLAKPTHDNIIRLAPPLVISEEDLLKGVDSIRKSLKELPNVAKTEH

SEQ ID NO: 12316 - protein, 255 aa, Alkaliphilus metalliredigenes QYMF
MHKGNIVLGTPQEVAKKLGVYVTALAMDSIRKHGGFTIGLSGGSSMDVFAKGILNKEIKASIDWSKWQVFWVDERWVPLTSTDSNYCKSKELFLDHVDIPKNQIHPYDTGLKPDEAARAYENMLSRVFTTGSEEIPQFDLILLGLGEDGHTASLFPQHPLLKEEKHWVSSLMDAPKAPPERMTFTLPLLNRTRHVAYIALGAGKSSILERVFLSNPSQMIPAQLVSPIEGKTQWFVDHDAYKDLGLLKNQNHHPE

SEQ ID NO: 12317 - protein, 339 aa, Sinorhizobium meliloti 1021
MRAIVLHAPGDIRLETRPKPVAGPGEVLLRVASVGVCGSDLPRMLVKGAWKMPLITGHEFSGHIHALGENVEGWEIGELTAIAPLMPCNQCIECKTGNFSRCRDYDYFGSRRDGAYAEFVAVPVENLIKTPQHVDPRAIAMTDPASIALHAIWKAGGITAGQTGAVVGCGPIGLFAIQWMRIMGTSRVIAVDVTEEKLALARQAGADLCILSADFADNKERADLVIEAVGIDSTINAAVMLAAPGGHVTFIGIPVPDVKLSNATFQRFLRQEVSLHGSWNSFGAPFPGPQWTTTVQKFATGELKWEFMISHDLDLAELPGIFQRFAAKDLHFSKVLFRP

SEQ ID NO: 12318 - protein, 151 aa, Synechococcus sp. CC9605
MAERTFIAIKPDGVQRGLVGEILGRFERKGFKLVGLKQITPSRALAEQHYGVHKERPFFAGLVDFITSGPVVAMVWEGDGVIASARKLIGATKPLEAEPGTIRGDLAVNIGRNVIHGSDAAETAQFEIGLWFQASELNDWSPSDQGWRVEG

SEQ ID NO: 12319 - protein, 642 aa, Synechococcus sp. CC9605
MSDSEHWSIQDSAALYGLDRWGDPYFSINGRGHISVQPQGDRGGSLDLVDLVSELKSRNLALPLLIRFDDILEDRLERLHAAFERAIAQYSYAGRYQGVFPVKCNQQRHVVEELVSCGKRWNFGLEAGSKAELLIALSLLDDPEALLICNGYKDRLYIETAILARRLGRQPVVVIEQPDEVDRIIEASKSLGAAPYIGVRAKLSSRSTGRWGSSVGDKAKFGLSIPELLATVERLRDNNLLQDLRLLHFHIGSQINDIAVLKDALQEAGQIYVELTRLGAPMGFLDVGGGLGIDYDGSRTASAASTNYSLQNYANDVVATVRECCEPNGVAVPTLVSESGRAIASHFSLLVFDVLGSSSLPASVPKASGDEPLTVRNLRDTLATIQELSATTDAQLVRLQEAWNDALKFKQDALAAFRLGYMSLPDRATAEQLTWACADGIAQRLPQDQAIPEELAALNKALAGTYYANLSIFRSAPDTWAIDQLFPVVPIQQLDQRPTRLANLADLTCDSDGRLDRFIGDGQPKQLLELHELDGDNLYLIGLFLSGAYQEVMGNLHNLFGTTNAVHIRLSPGGSYRIDHVVRGDTNADVLEAMEHDPRTLLERLRVAAEAAINNGQLRIDESRRLLDHLESSLRQTTYLQD

SEQ ID NO: 12320 - protein, 900 aa, Yarrowia lipolytica CLIB122
MSDQHSAPFRKVAGSDVLESSNPTPGGLDIPECLPDPGWERSEGGGGVPIFRPTMEQFEDFNRFIMEIDKWGMKAGIVKVVPPKEWHESLPALDEVVKGIKIKNPIVQHISGHAGHFRQQNIEKQKSYNIAQWKYLSEQPDYQPPAKRGESRKDFKKRKNIPQDDAIFEDFDYRFDDSEFTTERMDFLEKIYWKTIAYKEPMYGADMPGSLFDDKTRSWNVAHLDNLLNQLDIKIPGVNDAYLYCGLWKSTFAWHLEDIDLYSINYIHFGAPKQWYSVNQEDEAKFYQIMADTFPEDHKACKEFLRHKTFLVSPQLLERHGLTVNRLHHYQGEFVITFPYGYHAGYNLGYNCAESVNFATPQWVPIGKHAHKCLCISDSVGLDVERLERRMLGLPSDSDHSEDDGHQSGVSIGTPDSEIEDHLLPKPHSPSKLKPKARPKSATGRGRGRPKKFHKVEDTKAPLLPALPVAAIEPAPRSLKRSRDTGCVLCPNEIPDFETLPLESSQEKIAHRVCANFVPETRVQNGLVYGYDKIPKGRLDLRCGYCRSKRGACVQCSFPKCVRAYHVTCADMAGVLCETTVDQETPTNVSIDYKCRFHRSKREAKSQAELESCPEIYNYAYSLLPGEICQFQIGGLSDQKRHKHVPLSPSRYAVAAGSGTSNILNGVISAGVVKVNNISEESVEVELLPHRTETLEVLWCWLLPTPTPSFGRGQSNGGTTQGCSSPIAPPYSPISPATDKSLHPAKFSDEPDFPSVLDGYKNPLDTRVTQHIDHPWYTEFYDTRNDPILQRCIHETYTTNSHQRDVCAGIYGMWNGDIWYYIPEVSSHTNDCYNTDINVRVAADVASFKRMRRQANRMKRRNQPLPAHLQSPPRLAPAPPQQQYSPPFGLPVYFPTTSTN

SEQ ID NO: 12321 - protein, 338 aa, Ralstonia eutropha JMP134
MKVFYDKDADLSLIKGKNVTIIGYGSQGHAHALNLKDSGVNVTVGLRKSGASWNKAVNAGLQVKEVAEAVKGADVVMILLPDEQIADVYKNEVHDNIKAGAALAFAHGFNVHYGAVVPRADVDVIMIAPKAPGHTVRATYTQGGGVPHLIAVYQDKSGSARDVALSYATANGGGRAGIIETNFREETETDLFGEQAVLCGGTVELIKAGFETLVEAGYAPEMAYFECLHELKLIVDLIYEGGIANMNYSISNNAEYGEYVTGPRIVTEETKKAMKQCLKDIQTGEYAKSFLLENKAGAPTLSSRRRLNAEHQIEVVGEKLRAMMPWIAKNKMVDQSKN

SEQ ID NO: 12322 - protein, 763 aa, Geobacter metallireducens GS-15
MNLRLTIRNKLFLATLLILFISYAILIQTTVTSINTSLEDNLAKELAENLRYAKDQYFSRAEHLKYALLLPASAQTVQERVERRDRVWLQETARRWKTSLPFAEPFLFVDPQLKVIAGDGESVPENVRELAPIVERALREKRPVSATELVSDRFLCSAGVRDFCSRPPYGDGSVMMITVVVPVLAEGGEALGAIVAGEVIDRDVKQAAGTQEIFGKQVVVAVIRGNRLAPAGVNPAFPYPAAIAPDILDKLERGQSFGGDVTIGGKAYKTAISPLTNSRGDYVGSLYVALSRDDLKGILGDSLKNILVSAAIGIVLTFLTAFHVARRLTMPLNALAGGVRKIESGDLRQRVEVTTADEVGELGEAFNRMARSLEERDRTIRATAHEQAELNRKLQEMNEHLEENVSERTTALQMEMGRLEAILTGMAEGIAVTDREGKVILFNPAAQRIFEMVPPRVMGHTLEELCAGGEFCALADYVRTMKETDDLTPRRDVEMSMKGKKLTISLSPFCDQGGALAGVVMSVRDVTGEEDVDRVKTEFISTVSHELKTPLTSIKGSLQFIHDRGEGFGGMEGELLSVCLRNTDRLIRLVNDILDIARIESGRLEFVPEPQDVRTLVTHSIEELAGYALEHDVSVENRCGQDLPPIYGDRDRLVQVLTNLLSNAIKFSPRGERVVVTAERTSNYVAISVGDRGREILWSDRGKLFKKFQLLDNSDRRQHGGTGLGLAICKEIVEHHHGRIFYNEGTGGGNVFTFTVPVYEEQS

SEQ ID NO: 12323 - protein, 508 aa, Geobacter metallireducens GS-15
MNNLKILIVDDEADIALILKLQLEDAGYRTTRARDGLEALEMLAREHYDLILLDIRMPRLDGIEVLERIRQEWPELVVVMMTAHGSEDIAVEAMKKGAVDYISKPFSSDDMKKRVERAIEYNRTRLENERLQREVEEERRKMEAILQGMAEALVAVDRQGLVMSINRTAAELFGVDAAAVHARPVEELLSAAIPADRLPCRVVLATGEPCLDVAYDLRLPGRIVPVLSSAAPLANAAGEMIGSVEIIRDISALKALEQEREDFVSMLSHDLKTPITAIIGSIDLVKEGRLGPVNPEQSMYLDAAVESCAEMVDMIDTLLDVHRFEAGRMVTTLVEEELGPLLQRTVGRFEPVARHSGLELTLSLPGAPVTFLVDRKQFGRLLGNLLSNALKFTTEGGIEVRAELPENAAAAAQGITPGAYPTERLPREGRYLLVSVSDTGAGIPADSLVTIFDRFVQARNRKMGKSSGTGLGLAFCRKVMDAHHGFIWAESEPDRGSTFRMLFPLGTD

SEQ ID NO: 12324 - protein, 74 aa, Brassica napus
FFQSFGFSLSFGSLRDKISQRYKILSHKTLVNKKKLARKMRQNRPIPTGIRLGTNTTIRYKPRRKHGRKTKLGF

SEQ ID NO: 12325 - protein, 162 aa, Salmonella typhimurium
MRGDFYKQLTNDLETARAEGLFKEERIITSAQQADITVADGSHVINFCANNYLGLANHPELINAAKAGMDSHGFGMASVRFICGTQDSHKALEQKLASFLGMEDAILYSSCFDANGGLFETLLGAEDAIISDALNHASIIDGVRLCKAKRYRYANNDMAELE

SEQ ID NO: 12326 - protein, 404 aa, Frankia sp. EAN1pec
MGGSVSAWSGRDSHPHVPACSLEPRAVQARDVVRPSSRAGHGPAPPGRPPPRQAPRKRPMRATYMYGAGDVRITDVGDPVLEQPTDALVRVVLACICGSDLHPYHSLAATPAGVPMGHEFIGVVEEVGGEVSTLRAGDLVIAPFAWSDGTCEFCREGLHTSCRTGGFFAAGGVGGGQAEAIRVPQADGTLVKVPVPEDSAILPSLLTLSDVFGTGYHAAVRAGVNPRTTVTVIGDGAVGLMAVLSARRLGAEQIILMGRHKARTDLGLEFGATDVVAERGEEGVARVRELTGGDGSHAVLEAVGYRAAYDQALGVVRPGGVISRVGVPQYADAPIGFPSLFGRNITLTGGPAPVRAYIETLLPAVLDGEVEPGKVFDRTVSLEDVPAGYRAMDDRKALKVLVRP

SEQ ID NO: 12327 - protein, 481 aa, Triticum aestivum
MVSSEIPSVTTTHTQRPKLFTGMILLPKGPPDVVLPENVEFDFNDVFGATAVQTPTEVSILTPGSPAPLAESNEEVYNDPVVITKRSHSLVGPTSLVSQSLPLSKLTLHESESSLDLLECLSKEKKSGQGSLSDEELNDTTKENEAVGLDDFELLKLVGQGAFGKVYQVRRKCTSDIYAMKVMRKDKILEKNHAEYMKAERDILTKVDHPFVVQLRYSFQTKYRLYLVLDFVNGGHLFFQLYQQGLFREELARIYTAEIVSAVAHLHANGIMHRDLKPENILLDAHGHAMLTDFGLAKEFDENTRSNSMCGTVEYMAPEIVQGRGHDKAADWWSVGILLFEMLTGKPPFFGGNRDKIQQNIVKEKMKLPTYLSSEVHSLLKGLLHKEAGRRLGSGPGGSDEIKNHKWFKAVNWKKLEARQIKPSFCPNVAGQTCIANFDECWTSMPVLDSPVASPVAADSNFVGFSYVRPEPFLQKPSPLG

SEQ ID NO: 12328 - protein, 317 aa, Capsicum annuum
KVGINGFGRIGRLVARVILQRDDVELVAVNDPFITVDYMTYMFKYDSVHGQWKNNEVKVKDEKTLLFGEKPVTVYGIRNPEEIPWAEAGAEYVVESTGVFTDKDKTAAHLKGGAKKVVISAPSKDAPMFVVGVNEKEYKPDLNIVSNASCTTNCLAPLAKVIHDRFGIVEGLMTTVHSITATQKTVDGPSAKDWRGGRAASFNIIPSSTGAAKAVGKVLPSLNGKLTGMSFRVPTVDVSVVDLTVRLEKEATYDEIKAAIKEESEGKLKGIVGYTEDDVVSTDFIGDNRSSIFDAKAGIALSKTFVKLVSWYDNEWG

SEQ ID NO: 12329 - protein, 313 aa, Capsicum annuum
GFGRIGRLVARVALQRDDVELVAVNDPFISTDYMTYMFKYDTVHGQWKHHELKVQDEKTLLFGEKSVRVFGIRNPEEIPWAEAGADFVVESTGVFTDMDKAAAHLKGGAKKVVISAPSKDAPMFVVGVNENEYKPDLDIVSNASCTTNCLAPLAKVINDRFGIVEGLMTTVHAMTATQKTVDGPSMKDWRGGRAASFNIIPSSTGAAKAVGKVLPALNGKLTGMAFRVPTVDVSVVDLTVRLEKEASYDDIKAAIKEESEGKLKGILGFTEDDVVSTDFVGDSRSSIFDAKAGIALSKKFVKLVSWYDNEWGY

SEQ ID NO: 12330 - protein, 547 aa, Magnaporthe grisea 70-15
MANPPHGGVLKDLLARDAPRNAELAAEAETLPALLLTERQLCDLELIITGGFSPLEGFMTEKDYNGVVKENRLTDGALFSMPITLDLSQQTIDENGVKPGARITLRDFRDDRNLTILTVEDVYRPDKQLEAKEVFGGDPEHPAVNYLFNTAGEFYVGGKLEAVNRLQHYDFTRNPMHRAHRELTVRAARSHHANVLIHPVVGLTKPGDIDHFTRVRVYKALLPRYPNGMAVLGLLPLAMRMGGPREAIWHAIIRKNHGATHFIVGRDHAGPGKNSAGVDFYGPYDAQYAVEKYKDELGIEVVPFQMMTYLPDSDEYAPVDTIEKGVRTLNISGTELRSRLRSGRDIPEWFSYPEVVKVLRESHPPRSQQGFTIFLTGYQNSGKDQIARALQVTLNQQGGRSVSMLLGETVRSELSSELGFSREDRDKNIGRIAFVASELTRSGAAVIAAPIAPFEASRQHARELVEKHGDFYLVWVNTPLEHCEKTDKRGIYKRARAGEIKGFTGVDDPYENPVKPDLTVDVSKQSVRSIVHQIVLTLESKGLLDRL

SEQ ID NO: 12331 - protein, 341 aa, Staphylococcus aureus subsp. aureus MW2
MNNKVLVTGGTGFVGMRIISRLLEQGYEVQTTIRDLSKADKVIKTMQDNGISTERLMFVEADLSQDEHWDEAMKDCKYVLSVASPVFFGKTDDAEVMAKPAIEGIQRILRAAEHAGVKRVVMTANFGAVGFSNKDKNSITNESHWTNEDEPGLSVYEKSKLLAEKAAWDFVENENTTVEFATINPVAIFGPSLDAHVSGSFHLLENLLNGSMKRVPQIPLNVVDVRDVAELHILAMTNEQANGKRFIATADGQINLLEIAKLIKEKRPEIAQKVSTKKLPDFVLSLGAKFNHQAKEGKLLLDMNRNVSNERAKILLGWEPIATQKEAILAAVDSMAKYHLI

SEQ ID NO: 12332 - protein, 457 aa, Glycine max
  misc_feature (275)..(275): Xaa can be any naturally occurring amino acid
  misc_feature (315)..(315): Xaa can be any naturally occurring amino acid
  unsure (1)..(457): unsure at all Xaa locations
MFEGLCLKMEKRGNVLMEKYEFGKLLGQGNFAKVYHARDVRTGESVAVKVIDKEKILKIGLVDQTKREISIMRLVKHPNVLQLYEVLATKTKIYFIIEYAKGGELFNKIAKGRLTEDKARKYFQQLVSAVDFCHSRGVYHRDLKPENLLLDENGVLKVADFGLSALVESHRQKDMLHTICGTPAYVAPEVISRRGYDGTKADVWSCGVILFVLLAGHLPFYDLNLMSLYNKIGKADYKCPNWFPFEVRRLLAKILDPNPNTRISMAKVMENSWFXKGFKPKSGQVKREAVDVALVVSDQIFGLCENTSAAVVEAXASSVKPAHFNAFNIISLSAGLDLSGLFAGNVELDDTKFTFMSSASSIMSTMEDIARVLSMEIIKKDGGLLKLERSKEGRKGPLSIDAEIFEVAPSFHLVELKKSSGDTLEYQKILEDLRPALKDIVGVWQGEQHAVARLCTP

SEQ ID NO: 12333 - protein, 528 aa, Photobacterium profundum SS9
MFFNLEGLLPEAIESIEEQTERAYQQYQKFDKDMDKHIYLRNIQDTNETLFYRLVENHITEMMPIIYTPTVGAACEDFSNIYRRGRGLFISYPNRDRIEDMLNNASRQNVKVIVVTDGERILGLGDQGIGGMGIPIGKLALYTACGGISPAYTLPVVLDVGTNNPQRLSDPMYMGWRHTRISGQEYDNFVDEFIQAVKRRWPDALIQFEDFAQKNAMPLLERYKNKICCFNDDIQGTAAVTVGSLLAACKAAKSKLSEQRISFLGAGSAGCGIAEAIIAQMVSEGISEAQARSQVFMVDRWGLLIDDMPNLLNFQQALVQKRDTVNEWDLADNNVSLLDVMRNAKPTVLIGVSGVPGLFSEDVIREMHAHCKRPIVFPLSNPTSRVEATPADIINWTDGNALVATGSPFEPVVHNGKTYPIAQCNNSYIFPGIGLGILAVNARRVTDEMLMASSRALAECSPLAINGHGALLPPLEDIQKVSRKIAFAVAKKAIEQGKAPKNSDERILDKIDANFWQSDYRNYKRTSF

SEQ ID NO: 12334 - protein, 337 aa, Erwinia amylovora
MSILVTGGAGYIGSHTVLSLLQRGDDVVILDNLSNASRESINRVEKLTGKTATFFEGDLLDRSCLRSVFSAHRISAVIHFAGLKAVGASTRKPLEYYQNNVTGTLVLLEEMRSAGVNQFIFSSSATVYGADAPVPYVETTPIGGTTSPYGTSKLMVEQILRDYAKANPEFKTIALRYFNPVGAHESGQMGEDPNGIPNNLLPYIAQVAIGRLEKLGIFGDDYPTEDGTGVRDYIHVMDLAEGHLKALDHLSAIEGYKAYNLGAGKGYSVLEMVKAFEKASGGTVAYQISPRRDGDLAAFWADATLADKELNWRVSRGIDEMMRDTWNWQSQNPQGDS

SEQ ID NO: 12335 - protein, 640 aa, Corynebacterium glutamicum
MCGLLGILTANGNAEAFVPALERALPCMRHRGPDDAGTWHDADAAFGFNRLSIIDIAHSHQPLRWGPADEPDRYAMTFNGEIYNYVELRKELSDLGYTFNTSGDGEPIVVGFHHWGESVVEHLRGMFGIAIWDTKEKSLFLARDQFGIKPLFYATTEHGTVFSSEKKTILEMAEEMNLDLGLDKRTIEHYVDLQYVPEPDTLHAQISRLESGCTATVRPGGKLEQKRYFKPQFPVQKVVKGKEQDLFDRIAQVLEDSVEKHMRADVTVGSFLSGGIDSTAIAPLAKRHNPDLLTFTTGFEREGYSEVDVAAESAAAIGAEHIVKIVSPEEYANAIPKIMWYLDDPVADPSLVPLYFVAAEARKHVKVVLSGEGADELFGGYTIYKEPLSLAPFEKIPSPLRKGLGKLSKVLPDGMKGKSLLERGSMTMEERYYGNARSFNFEQMQRVIPWAKREWDHREVTAPIYAQSRNFDPVARMQHLDLFTWMRGDILVKADKINMANSLELRVPFLDKEVFKVAETIPYDLKIANGTTKYALRRALEQIVPPHVLHRKKLGFPVPMRHWLAGDELFGWAQDTIKESGTEDIFNKQAVLDMLNEHRDGVSDHSRRLWTVLSFMVWHGIFVENRIDPQIEDRSYPVEL

SEQ ID NO: 12336 - protein, 466 aa, Pseudomonas fluorescens Pf-5
MDQTLKQGELKRGLKNRHIQLIALGGAIGTGLFLGSAGVLKSAGPSMILGYAIAGFIAFLIMRQLGEMIVEEPVAGSFSHFAHKYWGGYFGFLAGWNYWVLYVLVGMAELTAVGKYVQFWWPEIPTWVSAAVFFVLVNLINMMNVKFFGEAEFWFAIIKVVAIVGMIVLGCYMLFSGSGGSQASVSNLWSHGGFFPNGGTGLLMAMAFIMFSFGGLELVGITAAEAAEPRKVIPKAINQVVYRVLIFYVGALAVLLSLYPWDELLVSLNAGGDAYSSSPFVKIFSLIGSDAAAQILNFVVLTAALSVYNSGVYCNSRMLYGLAEQGDAPKALMKLNKQGVPILALGISALITLLCVLVNYLAPHEALELLFALVVAALMINWALISLTHLRFRKAMAEQGVVPSFKAFWSPLSNYLCLAFMVMIVGVMWMIPGIRASVYAIPVWVLVIWGFYLLSRAKKASQPALR

SEQ ID NO: 12337 - protein, 171 aa, Oryza sativa (japonica cultivar-group)
MLGRKQNAQQKGGGGGGRTGGGGGGEIEPVSVDIMEPFMDAISLTAFAAAPSAAAAAAGVPSTASMDWKETAAAHVFMADMPGVRREEVRVEVEEEKVLRISGQRARAAEEKGERWHRVERSSERFVRTVRLPPNANTDGVHAALDNGVLTITIPKDNDRKPHARIIPITN

SEQ ID NO: 12338 - protein, 613 aa, Campylobacter coli RM2228
MQASLGNGAKGEGDNEDLHFADTVKGSDWGCDQEVARMFAQTAPKAVRELASWGVPWTRVTKGPRTVVINAQKTVIEEREEAHGLINARDFGGTKKWRTCYIADATGHCMLYGVANEAIKHQVKIIDRMEAVRVIHDGKKCLGVIARDLTNGQLIAYIARGTMIATGGYGRIYKQTTNAVICEGTGAAIALETGLCRLSNMEAVQFHPTPIVPSGILLTEGCRGDGGILRDVDGYRFMPDYEPEKKELASRDVVSRRMMEHIRKGKGVKSPYGDHLWLDISILGRAHVEKNLRDVQDICKTFNGIDPADEGPKGWAPVLPMQHYSMGGIRTKPTGESQWLDGLFACGEAACWDMHGFNRLGGNSCAETVVAGMIIGDYFADYCKNNGEVIDTNIVKDFLTKEYQYLKSLVDKEGKYSVFEIKNRMKEIMWDKVAIFRTGEGLKEAVDELEKLYKESQNVKVHCKELDCANPELEEAYRVPRMLKVALCVAYGALLRTESRGAHYREDYPKRDDLNWMKRTLTYWVEGESLPRVEYDELDIMKMEMPPAFRGYGAKGNIIENPLSEKRQAEVDAIREKMEAEGKNRHEIQHALMPYELQPKYKALNQRIGVDYE

SEQ ID NO: 12339 - protein, 205 aa, Lycopersicon esculentum
MAVAFHNLNSDSGLKKLDEYLLARSYITGYQASKDDITVYSYLAKSPSAEYVNASRWYKHIDALLRISGVSGEGAGVIVEGSAPITEAVATPPVADSKASAAEEEDDDDDVDLFGEETEEEKKAAEERAAALKASGKKKESGKSSVLMDVKPWDDETDMKKLEEAVRSVHMEGLTYGASKLVPVGYGIKKLQIMLTIVDDLVLRG

SEQ ID NO: 12340 - protein, 389 aa, Methanosarcina mazei Go1
MWSIKNMDLEDTLLMMPGPVSVAPRVLRAMSKPMINHRSAEFAGIYTDCRGILADVFQTKNDIFLLSGSGTAGMEAAVGSVAGSGEKVIAIENGKFGERFKDLAALYAELVPLEFEWGLPVDLEKVKEKLEEGAKAITLVHNETSAGIMNPAAEIGKLAKKYDALFIMDGVTSLGGDEVKVDEWGVDIAIVGSQKCFAAPPGMAAVSVSEKAFEAMNCMKKRLYYNDLKAYKKSGDKPRPETPYTPAIPLFYALQEALHIVKEEGMEARIKRHRTLSEAVRAAAGALNIEMFPQLNEYSQYSNTITALKSPAGIDGEDIKNDMKKRGVIIAGGQERLKSKIFRIGNMGNVTARDVLSTIQQLEIVLHKHGYIDSVGAGTEAATRVIDRL

SEQ ID NO: 12341 - protein, 578 aa, Nicotiana tabacum
MASLGFLFFFLLPLILLELSSSRSVMAAKTRHFKWDVEYIHWSPDGEESVVMGINGQFPGPTIRAKAGDTVAVHLTNKLHTEGVVIHWHGIRQIGTPWADGTAAISQCAINPGETFLYRFKVDKAGTYFYHGHYGMQRSAGLYGSLIVEVGEGEKEPFHYDGEFNLLLSDWWHKGSHEQEVDLSSNPLRWIGEPQTLLLNGRGQYNCSLAARFSKPPLPQCKLRGGEQYAPQILRVRPNKIYRLRVASTTALGSLSLAIGGHKMVVVEADGNYVQPFSVQDMDIYSGESYSVLFKTDQDPTKNYWISINVRGREPKTPQGLTLLNYLPNSASKFPTLPPPIAPLWNDYNHSKSFSNKIFALMGSPKPPPQNHRRIILLNTQNKIDGYTKWAINNVSLVLPTQLYLGSIRYGINAFDTKPPPDNFPKDYDVLKQAPNSNSTYGNGVYMLKFNTTIDIILQNANALAKDVSEIHPWHLHGHDFWVLGYGEGKFSEKDVKKFNLKNPPLRNTAVIFPFGWTALRFVTDNPGVWAFHCHIEPHLHMGMGVIFAEGVHLVKKIPKEALACGLTGKMLMSNKHN

SEQ ID NO: 12342 - protein, 302 aa, Oryza sativa
MALSSSSHLLPFSRPPATFPRARHAGGGRGRAGATGRFIACSSPPPPDVVVTRERGKNAKLIAALEKHNVQSLELPLIKHVEGPDTDRLSAVLRDEKFDWITITSPEAAAVFLEGWKAAGNPKVRIAVVGAGTERVFDEVIQYNDGSLEVAFSPSKAMGKFLASELPRTTETTCKVLYPASAKAGHEIQNGLSNRGFEVTRLNTYTTVSVQDVDPLILKPALSAPVVAVASPSALRAWLNLASQVDNWGNAIACIGETTASAAKKFGLKSIYYPTTPGLDGWVESILEALRAHGQSKEAPGC

SEQ ID NO: 12343 - protein, 515 aa, Methanocaldococcus jannaschii
MCGINGIIRFGKEVIKEEINKMNKAIKHRGPDDEGIFIYNFKNYSIGLGHVRLAILDLSEKGHQPMGYNVDEDKIIYRDDELDRADIIIVYNGEIYNYLELKEKFNLETETGTDTEVILKLYNKLGFDCVKEFNGMWAFCIFDKKKGLIFCSRDRLGVKPFYYYWDGNEFIFSSELKGILAVKEINKKENINKDAVELYFALGFIPSPYSIYKNTFKLEARQNLIFDLDKREIRKYYYWELPDYKPIYDKKKLIEEGKKLLYDAVKIRMRSDVPVGAFLSGGLDSSTVVGVMREFTDLSKLHTFSIGFEGKYDETPYIKIVVDYFKTQHHHYYFKERDFEELIDKYSWIYDEPFGDYSGFPTYKVSEMARKFVTVVLSGDGGDEVFGGYMTHLNGYRMDFIRKLPKFLRVVGSKLPVKKDLNGIANLYLLKEAFRLSLINPEEFYAESIKEDAIRPEIYKKWTIEKLRYCLNKGDNKLGEALRIFDLLFNTLCDNFLVKVDRASMLTLWKLEVHF

SEQ ID NO: 12344 - protein, 293 aa, Hordeum vulgare subsp. spontaneum
MSPTLSLKLKKSSHTPQSSVSSSTKLRLFKKEAACQSPSTLPVAMDMGLEVSSSSPSSSSVSSSPEHAARRASPAKRPAGRTKFRETRHPVYRGVRRRRNTERWVCEVRVPGKRGARLWLGTYATAEVAARANDAAMLALGGRSAACLNFADSAWLLAVPSALSDLADVRRAAVEAVADFQRREAADGSLAIAVAKEASSGAPSLSPSSGSDSAGSTGTSEPSANGVFEGPVVMDSEMFRLDLFPEMDLGSYYMSLAEALLMDPPPTATIIHAYEDNGDGGADVRLWSYSVDM

SEQ ID NO: 12345 - protein, 482 aa, GIBBERELLA ZEAE PH-1
MPPPQLRGFGGGPAVAAPYHQGGFPSHGQPQGGMPGANQYMNANAQLGPFSANGNAFTSGLNSLNTQGFADTGFGSQSARMGFHGPAAALQQSQHGLHQNMLMEHPTIRSQPNKGRIREVWKHNLHEEMAVLRDLVDKYPYIAMDTEFPGVVSRPMGGFRGKSDYHYQCLRTNVDMLKVIQIGLTFFNEDGETPPARPTNDLKLGTAAQKAATNAPFPCSWQFNFKFSITDDMYNEKSIESLQQAGINFELLDRDGIDPHEFASLLIPSGLVCFDNVRWISFHGGYDFGYLTKLLICLPLPNDEVDFDHKMKLYFPTTYDVKHLMKHAIRLHNSGLLTPSDPSSAEILQKFEHKSGLENIAETLKIKRVGSAHQAGSDSLLTGKVFFSMRDKIFAGDIPDEHVGKVWGLGFPDSNSNIISMNQQNNNDGQTNGNAPSTPNTTSVGLATTPGPQGHNGILNTGPMTPGGGGGVFGSFAFGGNR

SEQ ID NO: 12346 - protein, 544 aa, Thermoplasma acidophilum DSM 1728
MKTKIVATIGPASSSPEIMKQMIDNGLSLVRINSAHADIKDVSKITQMVRSINRDVGIMIDLKGPELRTGEFAGGTLKISSGKDYVMGKDIVLNNMNVLSAVQVGDRILMSDGEVSFEVESTDPFTIRALNDGVLRDRSRVNIPGRFIELGTITDRDRAFIREGIADGVDFFALSFVQKSENVDSLRDFVIDSGGDQYIISKIETKSGLDNIEEIVKSSDGIMVARGDLGVELPLKEVVLAQKHIIKTAHEDGDFTIVATQVLESMVNNSSPTRAEISDITNAIIDNADALMLSEESAIGKYPVQAVRTLKEVSDYVEDKVSFDSSYYFKGNTIAYSVARAAKILSDDIKSDGIVALTHTGSTVRMISSLRPKAMVYAATVSESLARKLNIYFGVLPLHMEGNAEDLSFSEIMEYIVRSGRFADGSKLVMTSGDPYFTFGGTNDVKVAVVGKFIGRGYSFGDSLSGTATYGTKGDILMSEDGRIPGTDFRAFIFTSDIKPSLMSSLKGKTVVTKARLVRQIKEGERIYIDGNTGIILMASPDQK

SEQ ID NO: 12347 - protein, 427 aa, Anaplasma marginale str. St. Maries
MVGCMYNFENLWLPYSGVLSPIDAVKVVSGSGCYLELENGRKLLDGISSWWSVCHGYSHPHIVAKMREQVERLSHVMLCSGLVHEGACELASRLMGLAPPGLQKVFFSDSGSMAVEVAMKIAVQYWHIVGKPQKTGFVAFKNAYHGDSMGCMSVSDPMAIHGTQFSGYYPTQHLFDLPVDERDFELLGRKIEQIAHRTAAIVVEPILQAAGGMRIYSPDVLASLLKLAREANILFIVDEVATGFGRIGTMFACEQAKISPDIMVLGKAMTGGMCPLSATLVSSEICGPFESCGERLMHGNTFAANPLACAAANASLDLFEDGSLMSRVQVIEERMGRGLEPLRGLKYVHNIRVKGAVAAMEIAADNFDHLQENFLRKLIDCEIWIRPIGNTVYLMPPLIISDAELEHLLTAVCTLVHSCRERLELVV

SEQ ID NO: 12348 - protein, 222 aa, Triticum aestivum
MVRGKTQMKRIENPTSRQVTFSKRRGGLLKKAFELSVLCDAEVALVVFSPRGRLYEFTSSSMKNTIERYKTVTKDNMSRQTVQQDMEKIKADAEGLSKKLDALEACKSKLLGQNLEECSIEELQSLEVKIERSLLGIRAMKTRRFEEQLSTLRQKEMKLRQDNEELYSQCQKEQHLALEAAAPPAPATLAALPAPVTLEEQGQQVVDVETDLFLGLPGTGRS

SEQ ID NO: 12349 - protein, 1222 aa, Cytophaga hutchinsonii
MSQEHESSFQDPSRDELIQQVKELQIINANQRPEKILQEAFEKINLLVITIDQDGLIVYANEAFLEVIGWEKQRLLGENWKEFLEPGKDKNKEEHIYTLIKKQGFIDQLKRKFLSKEGDYRTIKFNVVIHHPIGNDVHLTTLIGEDITDKKKVIRALKDSNDQLQDLFENANDLIQVFDLDGKIQFVNRAWKDILQYSDEEILKLNFRDIIAKEQVGVTMEHLNNILAGKKDDKFETVFTSKNGRNIQVICSVNVRYEKEKPVSFRGIFHDNTEHMRAERAQNLYYKISTLAINSDRLDSLLDNIHKELRTIIAVNNFHVALYDRDHNYLNFPYYVDENIGPKPISMKRIVGKGLTEYSLFNEEPTFLYEEDINKLSEAGAIELLGPTPKIWLGVPLRLENRTIGVICVKSHSDRNKYKRRHVELLDFISGQIALVIERKRNEEQIIDKTARLNAIFESSSHLIWSVNRKRGLTSFNQNYANAIFRKYQKYPTIYDEGVTKEVLVLSDPEFHDSIDKKYKDAFNGQPQHFEACNTNQNGEIFWRETYLNPIFLPDGRIDEVSGISHDITEKKQWEITIQESEEKFRNIFESFQDIYYRTDLSGYITMISPSGCELSGYTQEEIIGKHISEFFTTPKQQVNLIREVLKTGRVKNYETNVNIKGGESIQSISNIRLIYNNEGKPIGVDGVARDITFLKKASQELYHAKEIAEKSLKVKENFLANMSHEIRTPMNGVIGMIDLLNETPLMEEQRKYVQTIKKSSETLLNILNDILDLSKIEAGKMQLRLAPISIEQTVEKLHALFYQQATLKNIDLLYSIDSNVPKVVLADETRLLQILSNLTSNAIKFTDQGSVRIQISLQSKKDLVNKIRVNISDTGIGIAQDKLNVLFGYFNQVDNSSSKSYGGTGLGLAISKELSKLMNGEIGVQTEANKGSVFWFTFEANESKRLVEAKVETPNAFSSEKTFKDYPKILLVDDNAINLFVASEILRKAGCEIDTAGNGLEAIQKVKENPYRMVLMDIQMPQMDGIEATAEIRKLNLAYTPPIIAMTAYSMKEDKDRFMVNGMDDYIAKPIKAESLISKVKAWLDSNAAKNGHTATQTSDETAVEIPILDLEVFEKLKSLSGAEIIDQIYKEFENESLEQIVDCKNSLAMGDFHNILNKLHTLKGVSGTLGLIELESISRLVESKLKKGDYPELAVDIEKLSEAHNRFIEHYTFILNSNSK

SEQ ID NO: 12350 - protein, 347 aa, Prochlorococcus marinus str. MIT 9312
MKDSNSKEIDSITSEKEINIDNFSRDELLEMLSKMILIRNAEYKIAKGREFGLVGGPVHLGVGQEAIPVGISQYLNNQDKVFGAHRSHSHILSLGIDLKSFFSEILAKSSGISKGMGGSMHLFGGSVGFCGSVPIVGGTVPLAVGTALASKLKEEKVVSISYLGDGAIEEGIVHESLNFARINNCPVIFVVENNLFSSHLNIKLRQPKKLTYRFAKANDIESKVLDGNNLTSICKTGKEFIRRCRDGEGPFFIEALTYRWFGHVDWREDIDVGINRSADDLKYWKKRDPILRLKKSLLKENYFGENHLINLEKDIQKDIDNAWVDALGESSPEWNESLDYVFKSNYK

SEQ ID NO: 12351 - protein, 322 aa, Arabidopsis thaliana
MTRVECFNPHRWIILHVAIIIQSKANAQSFSPSPPDLQTGHTPSKTTVFAVLVTLFFLTGLLSVYIRHCARSNPDSSTRYFRNRANDGSSRRGGLDNAVVESFPVFAYSSVKESKIGSKDLECAICLNELEDHETVRLLPICNHLFHIDCIDTWLYSHATCPVCRSNLTAKSNKPGDEDDGVPLAAMRDHVVVDIETVEVAKSHHRRLSSEISGKFPRSNSTGHSMDRFSDGTERFTLRLPDDVKMRLMAVKGRRLKRTRSFDVDLTAEHYCRSGEESSNTIGSGAKSGRVNWPDRWGLTLFVSKSNSGSVRSQKSNGEPLK

SEQ ID NO: 12352 - protein, 183 aa, Pyrobaculum aerophilum
MPVEKTLLILKPDAVARGLVGEIISRFEKAGLKIVALKMVKASPEEIERFYPSSEEWLRSAGQKLLKAYQELGIDPRAKIGTDDPVEVGRIIKRSLVKYMTSGPIVVMVLKGNRAVEIVRKLVGPTSPHSAPPGTIRGDYSIDSPDLAAEEGRVVFNLVHASDSPSEAEREIRFWFREEEVLE

SEQ ID NO: 12353 - protein, 496 aa, Thlaspi arvense
MDLLYIVAALVIFASLLIAKSKRKPKKNLPPGPPRLPIIGNLHQLGEKPHRAMVELSKTYGPLMSLKLGSVTTVVATSVETVRDVLKTYDLECCSRPYMTYPARITYNLKDLVFSPYDKYWRQVRKLTVVELYTAKRVQSFRHIREEEVASFVRFNKQAASSEETVNLSQKILKMSGSVICRIGFGINLEGSKLENTYQEIIVQAFEVLGSLAAVDYFPVIGTIIDRITGLHAKCEKVFHGIDSFFDQAIQRHIDDPSIKDDIIDLLLKMERGEGSLGEYELTREHTKGILMNILTAGIDTSAQTMTWAMTHLLANPRVMKKLQAEIREKIKNIDEITDDDVEQLDYFKLVLKETFRISPIVPVLVPRVAAKDLKIAGYDVPEKTWIHVNMWAVHMSPSIWKDPETFNPERFIDNQTDFKGLNFELLPFGSGRRMCPGMGMGLAVVHLTLINLLYRFDWKLPNGMKAEELSIEENYGLICVKKLPLEAIPVLTQWT

SEQ ID NO: 12354 - protein, 76 aa, Brassica napus
  misc_feature (58)..(58): Xaa can be any naturally occurring amino acid
  unsure (1)..(76): unsure at all Xaa locations
MAIRKEDESREEQSNSFLLDALYCEEEKWEDEEEEVEENSSFSSSSPTSPLVLLQQDXFWQDKIWSLSSKEEEQDS

SEQ ID NO: 12355 - protein, 494 aa, Pseudomonas fluorescens Pf-5
MRRPGQRHKDGPSQRFIRAHNNKEALKVTTSNKGFEAISNREHGLRRQLTAGQMSMIAIGGAIGTGLFMGSAYAIGYAGPSVLLSYAIGALITLILMGCLAEMTVAHSTSGSFGAYAEFYVSPLAGFLVRYAYWAAIVLAVGAEVTAIAMYMKYWFANVPEWVWIISFSSVLIVLNGISVKTFGNFEYWFSTIKIAAIVGFIILAVYVVFGSGNPDYGLHNYSAHGGFFPNGFEGMWIAVIVSIFSYLSVEMIAVAAGEAKDPQRAVKQAFRATIVRLVVFYLLTLALMLAIVPWAQAGKAQSPFVTVMQTIGIPGATGVMNFVILIAALSAMNSQLYITTRMMFSLSRAGYAPKSMGALSKNGIPLNALLLSSSGIALATLVNVLYPESSFTLMMAISMFGAIFTWFMIFLTHYCFRRYHQRHGEQQLSFRMRLFPYSTLLGLVLMGAVMITTFFTEAFKMTLVFGVPFLLLLTLVYYLCFRKPRVVAGLSEV

SEQ ID NO: 12356 - protein, 508 aa, Zea mays
MQPDPSGNTNAKAKLPLMAPAPSSGRPASVLPYKTANVRDHYRIGKKLGQGQFGTTYHCVGKADGAEYACKSIPKRKLLCREDYEDVYREIQIMHHLSEHPNVVRIRGAYEDALFVHIVMELCAGGELFDRIVAKGHYSERAAANLIKTIVGVVEGCHSLGVMHRDLKPENFLFASTAEEAPLKATDFGLSMFYKPGDKFSDVVGSPYYVAPEVLQKCYGPEADVWSAGVILYILLCGVPPFWAETESGIFRQIMRAKLDFESEPWPSISDSAKDLVRNMLTRDPKKRFSAHEVLCHPWIVDDAVAPDKPIDSAVLSRLKHFSAMNKLKKMALRVIAESLSEEEIGGLKELFKMIDTDNSGTITFDELKDGLKRVGSELTENEIQALMEAADIDNSGTIDYGEFIAATLHMNKLEREENLVSAFSFFDKDGSGFITIDELSQACREFGLDDVHLEDMIKDVDQNNDGQIDYSEFTAMMRKGNAGATGRRTMRNSLHLNLGELLNPSKT

SEQ ID NO: 12357 - protein, 411 aa, Anaplasma phagocytophilum
MVEKAVLECGDRRISLPVLRGTDGTPVVDITTLYRENNVLTYDPGFMSTAACRSEITFIDGNKGTLRYRGIDIENLIGTPNSFSSIVYLLLKGTLPSETEHEEFVRILGAEYDVPEQVMNVIRSFPRDSHPMAILIASFSALAANYHASRIDPLTGAIIAIAKVPGIVASIYRHTANLDFIQADANLEYTHHFIRMMFGDMDDAHRDIMHKALDAIFIMHADHEQNASTSTVRMTGSSGAGLFACLCAGVATLWGPAHGGANEAVIKMLAEIGSPENVSSFIDKVKNNKGKSRLMGFGHRVYKSYDPRARVLRTICKDVLDSLGRDENLLAVAEELESQALQDEYFIERKLYPNVDFYSGIVLRAMGVPVDMYTAFFALARTSGWASQWYEMIQSDEGKRISRPRQLYTGK

SEQ ID NO: 12358 - protein, 359 aa, Glycine max
  misc_feature (180)..(180): Xaa can be any naturally occurring amino acid
  misc_feature (199)..(199): Xaa can be any naturally occurring amino acid
  unsure (1)..(359): unsure at all Xaa locations
MGYEYLLGGIIASSLVLVFVVYGSVSKKMTKGSVVHAESNGGSIIRTSSENRNHHQEISETTDIIIVGAGVAGAALAYTLGKEGRRVHVIERDLTEPDRIVGELLQPGGYLKLIELGLQDCVGEIDAQPVFGYALYKDGKNTKLSYPLENFASDVSGRSFHIGRFIQRMREKARGTHNNXNKEKQHIPVLLVDANNMRXPLTGRRMTVALSDIVVLRDLLRPLHDLHDATALCRYLESFYTLRKPVASTINTLAGALYKVFCASPDPASKEMRQACFDYLSLGGVFSDGPIALLSGLNPRPRGLVLHFFAVAIYGVGRLLIPFPSPKRMWIGARLISVSTSHFPFCSNNIQNISHITYC

SEQ ID NO: 12359 - protein, 571 aa, Legionella pneumophila str. Paris
MLDFSLNRDPQTGELYIETSLCGKPLLTTPQLNKGTAFTQEERKDFGLLGKLPHRVETLDEQVKRAYLQYSSYTTRLQQHIYLNNLHDKNQIVFYKLLSRHLGEMLPIIYTPIVGAAAKRFSHEYRQPRGLYIAHSDKNQLEEIINNRSNPDIDLVVVTDGEGVLGIGDQGIGGMDIPVAKLMVYSLCGGIDPTRTLPIFLDVGTNNQELLNDPMYLGCRHPRIKSSEYDDFIKTFVNEIHKQFPNAFLHWEDFGRGNARRILDQFQDELCTFNDDIQGTGAVTLAAILAACDVTGLPLHEHRIVVFGAGSAGTGISDQIVDAMVKSGLSLTDAYDRFWLIDKQGLLLATDQELTDAQKPYAWNPIDIQSWEINNKQHPSFTDTIRHVKPTILIGCSAQTGAFSQDIVETMSTACERPIIFPLSNPDEKCEAQPSDILAWSKGRALIATGTAFAPIEYQNRMVQIAQCNNALVFPGIGLGVLAVSASRLTKDMILAAAQTLSKFAPSKKDSFLPLLPSLDNAQIVAKEIAIAVAQCAIDSGYAQKNQDKDLPRLIDELFWEPRYLPFRKRG

SEQ ID NO: 12360 - protein, 976 aa, Synechococcus sp. CC9605
MTQTPSFPLLEHPAFCGVSDASVSRLERECNVLRFDLGGQLSDPNEIPARILVILQGQARLVGRHNGRLTTVGKFGPGSVIGAASLLACSPCENVIAAEEVIACGISDELWRELYATEASFRHWCDQQLWPQELLKLLEALEQNTPEVESSALEKLEDALQTAERCSPDPAAVDAALAAGKLLFVTSAWGELTFGQPIRSSVDLPVCEPFSLRLVALPASGVSDKAQETMDDSSGSRVSASSIQDAEVLPPVSSFSPERNVVDSLRLIRADGSLQETLACFQMLAQLMKLPFRRDAIEKVLQDNLRRGLAPNLQLCGQLAASLGLHVMASRVPARAGTRLQVPSMLPWHGGFALAIASNERGLKLASPNQGIVTLAPDDLAEQFPEGIELLLMERSNSSPDQTFGPGWFWPALKRYRVVLIQVLAASFVVQLFTLANPLLIQVIIDKVISQRSLDTLQVLGIALVVVTILEGVLGSLKTFLFAETTNRIDQRLGAEVIDHLLRLPLGYFDRRPVGELGTRVAELEKIRNFLTGQALTTILDAAFSVIYIAVMLIYSWLLTLIALSVLPIQIGLTMLGAPLFRRQFRAAAEENAKTQSHLVEVLTGIQTVKAQNVEMVSRWRWQGFYSQYIARTFEKTITGTALNQTSQVLQKISQLMVLWIGASMVLNGDLTLGQLIAFRIISGYVTQPLLRLSTIWQNIQELRVSFERLADVIDTPEESDEVDKSKVMLPPLHGDVRFEKLSFRFRPGQPQVLKEVNLEIPAGTFVGIVGQSGSGKSTLMKLLPRLYAPEEGRILIDDYDIGKVELYSLRRQIGIVPQDPLLFSGSVSDNIALTNPEASSEEIVRAARLANAHDFIMDLPSGYSTPVGERGAALSGGQRQRVAIARTLLSNPKLLVMDEATSALDYETERKVFDNLLSSLNDRTVFFITHRLSTIRQADMIVMLHQGAVVEIGTHDDLISQRGRYYALYRQQESS

SEQ ID NO: 12361 - protein, 338 aa, Solanum tuberosum
MANGKIKIGINGFGRIGRLVARVALQRDDVELVAVNDPFISTDYMTYMFKYDSVHGQWKHHELKVKDEKTLLFGEKAVTVFGIRNPEDIPWGEAGADFVVESTGVFTDKDKAAAHLKGGAKKVVISAPSKDAPMFVVGVNENEYKPELDIVSNASCTTNCLAPLAKVINDRFGIVEGLMTTVHAMTATQKTVDGPSMKDWRGGRAASFNIIPSSTGAAKAVGKVLPSLNGKLTGMAFRVPTADVSVVDLTVRLEKEASYEDIKAAIKEESEGKLKGILGYTEDDVVSTDFVGDSRSSIFDAKAGIALSKNFVKLVSWYDNEWGYSSRVIDLICHMAKA

SEQ ID NO: 12362 - protein, 105 aa, Porphyromonas gingivalis
MNIKPLADRVLVKPAAAEEKTVSGIIIPDSAKEKPLKGEVIAVGNGTKDEEMVLKAGDTVLYGKYATEIELEGEKYIIMRQNDVPMDLKRGIDKAVKAVVGLAII

SEQ ID NO: 12363 - protein, 420 aa, Ralstonia metallidurans CH34
MKNAELVRRKDAATPRGVGVMCNFYADRAENSEIWDVEGKRYIDFAAGIAVLNTGHRHPRLVAALQAQLNRFTHTAYQIVPYASYVELAEKINQRAPGRSARKTAFFTTGAEAVENAVKIARAATGRPGVIAFSGGFHGRTMMGMALTGKVAPYKTGFGPFPGEVFHAPYPSALHGVTVEDSRRALEHLFKADIDPRRVAAIIFEPVQGEGGFNVAPPEFVRMLRAVCDEHGILLVADEVQTGFGRTGKLFAMEHYDVAPDLTTMAKSLAGGMPLSAVCGRAEIMDAPAPGGLGGTYAGNPLAVASALAVLDVLESENLIARGAELGERLTARLNSLKPRVPQIAEVRGIGAMVAVEFRRADGSPDAEFTREVQNRALERGLLLLSCGVYGNVIRFLFPLTIQDAVMNEGLDILADVLTR

SEQ ID NO: 12364 - protein, 357 aa, Ralstonia metallidurans CH34
MRAFFSDDQLLHQPRQFMRAGRLCEPTDVPARAAVLQRALDARGIELVAPPDYGRAPLETVHSPAYLDFLTSAFERWMAQATPTLEPGIEVLPNLSPYHSGKIDKTRRGPCPSGSVIAEAGYYLGDLSCPLGPHSWQSILRSAHSAVAAARHVCAPHDGNGMAYALCRPSGHHAHADRAGGFCYVNNSAIAAQTLLERFDKVAVLDVDAHHGDGTQQIFYQRSDVMTISLHADPSSYYPFYTGYATERGHGAGYGYNLNFPLPHGTGDAGFLSALDSALDALRDYRPQALVLALGFDTYKHDPISVLQVGLEAYRGVGERIHALGVPTVVVQEGGYEVDAIGIALEAFLAGFVPAMA

SEQ ID NO: 12365 - protein, 95 aa, Geobacter metallireducens GS-15
MKLRPLQDRILVKRIEEEQVTAGGIFIPDTAKEKPQRGEIVAVGNGKKTEDGKVIPIDLKVGDKVLFGKYAGTDIKVEGEDFLIMREDDILGVIE

SEQ ID NO: 12366 - protein, 546 aa, Geobacter metallireducens GS-15
MAKIIKFDQEGRNAILKGVNTLADAVKVTLGPKGRNVIIEKSFGSPLITKDGVTVAKEIELEDKFENMGAQLVKEVASKTSDVAGDGTTTATVLAQAIYRQGSKLVAAGHNPMEIKRGIDSAVETIVAELQKISKPIKDHKEIAQVGTISANNDKTIGGIIAEAMEKVGKEGVITVEEAKAMETSLETVEGMQFDRGYLSPYFVTDPERMEASLENANILIHDKKISNMKDLLPILEQTAKSGRPLLIIAEDIEGEALATLVVNKLRGVLNICAVKAPGFGDRRKAMLEDIAVLTGGKVISEELGFKLENATFDMLGTAKRVTIDKDNTTIIDGDGSEADIQGRVKQIRAQIEETSSDYDREKLQERLAKLVGGVAVIKVGAATETEMKEKKARVEDALHATRAAVDEGIVPGGGVAYIRSLGALEGISLPAEQQFGVTLIKRALEEPIRQIAQNAGVDGSIVVDKVKNGKDAFGFNAADDEYVDMIAAGIIDPTKVSRSALQNAASVAGLMLTTEAMIADKPKEEAAMPAMPGGMGGMGGMGGMM

SEQ ID NO: 12367 - protein, 163 aa, Ralstonia eutropha JMP134
MLLAIKDFFNSLLLKELFKGMALTGRYLFARKVTVQFPEEKTPISPRFRGLHALRRYPNGEERCIACKLCEAVCPALAITIESDVRADGTRRTTRYDIDLTKCIFCGFCEEACPVDAVVETPILEYHGEKRGDLYFTKDMLLAVGDRYEPQIAAAKAADAKYR

SEQ ID NO: 12368 - protein, 474 aa, Oryza sativa (japonica cultivar-group)
MAFFRGLTAVSRLRSRVAQEATTLGGVRWLQMQSASDLDLKSQLQELIPEQQDRLKKLKSEHGKVQLGNITVDMVLGGMRGMTGMLWETSLLDPDEGIRFRGLSIPERQKVLPTAVKDGEPLPEGLLWLLLTGKVPTKEQVDALSKELASRSSVPGHVYEAIDALPVTAHPMTQFTTGVMALQVESEFQKSPMTKGMSKSKFWEPTYERLLKFDSSPSSSGLSYVYRRIFKGGKTIAADNALDYAANFSHMLGFDDPKMLELMRLYITIHTDHEGGNVSAHTGHLVGSALSDPYLSFAAALNGLAGPLHGLANQEVLLWIKSVIGETGSDVTTDQLKEYVWKTLKGGKVVPGFGHGVLRKTDPRYTCQREFALKYLPEDPLFQLVSKLYEVVPPILTELGKVKNPWPNVDAHSGVLLNHFGLSEARYYTVLFGVSRSIGIGSQLIWDRALGLPLERPKSVTMEWLENHCKKVAA

SEQ ID NO: 12369 - protein, 106 aa, Brassica napus
  misc_feature (17)..(17): Xaa can be any naturally occurring amino acid
  unsure (1)..(106): unsure at all Xaa locations
MEISSPVRCPHTSNGNXLSRSETPAPDHSSSSAARPQQPSDGISKDLGGGQITDEEAQSLNMLKNCSSYPLKEMTGSEIDTNEPKGVSGSESARRRRYEQQTLNGV

SEQ ID NO: 12370 - protein, 249 aa, Triticum aestivum
RFIEDEARYFFQQLISGVSYCHSMQVCHRDLKLENTLLDGSDAPRLKICDFGYSKSSVLHSQPKSTVGTPAYIAPEVLLKKEYDGKIADVWSCGVTLYVMVVGAYPFEDPEEPKNFRKTIQRILNVQYAIPDNVNISPECRHLISRIFVGDPAMRITIPEIRNHSWFLKNLPADLMDDDSMSNQYEEPDQPMQTMDEIMQILTEATIPPACSRINHILTDGFDMDDDMDDLESDSDLDIDSSGEIVYAM

SEQ ID NO: 12371 - protein, 363 aa, Haematonectria haematococca
MPITKYKAAAVTSEPGWFDLEAGVVKTIDFINEAGQAECKLVAFPEVWIPGYPYWMWKVTYLQSLPMLKKYRENSLTVDSEEMRRIRRAARDNQIYVSLGFSEIDHATLYLAQVLIGPDGSVVNHRRKIKPTHVEKLVYGDGPGDTFMSVSETDIGRVGQLNCWENMNPFLKALNVSCGEQVHIAAWPVYPGRERQVAPDPATNYADPASDLVTPEYAIETGAWTLAPFQRLSVEGLKKNTPEGVEPETDPSVYNGHARIYRPDGSLVVKPDKDFDGLLFVDIDLNETHLTKVLADFAGHYMRPDLIRLLVDTRRKELITEADPVGTIATYTTRHRLGLDKPLDGEKKEKEATKGRDSEAEEL

SEQ ID NO: 12372 - protein, 537 aa, GIBBERELLA ZEAE PH-1
MASTPPQADYGKEAVLDVSENQDVETGEVKNGGLQRDLKNRHMQMIAIGGAIGAGLFVGSGGALQKGGPAALLIGYLIIGIMLLCTCLALAEMAVLYPVNGAFFTYICRFVDPSWGFAMGWQYALAWLTVLPFELIAASITIKFWREDINMAVWVSVFLVTLIGIQFFGVRGYGEVEFVLSIIKICACVGFIILGIVINCGGVGDQGYIGVKYWQDPGAFTSFKGFCAVFVVAAFSFGGTEMVGLAAAESADPRRSIPMASKQVFWRIAIFYILNLFIVGLILPANDPRLMGASGANTKASPFVLAIQDAGIKVLPSIMNAVITVAVLSVANSCTFGSTRTIQAMAERNMAPGFFKYIDSKGRPLYCVLLQIAFGLLAYIGAAPQGMEIFGWLLALTGLGFLFVWGSICLAHIRMRAGMKAQGVNLGLIPYKTPFGVAGSYLGLGLNILALIASFYTALYPASGASPAAEAFFSSYLAFFSVTLLYVGYKVCTRKWQMYVRPSEMDLSTGAVFLEEEEPKEPFVWADAPKRVLRSFF

SEQ ID NO: 12373 - protein, 328 aa, Arabidopsis thaliana
MRPILMKGHERPLTFLRYNRNGDLLFSCAKDHTPTVWFADNGERLGTYRGHSGAVWCCDISRDSSRLITGSADQTAKLWDVKSGKELFTFKFGAPARSVDFSVGDHLAVITTDHFVGTSSAIHVKRIAEDPEDQVGDSVLVLQSPDGKKKINRAVWGPLNQTIVSGGEDAAIRIWDAETGKLLKQSDEEVGHKEAITSLCKAADDSHFLTGSHDKTAKLWDMRTLTLIKTYTTVVPVNAVAMSPLLNHVVLGGGQDASAVTTTDHRAGKFEAKFYDTILQEEIGGVKGHFGPINALAFSPDGKSFSSGGEDGYVRLHHFDSNYFNIKI

SEQ ID NO: 12374 - protein, 800 aa, Oryza sativa
MAGRHAPHLRLAVPPRLSPHPSFRFPTTPLPTPSKTRLHHPSSSPYAAALLRLLALHSLFLLAPAARAPASSFPSLPPLLALLSAAVSLLLPPFSAAAAAHHPFPAVTHLLRPAALLAVTLLLRFASLRLLASPGTLVLAESAGALLARALRRPSRRRVVSVAVASFALFFFASPSSSSSSTSHLLVLLPFASGLVSSADQTPSVRHVTRGRHARAAVFALAAAFLSVPAVLGLFFVGGSDAGDGDGDGGAVLPISQLWWLLLNAAVFGMVLGRRPDYDGSSSRPSVDFAMTFLCTLVLELLYYPKLSLPGFLICGLLLWIASRELAASGYVELGSADVSESVYEAIMGPVRHILNERKSRKIAAFLLINTAYMFVEFTSGFMSDSLGLISDACHMLFDCAALAIGLYASYIARLPANGLYNYGRGRFEVLSGYVNAVFLVLVGALIVLESFERILEPREISTSSLLTVSIGGLVVNVIGLVFFHEEHHHAHGGSCSHSHSHSHSHSHSHSHSHSHVHGHEDHHNHDHALQGVNHNGACCEHHGDANKSHHHDHHHDSSNEESHHNSLTGNSCKENHSHCHGHDHHHHHHHDHSEHHQQSGDHAHQDISNISSDPAILEIPLNSIHTHCSEAHSCNGGLQSSENHNKSRNRHHIDHNMEGIFLHVLADTMGSVGVVISTLLIKYKGWLIADPICSVFISIMIVSSVLPLLRNSAEILLQRVPRSLEKDIKEALDDVMKIKGVIGVHNFHVWNLTNTDIVGTFHLHITTEADKSSIREKASDIFHEAGIQDLTIQIECVKR

SEQ ID NO: 12375 - protein, 325 aa, Zea mays
MTGGGEEQGRSLFGVSLTNRPRWQQFMICSSGFFFGYLVNGICEGFVYLALIRLQGFTVKQMVNPWRTYVRLSAVLMGSNGLTKGSLAFLNYPAQIMFKSTKVLPVMVMGAFIPGLRRKYAFQEYVSAVMLVVGLILFTLADAQTSPNFSMAGVAMVSGALVMDAFLGNLQEAIFKMNPDTTQMEMLFCSTVVGLPFLAVPMVLTGELVTAWTSCSQHLYVYAVLVLEAMATFVGQVSVLSLIALFGAATTAMVTTARKAVTLLLSYLIFTKPLTEQHATGLLLITMGIVIKLLPENKERRPRRLPKNDDDDKPRESREAGEETA

SEQ ID NO: 12376 - protein, 119 aa, Arabidopsis thaliana; identical to SEQ ID NO: 1225

SEQ ID NO: 12377 - protein, 231 aa, Arabidopsis thaliana
MEEEYVRVISITTIGVISWGLIFILVRRIFSSYSFDFSTRIVSTLHATIAVTLATLSIQDWSCPVCPIASTSSLRQMETLAFSLSYMIYDLICSHFDQVLSIDNAVHHSVCILGFVAGLFYQKCGSEMVAALWITEISSPFLHLREILKEIGYRDTDLNLAADVCFATIFSLARMVGGPYLVYVTISADNPILIKAMALGLQLVSAFWFYKILKMMRYKFIKRSMSNKKSA

SEQ ID NO: 12378 - protein, 171 aa, Oryza sativa (japonica cultivar-group)
MAAAPSATSVHDFTVKGVQDASGKDVNLSTYKGKVLLIVNVASQCGLTNSNYTELSQLYEKYKVQGFEILAFPCNQFGGQEPGSNEEIVQFACTRFKAEYPIFDKVDVNGNNAAPLYKYLKSNKGGLFGDSIKWNFSKFLVDKEGRVVDRYAPTTSPLSIEKDIKKLLGSS

SEQ ID NO: 12379 - protein, 94 aa, Lactococcus lactis subsp. cremoris
MLKPLENRVVLRVKEEEEKSMGGIVLTSASQEKPQTAEVIAVGEGKTTNHGTLISPLVKVGDTVIFEKFAGTTVKMDGEEFLILKDSDLLAIVE

SEQ ID NO: 12380 - protein, 216 aa, Arabidopsis thaliana
MANPPTLPISDHSGGGSQSQQPVSTPAFRTFLSRLSSSIRQSLSQRRPWLELVDRSAISRPESLTDAYSRIRRNLPYFKVNYVTIVSLVLALSLLSHPFSLLVLLCLFCAWIFLYLFRPSDQPLVVLGRTFSDRETLGVLVILTIVVVFLTSVGSLLTSALMIGFGIVCLHGAFRVPEDLFLDDQEPANTGLLSFLSGAATSAAVAAASTPASGRV

SEQ ID NO: 12381 - protein, 612 aa, Arabidopsis thaliana
MPEAPKIAALEVSDESLAEKNKNKLQFIEDVTTNADDVQRRVLEEILSRNADVEYLKRHGLEGRTDRETFKHIMPVVTYEDIQPEINRIANGDKSQVLCSNPISEFLTSSGTSGGERKLMPTIEEELDRRSLLYSLLMPVMDQFVPGLDKGKGMYFLFIKSESKTPGGLPARPVLTSYYKSSHFKNRPYDPYTNYTSPNQTILCSDSYQSMYSQMLCGLCQHKEVLRVGAVFASGFIRAIKFLEKHWPELARDIRTGTLSSEITDSSVREAVGEILKPDPKLADFVESECRKTSWQGIITRLWPNTKYVDVIVTGTMSQYIPTLDYYSNGLPLVCTMYASSECYFGVNLRPLCKPSEVSYTLIPNMAYFEFLPVHRNSGVTSSISLPKALTEKEQQELVDLVDVKLGQEYELVVTTYAGLYRYRVGDVLSVAGFKNNAPQFSFICRKNVVLSIDSDKTDEVELQNAVKNAVTHLVPFDASLSEYTSYADTSSIPGHYVLFWELCLNGNTPIPPSVFEDCCLTIEESLNSVYRQGRVSDKSIGPLEIKMVESGTFDKLMDYAISLGASINQYKTPRCVKFAPIIELLNSRVVDSYFSPKCPKWSPGHKQWGSN

SEQ ID NO: 12382 - protein, 542 aa, Lactococcus lactis subsp. cremoris
MSKEIKFSSDARTAMMRGIDILADTVKTTLGPKGRNVVLEKSYGSPLITNDGVTIAKEIELEDHFENMGAKLVSEVASKTNDIAGDGTTTATVLTQAIVREGLKNVTAGANPVGIRRGIELAAETAVASIKEMAIPVHDKSAIAQVATVSSRSEKVGEYISDAMERVGSDGVITIEESKGMQTELDVVEGMQFDRGYLSQYMVSNTEKMVAELDNPYILITDKKISNIQEILPLLEQILKTNRPLLIVADDVDGEALPTLVLNKIKGVFNVVAVKAPGFGDRRKAQLEDLAILTGGTVITEELGLDLKDATLEALGQAAKATVDKDHTTIVEGAGSVGAISDRVAIIKAQIEKITSDFDREKLQERLAKLAGGVAVVKVGAATETELKAMKLLIEDALNATRAAVEEGIVSGGGTALVNAIAALDKLSEEGDIQTGINIVRRALEEPVRQIAANAGYEGSVIIDKLRSEKVGTGFNAATGQWVNMIEEGIVDPAKVTRSALQNAASVAGLILTTEAVVANKPEPAAPAMPPMDPSMGMGGMM

SEQ ID NO: 12383 - protein, 222 aa, Triticum aestivum
MNSRGTHCLEHPNRKKKNTSRWTSSMAVRCHAAATLVSSRAHLSSYLPPLLPSARPRPRTTRSGGGSFRRTAVRAMGAAPSSPSPSGQAPGKADNASLSDEELKKRLTKEQYYVTRQKGTERAFTGEYWNTKTPGIYHCICCDTPLFESSTKFDSGTGWPSYYQPVSDNVKSKLDMSIFFMPRTESLCAVCDAHLGHVFDDGPPPTGKRYCINSASLKFKPQ

SEQ ID NO: 12384 - protein, 345 aa, Uncultured proteobacterium
MNESTKQAIESRALAPRFYTTNCQEIGQYDIEAVRGEWDAMMAAFKRDKNREHFKQNYEFDPAELDADPELKAEFLDLLVSSITAEYSGCVLYQEIERKVDNPEIAQLFRYMARDESRHAGFINRALNKLGVAVDLSVLKQSKEYTYFRPKFIFYATYLSEKIGYARYITIYRHLERNPERRFHPIFNWFYEWCNDEFSHGEAFALLMRANPTLLTGFNKLYIRMFLVLVYSTMYVRDHSRPKLYEAFGMDVTEFDHTVFDITTEISKQVFPMTLNTRDPKFQRGLERLLDLNVRADALENAPGLGAKVRRMSLQVGIGATILRLFLLPTIPNEIPKQVSMRPAW

SEQ ID NO: 12385 - protein, 1120 aa, Ustilago maydis 521
MSNQAQDQPERRDSSSENSSPFKDDEVAADQSVSAHGNTSLNKKDRVSAVRDADASSAREGQQPGVTRIEALYRIFPRNSPIVYTVYASLAAVTICFALDQSTTAAYQLYATRTLGSHAKLFGVIATVEAILNAVSKPFIAKICDIFSRQTAYFLVAVFYTIGFVVVASAQTPAAFAVGRIITEVGQAGFDLVTDIVVADLSPLEWRGVVTALTSSPFIVLPWVGNLIQARLNTGRPEGWRWGYGMFAIMAPVCVAPIILVLMYVDRKAQKAGELSFASSRLETRRAQEQGTVKVQRDSLRDRFANLVQLCKEMDLVGLFLLALSFSLLLVPFSIYKDADKQWRNPSIIAMFVCGGVILGMFLAWEILLASHPVMNKRVWYNRTFLLAVTIDIFYFMGGNARSTYYGSFVLVGTNLSTANWGYVVNALATCALSVFGLAAGFYLRIFHRYKFLQIGGLVIRIVAMGLYLYGRNGNLTTMVVAWSQILNSLGGACSVVGTRVASQASVPHQDLASIISQLALWTRLGGAIGSAIAAGIWTGTLPDYLAATNLTPAQQSRAYNSPTTIKTSYPWNTPLRNQINQAFSKTMKPIFIVALVLAFIPLFAGLLMPNYYLGKTQNAVDGTDNSGRVIESAEDNPNAEINRKNVKYAKATKSDQPGILTVCRGVRLLRRKAIHIVYLIKVGYESKIFAASITLHLFTRVWSVAILYLITVLVALAAFAAMTIDLSLKSNQQKTIAVLGASYAGHRAIQVLVASLPEDWRVVVLERNTHANHLYAFPRMSVVRGHEQKVFIPYTNMFKPALDRRDQHVLLHANVLELDQEQRRVSYELIDDKQSGVQWLHWDFLVYALGSHLPDPINVWSNSEHVNTHDGSKMMGVKWLRDAQDRIEKAESIVIVGGGALGVQLATDIAVTYGSSKKVTLTHSRPQLLPRFDPWMHEKTAARLQELGVELALGSRVDLSTVSEDKKRFKLLDGRELQGDLTLFCLGQTPNTSLLGASSLNDSGMAKVEPTLQLSANERIFVIGDAADAFGAINAGHTAWDQAEVAAKNILALIDNKGQAMKLEEYKPTPPAIKVSLGIDRAIRQTMAGELVEVDSGSIDLNSTNMWTRRGLSTDDLWQ

SEQ ID NO: 12386 - protein, 909 aa, Bdellovibrio bacteriovorus HD100
MTLRLRIFLFNLISVFLATFVVALIGLKIVESTVIDSTYERLTQIRISKTSSIENYFRDLQTAINLISSHELTDDLLRERKVDSLPEFRRLLDNYVLDFNIYDMALINNQGVVVYTTRKDIEDGASVTTDLPQGSKLKDIYTWGVKAQEGSTLFLDFDKDTLNPNSATGFVASPIYRNLRPVGVLVLKISISEIDRITSDNFAWPTHGMGQTGETLIYGEDWSLRNTGRFRVEANQSAQGSLEAEVLSSNRGDEDIKKIENLSEVRELGTDYRGQKVIRSIGKIYLPNGELWYIQTKIDESEAFAVLDRIAIASSAAAVLIFILFFFATFAATGKVVEPIQLLTDRLEKLGTSNLTQKINYNSKDEIGLLVSKYNQLADRLETTTVSKEFLDSVIQSIKAFLFIVKVSHHDDWRQASYMISQANESALKFLGYSLNQISHVDLKQLINTQEEFNNYTWLLQTRLSIEAEITAQDGRRLPILMNWAALPNRTSKDLTFVFVCTDITDRITAEQALIEAREQAVKASQAKSEFLARMSHEIRTPLNAIIGITDILAESDLKPEQSQLVRVCANAGENLLALINDILDISKIEAREVRLEKIAFDLESTTTNICDILKQKATEKDLKFSLTVNLPKNRAPLVIGDPTRLRQILFNLIGNAIKFTQEGEIAVLLDFDSSSQKFVRFTIRDTGTGIPKDKQHLLFQSFVQADSSITRKFGGSGLGLTISKNLVELMGGRIWFQSEEGSGSSFYFTVPYVPTEAPRELAAPEKTQAAETTPRPTMNELTVTRSARILVVDDTEDNRFLLLTYLKKLPFEVVQAENGKEAVEKVLAEPFDLILMDIQMPVMDGYAATRKIRQWEKDQGLKPIPIIAVSANAMAEDMQKSLDVGCSEHVTKPIKKSALLEMIHRYLG

SEQ ID NO: 12387 - protein, 538 aa, Oryza sativa
MAGGGGGGGGAAPAPKHDELTPHPVKDQLPGVSYCITSPPPWPEAILLGFQHYLVMLGTTVIIPTALVPQMGGNNEDKAVVIQTLLFVAGINTLLQSFFGTRLPAVIGGSYTFVVPTISIILAGRYANEPNPHTKFLRIMRGTQGALIVASALQIIFGFSGLWRNVARYLSPLSAAPLVMLVGFGLYELGFPSVAKCVEIGLPELILLVIFAMYLPHAIHMMKSIFDRFAVLFTIPIVWLYAYLLTVGGAYRNAPPKTQFHCRTDRSGIIGGAPWIRVPYPFQWGAPTFDAGEAFAMMAASFVALVESTGAFIAVSRYASATPLPPSVLSRGIGWQGIGILLDGLFGTGNGSSVSVENAGLLALTRVGSRRVVQISAGFMIFFSILGKFGAVFASIPPPIFAALYCIFFAYVGSAGVGFLQFCNLNSFRTKFILGFSVFMGLSVPQYFNEYTSVAGYGPVHTHSRWFNDIVNVIFSSKAFVAGFVAYLLDNTIHRHDSSVRKDRGHHWWDKFRSYRTDTRSEEFYSLPFNLNKFFPSV

SEQ ID NO: 12388 - protein, 346 aa, Glycine max
  misc_feature (173)..(173): Xaa can be any naturally occurring amino acid
  misc_feature (175)..(175): Xaa can be any naturally occurring amino acid
  misc_feature (196)..(196): Xaa can be any naturally occurring amino acid
  misc_feature (209)..(209): Xaa can be any naturally occurring amino acid
  misc_feature (216)..(216): Xaa can be any naturally occurring amino acid
  unsure (1)..(346): unsure at all Xaa locations
MAHFTSSGKSDNLTKEDCIGKSALVVCFGEILIDFVPTVCGVSLAEAPAFKKAPGGAPANVAVGISRLGGSSAFVGKVGADEFGYMLVDILKKNNVETSGMKFDPNARTALAFVTLRADGEREFLFFRNPSADMLLQESELDKNLIKKAKIFHYGSISLIDEPCKSAHLAAMXLXKESGCIPSYDPNLRLALWANXWKAARDGIKWVYXGGSKAGXVLKISEEEITFLTGGDDPYDDNVVLNKLFHPNLKLLIVTEGSEGCRYYTKEFKGRVAGVEVKPVDTTGAGDAFVSGIIYSLASDQSLFQNEEHLRKALYFANVCGAITVTERGAILALPTKEAVFQFAAT

SEQ ID NO: 12389 - protein, 122 aa, Brassica napus
  misc_feature (78)..(78): Xaa can be any naturally occurring amino acid
  misc_feature (100)..(100): Xaa can be any naturally occurring amino acid
  unsure (1)..(122): unsure at all Xaa locations
MTMILYEVLRLYPPVAQLIRAVHKEMKVGDLTLPGGVQISLPILLVQRDTELWGQDAGEFKPERFKDGLSKATKNQVXYFPFFLGPRICLCQRFALFGGXIAIALVLPGISFGVFPSYCDCP

SEQ ID NO: 12390 - protein, 206 aa, Kluyveromyces lactis
MNSEYDYLFKLLLIGNSGVGKSCLLLRFSDDTYTNDYISTIGVDFKIKTVELDGKTVKLQIWDTAGQERFRTITSSYYRGSHGIIIVYDVTDRESFNGVKMWLQEIDRIATSTVLKLLVGNKCDLKDKRVVEYDVAKEFADANKMPFLETSALDSTNVEDAFLTMARQIKESMSQQNLNETTQKKEDKGNVNLKGQSLTNTGGGCC

SEQ ID NO: 12391 - protein, 343 aa, Streptomyces vinaceus
MPTCRVIRNWGVTMDPVEYEMLRHMWFPVARVADLKNGVASGSILGEELVVYGDEGSVTVAQGFCPHRGVALRLGQLRDGALECPYHGWLFETGSGRCTRIPSLPPGRGRPHTALRTHPAEVAYGLVWSCLGDPFLPLPRLPEYVDDSWRLGAGEPYTLNCGMRLLTENFRDKAHFPFVHADSMGHVDKVVQPYRISRDGWRLGWSSSLGSEGVPEDLAEELSHRLDYHITMPVFASICVSSPSGGRRLVAQVATPVSADGKAVRQFWLAGTDAESTAQGAVLADVLGFERQVFEEDHPIVENQWPVEAPLDVHSQVHTPADRFSITYRKVYGELLMNFKESR

SEQ ID NO: 12392 - protein, 285 aa, Glycine max
MAKHDVEGGSFSAKDYHDPPPAPLIDAEELTQWSFYRALIAEFIATMLFLYITVLTVIGYKSQSDVKAGGDVCGGVGILGIAWAFGGMIFILVYCTAGISGGHINPAVTFGLFLARKVSLIRAIMYMVAQCLGAICGVGLVKAFQKAYYNRYGGGANELSEGYSTGVGLGAEIIGTFVLVYTVFSATDPKRNARDSHVPVLAPLPIGFAVFMVHLATIPVTGTGINPARSLGAAVMYNQQKAWDDHWIFWVGPFIGAAIAAFYHQFILRAGAAKALGSFRSNPAI

SEQ ID NO: 12393 - protein, 465 aa, Comamonas testosteroni
MTSQTSKQNTDPTVVNVQTVLNESPFSGFQWGIFFLCFLIVLLDGFDTAAIGFIAPSLLGEWGIDKSHLGPVLSAALFGLAFGALGAGPLADRVGRKTVLIIAAVVMGGASIASGLVHDLQGLTIWRFITGLGLGAAMPNAITLMNEYCPDSKRSFITNCMFCGFPIGSAFGGFIAAWMIPHFGWRSLLIVGGVVPLILAVLMIVMLPESVRFMVLKNYSADRVRKVMVRIAAGTRNAARFVLNDGGEAAAQAQQGPQGLRLVFSQKYLVGTLALWVTYFMGLVIVYGLVNWMPVLFKEAGVPASQAAVIAALFQLGGVGAIFVGLLMDRWNANLIIATGYFLTSLGVAFIGQVLGGGVGMLVASVFIAGLLMNAAQSSMQALAAEYYPTECRASGVSWMLGIGRFGGIAGSFLVAELSRRHLELPLVFMVVAIPGVIAALALLVKNRYAGGAPRTSMLGLGGAH

SEQ ID NO: 12394 - protein, 220 aa, Populus tremuloides
MVRGKTQMRRIENATSRQVTFSKRRNGLLKKAFELSVLCDAEVALIVFSPRGKLYEFASSSMQETIERYRRHVKENNTNKQPVEQNMLQLKEEAASMIKKIEHLEVSKRKLLGECLGSCTIEELQQIEQQLERSVSTIRARKNQVFKEQIELLKQKEKLLAAENARLSDECGAQSWPVSWEQRDDLPREEQRESSSISDVETELFIGPPETRTKRIPPRN

SEQ ID NO: 12395 - protein, 104 aa, Quercus suber
SLDIWDPFDGLFTSVRETSSFSNVRIDWKETPEAHVFKADLPGLKKEEVKVEVEEGRVLQISGERSKEQEEKNEKWHRVERSSGKFLRRFRLPQNAKIDEVKAS

SEQ ID NO: 12396 - protein, 110 aa, Quercus suber
SLDVWDPFEGFAQLSSHSNFPSETSSFAAAKVDWKETPNAHVFKADVPGLKKEEVKVEIEEGRVLQISGERSQEQEEKSDTWHRVERSSGRFSRRFRLPENAKVEEVKAA

SEQ ID NO: 12397 - protein, 357 aa, Frankia sp. EAN1pec
MDAVMLVGGQGTRLRPLTMSAPKPMLPVAGVPVTAHMLARARDAGITRVVLATSYRAEVFEEHFGDGSGHGLELEYVTETEPLGTGGAIRNVASRLRSGADEPVVIFNGDILSGLDIGALVERHTTADAAVTLHLTRVDDPRAFGVVPTDPAGRVTAFLEKTPDPPTNLINAGCYVFRRSLIDTIPAGRPVSVERETFPSLLAAGVPVVGYPDDTYWLDLGTPAAFVLGSRDLVTGRMPSSALPGPVGDRLVLPGSTVATDAKIGGGSTIGAGASVGTGARIDGSVLFDRASVGAGAYVRDSVVGREAVIGNGVVLENVVIGDGAVIEPGNELRAGARVFPGAVLGAGAVRFSSDRA

SEQ ID NO: 12398 - protein, 293 aa, Hordeum vulgare subsp. spontaneum
MSPTLSLKLKKSSHTPQSSVSSSTKLRLFKKEAACQSPSTLPVAMDMGLEVSSSSPSSSSVSSSPEHAARRASPAKRPAGRTKFRETRHPVYRGVRRRGNTERWVCEVRVPGKRGARLWLGTYATAEVAARANDAAMLALGGRSAACLNFADSAWLLAVPSALSDLADVRRAAVEAVADFQRREAADGSLAIAVAKEASSGAPSLSPSSGSDSAGSTGTSEPSANGVFEGPVVMDSEMFRLDLFPEMDLGSYYMSLAEALLMDPPPTATIIHAYEDNGDGGADVRLWSYSVDM

SEQ ID NO: 12399 - protein, 81 aa, Gaertnera acuminata
TPQDEMRAGMSYLHETIWKGVPKFLRRVDTALKNIGINERVPYNAPVIQFSSWMGGDRDGNPRVTPEVTRDVCLLARMMAA

SEQ ID NO: 12400 - protein, 461 aa, Zea mays
  misc_feature (186)..(186): Xaa can be any naturally occurring amino acid
  unsure (1)..(461): unsure at all Xaa locations
MATAAAFSVSSPAASAVAARSKVFGGGVNQARTRTGCRVGITRKNFGRVMMALAVDVSRFEGVPMAPPDPILGVSEAFKADKSELKLNLGVGAYRTEELQPYVLNVVKKAENLMLEKGENKEYLPIEGLAAFNKATAELLLGADNPVINQGLVATLQSLSGTGSLRLAAAFIQRYFPEAKVLISSXPTWGNHKNIFNDARVPWSEYRYYDPKTVGLDFEGMIADIEAAPEGSFVLLHGCAHNPTGIDPTPEQWEKIADVIQEKKHMPFFDVAYQGFASGSLDEDAFSVRLFVKRGMEVFVAQSYSKNLGLYSERVGAINVVCSAPEVADRVKSQLKRLARPMYSNPPIHGAKIVANVVGDPIMFGEWKQEMELMAGRIKNVRQKLYDSLSAKDKSGKDWSFILRQIGMFSYTGLNKAQSDNMTDKWHIYMTKDGRISLAGLSLAKCDYLADAIIDSFHNVN

SEQ ID NO: 12401 - protein, 355 aa, Botryotinia fuckeliana
MTARAPNPASGSRKISFNVSEQYDIQDVVGEGAYGVVCSALHKPSGQKVAIKKITPFDHSMFCLRTLREMKLLRYFNHENIISILDIQKPRNYESFTEVYLIQELMETDMHRVIRTQDLSDDHCQYFIYQTLRALKAMHSANVLHRDLKPSNLLLNANCDLKVCDFGLARSAASQEDNSGFMTEYVATRWYRAPEIMLTFKEYTKAIDVWSVGCILAEMLSGKPLFPGKDYHHQLTLILDVLGTPTMEDYYGIKSRRAREYIRSLPFKKKVPFKTMFPKTSDLALDLLEKLLAFNPVKRITVEEALKHPYLEPYHDPEDEPTANPIPEEFFDFDKNKDNLTKEQLKKLIYDEIMR

SEQ ID NO: 12402 - protein, 250 aa, Triticum aestivum
SPTRAPASASPRTTPSSSRYARVELPRYRMPENSIPKETAYQMITDELMLDGNPRLDLASFVTTWMEPECNKLIMDSINKNYVDMDEYPVTTELQNRCVNMIAHLFNAPINEDEKAIGVSTVGSSEAIMLAGLAFKRKWANKRKEEGKPYDKPNIVTGANVQVCWEKFARYFEVELKEVKLTEGYYVMDPLKAVEMVDENTICVAAILGSTLTGEYEDVKLLNDLLVGKNKETGYAFYLLAVVSQFGKLP

SEQ ID NO: 12403 - protein, 81 aa, Gaertnera brevipedicellata
  misc_feature (55)..(55): Xaa can be any naturally occurring amino acid
  unsure (1)..(81): unsure at all Xaa locations
TPQDEMRAGMSYFHETIWKGVPKFLRRVDTALKNIGINERVPYNAPLIQFSSWMXGDRDGBPRVTPEVTRDVCLLARMMAA

SEQ ID NO: 12404 - protein, 158 aa, Triticum aestivum
  misc_feature (58)..(58): Xaa can be any naturally occurring amino acid
  unsure (1)..(158): unsure at all Xaa locations
MSLIRRSNVFDPFSLDFFDPFEGFPFGSGNSGSGSLVPRTSSDTAAFAGARIDWKETXPEAHVFKADVPGLKKEEVKVEVEDGNILQISGERNKEQEEKTDTWHRVERSSGKFLRRFRLPENAKAEQVKASMENGVLTVTVPKVEAKKPEVKSIHISG

SEQ ID NO: 12405 - protein, 259 aa, Arabidopsis thaliana
MAPVKRRVFKTNNEMAVELAKYTADLSSKFCKERGVFTVVLSGGDLIAWLWKLLEAPYIDSIEWSKWHIFWVDERVCAWDHADSNYKLAYDGFLSKVPVPAENIYAIDNGLGAEGNAELAAERYEECLKQKVNQNIIRTYKSSGFPQFDLQLLGMGPDGHMASLFPGHAQINEKVKWVTSITDSPKPPSKRITLTLPVINCASYNVMAVCDKEQADSVAAALNHTKDLPAGRLTADVEVVWFLDQAAASKLPHGWCSIL

SEQ ID NO: 12406 - protein, 609 aa, Zea mays
MALSASRVQQAEELLQRPAERQLMRSQLAAAARSINWSYALFWSISDTQPGVLTWADGFYNGEVKTRKISNSVELTSDQLVMQRSDQLRELYEALLSGEGDRRAAPARPAGSLSPEDLGDTEWYYVVSMTYAFRPGQGLPGRSFASDEHVWLCNAHLAGSKAFPRALLAKSASIQSILCIPVMGGVLELGTTDTVPEAPDLVSRATAAFWEPQCPTYSEEPSSSPSGRANETGEAAADDVAAFEELDHSGVDIEAMTAAGGHRQEEELREAEALSDDASLEHITKEIEEFYSLCEEMDLQALPLPLEDGWTVDASNFEVPCSSPQPAPPPVDRATANVAADASRAPVYGSRATSFMAWTRSSQQSSCSDDAAPAAVVPAVEEPQRLLKKVVAGGGAWESCGGATGAAQEMSATKNHVMSERKQREKLNEMFLVLKSLLPSIHRVNKASILAETIAYLKELQRRVQELESSREPASRPSETTTRLITRPSRGNNESVRKEVCAGSKRKSPELGRDDVERPPVLTMDAGTSNVTVTVSDKDVLLEVQCRWEELLMTRVFDAIKSLHLDVLSVQASAPGGFMGLKIRAQFAGSGAVVPWMISEALRKAIGKR

SEQ ID NO: 12407 - protein, 435 aa, Wigglesworthia glossinidia endosymbiont of Glossina brevipalpis
MIKNSITNKLYVEAKKIIPGGVNSPARSFYFVKEIPVIAKRSKGPYIFDVDNNKYIDYICSWGASILGHNNYYITSKIIEYSKKGLNFGLLTEIEIKIARLISKYIPSIEMIRMVNSGTEATMSAIRLARSYTKKNKIIKFDGCYHGHADFLLANSNLDPYDLFSSNPISSGIPKNILKDTLICPYNDYESIEKIFDLYPNKIACIIVEPIAGNMGCVLPEKNFLYKLRMLCNKFNSLLIMDEIITGFRISLGGAQSYYNIYPDITCLGKIIGGGLPIGAFGGKKRIMNHVSPSGSVYQAGTFSGNPISMISGYACLKLLKSPDLYNKLNKKTEYLVNELRSSACDNKIPVVINSLGSMFSIFFTNLDKIKCYKDVSSCNYKKFILFFNEIKKLGILFSPSLFESNFITLMHKKKDLEKTIDSANKVFKILKNKV

SEQ ID NO: 12408 - protein, 1019 aa, Arabidopsis thaliana
MSELPEHLLEEILYRVPAMSLKQLGSTCKGWNCLFKDRRFTRKHLDKGPKQFLIHILSLRRLIVMRLRHQGGQYLARGMEPVYWSNKVDSTHDLYDNYTLGSYQNNSYNILAHTGFGYDHEFQIYEINSNSWRIIDATLDFKLGYIGRGVSLKGKTYWIASGEEEKRLGKFLISFDYTTERFERLCLPNKYPCYATLALSVVREEKLSMLSQRGIKSKAEIWVTNKIGETQVVSWSMVLALDLQPKRCIGESGSFLVDEKKRVVVCCDNIRDQGKTTFDSNLPRYHRQKKKGRMIIVFDVESMRLPVTVKATKPSFLVIWIRYSSAASSPTVSLNPSGRLQQTLAGSVEVKGKSLHSGKFSTVKLNPEIAGAGRFFEFRSRFIPASIEFAQESPLCTTLLKDELKIRTVEHLLSALEAKGVDNCRIQIESESSDDREVEVPIFDGSAKEWVDAIQGVGINAAQNHDGESVEKMVAHVNKPVYVCKNDTFVAAFPALETRITCGIDFPQVPAIGCQWFSWRPIHESSFAKDIASSRTFCVYEEVERMREAGLIKGGSLDNAIVCSAEHGWMNPPLRFDDEACRHKILDLIGDLSLVSRGGNGGLPVAHIVAYKNEEEEVRSSTEENENVRSSTEENEYVRSSTEAGRGEDPHEDSDNISESGAIHLQIMERFNQRSGSGKEEEEDTMDLSIKQVDLLNQVEISRVYHCDGLLLCVAKDNSRVVVWNPYLGQTRWIRPRTESNIGDSYALGYDINRNHKILRMVQTRNVSVYRYEIYDLRSNSWRVLEVTPNGEMDPNHPLYGVSVKGNTYFFAHEDSSSGEIDEDGDIIDLEDFLLCFDFTTETFGLRLPLPFHSTIDATVTLSCVRDQQLAVLYHNEGLHSDDRFTTVEFWVTTSIEPNSVSWSKFLTVDMRPLALTGVRFDNDMGATFFIDEDEKVAVVFDLDGYLSTESARYHTAFISGKDGFFKPVTLGVAPNVGEPCPRTGHIPTTYRPPLVCSSTYLPSLVQVNQQRKRKERHV

SEQ ID NO: 12409 - protein, 226 aa, Trichodesmium erythraeum IMS101
MIEKNMSNTDSKLPLWVQDRDKVITNNEGVEWRKGKRPDYSHNDRVFQQESKHDHQKGSLEAIVHNLVRTFEMEVSNKIDPQQWLSVVADKFRMSSNGGKEYTAQETAEQGTYNLFMSQNQYYNPKEETFESSSEVFNTAFPEGFLWEVIEVLSGPPNVTFKWRHWGTFKGNFKEHKPTGKTIEIIGISLARLTEDLKILSIEHYFDNSKFIKDLTAGSCPFNSQK

SEQ ID NO: 12410 - protein, 394 aa, Campylobacter coli RM2228
MINALGLDKESSFKAICEGKSGVKKITLFDTTDFPVQIAAEIENFDPLEVVDGKEVKKIDRFIQLGIKAAREAMQDANFDQNLDKEEFGVVSAAGIGGLPNIEKNSVICSERGPRKISPFFIPSALVNMLGGLISIEHGLKGPNISCVTACAAGTHAIGEAYKSIALGNANKMLVIGAEAAICPVGIGGFASMKALSTRNDDPAHASRPFDKERDGFVMGEGAGALVFEEYEEAKKRGAKIYAELVGFGESADAHHITSPTLDGPLRAMKKALKMAGNPKVDYINAHGTSTPVNDKNETAAIKELFGSEIPAVSSTKGQTGHCLGAAGAIEAVISIMALDNGIMPPTINQFVSDEECDLDYIPNEARKADLRVVMSNSFGFGGTNGCVVFKKVD

SEQ ID NO: 12411 - protein, 389 aa, Alkaliphilus metalliredigenes QYMF
MRQIAEKLTHGIKEELIQLSEYIFNNPELGYEEFKACEAHVKLLKRHGFVVEEGFLDIKTAFKAVYDSGIPGPVVAFLSEYDALPGMGHGCGHNLLGATTTGAGITVSKLMKEMGLRGKVMVFGTPAEETSGAKVQMTNEGAFEDVDVAMQAHPASQHMKSGKSLALEAIQFTFTGKSAHAAASPEEGINALDAAINTFVSINALRQHILPSARIHGIISEGGKAANIVPDLAIAQFYVRATTKTYLQELVEKVKNCARAGAMAAGAKVEFYNYEASYDNLVTNETLSEAYSRRLMEVGVEKIEGAKKGYGSLDLGNISHVGPTIHPYFRICEENIPAHTKAFAAATQTPFAYESMVKTINALALTATDVLEDEKLLKKIKEEFQKAEK

SEQ ID NO: 12412 - protein, 543 aa, Streptococcus pyogenes SSI-1
MAKDIKFSADARAAMVRGVDMLADTVKVTLGPKGRNVVLEKAFGSPLITNDGVTIAKEIELEDHFENMGAKLVSEVASKTNDIAGDGTTTATVLTQAIVHEGLKNVTAGANPIGIRRGIETATATAVEALKAIAQPVSGKEAIAQVAAVSSRSEKVGEYISEAMERVGNDGVITIEESRGMETELEVVEGMQFDRGYLSQYMVTDNEKMVADLENPFILITDKKVSNIQDILPLLEEVLKTNRPLLIIADDVDGEALPTLVLNKIRGTFNVVAVKAPGFGDRRKAMLEDIAILTGGTVITEDLGLELKDATMTALGQAAKITVDKDSTVIVEGSGSSEAIANRIALIKSQLETTTSDFDREKLQERLAKLGGGVAVIKVGAPTETALKEMKLRIEDALNATRAAVEEGIVAGGGTALITVIEKVAALELEGDDATGRNIVLRALEEPVRQIALNAGYEGSVVIDKLKNSPAGTGFNAATGEWVDMIKTGIIDPVKVTRSALQNAASVASLILTTEAVVANKPEPAAPAPAMPAGMDPGMMGGF

SEQ ID NO: 12413 - protein, 483 aa, Brucella melitensis 16M
MAPPLQNRNLSITLEAGISMTGFDYDLFVIGGGSGGVRAGRLAGAIGKKVGLAEEYRMGGTCVIRGCVPKKLFVYASQFPEHFEDSAGYGWSMGEAAFDWKKLIAAKDKEISRLEGLYRKGLENSHVDIFASRAELIDEHTIELKADGRRVTADKILIATGGRPNTHESLPGHEYCISSNEAFHLEELPKSIVIAGGGYIAVEFANIFHGLGVETTLVYRGKEILSRFDHDIRSLLHETMEAKGIRILCGAIFEKVEKKADGKLSVELSNGETLETDQAMLALGRIPNTDGLGLEKAGVKIDKSGAIEVDDYSRTNVENIWAVGDVTNRVQLTPVAIHEAMCFLETAFKDNPTKPDHELIATAVFSQPEIGTVGLSEDEAAKKYPELEIYRALFRPMKNTLSGRSEKTLMKLVVESKSRKVLGAHIMGPDAGEMAQLLGISLKAGATKDDFDRTMAVHPTATEELVTMYKPTYRVVNGKKIEG

SEQ ID NO: 12414 - protein, 479 aa, Haemophilus somnus 2336
MSRRLRRTKIVCTLGPSTDRGNNLEKIIVAGANVVRMNFSHGTPEDHLARAEKVREIAKKLGKTVAILGDLQGPKIRVSTFKEGKIFLNIGDNFTLDADLPKGEGNQEAVGLDYKTLPQDVVPGDILLLDDGRVQLKVLSTDNTKVFTEVIVGGPLSNNKGINKLGGGLSANALTEKDKEDIILAARIGVDYLAVSFPRSSADLNYARELAQQAGLKAKIVAKVERAETVIDDEAMDDIILASDVIMVARGDLGVEIGDPELVGIQKKLIRRSRQLNRVVITATQMMESMISNPMPTRAEVMDVANAVLDGTDAVMLSAETAAGQYPSETVSAMAKVCLGAEKMPSVNISRHRLDKEFDTIEETIAMSTMFAANHMKGVAAIIAMTSSGHTAKLMSRISSGLPIFALSRNESTLNLCALYRGVIPIHFDQDSRTLEGLKAAIQSLKDKGYLVSGDLVLLTQGDHLTSNGTTTCRALVVE

SEQ ID NO: 12415 - protein, 540 aa, Zea mays
  misc_feature (90)..(90): Xaa can be any naturally occurring amino acid
  unsure (1)..(540): unsure at all Xaa locations
MAAMAAAAAAAAGGVGLHLIGAATATLIVAVLVAAVLGRRRRARARAQAPPVEGKPAPEAGCAVGDGAGPDVGTDVIIVGAGVAGSALAXYTLGKDGRRVHVIERDLTEPDRIVGELLQPGGYLKLIELGLQDCVEEIDAQRVLGYALFKDGRNTKLAYPLEKFHSDVAGRSFHNGRFIQRMRQKAASLPNVQLEQGTVTSLLEENGTVKGVQYKTKSGEELKAYAPLTIVCDGCFSNLRRALCSPKVDVPSCFVGLVLENCQLPHPNHGHVILANPSPILFYPISSTEVRCLVDVPGQKVPSIASGEMANYLKTVVAPQIPPEIYDSFIAAIDKGSIRTMPNRSMPAAPLPTPGALLMGDAFNMRHPLTGGGMTVALSDIVVLRNLLKPLRNLHDASSLCKYLESFYTLRKPVASTINTLAGALYKVFSASPDQARNEMRQACFDYLSLGGVFSNGPIALLSGLNPRPLSLVAHFFAVAIYGVGRLMLPLPSPKRMWIGARLISGACGIILPIIKAEGVRQMFFPATVPAYYRAAPTGE

SEQ ID NO: 12416 - protein, 172 aa, Zea mays
MDEKRTTAFGLMQIDEEWRIIEFAKKPKGEQLNEMIVDTTILGLDDVRAKAMLYIASMDIYVFSQDVMLQLLREQFPRANDLGSEVISGATSIGKRVHAYLYDGYLEDIGTINTFYNANLIILHTKCWTAQLSNLWMGNGCYVYGELCFIWKPPWPGLICVQERVLLQFDAL

SEQ ID NO: 12417 - protein, 52 aa, Pseudomonas aeruginosa UCBPP-PA14
MDLIRILIAILLPPLGVFLQVGFGGAFWLNILLTLLGYIPGIVHAVYIIAKR

SEQ ID NO: 12418 - protein, 394 aa, Staphylococcus aureus
MQEAYIVAYGRSAAAKAKQGALFHERPDDVAAKVLQGVLKRIDGKFNKNMIEDVIVGTAFPEGLQGQNIARTIALRTGLSDTVPGQTVNRYCSSGLQTIAIAANQIMAGQGDILVAGGVELMSAVPMGGNEPTNNPTLQYVDIGASYPMGLTAENVASQFDVSREDQDAYAVRSHQRAYDAQRDGRFKDEIIPIQVNSVEYTNTGPKVHTNIFDQDEFIRPDTTMEALAKLRTVFKADGTVTAGTSAPLSDGAGFVVLMSGDKVKELGVTPIARFVGYKAVGVDPKIMGIGPAYAIPEVLSLSNLSVEDIDLIELNEAFASQTIASIKEVGLDISRTNVNGGAIALGHPLGATGAMLTARLLNEMGRRPDSRYGMVTMCIGVGMGAAAIFEYVR

SEQ ID NO: 12419 - protein, 72 aa, Lycopersicon esculentum
MRLFATMLLLAMLVMATGPMRIVEARTCESQSHRFKGPCVSEKNCASVCETEGFSGGDCRGFRRRCFCTRPC

SEQ ID NO: 12420 - protein, 81 aa, Gaertnera cooperi
  misc_feature (5)..(5): Xaa can be any naturally occurring amino acid
  misc_feature (46)..(46): Xaa can be any naturally occurring amino acid
  misc_feature (50)..(50): Xaa can be any naturally occurring amino acid
  unsure (1)..(81): unsure at all Xaa locations
TPQDXMRAGMSYFHETIWKGAPKFLRRVDTALKNIGINERVPYNGXVIQXSSWMGGDRDGNPRVTPEVTRDVCLLARMMAA

SEQ ID NO: 12421 - protein, 81 aa, Gaertnera drakeana
  misc_feature (5)..(5): Xaa can be any naturally occurring amino acid
  misc_feature (63)..(63): Xaa can be any naturally occurring amino acid
  misc_feature (70)..(70): Xaa can be any naturally occurring amino acid
  unsure (1)..(81): unsure at all Xaa locations
TPQDXMRAGMSYFHETIWKGVPKFLRRVDTALKNIGINERVPYNAPVIQFSSWMGGDRDGNPXVTPEVTXDVCLLARMMAA

SEQ ID NO: 12422 - protein, 600 aa, Agrobacterium tumefaciens str. C58
MSRKKLDFRADAYRHVLGFVFNHWSHRKALVGFIIVLVVASTLAEVMVPVFSGRIVDAIAGDNGGANAGDGALRAFVIVVALGFTSVVLRWFIFNGIIRLTLKTMADVTNNGFHKVQRFSTDWHANSFAGSTVRKITRGMWALDSLNDLLLVALLPSIVMLVGATVVLGSYWPVMGLIVGLGSLIYIGVTVGLSMGYVSPAARLANAWDTRLGGALADAISCNAVVKAFGAETREETRLGHVLVKWDNRTRRTWKRGTLNGTIQSFMMVSMQAGILGTGLIMWQKGLATAGDITFVLAMFFVLQGYLRDVGQDIRNLQRAVNDMEELVLLDKMPLGVEDRPDAKRINIGKGEIVFDHVTFQYGAHATPLYEDFSVTIKPGERVGLVGHSGSGKTTFVKLIQRLYDIKAGAIRIDGQNIADVTQASLRGQIAIVQQEPILFHRTLAENIAYGRPDASRREIEQAAKQASAHDFIMSLPKGYETMVGERGVKLSGGERQRVAIARAFLADAPVLILDEATSSLDSESEVQIQQAMERLMDGRTTLVIAHRLSTVRALDRLLVFDKGRIVEEGDHQALIRLHDGIYRRLFERQALELTKGLVA

SEQ ID NO: 12423 - protein, 574 aa, Oryza sativa (japonica cultivar-group)
MEETPLPSGKNFRSQLAAAARSINWTYAIFWSISTSRPGVLTWKDGFYNGEIKTRKITNSMNLMADELVLQRSEQLRELYDSLLSGECGHRARRPVAALLPEDLGDTEWYYVVCMTYAFGPRQGLPGKSFASNEFVWLTNAQSADRKLFHRALIAKSASIKTIVCVPFIMHGVLELGTTDPISEDPALVDRIAASFWDTPPRAAFSSEAGDADIVVFEDLDHGNAAVEATTTTVPGEPHAVAGGEVAECEPNSDNDLEQITMDDIGELYSLCEELDVVRPLDDDSSSWAVADPWSSFQLVPTSSPAPDQAPAAEATDVDDVVVAALDSSSIDGSCRPSPSSFVAWKRTADSDEVQAVPLISGEPPQKLLKKAVAGAGAWMNNGDSSAAAMTTQGSSIKNHVMSERRRREKLNEMFLILKSVVPSIHRVDKASILAETIAYLKELEKRVEELESSSQPSPCPLETRSRRKCREITGKKVSAGAKRKAPAPEVASDDDTDGERRHCVSNVNVTIMDNKEVLLELQCQWKELLMTRVFDAIKGVSLDVLSVQASTSDGLLGLKIQAKFASSAAVEPG

SEQ ID NO: 12424 - protein, 492 aa, Cytophaga hutchinsonii
MANYFNTLSLREKLDQLGVCEFMDRSEFSDGVAALKGKKIVIVGCGAQGLNQGLNLRDSGLDVSYTLRKEAIDSKRQSFLNASENGFKVGTYEELIPTADLVINLTPDKQHTAVVSAVMPLMKKGSTLSYSHGFNIVEEGMQIRKDITVIMVAPKSPGSEVREEYKRGFGVPTLIAVHPENDPEGKGWDYAKAYCVGTGGDRAGVLKSSFVAEVKSDLMGEQTILCGLLQTGSILCFDKMVEKGIDKGYASKLIQYGWEVITESLKHGGISGMMDRLSNPAKIKAFQVSEELKDIMRPLFRKHQDDIISGEFSRIMMEDWANGDKNLLTWRAATGETAFEKTPAGDVKIAEQEYYDNGLLMVAMVRAGVELAFETMTESGIIDESAYYESLHETPLIANTIARKKLFEMNRVISDTAEYGCYLFDHACKPLLANFMKTVDTDIIGKNFNAGKDNGVDNQMLIAVNEVLRSHPIEIVGAELREAMTEMKAIVS

SEQ ID NO: 12425 - protein, 81 aa, Gaertnera fractiflexa
  misc_feature (49)..(49): Xaa can be any naturally occurring amino acid
  misc_feature (67)..(67): Xaa can be any naturally occurring amino acid
  unsure (1)..(81): unsure at all Xaa locations
TPQDEMRAGMSYFHETIWKGVPKFLRRVDTALKNIGINERVPYNAPVIXFSSWMGGDRDGNPRVTPXVTRDVCLLARMMAA

SEQ ID NO: 12426 - protein, 567 aa, Debaryomyces hansenii CBS767
MFAYRNRGAFGISRSNKIRSSSFTRTPKITYLTINIIRDTNKGTNSSTYRYFIRPGILIVGLGGSAYLIDRYAYSSIMTRSIRALYVMLWIAYEYSRNIAKYETISDLHNVAAERLLNMLRTNRGLYIKLGQAIANQGDFFPKEYQKKFVKLYDDAPVDTWEQIDKVLRKNLGENYEMEVFDSIDHDPVASASIAQVHKGKLKSNGESVAIKVQHHYINEQIVIDLFMYKLISKIYERVFDIPLSFFTKYVSEQMIEEADFVNEMENASKLRQIIKKDESMNNTNIYIPHSYSDLSKRQVLITEWCDGVALTDKDKLIASDIDLTLAMKQYIKVFGKQIFEYGFIHSDPHPGNLLARFDNAGNQQLVILDHGLYISLPNSFRIENCQLWEYLFSFNTQGIEEIGREWGIGSTELFATLVQLKPIKISTESTNRGDSDINSLLRDFLSDEEKFPVELLFLTRTMRMIQNLNRNFGSPVNRINLLTSELINALMLENSHSVTTISSRILQYFKLFKVRCVLFVSNLAFYLVRLRQLLSGDKYGDKSIGIEDYLEVYLQNTALSLGVDWT

SEQ ID NO: 12427 - protein, 440 aa, Zea mays
MAALCSASPAISAAASLGSPARVVASFLRLRLRLRAAKRSCSHAPAPSWRARRRFAASAAEAEECSGVETLIPPDNRIPATIITGFLGSGKTTLLNHILTAHHGKRIAVIENEFGEVDIDGSLVAAQTAGAEDIMMLNNGCLCCTVRGDLVRMIGELVNKKKGRFDHIVIETTGLANPAPIIQTFYAEDVVFNDVKLDGVVTLVDAKHARQHLDEVKPKGIVNEAVQQIAYADRIIVNKIDLVKEPEVLSLVERIRGINHMANLKRAEYGKVDLDYVLGIGGFDLERIESAVAEKSHEDHAEHDHEHHEHEHEHENEHDHDHHHHHDHDHDHHAHDHTHDPGVSSVSIVCEGEMDLEKADMWLGNLLLEHSEDIYRMKGLLSVSGMPQRFVFQGVHDIFQGSPERMWEPNEPRINKIVFIGRNLNKEELDKGFKDCLLKK

SEQ ID NO: 12428 - protein, 593 aa, Glycine max
MAIATCDHDKNAKALQFIEDMTQNTESVQERVLAEILSQNSQTEYLKRFELNGATDRDTFKSKVPVVSYDDLKHDIHRIANGDRSPILCAHPISEFLTSSGTSAGERKLMPTIRQEMDRRQLIFSLPMPVMNQYVTDMDKGKALIFLFTKAEQKTPSGLVARPVSASMYKSDQFKNRPYDPYNVYTSPDEAILCPDSFQSMYTQMLCGLIMRHQVLRVGANFASGLLRSIHLLQLNWAQLSHDISTGTLNPKITDPAIKQRMTQILKPDPELAEFIVKECSGENWERIIPRIWPNTKYVEVVVTGAMAQYVPTLDYYSGGLPLASNIYGSSECFFGINLNPFCNPSDVSYTIMPNMGYFEFLPQDHDDASSSSGSSFTLSRLIDLDDVELGKSYEIVVTTYSGLCRYRVGDILRVTGFHNTAPQFSFVRRKNVLLSIDSDKTDEAELQNAVEKASVLLKEFKTSVVEYTSFADTKSIPGHYVIYWELLMKDSSNAPTTEALEQCCLTMEESLNAVYRQGRVADHSIGPLEIRVVKNGTFEELMDYAISRGASISQYKVPRCVTFTPITELLDSRVESVHFSPSEPHWTPERRR

SEQ ID NO: 12429 - protein, 492 aa, Cucurbita pepo
MDPYRHRPSSAFNAPFWTTNSGAPVWNNNSSMTVGPRGPILLEDYHLVEKLANFDRERIPERVVHARGASAKGFFEVTHDITNLSCADFLRAPGVQTPVIVRFSTVIHERGSPETLRDPRGFAVKFYTREGNFDLVGNNFPVFFIRDGMKFTRHVHPLKPNPKSHIQENWRILDFFSHHPESLNMFSFLFDDIGIPQDYRHMDGSGVNTYTLINKAGKAHYVKFHWRPTCGVKSLLEEDAIRVGGSNHSHATQDLYDSIAAGNYPEWKLFIQTIDPDHEDKYDFDPLDVTKTWPEDILPLQPVGRMVLNKNIDNFFAENEQLAFCPAIIVPGVYYSDDKLLQTRIFSYADTQRHRLGPNYLQLPANAPKCAHHNNHHEGFMNFMHRDEEVNYFPSRFDPSRHAERYPHPPAVCSGKRERCIIEKENNFKEPGERYRSWTPDRQERFVRRWVDALSDTRVTHEIRSIWISYWSQADRSLGQKLASHLNVRPSI

SEQ ID NO: 12430 - protein, 616 aa, Vibrio vulnificus YJ016
MPANRAYMCKPKVRDMANLDFHIVKRIRKQIAQGAERVALKHKVGAVWQGISWKQFGQQIDELSLALLAQGIEVQDKIAIFSNNMPQWTVADFAALQLRAVTVPIYPTNTAAQAAYILQNADVKVLFVGEQPQFDAAVKIFDECEQLNLIVAMSDDIDLGEHHFAIHWKAFIQQGQQEARAELERRLEQANFEDLLTLIYTSGTTGQPKGVMLDYSNIAAQLEGHDRRLSLTENDVSLCFLPLSHVFERAWTFYVLYKGGTNCYLQDTMQVRDALSDIKPTVMCAVPRFYEKIFSAIHEKVSRAPLMRKIMFTWAVNMGAKMSVCHQEGRQPSLMLKKAHALADKLVLSKLRALLGGNINFMPCGGAKLDETIGRFFHAIGINVKLGYGMTETTATISCWDDKCFNPDSIGMSMPGAQVKIGENNEILVRGPMVMRGYYKLPEETEKTFDEHGFLKTGDAGHIDEHGNLFITDRIKELMKTSGGKYIAPQMIEGAIGKDHFIEQIAVIADTRKFVSALIVPCFDSLEEYAKELNIKYHDRVELIKHHQVVEMLEKRVNDLQKELAKFEQVKKFKLLPKAFSMDEGELTPTQKLRRKVINDKYQDEIEEMYSEKKEK

SEQ ID NO: 12431 - protein, 492 aa, Triticum aestivum
MDPYKYRPSSSFNAPMWSTNSGAPVWNNDNSLTVGSRGPILLEDYHLVEKIADFDRERIPERVVHARGASAKGFFEVTHDVSHLTCADFLRAPGVQTPVIVRFSTVIHERGSPETLRDPRGFAIKFYTREGNWDLVGNNFPVFFIRDGMKFPDMVHALKPNPKTHIQENWRILDFFSHHPESLHMFTFLFDDIGVPADYRHMDGSGVNTYTLVNRAGKAHYVKFHWKPTCGVKSLLEEEAVTVGGTNHSHATKDLTDSIAAGNYPEWTFYIQTIDPDHEDRFDFDPLDVTKTWPEDVVPLQPVGRLVLNRNIDNFFAENEQLAFCPGIIVPGVYYSDDKLLQTRIFSYSDTQRHRLGPNYLLLPANAPKCSHHNNHYDGLMNFMHRDEEVDYFPSRFDPAKHAPRYPIPSRTLNGRREKMVIEKENNFKQPGERYRSMDPARQERFINRWIDALSDPRLTHEIKAIWLSYWSQADKSLGQKLASRLSSKPSM

SEQ ID NO: 12432 - protein, 492 aa, Solanum tuberosum
MDPSKYRPSSAYDTPFLTTNAGGPVYNNVSSLTVGPRGPVLLEDYYLIEKLATFDREKIPERVVHARGASAKGFFEVTHDISHLTCADFLRAPGAQTPVICRFSTVVHERGSPESIRDIRGFGVKFYNRGGNFDLVGNNVPVFFNRDAKSFPDTIRALKPNPKSHIQEDWRTLDFFSFLPESLHTFAFFYDDVCLPTDYRHMEGFGVHAYQLINKEGKAHYVKFHWKPTCGVKCMSEEEAIRVGGTNHSHATKDLYDSIAAGNYPEWKLFIQTMDPEDVDKFDFDPLDVTKTWPEDLLPLIPVGRLVLNRNIDNFFAENEQLAFNPGHIVPGIYYSEDKLLQTRIFAYADTQRHRIGPNYMQLPVNAPKCGHHNNHRDGAMNMTHRDEEVDYFPSRFDPCRPAEQYPIPACVLNGRRTNCVIPKENNSKQAGERYRSWESDRQDRYINKWVESLSDPRVTHEIRSIWISYLSQADKSCGQKVASRLTVKPTM

SEQ ID NO: 12433 - protein, 339 aa, Burkholderia vietnamiensis G4
MKPKIVLTHWVHPEIIDLLQSAADVIPNTTRETLPREDLLLRAKDADALMVFMPDTIDADFLGRCPKLKIVSAALKGYDNFDVDACTQRGIWFSIVPDLLTIPTAELTIGLLLGLTRHLMEGDRRIRSGRFQGWRPELYGIGLTGRTLGIVGMGAVGRAIARRLSAFDMKLVYCDNVALTDDLEQAWGARRLSLDELLATSDFVVPMLPMTPQNLHLFNADTIGKMQSGSYLINACRGSVVDESAVVEALRTGRLAGYAADVFEMEEWARPERPESIPQSLLDNTLQTFFTPHLGSAVKEVRIEIERQAATNILQALAGERPVGAINNPGGVNNQVQHP

SEQ ID NO: 12434 - protein, 492 aa, Cucurbita pepo
MDPYKYRPSSAYNTPFCTTNSGAPIWNNTAVMSVGERGPILLEDYQLIEKIATFTRERIPERVVHARGASAKGFFEVTHDVSDLSCADFLRAPGVQTPVIVRFSTVIHERVSPETVRDPRGFAVKFYTREGNFDLVGNNFPVFFVRDAMQFPDVIRAFKPNPKSHLQESWRFLDFCSYHPESLLSFAWFYDDVGIPINYRHMEGFGVQAYSLINKAGKARLVKFHWKPTCGVKSMLEEEAIRVGGSNHSHATQDLYESIAAGNFPEWRLYIQTIDYEDQNNYDFEPLDTTIAWPEDVVPLRPVGRLVLNKNIDNFFAENEMLAFSMSLVPGIHYSDDKMLQARSFAYADTQRHRLGPNYLQLPVNAPKCPHHNNHHEGFMNFMHRDEEVNYFPSRYDACRHAEKYPMPPNVLSGKRERCVIPKENHNFKQAGDRYRSWAPDRQERFVNRFVEALSDSKVTHEVRNIWISYWTQADRSLGQKIASRMNARPNM

SEQ ID NO: 12435 - protein, 255 aa, Brassica napus
  misc_feature (244)..(244): Xaa can be any naturally occurring amino acid
  misc_feature (249)..(249): Xaa can be any naturally occurring amino acid
  unsure (1)..(255): unsure at all Xaa locations
VDPRVRTEYLPTPLNLKIWKLNGKINNSIKRIIDARLKAKSKNVEKDYGNDLLGIMLASARSNVSEKKMSIDEIIEECKTFFFAGHETTANLLTWTSMLLSLHQDWQEKLREEVFNECGKDKIPDSDNCSKLKLMNMVLMETLRLYGPVLNMIRSASQDMKLGSLVIPKGTTIVVPIVKMHRDKAVWGSDSDKFNPLRFENGVSRAANHPNAFLAFSLGPRVCIGQNFALMEAKTVLTMILQRXRFNIXDEYKHA

SEQ ID NO: 12436 - protein, 483 aa, Rickettsia typhi str. Wilmington
MISNFLNLIRIFRIISKRQILIDSRSPKYFRFIGYILALFFAPSSLIKKSREDYGKRLTACLTDLGPIYIKFGQTLSTRADLVGAEIACYLRLLQDKLPPFDGVVARKLIYKSFTPYCKEQQSANAVILSHKQKVETHSTNTCNAALPFRHFDNNPIAAASISQVHKAQLITGGYVALKILRPDIRKKYNRDIRLLYFFAKIISKFSKAKRLKPITVIDKFHETMKFELDLRLEAAAASELKDNMRNDINVIIPKIYWDLTSENILTTEWLDGISIYDIPLLKGMNLEPKKIAQDFAVMFFNQAYRDGFFHADLHAGNILVNNQGKIILLDFGIMGRLKEKDRLSVAEILFAFLKRDYKLVAKVHLRAGYIPANTDLDLFARSCRAVTEPIVGIPTKNISIGKLLTHLFKITEDFGMEVQPDLLILQKTLIMVEGIGRQLDSNVNMWQLAEPWIKKWAVKNLSPEAKLLRLIKHYFNSINDIT

SEQ ID NO: 12437 - protein, 144 aa, Brassica napus
  misc_feature (2)..(2): Xaa can be any naturally occurring amino acid
  misc_feature (11)..(11): Xaa can be any naturally occurring amino acid
  misc_feature (24)..(24): Xaa can be any naturally occurring amino acid
  misc_feature (51)..(51): Xaa can be any naturally occurring amino acid
  misc_feature (58)..(58): Xaa can be any naturally occurring amino acid
  misc_feature (81)..(82): Xaa can be any naturally occurring amino acid
  misc_feature (125)..(125): Xaa can be any naturally occurring amino acid
  unsure (1)..(144): unsure at all Xaa locations
GXRSNLRKRPXPPTFRSLKSFASXMVQQFAPDDPDSETYLPFAKKKRQRKXKDQSSVXDSPEQFNADGTIRMCTHCETTKXXQWREGPCGPKTLCNACGVRFRSGRLLPEYRPSSSPSFIPSLHXNSHRKIIEMRRKDQDLQPG

SEQ ID NO: 12438 - protein, 306 aa, Methanosarcina mazei Go1
MVINMKVACIQMDVLQCKKQENLEKALSMALKAVDKGAELVVFPEVFSTGFCYENIDHAAETLPSPLLENLACFSEANDCIILGSIILKDGNESGEEKYFREGDACFSGNENEMPVNKNSTEYKNFTENKNSAENKNSPYYNLGFCFESGALAGTYRKTHPFKAENKYFSKGSSIEPISLKKQDLKIGFEICYELRFPEVARKLALAGSDLLVTTAAFPNPRSEHWKVLAKARAIENQIPHIACNRTGSAPDCSYFGHSMIIDAWGEVKADAGSKECVIVHDLDMSQKDEVRKLIPVFEDRRVELY

SEQ ID NO: 12439 - protein, 430 aa, Cordyceps bassiana
HINVVVIGHVDSGKSTTTGHLIYQCGGIDKRTIEKFEKEAAELGKGSFKYAWVLDKLKAERERGITIDIALWKFETPKYHVTVIDAPGHRDFIKNMITGTSQADCAILIIAAGTGEFEAGISKDGQTREHALLAFTLGVKQLIVAINKMDTTKWSEARYQEIIKETSSFIKKVGYNPKAVAFVPISGFNGDNMLEPSSNCPWYKGWEKETKAGKSTGKTLLEAIDAIEPPKRPTDKPLRLPLQDVYKIGGIGTVPVGRVETGIIKPGMVVTFAPANVTTEVKSVEMHHEQLTEGVPGDNVGFNVKNVSVKEIRRGNVAGDSKNDPPNGAASFNAQVIVINHPGQIGAGYAPVLDCHTAHIACKFSELLEKIDRRTGKSVENNPKFIKSGDSAIVKMVPSKPMCVEAFTDYPPLGRFAVRDMRQTVAVGVI

SEQ ID NO: 12440 - protein, 489 aa, Sulfolobus solfataricus P2
MTFIRYFYELTDLRNFMSSKLDEYLARIDRLPTWGLSYALLWAIGFSYFITLYDAVGNIGAALPYIPFINASQASLIASLGLFGYIPGSLGLGYLADRIGRRTVLIITVLLTAIGSLGMALSINFPMLAIFRFIEGAGIGGDLNLAMVYVSEFAPSAKRGKYANWIYLAGWIAVGVGATIAALLVTGLPSVGWRLAFGIAAIMAVAALVFRIRAPETVRFLVKKGRINEAESIVRIMEETAMKRARVQSLPEPKIINYSYQTTNPFSILAKRVFAKRLIGLILFWFFIYFVQYTFSTLWDYYGKFIGYSGTMLNQFVLLTGFSALGDTLMAFLLLIIIERTDRRLITQIGSIGWLVGMIVASYFAVHFNLLGMALTLGLITNAIGGGMSYLAGYLISSESFPTAARSTGFAITDGLGHLGGAIGPLLLFPLVVATGPINAWAIEAFPVVIAAVILWFTVPRTVGVRLEEINEIHLTPQQPQGGIIKSEK

SEQ ID NO: 12441 - protein, 208 aa, Arabidopsis thaliana
SHSHGDSLAIEQSEEGQQQQQQGVMDYVPPHAYQSGPVNAASHMAFQQAHHFHHHHQQQQQQQLQMFWANQMQEIEHTTDFKNHTLPLARIKKIMKADEDVRMISAEAPVIFAKACEMFILELTLRAWIHTEENKRRTLQKNDIAAAISRTDVFDFLVDIIPRDELKEEGLGVTKGTIPSVVGSPPYYYLQQQGMMQHWPQEQHPDES

SEQ ID NO: 12442 - protein, 420 aa, GIBBERELLA ZEAE PH-1
MTPSPEVASAISKAESAPGEKGPVYEQFIPTIKNLSPLPTADDLNAIVDSFFGQALGVVATRTILSSFIAALREIENQDLWIEVGNRTLDTIAAQPSSSSFVDAGATLRELIATAHEKNEDFLDAAKTLADIPLDSSQRKITDEEKARTWVRIVRNYLEVDDSTAAEMYINKLKNIMHSVADQELNLHFKLSQARILDAQRDFLSASQRYHEISFFPAIDEDDRVHTLSMAIKCAVLAPAGPMRNRTLGRLYKDERSAQLEEFGILEKMFLDRLLSPEEVDKFAEGLQPHQLATTSDGSTVLAKAVVEHNLLGASRLYNNIRFEALGSLLGLDADKAEETTARMIEQGRLVGRMDQLDGIVYFEGGEASGEKGSGRAEVTVGKEMRTWDSNVQSLAEEVENVTNALQKEFPEFVAANLVV

SEQ ID NO: 12443 - protein, 394 aa, Staphylococcus aureus
MQEAYIVAYGRSAAAKAKQGALFHERPDDVAAKVLQGVLKRIDGKFNKNMIEDVIVGTAFPEGLQGQNIARTIALRTGLSDTVPGQTVNRYCSSGLQTIAIAANQIMAGQGDILVAGGVELMSAVPMGGNEPTNNPTLQYDDIGASYPMGLTAENVASQFDVSREDQDAYAVRSHQRAYDAQRDGRFKDEIIPIQVNSVEYTNAGPKVHTNIFDQDEFIRPDTTMEALAKLRTVFKADGTVTAGTSAPLSDGAGFVVLMSGDKVKELDVTPIARFVGYKAVGVDPKIMGIGPAYAIPEVLSLSNLSVEDIDLIELNEAFASQTIASIKEVGLDISRTNVNGGAIALGHPLGATGAMLTARLLNEMGRRPDSRYGMVTMCIGVGMGAAAIFEYVR

SEQ ID NO: 12444 - protein, 781 aa, Bradyrhizobium japonicum USDA 110
MSPLSLPVATLGTPRIGPRRELKLALESYWAGKISEQQLHEDAFGLRAANWARQKSLGVTIIPSNDFSLYDQVLDTSVMVGAIPEIYAANGESVSLQTYFAMARGSQCGEQDASCAQSPRGSGVPAQEMTKWFDTNYHYMVPEFYRGQAFRLCSRKPVEEYEEARALGFQTRPVLIGPVTFLKLGKSTDSAFQPLSLLDDLIPVYIDLLHELAKRGASWVQFDEPCLVLDLDEAARNSLLHAYNRFAKEGPAIKIMLASYFGALGDNLDTALSLPISGLHVDLVRAPELLDQIVADGRSDLVMSLGVIDGRNVWRSNLPSLRQRLKPSIAKLGRHRVQLAPSCSLLHVPVDVELETGLASDVKSWLAFSVQKMRELAILARVLAGDQNVGLALAESECAATARRTSPKIHNANVAVRMRAIDQTMRQRATPFARRSEIQRERFGLPAFPTTTIGSFPQTTAVRNARAAHARGAMSEEQYDRFLKEEIARAVRWQEDIGLDVLVHGEFERNDMVQYFSEQLAGFAFTRNGWVQSYGSRCVRPPILFGDVVRPKPITVEWWRYAQSLTSKPMKAMLTGPVTILNWSFVRDDIPRSEVCRQLALAMRDEVRDLENAGAAMIQIDEAALREGLPLRRSDWKAYLDWAGDCFRICSSGVTDQTQIHTHMCYSEFNDIIGAIAAMDADVISIETSRSKMELLDAFRRYEYPNQIGPGVYDIHSPRVPETDEMKELIVLARTRLQDSQLWVNPDCGLKTRKWEEVRPALANMVAAARELRAASDPQIR

SEQ ID NO: 12445 - protein, 119 aa, Triticum aestivum
DERKRKRMLSNRESARRSRAKKQQRLEELVAEVARLQAENAAAQSRIAAFEREFAKVDGDNAVLRARHGELSSRLESLGGVLEVLQMAGAAVDIPEMVTEDPMLRPWQPSFPPMQPIGF

SEQ ID NO: 12446 - protein, 396 aa, Synechocystis sp. PCC 6803
MFGGSVNGKFDQSGTKNLAFQLCCKYLELIGLTTVVFLPKPNSAKVFNQPQRFVAGWYWLLRSKQLKRGQVKAVFLLGKDLAVYRTDSGKVVAVDAYCPHMGAHLAEGKVEEESLRCFFHNWRFDHHGHCVEVPCLAKSLPVKVNSWPVTEAYGLIWLWTGNQPSQTLPLPLELTKEKVVSALGKSFTKACHPNVVMVNAIDAHHFNTVHNFPVEIDFKSEVIDQNIINFANTTKGGNDSLLVRLIKPFYREAGTYNLSYWFGSTGTVTLGPDFLHFYIMFTLRLGKNGQTEGQTILLTKHRPGLWGWFINGIILWLTKLVGNYFAKGDTKIFQTIKFALKTPLAEDKSILEFIHHLEQQPVLQWETWQSLDEDKSLSVPVINNHNGSVKIHGTNC

SEQ ID NO: 12447 - protein, 711 aa, ASPERGILLUS NIDULANS FGSC A4
MADDQDPPRRDVRNHMLFEIATEVANRVGGIYSVLKSKAPVTTAEYGERYTLIGPLNRNSAAVEVEELTPSSPAMKETMQSMKERGIEMVYGRWLIEGAPRVLLIDTGTGYKYLDEWKGDLWNTAGIPSPASDHETNEAIVFGYLVAWFLGEYIAHERRRAVVAHFHEWLAGVALPLTKKRHMDLTTIFTTHATLLGRYLCAGSVDFYNNLQYFDVDAEAGKRGIYHRYCIERAAAHSADVFTTVSHITAFESEHLLKRKPDGVLPNGLNVKKFSAVHEFQNLHSQSKEKINEFVRGHFYGHNDFDFDDTLYVFTSGRYEFRNKGVDMFIEGLARLNHRLKSSGSKTTVVAFIIMPAQTSSLTVESLKGQAVVKSLRDTIHMIEQGIGKRMYERCLAWKEGDNMPDEKDLITSQDRVLLRRRLFAMKRHTLPPIVTHNMINDSEDPILNQIRRVQLFNQSSDRVKIVFHPEFLNSSNPVLPLDYDDFVRGTHLGVFPSYYEPWGYTPAECTVMGVPSITTNLSGFGCYMEELIENSSDYGIYIVDRRMKGVDDSVNQLTDFMYNFTLKSRRQRINQRNRTERLSDLLDWKRMGLEYVKARQLALRRAYPSSFDNQEDYFDVIGGTEQKISRPLSVPGSPRDRSGMMTPGDFASLQEVKEGLSTEDYVAWRLPTSEEDDAEDHFYPLTLRTKKSDRPSSPLDRISINGGQSS

SEQ ID NO: 12448 - protein, 583 aa, Thermobifida fusca YX
MSAIDRGSGSSMEEPERPEGPLADADGRESVTDHQDTTAADTPEDATTGSAARSETGAAPDTAQAASAPSAAAAPASEPAASAAEQRDASHEAPAPGSRETPPHPAPRPAPFAPQSHAPHPAWGPPAPDQATARHGAQAYPGPEAPQPAPGRPGPPPAGGVPAGAAQGAWQERPAQHDQPNSPTGAWAVPPSPGGFFPPTGGFPTLHGSSPFEGAPPPGKPQRSGRVVLIAAVTALITSLIVGPAASVATAYFLSEQVAANPAATSAASGDVTKVAAKALPSVVSIATAEGGGSGFIIRDDGLIVTNNHVVSDAQELTVLFHDGSQASATIVGTDPVSDLAVIRAQGVSGLTPASLGDSDQVEVGAEVVAIGAPLGLSGTVTSGVVSAVERPVNTGVSGQQDSPLLPSPDEEEPQATTSTVIDAIQTDAPINPGNSGGPLVNMNGEVIGINTAIATTSGNFMSQSGSIGLGFAIPINQAKPIIEELINTGKATYAAIEASVTVAEDGPGAELVEVNRGGAADQAGLRKGDVIIRIEDRMVTDPNVLIAEIRSHRPGDTVTITYQRGGQTAQTTVTLAAQSLDN

SEQ ID NO: 12449 - protein, 495 aa, Debaryomyces hansenii CBS767
MTLVARGATRVSIRARIPHCKKLVPGVGYYRLFHESPNKLNGTFGVNIPHEQAGRSSSSTTSGIAKVGIDHENFKIPDSTTYLKDFKVSELLSYVVIGAATLNKPILNMCIKMFPYVPMSVIKAFVYKLYCGGENIEEVKQTGLRLSKRGINNMMLSLTIEACNGNDNIDPEFIVSETQRSVTEILIPHILTIIKESGKDINSIPPGYVALKPTGFAKDASNVLKYYKTDPHYAAMFEELVDKASNVCGTIYEENLKLSQKFPDRTAPFIVGVIDAEKHELQEGVYELQRRLYAKYNPLNKPVSIVGTLQMYLAGSSDLLALEEKLAMENNYRLGLKLVRGAYIHSEKNREVIHKTKECTDLNYNQGITYCIESILANKENELTIGHLVVASHNADSLKLTTEKLKKSTLVNNKNKNNVILGQLLGMADNITHNLIKTHNVDNVIKYVAWGPPLETKEYLLRRLEENGDAVRADSGFNLIKGVIGVLFKRLFRVV

SEQ ID NO: 12450 - protein, 347 aa, Prochlorococcus marinus subsp. marinus str. CCMP1375
MNRILVTGGAGFIGSHTCITLLESGYDLLIIDSFINSSEVSLKRVKEMSDNKNINYLKGDIRNLEFLDSIFSNAIQEGKPIDAVIHFAGLKSVSESTKIPLTYWDVNVVGSIALFSIMRKYKCYTIVFSSSATIYGNTDKVPIKEDSLISPINPYGESKATVEKILSDLSLSAPFDWRIACLRYFNPVGAHPSGRIGEDPLGIPNNLFPYITNVAGGQIKQVEVFGNDWPTQDGTGVRDYVHVLDLAEAHKSALECLFAEPAQLLILNLGNGFGLSVLEIINTFSRVNNCEVPYVFAARRPGDIAISYADIALSKARLNWYPKRSIEDMCRDTWRWKLNNPIGYRSK

SEQ ID NO: 12451 - protein, 326 aa, Nostoc sp. PCC 7120
MILVSSGAVGVGCARLGLTERPKAIALKQAVAAVGQGRLMRVYDDLFTTLQQPIAQVLLTRSDLVQRSRYLNVYNTFRELLALGVIPVVNENDTVAVDELKFGDNDTLSALVASLVEADWLFLLTDVDRLYSADPRSVPDARPISLVTSIKELADLQVQTGSQGSQWGTGGMMTKISAARIAIAAGVRTVITQGRYPRNIEKIIQGELIGTHFQPQPEPTSARKRWIAYGLVPVGKLYLDSGAIAAIVKAGKSLLPAGVKTVAGEFEPQDAVQLCDPQGNEIARGLVNYSSNDLQKICGRHSKEIPTILGYVGAETVIHRDNLVLT

SEQ ID NO: 12452 - protein, 81 aa, Gaertnera inflexa
  misc_feature (21)..(21): Xaa can be any naturally occurring amino acid
  unsure (1)..(81): unsure at all Xaa locations
TPQDEMRAGMSYFHETIWKGXPKFLRRVDTALKNIGINERVPYNAPVIQFSSWMGGDRDGNPRVTPEVTRDVCLLARMMAA

SEQ ID NO: 12453 - protein, 308 aa, Erwinia amylovora
MKKRIWVLGDAVVDLLPGQDNLLLKCPGGAPANVAVGIARLGGNSAFIGCVGDDPFGEFMQTTLQREGVDIGKMFRIDGQRTSTVLVSLDTEGERHFTFMVRPSADLFLRTDCLPSFAQGEGLHLCSIALSAEPSRGAALHAMHAIRQAGGWVSFDPNLRADLWPDADEMARSVAQAFELADIIKLSEDELVFLTGLAILEQGIDQFTARYQPALLLVTRGSQGVSVWQAGRLQHFAAPQVEVTDTTGAGDAFVAGLLAALVQETNPLQPQRLDFAVQQAQHSGAAATTAKGAMTALPYAKDLVRFSQ

SEQ ID NO: 12454 - protein, 335 aa, Pseudomonas fluorescens
MALSKEVPEFDIDDEVLLMESSIDMDSMSNNEGATPPSVRTKSKSSASLKQHKYIDYTRALDATQLYLNEIGFSPLLSPEEEVHFARLSQSGDPAGRKRMIESNLRLVVKIARRYVNRGLSLLDLIEEGNLGLIRAVEKFDPERGFRFSTYATWWIRQTIERAIMNQTRTIRLPIHVVKELNVYLRAARELTQKLDHEPSPEEIANLLEKPVAEVKRMLGLNERVSSVDVSLGPDSDKTLLDTLTDDRPTDPCELLQDDDLSQSIDQWLSELTEKQREVVVRRFGLRGHESSTLEDVGLEIGLTRERVRQIQVEGLKRLREILEKNGLSSESLFQ

SEQ ID NO: 12455 - protein, 495 aa, Vibrio vulnificus YJ016
MGHVKALGYKHRLSNCNYIDRRVSSMKKTKIVCTIGPKTESVEKLTELVNSGMNVMRLNFSHGDYVEHGTRIANFRQVMENTGKQLAILLDTKGPEIRTIKLENGDDVDLVAGQEFTFTTDTSVVGNKDIVAVTYPGFAADLSAGNTILVDDGLIEMEVIATTATEVKCKVLNNGALGENKGVNLPGVSVNLPALSEKDKNDLKFGCEQGVDFVAASFIRKASDVKEIREVLAANGGANIQIISKIENQEGVDNFDEILELSDGIMVARGDLGVEIPAEEVIFAQKMMIEKCNRARKVVITATQMLDSMIKNPRPTRAEAGDVANAIMDGTDAVMLSGETAKGKYPVEAVTIMAQIANRTDSVLKAELGSRLDSPRLRITEAVCKGAVDTAEKLAAPLIIVATEGGKSARSVRKYFPTANILALTTNKKTAAQLVLTKGVTPVVVDSIDNTDAFYVAGKELALESGLGSKGDIVVMVSGALVASGTTNTASVHVL

SEQ ID NO: 12456 - protein, 448 aa, Pseudomonas putida
MNQAQNSVGKSLDVQSFINQQPLSRYQWRVVLLCFLIVFLDGLDTAAMGFIAPALSQEWGIDRASLGPVMSAALIGMVFGALGSGPLADRFGRKGVLVGAVLVFGGFSLASAYATNVDQLLVLRFLTGLGLGAGMPNATTLLSEYTPERLKSLLVTSMFCGFNLGMAGGGFISAKMIPAYGWHSLLVIGGVLPLLLALVLMVWLPESARFLVVRNRGTDKIRKTLSPIAPQVVAEAGSFSVPEQKAVAARSVFAVIFSGTYGLGTMLLWLTYFMGLVIVYLLTSWLPTLMRDSGASMEQAAFIGALFQFGGVLSAVGVGWAMDRYNPHKVIGIFYLLAGVFAYAVGQSLGNITVLATLVLIAGMCVNGAQSAMPSLAARFYPTQGRATGVSWMLGIGRFGAILGAWSGATLLGLGWNFEQVLTALLVPAALATVGVIVKGLVSHADAT

SEQ ID NO: 12457 - protein, 324 aa, Triticum aestivum
  misc_feature (293)..(293): Xaa can be any naturally occurring amino acid
  unsure (1)..(324): unsure at all Xaa locations
MANPSNFQITPRAAFVESNELNFRSLYLFHTSLGANQTQSTVIDPNASTGLGQTAVNNWAICDSPSPGATVVARAHGLHIYAGNWQNTFSITFEVERFKGSTLQVMGISVEEGEWAIVGGTGQFAMANGVIYKKFHEQRSDGNIIELTVHAFCPVLKGSPSLLTKLGPWGGSGGSDKDIVEAPRRLESITVSSGSIIDSIKFSYVDQAGQKHTSGPWGGSGGNPNTIVLGASEFVKEVSGTYGIYDADQHNIIMSLKFITNVKAYGPFGEANGTPFTIPVENNSSIVGFFGRXGYISMRLVSTCARSKQQQLMFLFSAFVSHFK

SEQ ID NO: 12458 - protein, 492 aa, Cucurbita pepo
MDPYKYRPSSAYNTPFCTTNSGAPIWNNTAVMSVGERGPILLEDYQLIEKIATFTRERIPERVVHRRGASAKGFFEVTHDISNLTCADFLRAPGVQTPVIVRFSTVIHERGSPETLRDPRGFAVKFYTREGNFDLVGNNFPVFFVRDAMQFPDVIRAFKPNPKSHLQEPWRYLDFCSYHPESLLSFAWFYDDVGIPINYRHMEGFGVQAYSLINKSGKARLVKFHWKPTCGVKSMMEEEAIRIGGTNHSHATQDLYESIAAGNFPEWRLYIQTIDYEDQNKYDFEPLDTTITWPEDVVPLQPVGRLVLNKNIDNFFAENEMLAFSMSLVPGIHYSDDKMLQARSFAYADTQRHRLGPNYLQLPVNAPKCPHHNNHHEGFMNFMHRDEEVNYFPSRYDPCRHAEKFPMPPNVLTGKRERCVIPKENNNFKQAGDRYRSWAPDRQDRFVKRFVEALSDPRVTDEVRNIWISYWSQADRSLGQKIASRLNVRPNI

SEQ ID NO: 12459 - protein, 357 aa, Agrobacterium tumefaciens str. C58
MRALRFHAAKDLRIEDIAEPKRPGPGQVLVRNRFVGICGTDLHEYSYGPIFIPTEPHPFTGAHGPQILGHEFGGVVEAIGDGVTSVNVGDRVSIQPLIMPRSGDYFADRGLFHLSTQLALVGLSWDGGGMAEAALVNEYNVQKIPDEMTDEEAALVEPSAVAVYACDRGGVTAGNSVLVTGAGPIGMLTLLAARAAGATQLFVSDLNDARLELARNVIRDVITINPKRDNVGDVVRSATEGKVGCDVAIECVGNEHALKACVDAVRKQGVVVQTGLHPHENPIDWFQVTFRDLEIKGSWAYPTHYWPRVIRLIASGLLPATKIVTKRITLDTAVTEGFDALLDPAGTHLKILIDLSK

SEQ ID NO: 12460 - protein, 213 aa, Methanococcoides burtonii DSM 6242
MVEETTLDLVKQLIEGSPERKFSESLDIAINLKNLDMSQPKNRVDEEIILPNGLGKTMKIAVFAKGEVGLNAKDAGCDYILTEEDIKELGEDKSKARSLANECDFFIAEVQYMAQIGKALGAILGPRGKMPVPLTPDKNVADLINSTKNSVRIRSKDKLTFHVSVGRRDMDVEKLAENIETVLGRLEHSLEKGKHNLKSVYVTTTMGNSVRLV

SEQ ID NO: 12461 - protein, 398 aa, Pyrococcus abyssi GE5
MVLMGKLDWIKEELEELKKKGLYVTIRVLQSAQGPWVVVNGKRVLNMCSNNYLGLAAHPKIKEAAIRAILDYGVGAGAVRTIAGTMELHVELEEKLAKFKKREAAILFQSGYNANLGAISALLRKGEDGIFLSEELNHASIIDGMRLSGAPKVIYKHLDMDDLKKKLEENKDKKKKIIVTDGVFSMDGDLAPLPEIVELAEQYDAIVYVDDAHGEGVLGSHGRGIVDHFNLHDKVDFEMGTLSKAFGVIGGYVAGPEEAIEYLKQRARPFLFSSAMNPPDVAAAIAAVEILQKSDDLVKKLWDNTHFLQKGLRDLGYDLGNTKHPITPVMLYDEKLAQEFSRRLYEEYNIFAQAIVYPTVPLGTARIRLEPSAAHTKEDLKLVIDAFEDLGKKTGFLK

SEQ ID NO: 12462 - protein, 322 aa, Solanum tuberosum
MYQSKLAGTATSYDRHLFLCYKSHETCPARLEASDSDLLPKSFSAALKARKDDIKIKTLLTICEVRDDMEVSEGDILIFPEMIKYRDLKESDVDAFVDDVLVNGNPWSSGLQESLSGSYVFVCAHNLRDRRCGVCGPILIEEFSKLIESKGLKDKVRVAACSHIGGHKYAGNVIIFSSGKDGDIVGHWYGYVTPSDVPALLDEHIGEGKVIERLWRGQMGQYEKVTDKVDEQKVPEVTNEEKKPLENGSQESSVTSFSCCQGAAGVSCCRDASAEQEENKKGQGTVSNWFGKWEQREILARVGVVGAVAVVAVAYGFYKKSR

SEQ ID NO: 12463 - protein, 217 aa, Arabidopsis thaliana
  misc_feature (23)..(23): Xaa can be any naturally occurring amino acid
  misc_feature (171)..(171): Xaa can be any naturally occurring amino acid
  misc_feature (178)..(178): Xaa can be any naturally occurring amino acid
  misc_feature (190)..(190): Xaa can be any naturally occurring amino acid
  unsure (1)..(217): unsure at all Xaa locations
MVSLKLQKRLAASVMKCAEGAKXWLDPNESSDISMANSRQNIRKLVKDGFIIRKPTKIHSRSRARKMKIAKMKGRHSGYGKRKGTREARLPTKVLWMRRMRVLRRLLKKYRETKKIDKHMYHDMYMRVKGNVFKNKRVLMESIHKSKAEKAREKTLSDQFEAKRAKNKASXRERKHAXREERLAKGPGGXDVAPVAAPAPAATPAPTAAVPKKKSKK

SEQ ID NO: 12464 - protein, 143 aa, Streptomyces sp.
MADQTVLSPALLEYARSVSLRDDAVLRELRELTAALPGGRAMQIMPEEAQLLALLIRLTGAAQVLEIGTFTGYSTLCMARALPPGGRIVTCDITERWPGVGAPFWRQAGVADRIDLRIGDAARTLSELRAHEGDGIFDLVFVD

SEQ ID NO: 12465 - protein, 109 aa, Triticum aestivum
  misc_feature (40)..(40): Xaa can be any naturally occurring amino acid
  misc_feature (48)..(48): Xaa can be any naturally occurring amino acid
  misc_feature (54)..(54): Xaa can be any naturally occurring amino acid
  misc_feature (64)..(64): Xaa can be any naturally occurring amino acid
  misc_feature (67)..(67): Xaa can be any naturally occurring amino acid
  misc_feature (84)..(84): Xaa can be any naturally occurring amino acid
  misc_feature (88)..(88): Xaa can be any naturally occurring amino acid
  misc_feature (96)..(97): Xaa can be any naturally occurring amino acid
  misc_feature (100)..(101): Xaa can be any naturally occurring amino acid
  misc_feature (104)..(105): Xaa can be any naturally occurring amino acid
  misc_feature (107)..(108): Xaa can be any naturally occurring amino acid
  unsure (1)..(109): unsure at all Xaa locations
MAMIDEPLYPIAVLIDELKNEDIQLRLNSIRRLSTIARAXLGEERTMXELIPFXLSENNDDEDXVLXAMAEELGVFHSLIWVVXEHVXFCSQPLEXXFSXXGTXXRXXH

SEQ ID NO: 12466 - protein, 192 aa, Brassica napus
MAEETKKVHEVPKVATEESSAETGEVTDRGMFDFLKKKKEETKPEETINSEFEQKVQVSEPVPEVKHEEAEKKPSLLEKLHRNDSSSSSSSEEEGEDGEKRKKKKKDKKKIATEGEVQTEEEKKGFMDKLKEKLPGHGKKPEDDSTAVAAPVVAPPVEEAHPAEKKGILEKIKEKLPGYHSKTVDEEKKDDH

SEQ ID NO: 12467 - protein, 258 aa, Brassica carinata
MAEARHRKWHVFQTKDELSVAMAKYTAHLSAKFCKEKGLFTVVLSGGGLIDWLCKLLEPPYKDSIEWSKWHVFWVDERVCAYEDPDSNYKLAMDGFLSKVGIPNKNIYAIDKHYAADGNAEHCAALYEECLRNLVKQNILPLCPNGKYPQFDLQLLGMGPDGHMASLFPGHPQINVKDKWVTHITDSPKLPPRRITFTLPVINSASYNLMAVCDDHTEQCPRSIADIFKHNNLALPASHLTAHVENMWYLDKAAASLL

SEQ ID NO: 12468 - protein, 542 aa, Streptococcus pyogenes SSI-1
MTIDKKKVVYQIYPKSYKDTTGNGVGDLRGIIDKLPYLQELGIDMIWLNPFYPSPQRDNGYDVSDYTAVNPDFGTMADFEDLVKAAKEHQIELMLDMVLNHCSTDHEWFQKALAGDPYYQDFFILRDQPTDWVSKFGGNAWAPFGDTGKYYLHLFDVTQADLNWRNPHVREELAKVVNFWRDKGVKGFRFDVINLIGKDEELVDCPVNDGKPAYTDRPITHTYLHDLNQASFGQDDSFMTVGEMSATTIDNCLLYTAPEREELSMAFNFHHLKVDYENGQKWTIMAFDFAALRDLFHAWGEGMGQGNGWNALFYNNHDQPRALNRFIDVTHFRNEGATMLAASIHLSRGTPYIYMGEEIGMLDPDFDSMDDYVDVESLNAYSSLLVSGKSAEEAFAIIKDKSRDNARTPMQWDASEHAGFTTGKPWLEVGKSYRDINVETEKEGRIFPFYQRLIALRKELPIIAEGDYRAAFKDSQAVYAFERHLGDQCLLVLNHFYADEVELELPPRYQHGQVLISNYEKVSICEKVILKPYQTLAILAEN

SEQ ID NO: 12469 - protein, 437 aa, Bradyrhizobium japonicum USDA 110
MRKAYARLRGDGARTAGHRRTQCRRNGLTRQRSLLTPGPLSLSLAVKSQMQLDLASRDDEFKEVTACMRRLMLNLLGNAKDYSVVPIQGGGSFAMEAALSSFVSRADRPLVCVNGIYGERVLQILRLWGVEALKLVKRATDPLDPQEIGEYLSRNPGVTHLCFVHCETTTGIVNPLQEIVEEARRCGVKTIVDGMSSFGALNIDLSQRGPDVLVTSSNKCIEGPPGVAFVIASRELLENAAQEPRSFVLDVRDQWRSLERTGEWRSTPPTHIVQATTMALKILHEESIDARRFRYEKVRDDLIKELEGTVSPLLSPELQSPVCVAFSAPPGIVDQEGFDGLYRHLAAHNLYVYSKLHLATRSFRVGCIGEIQSSWIERLGCAFRSYFRSGQARSARPAPDQEAYAARVKMPAQAVGDRQLPFSAETAVLQRVIGATR

SEQ ID NO: 12470 - protein, 546 aa, Piscirickettsia salmonis
MSAKEVRFGTGSRQKMLDGVNLLANAVKVTLGLRGRNVILEKSFGAPTITKDGVSVAKEIELSDKFENMGAQMVKEVASKSNDDAGDGTTTATVLAQAIIQEGVKSVAAGMNPMDLKRGIDKATIAAVAALKDLSTPCTDNKAIAQVGTISANSDEEIGSIIAKAMEKVSTDGVITVEEGSSLENELDVVEGMQFDRGYLSPYFVNKQEKMIAEIESPFILLVDKKISNIRELLPTLESVAKSGKPLFIIAEDVEGEALATLVVNNIRGIVKVCAVKAPGFGDRRKAMLEDIAILTGGTVISEEVGLDLEKATLEHLGTAKRIVVTKDNTTVIDGAGEQTAIEARVTQIRAQVEETSSDYDREKLQERVAKLSGGVAVIKVGAATEIEMKEKKDRVDDALHATRAAVEEGVVPGGGVALVRAMAAVKALDFANDEQAQGANILLRAMSAPLRQIVENAGSEAAVILDKIVNGEGNFGYNAATNEFGDMIEMGILDPTKVTRSALQNAASIAGLMITTEAMVAELPKEDSAGGAGMPDMGGMGGMGG

SEQ ID NO: 12471 - protein, 348 aa, Clostridium acetobutylicum ATCC 824
MKTHKLLSIVLASVLLTSSFTGCTFASNKKKITPDTANAQNASTSVESPITKASKKVLPSVVGVTTTYIERDNTKKEGVGSGMIIDSSGYILTNNHVAGMTSKDLKVSLYDGSSIGAKPLWANESLDLSIIKIDKNNLQAVTLGDSSKVDIGETAIAIGNPLGLNFQRTVTSGIVSAVNRTVEAGEGVFMEDLIQTDASINPGNSGGPLIDANGNVIGVNSAKITSAEGIGFAVPINIVKPVLKSLKTTGQFKTPVIGIIGLDKSMNGYLNLNFEKGIYVYNISPNSGAAAAGINKGDIILSVNGKNINTMNELRESIYTIGANNTVSLKLKTASGEKTVNVKIQSST

SEQ ID NO: 12472 - protein, 1035 aa, Pichia pastoris
MSDTSNDEVIKDILKKIERERNIAQGASNIRKKTNNAEIIQNCNTSIREAQQNIEYLEQTLSKLQLEQHNRAARGSNQGELTQQKVLKTSPPTFTFLDLLKYDCPSLGHRIHYMLQLLEFKLQVEKQYREANEKISRLYQVDGDRRSIAAAEGGKVESDMKIHLMKMALKNYHDVHVNIDEVARDTEVMNTFRKKPLSGTLSITINSIRDILHVSSIFSKKLETLVSIRLMTVEKARTKPTKNQRVNDSFQIHVEKGNELSLIVYDKVGDTLTPVAMIWFLLSDIVEEIRKKKVDRELNATGWMSASNLAGRPEQQQPQQLGSHPFDNQQGNLQSLQTHTSHSNGDTDPAQLSASAWFVLAPAGQILLTMGFNKTNDAGQKKEFMGGLGRHGAIRQRKEEVLEQHGHKFVPRQFCNIMMCAMCGDFLPYSGYQCEDCRFLCHKKCYQKVITKCISKSSIDVDPEETKLNHRIPHKFEPFSNHGTKWCCHCGYILPWSRKNVYKCSECGVVCHAQCTHLVPDFCGMSMEMASKILSTIKETTATRQQRQAMSMSSKSSGKSDTHISQKQLPPVPSAAQRLSQSDEAPKTKPIRRPPPPPPPVSNEQRVLPQREEPQVEPERTPNQAIAEAEYALEKQISSTSSSKETDHHHQHHHYHPQQQPQQQVKTVKTAVASDVSPTKVAVKKQEAARRSSERHHGRHRQKYGLDDFRFIAVLGKGNFGKVMLAESIHTGQLCAIKVLKKDFIIKNDEVASTKSEKRVFIIANRGKHPFLLNLHQCFQTENRIYFVMEYVSGGDLMWHAQQRTFSPSRAKFYAAEVLLALQYFHENGVVYRDLKLDNILLTADGHIKLADYGLCKEEMWYGSTTATFCGTPEFMAPEILKEQKYDKAVDWWAFGVLLYQMMLGKSPFKGEDEDEVFNSILTDEPRYPIQMDRESVDILQQLLTKDPYKRLGASEEDAEEIKRHPYFHGINWDDIMQCKVPPPLIPTIKDRHDVSNFDVEFTTEAPKLTPVNSVLSLSMQEQFRGFTYVNDDHT

SEQ ID NO: 12473 - protein, 285 aa, Glycine max
MAFSRVALLICTVGYFVIASAGNFHQDFDITWGDGRAKILNNGELLTLSLDKASGSGFQSKNEYLFGKIDMQLKLVPGNSAGTVTAYYLSSKGATWDEIDFEFLGNLSGDPYILHTNVFSQGKGNREQQFYLWFDPTADFHTYSILWNPQRIVFSVDGSPIREFKNMESKGVPFPKNQAMRIYSSLWNADDWATRGGLVKTDWTQAPFTASYRNFNANACTMSSGTSSCGSNNPSSSNNNVWLSEELDSTDQERLKWVQKNYMIYNYCSDTQRFPQGLPSECNTA

SEQ ID NO: 12474 - protein, 478 aa, Colwellia psychrerythraea 34H
MTSSEPDNSIQKLHDTEEVQTSFLYVLFISSVAAIGGFLFGFDSGVINGTVTALGNAFNASDVASGFNVASVLLGCAVGALMAGPISDRFGRKPIMIITAIIFAISAFGSGISSSSAEFIFYRLIGGLGIGAASVLAPAYIAEVAPAALRGRLATLQQLAIVLGLFAAFLSNFLIASVSGGAEAMLMLDIAAWRWMFWVELLPAVLFLVGVIFIPESPRYLVAQGKIEEARTIFKRIATGVENEQIEEVKKSLHGDKKPSIRDLFIDGKKKIHPIIWIGIGLSVFQQFVGINVVFYYGAELWQAAGFDESQSLFINLIAGTTNIISTFIAIALVDKIGRKPLLLVGSVGMFISLGALTFIFGTGGLDEAGKLALSDTTGTVALIMANLFVVFFGLSWGPIVWVLLGEMFNNRIRGAALAIAASAQWLANFAITMTFPILLGSFGLAGAYGLYTVSALLSIFFVIKYIKETRGIRLEEM

SEQ ID NO: 12475 - protein, 81 aa, Gaertnera lowryi
  misc_feature (15)..(15): Xaa can be any naturally occurring amino acid
  unsure (1)..(81): unsure at all Xaa locations
TPQDEMRAGMSYFHXTIWKGVPKFLRRVDTALKNIGINERVPYNAPVIQFSSWMGGDRDGNPRVTPEVTRDVCLLARMMAA

SEQ ID NO: 12476 - protein, 415 aa, Zea mays
MAGYEQRVVAVIMVGGPTKGTRFRPLSLNVPKPLFPIAGQPMVHHPISACSRIPNLAQIYLIGFYDEREFALYVSSISNELRIPVRYLREDKPHGSAGGLYIFRDYIMEDSPSHIVLLNCDVCSSFPLPDMLEAHKKYGGMGTLLVNKVSAESANQFGELVADPETNELLHYTEKPETFVSDLINCGVYIFTPNIFSAIEDVLKQKKDRANLRRVSSFEALHSATKALPPDFVRLDQDILSPRAGKKELYTYQTLDFWEQIKTPGMSLRCSGLYLSRFRRTSPHLLASGDGKRTATIVGDVYIHPSAKVHPTSKIGPNVSISANARVGAGARLINCIILDGVEIMENAVVIHSIVGWKSSIGKWSRVQGEGDQNAKLGITILGEAVDVEDEVVIVNSIVLPNKTLNVSVQEEIIL

SEQ ID NO: 12477 - protein, 116 aa, Oryza sativa
IQPRTQQCIRPSFLLGSDRTPPPPPPTMASSRWVRPEVYPLFAAMGVAVGICGFQLFRNITGNPEVRVNKVGRAAGVLENHEEGRRYAEHGLRNYVRDKTPEIMPAINKFFTEPTK

SEQ ID NO: 12478 - protein, 708 aa, Chlamydomonas reinhardtii
MAVASTSRPSSARPIVINAASFGVKKTANQLLRELARGSARKSTSRSAVTGATGATCALDIVMVAAEVAPWSKTGGLGDVTGGLPIELVKRGHRVMTIAPRYDQYADAWDTSVVVDIMGEKVRYFHSIKKGVHRVWIDHPWFLAKVWGKTGSKLYGPRSGADYLDNHKRFALFCKAAIEAARVLPFGPGEDCVFVANDWHSALVPVLLKDEYQPKGQFTKAKSVLAIHNIAFQGRMWEEAFKDTKLPQAAFDKLAFSDGYAKVYTEATPMEEDEKPPLTGKTYKKINWLKGGIIAADKLVTVSPNYATEIAADAAGGVELDTVIRAKGIEGIVNGMDIEEWNPKTDKFLSVPYDQNSVYAGKAAAKEALQAELGLPVDPTAPLFAFIGRLEEQKGVDIILAALPKILATPKVQIAILGTGKAAYEKLVNAIGTKYKGRAKGVVKFSAPLAHMLTAGADFMLVPSRFEPCGLIQLHAMHYGTVPVVASTGGLVDTVKEGVTGFHMGALNPDKLDEADADALAATVRRASEVFAGGRYPEMVANCISQDLSWSKPAQKWEGLLEEVVYGKGGVATAKKEEIKVPVAEKIPGDLPAVSYAPNTLKPVSASVEGNGAAAPKVGTTAPAMGAWRATTPSGPSPAAATPKVTTYKPALPATAKPKTAGLKLAGEASTTSTSENGAASNGNGNGASASKTSAAKPLVSAATRKSA

SEQ ID NO: 12479 - protein, 416 aa, Debaryomyces hansenii CBS767
MDRLNQLSGQLNPSSKQALLEKNPDDVVIVAAYRTAITKGLKGGFKDVHSDYILRNFLVEFIKKTNVDPNLIEDVACGNVLNRGAGANEHRGACLSAGIPYTAGFIALNRLCSSGLMAISEIANKIKCGEIDCGLAAGSESMTANWGPQALSKSDPNLADDPEMEKCMIPMGITNENVAAKFNISRAVQDEFAAKSYAKASAAVKRGAFKDEILPIETAFKEGDDDDDDEDVKYTKAIIDTDECPREGVTAASLSKIKPAFKSDGSTHAGNSSQVSDGASGVLLMRRSLAEQKGYPIEAKYVLCSTVGVPPEIMGIGPAVAIPQVLKKTGLTVSDVDVFEINEAFAAQCLYSAQVCKVPEEKLNINGGGISLGHPLGGTGTRQYATILRLLKKGEIGLTSMCIGSGMGAASILVRE

SEQ ID NO: 12480 - protein, 250 aa, Chlamydomonas reinhardtii
RIRVHGAKELLLKSNYKLVMTVCKSFVGKGPHIQDLVSEGVKGLLKGVEKYDATKGFRFGTYAHWWIRQAVSRSLAETGRAVRLPMHMIEQLTRLKNLSAKLQTQLAREPTLPELAKAAGLPVTRVQMLMETARSAASLDTPIGGNELGPTVKDSVEDEREAADEEFGSDSLRNDMEAMLLELPEREARVVRLRFGLDDGKEWTLEEIGEALNVTRERIRQIEAKALRKLRVKTIDVSGKLMEYARTWRC

SEQ ID NO: 12481 - protein, 81 aa, Gaertnera madagascariensis
TPQDEMRAGMSYFHETIWKGVPKFLRRVDTALKNIGINERVPYDAPVIQFSSWMGGDRDGNPRVTPEVTRDVCLLARMMAA

SEQ ID NO: 12482 - protein, 81 aa, Gaertnera paniculata
TPQDEMRAGMSYFHETIGKGAPKFLRRVDTALKNIGINERVPYNAPLIQFSSWMGGDRDGNPRVTPEVTRDVCLLARMMAA

SEQ ID NO: 12483 - protein, 1188 aa, Shewanella oneidensis MR-1
MEQREEQVERHVLQIDLLLESSIRAVKSLRDVAVDHLRLGELVRKERLPQYGKFNESGQYFTLEPNYAKGGKPFTNMGRITGAGSLDGRSDKFYQELEMLFELSLSFPVAKEAAPKASAIYYLSRQRMMSYFPWTNDDERFRDELLNKKQFQYATPAMNPQRSVFWSEAYVDSTGKGLLTTLGVPVYLDDEFMGSINLDMTLASLARQIRVYFKMPGTVILLDQQNNILSHSDFDGSDINRVYHISQRIPSELHSLPESELFDAHEGIIRNGYYIHSVALHNAPWRLLYLQNEDDLFQDSVEKLQLTFILVVIALSVLVTIVHWQTRRSFVSPASRLLSHLEGCSQEPRKPPEKITPGWEPWFLLVSRIFEENKQYTHHLAEQNKRLDKLVARRTERLKDATERREREYALLRSLLDSIPEAIVFKDKEGNYLGCNKAAERMLGYTESEMIGLSSEDLTSPEMGIRIRAEDAQILKDRTPLRYQEKVELAGKPVLLDTLKLPFYNRRGELQGLIAVWRDVTREYESAEQLRLSEERYHLAMDAVEDGLWDWYLDSEHIICNPSYYSMLGYKPNEFPALVSAIDQLTHPDDRIRVEEYRNQYLENPVDAYEIEFRILGKNSSYHWVLSRGRVVEFTTDGQPKRMVGTHKDITRHKSNEVALLEAKQDAELANLYKSEFLANMSHEIRTPMNAIIGMLQLAQRTSLTAQQKDYLEKAGFSAQSLLRIINDILDFSKIEAGKLELERVPFPLDKVLDHALDLNALKAQEQGVELLLYAPVTAGLILKGDPLRLGQVLINLLSNAVKFTQSGEIELGCEDVGERDHRITLKFWVRDTGIGISKDQQEKLFDAFAQADGSTTRKYGGTGLGLSISKHLVSMMGGKMQVQSELGVGSTFSFTISFEIAEEAKIEPLVVPEKLNNLRTLVVDDNPTALQIYSALMRDFHFEVDTAASGAEALYKLSRDPIDLLLLDWMMPEMDGSDVISAIDTMVAEGRIAKRPIIIMMTAYAAEPLLHEVDSANVFAVLQKPFKASSLFDEIIAAFADEPRLNVVQPIAEVAVEEGEHTGLVLLVEDNFINQQVATELLKSAGYEVVVAGNGQIALDIVDSRPFDAVLMDIQMPVMDGLTAARALRERYSADVLPIIAMTAHAMSGDREKSLAAGMNAHITKPIVLTELFETLTHWIKHKHNHR

SEQ ID NO: 12484 - protein, 275 aa, Triticum aestivum
  misc_feature (151)..(151): Xaa can be any naturally occurring amino acid
  unsure (1)..(275): unsure at all Xaa locations
MQILNEQLAAPSTGLMVKESASPGSGSGSAGGAAEKMGRGRIEIKRIENTTNRQVTFCKRRNGLLKKAYELSVLCDAEVALIVFSGRGRLYEYSNNSVKATIERYKKATSDTSSAGTVAEINAQHYQQESAKLKQQITTLQNSNRFIFSPXTLIGDTMATMSHRDLKQLEGRLDKGLGKIRARKNELLCAEIEYMQRREMELQNNNFFLREKVAETERGQQQTLNMMGAASTSNEYEQNMIHCDPRTFLQFNFMQQQPQYYSQQEDRKSLNSVGR

SEQ ID NO: 12485 - protein, 544 aa, Olea europaea
MQVSTHAVKGNLCLGLQNLRPLPSSRELRENNLGFAVSELRMTKRSSCFGIGLDSIAMGARGNWPKSVYGSLAKARSVRAQAYEGDVEDVAPAKIQVKSSGTVLPYVGVACLGAILFGYHLGVVNGALEYLAKDLGIAENAVLQGWVVSTLLAGATVGSFTGGSLADKFGRTKTFLLDAIPLAVGAFLCATAQNIETMIIGRLLAGIGIGISSAIVPLYISEISPTEIRGTLGSVNQLFICIGILAALVAGLPLAGNPLWWRTMFGVAIIPSILLALGMAFSPESPRWLYQQGKISEAEVSIRKLNGKERVAEVMSDLDAAAQGSSEPEAGWFDLFSSRYWKVVSVGAALFLFQQLAGINAVVYYSTSVFRSAGITSDVAASALVGAANVFGTTIASSLMDKQGRKSLLLTSFAGMAVSMLLLSLTFTWKTLAPYAGTLAVLGTVLYVLSFSLGAGPVPALLLPEIFASRIRAKAVALSLGMHWISNFVIGLYFLSVVTKFGISTVYLGFASVCLLAVMYIAGNVVETKGRSLEEIERALTAAP

SEQ ID NO: 12486 - protein, 557 aa, Glycine max
MASHCVMAVTPSTPLLSFLERLQETAFETFAHSNFDPKTYVDMPLKSALTITEDAFQKLPRNANGSVPVEDLKRFIEAYFEGAGDDLVYRDPQDFVPEPEGFLPKVNHPQVRAWALQVHSLWKNLSRKISGAVKAQPDLHTLLPLPGSVVIPGSRFREVYYWDSYWVIRGLLASQMHDTAKAIVTNLISLIDKYGFVLNGARAYYTNRSQPPLLSAMIYEIYNSTGDVELVKRSLPALLKEYEFWNSDIHKLTILDAQGCTHTLNRYYAKWDKPRPESSIMDKASASNFSSVSEKQQFYRELASAAESGWDFSTRWMRNPPNFTTLATTSVIPVDLNAFLLGMELNIALFAKVTGDNSTAERFLENSDLRKKAMDSIFWNANKKQWLDYWLSSTCEEVHVWKNEHQNQNVFASNFVPLWMKPFYSDTSLVSSVVESLKTSGLLRDAGVATSLTDSGQQWDFPNGWAPLQHMLVEGLLKSGLKEARLLAEEIAIRWVTTNYIVYKKTGVMHEKFDVEHCGEFGGGGEYVPQTGFGWSNGVVLAFLEEFGWPEDRNIEC

SEQ ID NO: 12487 - protein, 466 aa, Capsella bursa-pastoris
MAGIVTEPWASAENGNASMTAKGSSRELRHGRTAHNMSSSSLRKKSDLRVIQKVPYKGLKDFLTNLQEVILGTKLAILFPAIPAAIICTYCGVSQPWIFGLSMLGLTPLAERVSFLTEQLAFYTGPTLGGLLNATCGNATELIIAILALTNNKVAVVKYSLLGSILSNLLLVLGTSLLCGGIANIRRERRFDRKQADVNFFLLLMGLLCHLLPLMFVYVATAETPAALVSDMTLTLSRGSSIFMLIGYIAYLVFQLWSHRQLFDAQDQEDEYDDDVEEETAVISFWSGFAWLVGMTLVIALLSEYVVATIETASESWNLSVSFISIILLPIVGNAAEHAGAIIFAFKNKLDISLGVALGSATQIGLFVVPLTIIVAWILGINMDLNFNLLETGSLALSIIITAFTLQDGTSHYMKGLVLLLCYFIIAFCFFVDKLPQKQPNGFHMGLQQINNVVTGITGTGGASST

SEQ ID NO: 12488 - protein, 412 aa, Saccharomyces cerevisiae
SATLFNNIELLPPDALFGIKQRYGQDQRATKVDLGIGAYRDDNGKPWVLPSVKAAEKLIHNDSSYNHEYLGITGLPSLTSNAAKIIFGTQSDALQEDRVISVQSLSGTGALHISAKFFSKFFPDKLVYLSKPTWANHMAIFENQGLKTATYPYWANETKSLDLNGFLNAIQKAPEGSIFVLHSCAHNPTGLDPTSEQWVQIVDAIASKNHIALFDTAYQGFATGDLDKDAYAVRLGVEKLSTVSPVFVCQSFAKNAGMYGERVGCFHLALTKQAQNKTIKPAVTSQLAKIIRSEVSNPPAYGAKIVAKLLETPELTEQWHKDMVTMSSRITKMRHALRDHLVKLGTPGNWDHIVNQCGMFSFTGLTPQMVKRLEETHAVYLVASGRASIAGLNQGNVEYVAKAIDEVVRFYA

SEQ ID NO: 12489 - protein, 187 aa, Arabidopsis thaliana
  misc_feature (38)..(38): Xaa can be any naturally occurring amino acid
  misc_feature (56)..(56): Xaa can be any naturally occurring amino acid
  misc_feature (78)..(78): Xaa can be any naturally occurring amino acid
  misc_feature (104)..(104): Xaa can be any naturally occurring amino acid
  misc_feature (129)..(129): Xaa can be any naturally occurring amino acid
  misc_feature (154)..(154): Xaa can be any naturally occurring amino acid
  unsure (1)..(187): unsure at all Xaa locations
CWLFSQDYRHMCRRFRAHTYTLIAKSRKILFVKLHWKXPTCAINNLTDEEAKVAGXPITLHTTKRIHDTHCLLYLPYXKLLIQTWITLYQDKVDFDPLDETKHXPEDIEPVHSPGTLILNTTIDNYLQXTEQLDFNQCLVDPGIYYSNDTLLQXRIFAYGDTHRHRLEPNYLQLTINAPICAHHINH

SEQ ID NO: 12490 - protein, 340 aa, Magnetospirillum magnetotacticum MS-1
MTLTVRRRAFASVAAAALVAGGAAGFGLTQPATPAYAQALPKSPITAPEHPPGSFADVVDKVKPGVVAVKVKLDDSADDDEDGSGAPNMQQVPPQLREFFKRFGQGGPGGGTPQRRGERGAVGSGFIISGDGYVVTNNHVVDHAKTVQVTLDDNRTLDAKVIGKDAKTDIALLKITEAGSYPYVQFGKGAPRVGDWVVAIGNPFGLGGTVTAGIVSARGRDIGAGPYDDFLQIDAPINKGNSGGPTFNVNGDGRRREPRRLASPSGGSVGLAFALPAETVTPVVAPLRTDRQGGPWLSRRAGAAGDQGHRRRTRSRQGQGRPDRSRRERQPGGQGRTEIG

SEQ ID NO: 12491 - protein, 269 aa, Zea mays
MARNAVDKATSIDAQLRLLAPQKLSDDDKLVEYDALLLDRFLDILQDLHGEDIRETVQECYELAAEYENKLDPKMLDEIGNVLTSLDPGDSIVITKSFSHMLILANLAEEVQIAYRRRIKLKKGDFVDENSATTESDIEETLKRLMHQLKKSPLEVFDALKNQTVDLVLTAHPTQSVRRSLLQKHGRIRNCLTQLYAKDITPDEKQELDEALQREIQAAFRTDEIRRAPPTPQDEMRAGMSYFHETIWKGVPKFLRRVDKALKNIGINE

SEQ ID NO: 12492 - protein, 388 aa, Arabidopsis thaliana
  misc_feature (285)..(285): Xaa can be any naturally occurring amino acid
  misc_feature (288)..(288): Xaa can be any naturally occurring amino acid
  unsure (1)..(388): unsure at all Xaa locations
MILSLCCLGSWPAILTLLERRGRLPQHTFLDFATANLLAAIVIAFSLGEIGKSTFLKPDFTTQLPQDNWPSVLLAVAGGVLLSIGNLATQYAFAFVGLSVTEVITASITVVIGTTLNYFLDNKINKAEILFPGVGCFLIAVFLGAAVHASNAADVKEKLKSLPSEDLYSSIENGEDKPEIEKTDVESQEKLAEKAKAGTAGFYVELENKRAIKVFGKSIMIGLFITLFAGISLSLFSPAFNLATNDQWSTLPKGVPKLVVYTAFFYFSIAGFLISLILNLIFLYXPMXGLARSSLKKYIYDSKGRGWAVFAGFLCGFGNGLQFMGGQAAGYAAADSVQALPLVSTFWGIVLFGEYRKSSKRTYALLVSMLAMFVAAVAILMASSGHRK

SEQ ID NO: 12493 - protein, 344 aa, Thermus thermophilus HB27
MRAVVYKGPFQVAVEEVPEPRLEADTDALLEVELSAICGSDLHIYHGKIAGVLPGTVLGHEFVGRIVEKGPLVPFPVGERVVGSFQVACGECPACRKGQFFACSRGGVFGFGLALGNLPGAQAERVRVPFARHTLFPIGDLPAEEAILAGDILTTAYGGVRPFLTPGMSVAVVGSGPVGLMAQMVAHALGAGQVYAIDPEEARLEKAKALGSLPIHPKAEDPVARVRRETEGLGADLVVEAVGGDGEALKLALRLAGPGGVVSSLGVPTAERLDYPWLPAFSRGITLRSALANVPRWIGEVLALQKAGRLKGSFVFSHRLPLEEAPEGYRLFHERKATKVALVP

SEQ ID NO: 12494 - protein, 286 aa, Brassica napus
  misc_feature (149)..(149): Xaa can be any naturally occurring amino acid
  misc_feature (164)..(164): Xaa can be any naturally occurring amino acid
  unsure (1)..(286): unsure at all Xaa locations
MLKVPEHQVAGHIAKDGKLGPLVDNQGRFYKPLQGDARGENEAKFYESFSSNKNVPDHIRGYFPVYHGVQLVEASDGSGKLPHMVLEDVVSSYVKPSVMDVKIGSRTWYPDVSEAHFNKCILNTSVDTSLCSTAFSWLKPLMDQASFHXMVLEDVVSGYVKPSXWMLRLGLGLGSLTFADDSVPDCAYASVVYGGSNGILMQLLELKAWFETQTLYHFNSCSVLMVYENESGGDEERRPQVKLVDFAHVLDGNGVIDQNFFGGLCSFIKFIQDILESSDNRCENGH

SEQ ID NO: 12495 - protein, 404 aa, Uncultured proteobacterium
MNFNALFQAQIDTLKSEGNYRYFAELERKCGKFPHAASHHDGKVQDVTVWCSNDYLGMGQNPVVIEAMCEAVTRSGTGAGGTRNISGTNHDHLLLERELADLHNKEAALLFTSGYVSNWAALSTLGSRLEGCIILSDSGNHASMIEGIRHSRAQKVIWNHNDVKDLEAKLAALPVDAPKIVAFESVYSMDGDIAPIRQIVEVAEKYGAMTYLDEVHAVGLYGPRGGGIAEQEGLMDRITLIEGTLGKAYGVVGGYITGSSVLCDFIRSFASGFIFTTALPPAVAAAARVSIMHLKTSDSERQRQRQQVAKLRAGLNRAGIPHLENQSHIVPVMIKDPVKTKMLADYLMDEWGIYVQPINYPTVPKGTERLRFTPSPLHSDADIAYLVEALESLWKQCAIAHAVA

SEQ ID NO: 12496 - protein, 375 aa, Uncultured proteobacterium
MNAPTHSAFANTAEEAIAAQDALDDPMTSEKATEVAMQNTLLTPRFYTTDFAEMDAIDVTPVREDWDRLIAQMKSDPNKGHFKKNEDWDNVDWEGMEPALKAEFIDFLISSCTAEFSGCVLYKEMKRRGSNEDITTLFQLMARDEARHAGFINDALREAGVRVNLGFLTQQKKYTYFRPKFIYYATYLSEKIGYARYITIYRHLEENPELRFHPIFKWFREWCNDEFSHGEAFALLMKSDPKLTESFGNKLWIKFFLTAVYSTMWVRDHQRPLFHEALGVDVTWYGQEVFRKTSEISKQIFPMTLDIDHPRWRKNLDRMEAASRQIAAAKARGGLGGMISRLGGMAKAATAFVLVFTIPAKTHSVPTSTRMEPTY

SEQ ID NO: 12497 - protein, 81 aa, Gaertnera schatzii
  misc_feature (37)..(38): Xaa can be any naturally occurring amino acid
  unsure (1)..(81): unsure at all Xaa locations
TPQDEMRAGMSYFHETIWKGVPKFLRRVDTALKNIGXXERVPYNAPVIQFSSWMGGDRDGNPRVTPEVTRDVCLLARMMAA

SEQ ID NO: 12498 - protein, 81 aa, Gaertnera schizocalyx
  misc_feature (33)..(33): Xaa can be any naturally occurring amino acid
  unsure (1)..(81): unsure at all Xaa locations
TPQDEMRAGMSYFHETIWKGVPKFLRRVDTALXNIGINERVPYNAPVIQFSSWMGGDRDGNPRVTPEVTRDVCLLARMMAA

SEQ ID NO: 12499 - protein, 81 aa, Gaertnera ternifolia
  misc_feature (8)..(8): Xaa can be any naturally occurring amino acid
  misc_feature (64)..(64): Xaa can be any naturally occurring amino acid
  unsure (1)..(81): unsure at all Xaa locations
TPQDEMRXGMSYFHETIWKGVPKFLRRVDTALKNIGINERVPYNAPVIQFSSWMGGDRDGNPRXTPEVTRDVCLLARMMAA

SEQ ID NO: 12500 - protein, 431 aa, Escherichia coli
MVSLEKNDHLMLARQLPLKSVALILAGGRGTRLKDLTNKRAKPTVHFGGKFRIIDFALSNCINSGIRRMGVITQYQSHTLVQHIQRGWSFFNEEMNEFVDLLPAQQRMKGENWYRGTADAVTQNLDIIRRYKAEYVVILAGDHIYKQDYSRMLIDHVEKGARCTVACMPVPIEEASAFGVMAVDENDKIIEFVEKPANPPSMPNDPSKSLASMGIYVFDADYLYELLEEDDRDENSSHDFGKDLIPKITEAGLAYAHPFPLSCVQSDPDAEPYWRDVGTLEAYWKANLDLASVVPELDMYDRNWPIRTYNESLPPAKFVQDRSGSHGMTLNSLVSGGCVISGSVVVQSVLFSRVRVNSFCNIDSAVLLPEVWVGRSCRLRRCVIDRACVIPEGMVIGENAEEDARRFYRSEEGIVLVTREMLRKLGHKQER

SEQ ID NO: 12501 - protein, 173 aa, Arabidopsis thaliana
MGASSSSSVSEKSIHQFTVKDSSGKEVDLSVYQGKVLLVVNVASKCGFTESNYTQLTELYRKYKDQGFVVLAFPCNQFLSQEPGTSEEAHQFACTRFKAEYPVFQKVRVNGQNAAPVYKFLKSKKPSFLGSRIKWNFTKFLVGKDGQVIDRYGTTVSPLSIQKDIEKALAQEL

SEQ ID NO: 12502 - protein, 332 aa, Wigglesworthia glossinidia endosymbiont of Glossina brevipalpis
MTLNIALNGFGRIGRMIFRIAQTRNNFNIVAINDLCSINEISYMLRFDSTHGKFLKKIYIKENFIQIEDKKIYCFSEKDPSNLPWKKLNIDIVIEATGLSLTKKASENHIISGAKKVIITAPPKDNIPMFVMGVNNNLYNGEKIISNASCTTNCLAPIAKVLNDYFGIQEALMTTVHSVTSTQNTVDGRSLQAFRIGRSCLNNIIPTSTGAADSVGKIIPDLNGKITGTSFRVPTTNVSVVDLTVKFKKETSYKEVCNAIKYESKNKFNGILGYTEDNVVSSDFNGEFLTSVFDSKAGIELNKTFMKIISWYDNESGYSSKVLDLAQYIFNK

SEQ ID NO: 12503 - protein, 764 aa, Burkholderia sp. 383
MVTTHNLGFPRIGAKRELKFGLERYWKGESSRGALKALGAELRQRHWNDQRDLDLAPVGDFAFYDQVLDMSFTLGNLPKRVQGFHGDALDNYFRVARGRSAQSAEEHAACCGGVSAGEMTKWFDTNYHYIVPEFHADTNFSLDPSRLLQQLAEAQAQGVAAKPVIVGPVTYLWLGKAKDDSDRLALLPKLLPVYGALLDTLTAQGVEWVQIDEPILVTELDAAWQQAFRTAYAALETRRIKVLLATYFGQLQGNLALATSLPVDGLHVDAINARDEVDALARELPAERVLSVGAINGRNIWKTDLNATLDWLEPLAKRLGDRLWLAPSCSLLHVPVDLASEEKLDAEIRSWLAFALQKLDELKVLATALNEGRDKVADALAANAAAIHSRRHSPRVNNPAVKAAIARIDAQLGNRVSPYTQRAPKQSARLNLPAFPTTTIGSFPQTGEIRQARSQFKAGTLDEAGYRKAMQAEIERSVREQESLELDVLVHGEAERNDMVEYFGEQLDGYAFSQFGWVQSYGSRCVKPPILFGDISRPKAMTVEWITYAQSLTNKPMKGMLTGPVTILNWSFVRDDQPRSVSCYQLALAIREEVLDLEKAGVRVIQIDEAALREGLPLRRAQWGEYLKWAVESFRITANGVQDDTQIHTHMCYSEFNDIIASIADMDADVITIETSRSDMELLDAFDNFKYPNEIGPGVYDIHSPNIPTQEHIVGLMKKAAERIPAERLWVNPDCGLKTRQWAEVIPALTNMVAAAKTLRNQVQ

SEQ ID NO: 12504 - protein, 145 aa, Arabidopsis thaliana
MGRGKIAIKRINNSTSRQVTFSKRRNGLLKKAKELAILCDAEVGVIIFSSTGRLYDFSSSSMKSVIERYSDAKGETSSENDPASEIQFWQKEAAILKRQLHNLQENHRQMMGEELSGLSVEALQNLENQLELSLRGVRMKKVLML

SEQ ID NO: 12505 - protein, 419 aa, Pyrococcus abyssi GE5
MKAVVLAAGKGERLRPLTDDRPKPILKVANKPIIEYILENLDPFVDEFIIIVKYMKEKIIETLGDEFHGKPITYVSQVEEEGTAKAIYSAKDYIEEEEFFAINGDIYFEQEAIRGLLHVYKKTKANAALVVKKFDDLSQLGMVKTEGGYVREIVEKPGNVGGLANLGIYIFNPDVFEFIERTQESERGEYEITDTINLMISDGRKVAYFEYSGFWSDIGRPWDLLEVNEYILKTKLKHDIRGTVEEGATIIPPVEIGEGTVVRSGSYIIGPVKIGKNCRIGPNCFIRPYTSIGDNCHIGNAVEIKNSIIMDNSNAPHLNYVGDSIVGENTNLGAGTITANLRHDNRTIKVEIKGKLEDSGRRKLGAIIGHNVKTGINVTIYPGRKIGSGALVGPGVIVDKNIPPNVLVVAKQEKIVKEI

SEQ ID NO: 12506 - protein, 581 aa, Glycine max
MVPSSFRPFISDDSRAKRVRVLELSRRLKHRGPDWSGLHQHGDCFLAHQRLAIVDPASGDQPLFNEDKSVIVTVNGEIYNHEELRKQLPNHNFRTGSDCDVIAHLYEEHGEDFVDMLDGIFSFVLLDTRDNSFIVARDAIGVTSLYIGWGLDGSVWISSEMKGLNDDCEHFECFPPGHLYSSKERGFRRWYNPPWFSEAIPSAPYDPLVLRHAFEQAVIKRLMTDVPFGVLLSGGLDSSLVASITSRYLANTKAAEQWGSKLHSFCVGLEGSPDLKAAKEVADYLGTVHHEFTFTVQDGIDSIEDVIYHIETYDVTTIRASTPMFLMSRKIKSLGVKWVISGEGSDEIFGGYLYFHKAPNKEEFHRETCRKIKALHQYDCLRANKSTFAWGLEARVPFLDKAFINAAMSIDPEWKMIKRDEGRIEKWILRRAFDDEEHPYLPKHILYRQKEQFSDGVGYSWIDALKAHPPKHVTEKMMLNAGNIYPHNTPKTKEAYYYRMIFERFFPQNSARLTVPGGASAACSTAKAVEWDAAWSNNLDPSGRAALGVHISAYENQNNKGVEIEKIIPMDAAPLGVAIQG

SEQ ID NO: 12507 - protein, 388 aa, Pseudomonas aeruginosa PAO1
MRALTFHGSHDVRIDRVAEPRLQEPDDLLLRVTATAICGSDLHLYRGKIPMVEQGDILGHEFMGVVEEVGSAVTAVRPGDRVVVPFVIACGECFFCRLNLHAACETTNPGRGAILNKKQIPPGAALYGYSHLYGGVPGGQAEYVRVPKANSGPFVIPDVMEDERVLFLSDILSTGYQAVRNAGVRQGSSVAIYGAGPVGLMAAACARMLGAERIFIVDHHPYRLDFAARTYGAIPIDFDQEDDPAAAIIERTDGHRGVDAVIDAVGFEAKGSVTETVLTALKLEASSGKALRQCIAAVRRGGTVSVPGVYAGFIHGFLFGDAFDKGLTFKMGQTHVQALLPALLEHIGNGDLHPEAIISHRLRLDDAPEGYALFDEKREDCRKVVLRP

SEQ ID NO: 12508 - protein, 175 aa, Triticum aestivum
MAPAVMASSATTVAPFQGLKSTAGLPVSCRSGSTGLSSVSNGGRIRCMQVWPIEGIKKFETLSYLPPLSTEALLKQVDYLIRSKWVPCLEFSKVGFVFREHNSSPGYYDGRYWTMWKLPMFGCTDATQVLNEVEEVKKEYPDAYVRVIGFDNMRQVQCVSFIAFRPPGCEESGKA

SEQ ID NO: 12509 - protein, 423 aa, Yarrowia lipolytica CLIB122
MLASAAVAFSPINVHSIEPLINSSESLQVREILKVDRTRLLCAVDGAGNKRACLTEFNNKNIDVLAASLNNVLLGKQLEARSEASSSFSGAGRNSDEELDCSFEPRDLKKPIRIGALFAVLATSALGVFPPVLATSVFKINLQSLPMTFVKQFGTGVVLSTAYVHLAAESQEDFTNECLGDLSYDPTAMSLALAGTFIAFVLEYGSARWLRARHERKKPNHSSESDDCDKDQVKGAVDVIETQIDMSGAANMGCAAHNATLIDPNDKISVIIMEGGIIFHSVLVGVAVTIADDDGFISLFIAILFHQAFEGIGLGSRIAGLRDSSLFFKMSMCTYFTIITPIGMAIGLGVMDSMNSNDPATIWAIGTISALSAGVLIWAGVVEMLAFDWLFGDLSFAPKKRVFFAMSGLVGGMICMSLIGKWA

SEQ ID NO: 12510 - protein, 408 aa, Thermus thermophilus HB27
MRRVVVTGLGALTPIGVGQEAFHKAQLAGKSGVRPITRFDASALPVRIAAEVDVDPGAYLDRKELRRLDRFVQYALIAAQLALEDAGLKPEDLDPERVGTLVGTGIGGMETWEAQSRVFLERGPNRISPFFIPMMIANMASAHIAMRYGFTGPSSTVVTACATGADALGSALRMIQLGEADLVLAGGTEAAITPMAIGAFAVMRALSTRNEEPEKASRPFTLSRDGFVMGEGAGVLVLEAYEHAKKRGARIYAELVGFGRSADAHHITEPHPEGKGAALAMARALKDAGIAPEQVGYINAHGTSTPAGDRAEVLAIKRVFGDHAKRLMVSSTKSMIGHLLGAAGAVEAIATVQALYHGVIPPTINLEDPDPELDLDFVPEPREAKVDYALSNSFAFGGHNAVLVFKRV

SEQ ID NO: 12511 - protein, 467 aa, Agrobacterium tumefaciens str. C58
MTIDIKNIAEMDRNAVLHPFTQLKDFASGKLGEPTIVETGKGIRIQDAHGKQLIDGFAGLYCVNVGYGRTEVAEAISRQAYRLAYYHSYAAHTTDELAILSDRLVRMAPGKMSKVFYGMSGSDANETQAKLVWYYNNLRGKPQKKKIISRERGYHGCSVVAGSMTGMSFYHDHMDLPRVGILHTGVPHHYWGAEAGETELEFSKRRAAELEALILREGPDTIGAFIAEPVLGTGGITPPPEGYWPAIQEVLKKYDVLLIADEVITGFGRTGSMFGSQHYGIEPDLITVAKGLTSAYFPLSGAIVGEKVYTVMEDGADRVGAFSHGYTYSGHPIGAAAANAVLDIVEKEDLPGNAQAVGSYFQEQLKAKFAQLPIVGEVRGVGLMGAIEFVADREKKTRFAPHLTVGARVSKAARNGGLIARAMPHGDILGFAPPLVTTKAEVDEIIAIAEAAVRTVMDDLVQAGEKI

SEQ ID NO: 12512 - protein, 492 aa, Agrobacterium tumefaciens str. C58
MKGIASAALKNLHRRDLIEDRAFVNGAWVERDQMFAIVDPAGGDHLADVASCTLNDVDFAIDAASKAFAGWRDMLPVDRGDILRNWSARMRENAHDLATIISAEQGKPLAESRGEIAYAANFLDWFASEGERSYGETIPTHLKGSNLSVRMQPIGVTVAITPWNFPSAMIARKAGAALAAGCTMIVKPAPETPLSALALARLAEESGVPPGVLQVLPGEAAPLARRLLENTEVRAFSFTGSTEVGRILLTQSAATVKKASLELGGHAPFIVFADADLTEAVKGCLGAKFATSGQDCLAANRIYVQRSLYPRFVERFAEATSRLTVGHGLETGVDIGPMTRPSVAEKCRQQVAQALSAGARLVCGGQDSPLGGNFVTPTVLADVTDDMLIAREETFGPVAAILPFDDEAEVIRRANATEMGLAAYLYTNDLGRAMRLTDQLEYGMVAVNTPKFTGAPIPFGGWKQSGLGREGSRHGLMEYLEPKYVCFGNLAA

SEQ ID NO: 12513 - protein, 452 aa, ASPERGILLUS NIDULANS FGSC A4
MEKEYPDDSLDKAPIREDAVFGEIREGGVNYRDVGWKGTTALMMKAQLGLGVLSIPQVFDTVGLIPGILIVLAISGMTGWSNWMVGVFKRRHPEVYGIDDVGRMLFGRIGFEVLGAAYTLLWIFVSGSGMLSVSIALNALSSHAICTAIFVAIAAVVGFGLSSIQTLAKMSWLAWVGTACIIVAVSTVTIAVGVQGHPPAIDGVVPEADYKLFNSPSFAEAMAAVSTVCLSYAGTPAFFNIAAEMKDPRLYTRALAISHSIITVIYIVCGTVVYYYCGSHVASPALGSAGALIKKICYGIALPGLVVSMVLLLHLPAKQIFVRMLRGSKHLTSHTLIHWVAWLGSTFAVALIAYIIASGIPVFSSLVSFVGALFGTPMCFQPFGCMWLYDNWGSGTSGKPLSWWFKVCWSSFMVLAGCLLTIAGTYGSIVGIIDSYNASGGSSAWSCANNDV

SEQ ID NO: 12514 - protein, 402 aa, Azoarcus sp. EbN1
MTRPVYICDAIRTPFGRYGGTLSGVRADDLAALPIKALVERNPGVDWQAVDDVLYGCANQAGEDNRNVARMAALLAGLPVEVPGSTINRLCGSSLDAIGMAARAIRSGETELMIAGGVESMSRAPFVLGKADSAFSRSAKIEDTTIGWRFVNPLMKAQYGIDSMPETAENVATDFGVSRADQDAFALRSQQRWAAAAERGFFEREIVKVEVPRKKGEPLVLAADEHPRPDTTLATLAKLKGVVRPDGSVTAGNASGVNDGACALLLASEAAVKRHGLTPRARVLGSAAAGVAPRIMGIGPAPATLKLLARLGMSVRDFDTIELNEAFAAQGLAVLRQLGLPDDGANVNPNGGAIAIGHPLGASGARLVTTALNQLETTGGRFGLATMCIGVGQGIALAIERV

SEQ ID NO: 12515 - protein, 81 aa, Gaertnera walkeri
  misc_feature (23)..(23): Xaa can be any naturally occurring amino acid
  misc_feature (43)..(43): Xaa can be any naturally occurring amino acid
  misc_feature (55)..(55): Xaa can be any naturally occurring amino acid
  unsure (1)..(81): unsure at all Xaa locations
TPQDEMRAGMSYFHETIWKGVPXFLRRVDTALKNIGINERVPXNAPVIQFSSWMXGDRDGNPRVTPEVTRDVCLLARMMAA

SEQ ID NO: 12516 - protein, 422 aa, Wolinella succinogenes
MGTVTFTNNETGEKFEFEILNPTRGPQLVDFSKFYETTGMFTFDPGYGSTANCKSEISFVDGKKGELVYYGHPIEELVEKYKFVDVIKLLIGNGYIFPTKEESDQFERELVRRSYIHEGLRKIIDAFPDGAHPMANLSSSVSALSTFYYDHIDMEYEAEYQTMARRIIAKTPTLAAFAYRSSVGSPFVYPDADRGYVENFLYMLRAYPHGKLKEEISPIEVSALDTIFMLHADHGQNASTATVRNVASTGVHPYAALSAGLSALWGKAHGGANESVMDQLEMIGDVKNVDRYIAKAKDKNDSFRLMGFGHRVYKSYDPRARILRKLKDDLDQKGVKMNQRLVEIAEKIEEVATQDEYFLSRSLYPNVDFYSGIILTALKIPKSMFTPIFAIGRMPGWCGQVLELLQEPNVKITRPRQMYVGK

SEQ ID NO: 12517 - protein, 81 aa, Morinda citrifolia
  misc_feature (17)..(17): Xaa can be any naturally occurring amino acid
  misc_feature (24)..(24): Xaa can be any naturally occurring amino acid
  unsure (1)..(81): unsure at all Xaa locations
TPQDEMRAGMSYFHETXWKGVPKXLRRVDTALKNIGINERVPYNAPVIQFSSWMGGDRDGNPRVTPEVTRDVCLLARMMAA

SEQ ID NO: 12518 - protein, 330 aa, Erwinia amylovora
MSQNTLKVNELNEDAEFDENGAEVFDEKALVGNEPGDNELAEEDLLSQGATQRVLDATQLYLGEIGYSPLLTAEEEVFFARRALRGDVPSRRRMIESNLRLVVKIARRYSNRGLALLDLIEEGNLGLIRAVEKFDPERGFRFSTYATWWIRQTIERAIMNQTRTIRLPIHIVKELNVYLRTARELSHKLDHEPSAEEIAEKLDKPVDDVSRMLRLNERITSVDTPLGGDSEKALLDILADEKDNGPEDTTQDDDMKQSIVKWLFELNAKQREVLARRFGLLGYEAATLEDVGREIGLTRERVRQIQVEGLRRLREILQGQGLSIEALFRE

SEQ ID NO: 12519 - protein, 81 aa, Morinda royoc
TPQDEMRAGMSYFHETIWKGVPKFLRRVDTALKNIGINERVPYNAPVIQFSSWMGGDRDGNPRVTPEVTRDVCLLARMMAA

SEQ ID NO: 12520 - protein, 128 aa, Photobacterium profundum SS9
MAYSEKVIEHYENPRNVGSFDKNDKNIGSGMVGAPACGDVMKLQIKVSDEGIIEDAKFKTYGCGSAIASSSLITEWVKGKSLDEAAAIKNSAIAEELELPPVKIHCSILAEDAIKAAVSDYKKKHEAN

SEQ ID NO: 12521 - protein, 542 aa, Pasteurella multocida subsp. multocida str. Pm70
MATNYIFVTGGVVSSLGKGIAAASLAAILEARGLKVTMLKLDPYINVDPGTMSPTQHGEVFVTQDGAETDLDLGHYERFIRTKMTKRNNFTTGKIYSEVLRKERRGDYLGATIQVIPHITNEIKSRVIDGAAGHDVAIVEVGGTVGDIESLPFLEALRQLAVQVGRERTLFMHLTLVPYIPTAGEVKTKPTQHSVKELLSIGIQPDVLICRSDRMVPPNERAKIALFCNVPERAVISLKDVSSIYQIPALLKSQGLDDFICQRFHLDCPEADLSEWEQVLYQEANPTGEVVIGMVGKYTELPDAYKSVNEALKHAGLKNRLSVQIKYIDSQDVETKGTEVLEGVDGILVPGGFGNRGVEGKILTAKYARENHIPYLGICLGMQVAYIEYARNVAGLTDANSTEFDRTCDYPVVGLITEWQDAEGNIETRTDASDLGGTMRLGAQQCHLMEGSKARELYGAETIEERHRHRYEVNNVLRPQVEKAGLKVTGLSADKKLVEIIEVPNHPWFVACQFHPEFTSTPRDGHPLFAGFVKAAKDNQKK

SEQ ID NO: 12522 - protein, 762 aa, Chlamydomonas reinhardtii
MAAPDALIAAFIPASAVVAILFAVFLWKRVAAIQMTGGRVLSSQNGREYLLEEEQRGGEEEIVAKAADIQKSISEGASSFLATEYYYLGIFMVIMSVVICSLLSIVTPEEGRTSADELRNGVFSTIAFALGGATSILSGYLGMQIATFANARTAVEARKGIAPAFMCAFRSGAVMGFLLSGFGLLNLFLAITIFSKFFGDDWKGLFEAIGYGLGGSSIALFGRVGGGIYTKAADVGADLVGKVEKDIPEDDPRNPAVIADNVGDNVGDIAGMGADLFGSFAESTCAALVISAVSSLGKEHDYAGMMFPLLISATGIFVCLITTFLATDLKPAKVIAEIEHTLKMQLIISTLLMTPVALGVALWSLPPEFTLSVPSSSPDKPFDEKVVKSWYMFVCISTGLWGGLLVGLQTEYFTSNRYKPVQDVADACRTGAATDIIFGLALGYKSCIIPTIVIGVAIYVGTSLAGMFGIACCALGMLSTLATGLAIDAYGPISDNAGGIAEMAGMGEDIRERTDALDAAGNTTAAIGKGFAIGSAALVSLALFGAYVTRAKIDMIHSSILDPRVFAGLLLGAMLPYWFSAMTMKSVGKAALAMVHEVRRQFNTIAGLMEGTARPDYKRCVAISTQAAISEMIAPGALVIFTPVVVGALFGTQCLAGVLAGSLVSGVQLAVSMSNTGGAWDNAKKYIEAGATEHARELGGKGSDCHKAAVIGDTVGDPLKDTNGPSLNILIKLMAVESLVFAPFFYNCAHGQGLIFSFFGIA

SEQ ID NO: 12523 - protein, 598 aa, Lycopersicon esculentum
MGQCCSKGVSGENGGSVVAIGDGNSAVSTNNRPKPPPSPVRQSVGNGMSYTNNSTPAHSFTASPFQSPYPAGIAPSPSPVGTPRRKFKWPFPPPSPAKPILSAIFKRQGGTSVKPKEGPIPEDEGGEGERQLDKSFGYPKNLTSKYELGKEVGRGHFGHTCWAKGKKGELKNQPVAVKIISKAKMTTAISIEDVRREVKILKALSGHQNLVKFYDAFEDANNVYIVMELCEGGELLDRILSRGGRYTEEDAKSIVVQILNVVAFCHLQGVVHRDLKPENFLFAKKDEDSPMKVIDFGLSDFIKPDQRLNDIVGSAYYVAPEVLHRSYSIEADMWSIGVITYILLCGSRPFWARTESGIFRSVLRADPNFEDSPWPAVSAEARDFVKRLLNKDHRKRMTASQALTHPWLRTENPFVPLDILIFKLVKSYIRTSPLKRAALKALSKALTEEELIYLKAQFNLLEPKAGFVSLDNFRMALMKQTTDAMREARVLDIINLLEPLSYKQMDFEEFCAAAISTYQLEALENWEHIASAAFNYFEQEGNRVISVEELAQEMNLGPTAYAFLKDWIRPSDRKLSFLGYTKFLHGVTMRSSSTRHHR

SEQ ID NO: 12524 - protein, 429 aa, Burkholderia vietnamiensis G4
MPAMRSATAHRPADAGPHPITPTNQTDIAMFEHIDAYPGDPILTLNENFQKDPRDQKVNLSIGIYFDADGRIPVMAAVREAETALQRDVGPKPYLPMVGLAAYRDAVQALVFGADHPARAAGRIATVQTLGGSGALKVGADFLKRYFPDAQVWLSDPSWENHRFIFERAGFTVNTYPYYDAATGGLKFDAMLAAIDALPARSIVLLHACCHNPTGVDLDEGQWEKLIDVIEARELLPFVDMAYQGFGAGLDADAFAVRELARRGVPALVANSFSKNFSLYGERVGALSVVCEDADAAERVLGQLAGAVRSNYSNPQTYGAKLVATVLNTPALRKQWEEELAAMCRRIARMRQAIHDGLRDHVSGEALTRYVKQRGMFTYTGLTETQVDALRDVHGVYILRSGRMCVAGLNDSNVGIVADAIGKVLKSGV

SEQ ID NO: 12525 - protein, 461 aa, Burkholderia vietnamiensis G4
MVSGNEKDGLKRGLKNRHIQLIALGGALGTGLFLGIAQTIKMAGPSVLLGYAVAGVVAFFIMRQLGEMVVDEPVAGSFSYFADKYVGHFTGFLSGWNYWVLYILVSMAELSAVGIYVQYWWPGVPTWVSALVFYVAINLLNLASVKSYGETEFWFSIIKVAAIVGMIGFGGWLLVSGHAGPEASIANLWQHGGFFPNGVSGLVMSMAAIMFSFGGLELIGITAAEADDPKHSIPRATNQVIYRILIFYIGALAVLLSLYPWEKVVTGGSPFVLIFHALSSNLVANVLNVVVLTAALSVYNSGVYSNSRMLFGLATQGNAPKVLCSVNRRGIPLAALGASALATGVCVLVNYFMPGKAFEVLMGLVVSALIINWAMITLIHLKFRQAKRIAGEQTSFRSLGYPFTNYLCLAFMAGILVVMYLTPDLRLSVYLIPVWLAVLAIGYRFRQKNARYALGDGASAR

SEQ ID NO: 12526 - protein, 283 aa, Glycine max
  misc_feature (62)..(62): Xaa can be any naturally occurring amino acid
  unsure (1)..(283): unsure at all Xaa locations
VPCPHIVDPATKYISLIIPAFNEEHRLPGALEETMNYLHQRTLKDSSFTYEVVIIDDGSADXDKRVAFEFVRKYTVDKVRVILLGRNHGKGEAIRKGMMHSRGELLLMLDADGATKVTDLEKLENQIQAVAKREYHHGDSSDSDPRFRISDIPAAVFGSRAHLEEKALATRKWYRNFLMKGFHLVVLMAAGPGIRDTQCGFKMFTRAAARKLFSNVRLKRWCFDVELVFLCKWFRISISEISVNWSEIPGSKVNLLSIPNMLWELVLMSVGYRTGMWRISNSA

SEQ ID NO: 12527 - protein, 869 aa, Ustilago maydis 521
MSARRPSNPFTKNQDAPGYYDDQVSSDERAQLRSLAQHMRKLSMSNSAISDDSTDLASWRKSNPAPSGSGSNGALTPRAEGRPRPVATDDTTQAASATAVPGALEPSGGPKYTPHSGNLPGPDKAYGEDQDKATLLSGSLGKSSSMLNNGKGHGGSGSGSADDDKHAMGQQKRRPQRMNDDPVILSRRMSHDAVQEAPRRFIVDVEETMRLVLEQEDTDGNFQICITDSGPKVLTLGTATSNGYKGFDIRGTYMLSNLLQELALAREHGRKRIVLDESRLTENPVDRLSRMISQTFWHNLTRRIDGDGLDAILSDPKNRSKSQNPRIYVPASETEMLHYYQKVAQERPSLNLTVESLPANITAEYTRDLNDRPGLLALAMRDDIDPTTGEKKGLKGIPFVVPGARFNELYNWDSYFISLGLVVDNMIDLAKGTVDHFIFEIKHYGKILNGNRTYYLMRAQPPFLTDMALQVYSRLDPANETDNKEWLRNAIQAAIKEYHTVWMSRPRFDEKTWLSRYRPEGLGVPPETEASHFTHILRPYAAKHGCSVNEFTRKYNHGEIQEPELDTYFMHDRAVRESGHDTTYRFEHKCADLATIDLNALLYKYEIDIATAIREVFDDRLELEDDFLLHGPLPPSLLKNGQGPAQPSRSIETPQTSAEWFARAAHRKAQVDKYLWNDGMGLYFDYDTRLEEPIVYESVTSFWAMWAGMSSEDQAAKLVHKSLKRFEEQGGLVSGTEDSRGKISIDRPNRQWDWPYAWPPHNVLAWVGLERYGYLEEARRLAYRWLYMMTLAFVDFNGTVPEKFDAVNLSHMVDAEYGNQGIDFKCVPREGFGWMNSSFQVGLTFLTTHQRRAVAALQHPDEFFNVRRH

SEQ ID NO: 12528 - protein, 538 aa, Wigglesworthia glossinidia endosymbiont of Glossina brevipalpis
MIFNKIARAYIIIKIILNYGLDEIIPKKYFIFHFFRKIIFWIPNKNKNIEFSKRLILAIEKLGPIWIKFGQMLSTRNDIFKKDIIKQLQNLQNEVTPFDSKIAIRCIENSMNNKIEKIFNNFNKSPIASASIAQVYTAKLKNGKRVVVKVIRPGIIKKIKSDIKLMLVLAKFLSKIFKYGKNLRLIDIIIEYKKIILNETNLLYEAVHTIQLRRNFKESNMLYIPKVYINYCNENVMISEKINGIKISNIFDLKKNNVNMKLLAERGVKIFFTQVFRDNFFHGDMHPGNIFVSYENPDDPKYIGIDCSIIGRLTKLDKYFLAENFVAFFNRDYRKIAKLHIDSGWVDKKTNVNDLESSIRVVCEPIFEKSLSDIYFGKILLAFFSSTKDFKINIQPQLILLQKTLFYIEGIGKQLYPELNLWKTAKPFLENWIKNETRFLKILSILKENAILLAINFDGKKLFKNSFYEEREKKIKKKEKINILILCKSIFLFLLGTTIILFSLFLFMNENINQILFNILVFTSVILFIFSWKFLNRI

SEQ ID NO: 12529 - protein, 111 aa, Triticum aestivum
MSIHQPVIAPSARIHWTKEEHWNFIHGLSVYGRGKWKEISKDFVTTKTPVQVSSHAHKYFKRLERKNLRRRYSINDLGLEIVRPWIMENSFSARQFRILGNFDHQNPSFGL

SEQ ID NO: 12530 - protein, 559 aa, Arabidopsis thaliana
MARTTRERVKSFINNRWLVFVAAMWIQSCAGIGYLFGSISPVIKSSLNYNQKQLSRLGVAKDLGDSVGFLAGTLSEILPLWAALLVGSVQNLVGYGWVWLIVTGRAPILPLWAMCILIFVGNNGETYFNTAALVSGVQNFPKSRGPVVGILKGFAGLGGAILSQVYTMIHSSDRASLIFMVAVAPSVVVVPLMFFIRPVGGHRQIRSSDATSFTVIYAVCILLAAYLMAVMLVEDFIDLSHSIIIAFTVVLFAILLVPIFIPIATSCFTASTDPCDTLEEPLLGDQQGQDPGQSTTPDHGPELIFSEVEDEKPKEVDLLPAVERHKRIAQLQAKLMQAAAEGAVRVKRRRGPHRGEDFTLTQALVKADFWLIFFSLLLGSGSGLTVIDNLGQMTQSLGYDNTHVFVSMISIWNFLGRIGGGYFSELIVRDYAYPRPVAIAVAQLVMSVGHIFFAYGWPGAMHIGTLLIGLGYGAHWAIVPATASELFGLKKFGALYNFLTLANPAGSLVFSGLIASSIYDREAERQAQGSLFNPDDVLRCRGSICYFLTSLIMSGFCLI

SEQ ID NO: 12531 - protein, 398 aa, Wigglesworthia glossinidia endosymbiont of Glossina brevipalpis
MFELTELSPLDPVLGMIDIIKNDKRDGLINLGIGVYKDIKGNTPILDSVKKAENILIESEKTKNYLNIEGLESFIQHSKSLIFGKENLSELNDFIASVQCPGGTSALKIAAEFLIRHTKIRKIWISDPSWPNHEKLFSFAGFKVHKYPYFNKEKNQLDFYNMKKCLENIKDDSAVIFHSSCHNPTGIDPSFEQWLELAKISRNKKWIPIFDSAYQGFSNGLKDDVFGIKIFLKYINEFVVCNSFSKNFSLYNERVGTCNFITKNKKHASNVFSQLRSIIRVNYSNPPAHGANIINVIFSKKDLFNLWKSELNEMRNRIKQIRSLFADTLFKINNKKNFNFIKNQHGMFSFIGLNRKNVMDLRNNFRIYVIDSGRLNFAAITNKNIYEVCRSINCVLNN

SEQ ID NO: 12532 - protein, 309 aa, Arabidopsis thaliana
METEEEMKESSISMVEAKLPPGFRFHPKDDELVCDYLMRRSLHNNHRPPLVLIQVDLNKCEPWDIPMYNTTKRVCVQRDRKYATGLRTNRATATGYWKATGKDRTILRKGKLVGMRKTLVFYQGRAPRGRKTDWVMHEFRLQGSHHPPNHSLSSPKNTEGVICRDNMGSCFDETASASLPPLMDPYINFDQEPSSYLSDDHHYIINEHVPCFSNLSQNQTLNSNLTNSVSELKIPCKNPNPLFTGGSASATLTGLDSFCSSDQMVLRALLSQLTKIDGSLGPKESQSYGEGSSESLLTDIGIPSTVWNC

SEQ ID NO: 12533 - protein, 473 aa, Thermotoga maritima MSB8
MMYPMPSWVYDSVVYQIFPDRFFIGKGKTVEDKKDLYLKRGGVIEKWGVPPRKLPGAQHVKIFYGGDLWGIAEKVDYFEELGINVLYLTPIFLSDTNHKYDTIDYFRVDPQFGGKRAFLHLLRVLHERSMKLILDGVFNHVGSQHPWFKKAKKNDPEYVNRFFLYKDRHRSWFDVGSLPELNVEVEEVKEYILKVVEHYLKLGIDGWRLDCGHDLGPTVNLWINMKVKEFSAEKYLVSEIWTYPAGWDMVDGLMNYNFRNLVLSYVNGETDSIGFHLERAYRETKNIFGCWNMLDSHDTPRLATMVPDRDLRKLAVVLQFTYPGVPLVYYGTEIGLTGGEDPECRATMEWNREKWDVDLFEFYKKMIRLRRTDPGLRFGEFVLLNDSPLAFLRKAPHPLQNTIVVVNPGEEKVLVLSIPDGKIMNTTPLVDVFSGERFHVDGGVVKLPLLARSFRILKPEDLRVGKYRLYKRV

SEQ ID NO: 12534 - protein, 127 aa, Glycine max
  misc_feature (23)..(23): Xaa can be any naturally occurring amino acid
  misc_feature (78)..(78): Xaa can be any naturally occurring amino acid
  unsure (1)..(127): unsure at all Xaa locations
MDYFNAPGRNHLFVPGPVNIPDXIIRAMNRNNEDYRSPAIPAMTKTLLEDVKKIFKTTTGTPFLIPTTGTGAWESALXNTLSPGDRIASFLIGQFSLLWIDQQQRLKFNVDVVESEWGHGAKLDVLE

SEQ ID NO: 12535 - protein, 467 aa, Mesorhizobium loti MAFF303099
MSAIDAGARAPENLWRQEIRATLALAWPMVLTNLGQTAMTATDVMMMGRLGPDTLASGALGANLYFMPLIFGLGLMLATSPMIATELGRRRYSVRDLRRTVRQGLWLAILISIPIWIVLWHGEAILLAMGQEPALAHQAGIYLRWLEWAVLPFYGYIVLRSFISALERPGWALIIVFVAVACNALFNWVFMFGNLGFPAMGIAGSGLATSLSSTLMFAGMAAVVMLEKKFRRYRLFGRFWRSDWPRFNGLLRLGLPIAGILAFEVTIFNAAALLMGLIDADSLAAHAIAIQIASISFMVPLGLNQAVTVRVGLAHGAGNPEGVSRAGWTAFVIGVSFMALMGLVMVLWPHLLISAFIDLANPANARVIALAVSFLVFAALFQVFDGAQAVAAGMLRGLHDTKVPMIYAAIGYWGVGLPLGVLLAFHFGFHGVGIWIGLSSGLAVVAALLLTRWLRRDRIAPPLAFGH

SEQ ID NO: 12536 - protein, 206 aa, Candida glabrata
VAFVHGRFLNNLRNICAAEPNVTRLQGNVVEILKDKKNEVVGAKVDVDSRGKVDFKAHLTFVCDGIFSRFRRELHPDHVPTVNSSFVGMSLYHAHMPHDMHGHVILGDKHMPILVYQISPEETRILCAYNAPKVPTDLKSWMTKDVQPYIPKTLRPSFDDALAQGKFKPMANSWLPARQNDVTGLCVIGDALNMRHPLTGGGMTVG

SEQ ID NO: 12537 - protein, 388 aa, Deinococcus radiodurans R1
MSAVLGDGLREQVVAWRRHLHQHPELGFQEHQTARYVEEQLRDMPGLHLSRPTETSVLAVLKGGKPGRTVLLRADMDALPIEEEADVEFKSQTPGVMHACGHDGHTAMLLGAAKQLSAQAADLHGEVRFIFQHAEEVFPGGAEQLVDAGVMDGVDLAVGTHLMTSVPVGTVVLRDGALMAAPDAFDITIQGKGGHGAMPHQTVDPVVIAAQVVMAFQTAVSRLRDPIDPGVVSVTQIHGGSAHNVIPDTVTLGGTVRTFSDELRAQMPGRLETLLRGICEAYGATYTFTYHGGYRSVNNDPATTERLRKVVREVLPEVTVSDGVPLMGGEDFSAYLTRAPGTFVLIGAGNAEKGMTAPHHHPKFMIDESALEQGVQIYVGAARALTAS

SEQ ID NO: 12538 - protein, 557 aa, Nicotiana tabacum
MNSWIRLFIVLAACLFPLVVECRIRHYKFNVVMKNTTRLCSSKPIVTVNGKFPGPTIYAREGDTVLVKVVNHVKYNLSIHWHGIRQLRTGWADGPAYITQCPIQPGQNYVYNFTITGQRGTLFWHAHILWLRATVHGAIVILPNLGVPYPFPKPNHEAVVILAEWWKSDTEAVINEAIKSGLAPNVSDAHTINGHPGPVSNCASQGGYKLNVDPGKTYMLRVINAALNEELFFKIAGHKMTVVEVDATYIKPFKTDTIVIAPGQTTNVIVTANQGSGKYMVAASPFMDAPIAVDNVTAIATLHYSGTQGNSHISLTSTPPKNATPVANTFLDSLRSLNSKKYPAKVPKKIDHSLFFTVGLGINPCPTCKQGNGSRVVASVNNVTFVMPTVALLQAHFFGTKGVFTTDFPANPPFAFNYTGTGPTNLATMNGTKVYRLRYNDTVQLVLQDTGIIAPENHPIHLHGFNFFLVGKGIGNFNPKTDPKNFNLVDPVERNTVGVPAGGWVAIRFRADNPGVWFMHCHLEIHTTWGLKMAWLVDNGKGPNESLLPPPKDLPKC

SEQ ID NO: 12539 - protein, 124 aa, Glycine max
MVSSARSSGGMAHSASNSAGSAGSPSGGIGPGNGVAAAAATTSASASTPASGSTVARRLNDLEIQGDDAPSSQPAASKKKKKGTRVVGPDKGNRGLRQFSMKVCEKVEGKGRTTYNEVADELVA

SEQ ID NO: 12540 - protein, 451 aa, Emericella nidulans
MRGEVCHIHIGQAGTQLGNSAWELYLLEHGLGADGRLDPEKGEDINAGGSFETFFTETGCGKYVPRSIFVDLDPSPIDEIRTGPYRQLFHPEQLISGKEDAANNYARGHYTVGKELVDTVVDRVRRLSDNCSSLQGFLVFHSFGGGTGSGFGALLLERLSTEYGKKSKLEFAVYPSPRVSTAVVEPYNAVLSTHSTLENSDCTFLVDNEAVYDICRRNLDIPRPSFEHLNRLIAQVVSSITSSLRFDGALNVDLNEFQTNLVPFPRIHYPLISYAPVISSNRSLHESFKVQDLTLQCAEPNNQMVRCDPRNGKYMAVALLYRGDCVPRDCTQAIASLKAKASFNYVEWCPTGFKVGINYHKPARVPGTELAPVDRAVCMLSNTTAISEAWSRLDHKFDLMYSKRAFVHWYVGEGMEEGEFSEAREDLAALEKDYEEVAGDSLDMEGEEAEY

SEQ ID NO: 12541 - protein, 469 aa, Neurospora crassa
MAPVMRLGSAALRSSIHLTSRQTAFTAARCYSSKTQTLKERFAELLPENIEKIKALRKEHGSKVVDKVTLDQVYGGARGIKCLVWEGSVLDAEEGIRFRGKTIPECQELLPKAPGGKEPLPEGLFWLLLTGEVPSEQQVRDLSAEWAARSDVPKFIEELIDRCPSDLHPMAQLSLAVTALEHTSSFARAYAKGINKKEYWGYTFEDSMDLIAKLPTIAARIYQNVFKGGKVAAVQKDKDYSFNFANQLGFGDNKDFVELLRLYLTIHTDHEGGNVSAHTTHLVGSALSSPFLSVAAGLNGLAGPLHGLANQEVLNWLTEMKKVIGDDLSDEAITKYLWDTLNAGRVVPGYGHAVLRKTDPRYSAQRKFAQEHLPEDPMFQLVSQVYKIAPKVLTEHGKTKNPYPNVDAHSGVLLQHYGLTEANYYTVLFGVSRAIGVLPQLIIDRAVGAPIERPKSYSTDKWIEICKKL

SEQ ID NO: 12542 - protein, 502 aa, Clostridium acetobutylicum ATCC 824
MKVGTSKIMNKIDQFCTTSLGIPGNILMENAALKVVKNIGEEFKDIVLVCGVGNNGGDGMACARHLNAIGRNLKIFCVGNIEKMSSDCKFNYDILSNIGIQVINLANEDDLEEFKTAVQSADLILDCIFGTGLSREVKGIYRDVISIINDEGNYIMAVDTPSGLSSDTGIEMGIAIKAHKTISFVMYKRGFFRYRSEDYTGEIVIENIGVPKFVIDKFHENEYIVDEEMASNSIIKRDKYAHKGNFGRVAIFAGAKGYSGAAYISTEAAVRSGSGLITLCTKEELQNLLSSKLVEAMTASFNDKEKIEKIITSSDAIAVGPGMGNTEETFYKVKEILSTACCPIVIDADGINVLKGRLDTLKNSKNKVILTPHPGEMSRISGVSIEKLEKNRIDIAKNFAAKYDVIIVLKGYKTVITDGKEVFVNTTGSSYMASGGMGDCLTGIIVSLVGQGYSPIMAAAIGTFIHGYCGDVLANKMANITASDILKEIPYSIKKISYNKMR

SEQ ID NO: 12543 - protein, 451 aa, Chlamydomonas reinhardtii
MREVISIHIGQAGIQVGNACWELYCLEHGIQPDGQMPSDKTIGGGDDAFNTFFSETGAGKHVPRCIFLDLEPTVVDEVRTGTYRQLFHPEQLISGKEDAANNFARGHYTIGKEIVDLALDRIRKLADNCTGLQGFLVFNAVGGGTGSGLGSLLLERLSVDYGKKSKLGFTVYPSPQVSTAVVEPYNSVLSTHSLLEHTDVAVMLDNEAIYDICRRSLDIERPTYTNLNRLIAQVISSLTASLRFDGALNVDITEFQTNLVPYPRIHFMLSSYAPIISAEKAYHEQLSVAEITNAAFEPASMMVKCDPLHGKYMACCLMYRGDVVPKDVNASVATIKTKRTIQFVDWCPTGFKCGINYQPPTVVPGVDLAKVQRAVCMISNSTAIGEIFSRLDHKFDLMYAKRAFVHWYVGEGMEEGEFSEAREDLAALEKDFEEVGAESAEGAGEGEGEEY

SEQ ID NO: 12544 - protein, 255 aa, Elymus abolinii
LDNIMRLTGITGIVNGMNVSEWDPTKDKFLAVNYDVTTALEGKALNKEALQAEVGLPVDRKVPLVAFIGRLEEQKGPDVMIATIPEIVKDEDVQIVLLGTGKKKFERLLKSVEERFPGKVRAVVRFNAPLAHQMMAGADVLAVTSRFEPCGLIQLQGMRYGTPCACASTGGLVDTIVEGKTGFHMGRLSVDCNVVEPADVKKVATTLKRAIKVVGTPAYQEMVKNCMIQDLSWKGPAKNWEDVLLELGVEGSEPG

SEQ ID NO: 12545 - protein, 142 aa, Photobacterium profundum SS9
MTIEKTFSIIKPDAVKRNLIGAIYQRFENAGLKIVASKMVHLDATKAQGFYAEHEEKPFFNELVEFMTSGPVMVQVLEGEDAIHRYRELMGTTNPENAACGTIRSDFALSMRYNSVHGSDSPESAAREIAYFFTEDEICPRD

SEQ ID NO: 12546 - protein, 300 aa, Nocardioides sp. JS614
MLVVGESLVDIVHGPDGNTTEYAGGSAANVAVALARLGRRVRFVTAWAADERGRVLADHLARAGVELAGDPHVLARTATAAATIGADGAASYEFDLEWQIPDVSAEPAPLVLHTCSLGAVLEPGADGVLALVERLRDRATISYDVNARPAITGTGPDVVALVERLAAVTDLVKASDEDLAHLYPQLDEEAAARHLLALGPAGVVVTRGGNGAAWFAAHAIVEAASLPVEVADTIGAGDTFGAAVVDALWQRDLLGADHRSELRELDPGVIAEVLAHATRAAAVTVSRPGADPPYRSELEA

SEQ ID NO: 12547 - protein, 81 aa, Gaertnera cuneifolia
  misc_feature (35)..(35): Xaa can be any naturally occurring amino acid
  misc_feature (41)..(41): Xaa can be any naturally occurring amino acid
  unsure (1)..(81): unsure at all Xaa locations
TPQDEMRAGMSYFHETIWKGVPKFLRRVDTALKNXGINERXPYNAPLIQFSSWMGGDRDGNPRVTPEVTRDVCLLARMMAA

SEQ ID NO: 12548 - protein, 526 aa, Burkholderia sp. 383
MHSDARPDSPRPSGSPPAKPTLHRALQARHLRMIAIGGSIGTGLFVASGASISQAGPGGAMLAYMVIGLMVYFLMTSLGEMAAFMPVSGSFATYGAKFVDEGFGFALGWNYWYSWAVTLAVELVAGQLVMNYWFPHVPGVWWSALFLTLIFALNALSVRGFGEAEYWFALIKVLTVLAFVGVGLLMIFGIMQGGPSAGWGNFTIGDAPFAGGWATMLGVAMIAGFSFQGTEMIGVAAGESENPRTTIPRAVSQIFWRILLFYVFAIFVIGVLIPYTDPSLLKSDVTDIGVSPFTLVFRHAGLAFAAGVMNAVILTAVLSAGNSGMYASTRMLYNLAVEGRAPKIFAKLSRGGVPRNALYATTAVGALCFLTSLYGDKTVYLWLLNTSGMAGFITWLGIAVSHYRFRKGFLKQGYRLDQLPYRSKWFPFGPLFAFALCAVVALGQDYQAFFSDKIDWVAVAATYIGLPFFLAIWLGYALVRKCRLVRYEDMEIAPWIERNATPEPAPQAETGYAGYVARPANPTPGA

SEQ ID NO: 12549 - protein, 486 aa, Zea mays
LITTMGKRKRSPCQRDNHNDSLASKIMRTRIPDLPEDIWSHVHSLMPMRDAGRAACLSRAFLRSWRHHPNLIFNKDTIGMKKNSYGENFHHKISRILRNHCGISLKTFKLDYSGMCGFDGTSYLDSWLQAALNPGIEEVTLWLFHTRRIYEFPCSLLSDGVRNSLRYLKLRCCALRPTVELAPMRSLTSLHLSFVSIKWNGLKRLLSNSLALEELELVCCDKIVCLKIPSALQRLNSLNIFGCSALKVLESKAPNLSSLSLSDFGGGLVFSLVKTLQMKKLITESTVYDARTRLPSIMPNLETLVINSYQQVVDAPMLPTKFLCLKHLTVRLSSGTTITQAFDYFSLVSFLDASPSLETFILNVSGKGMIHESISAHPQLRHTPEHHHGHLRSVKICGFSSEKSLFELTRYILENAVSLKFLTLDTFYGDRCGQGKCTSCLPTPDVFMDVSKAISGIKTYIENKVPSTVKLTVLEPCSRCHVRRVI

SEQ ID NO: 12550 - protein, 218 aa, Ustilago maydis 521
MSSQDNSKKDGSADWANKDGHYRRQESSFRTTIEKGGKHEPELGRYHLVVALACPWAHRTLIVRKLKGIDRVPDLLPVHVVDSLLGSEGWSFVPYEEPKGYGVPGTGIKIPGHENKKRIRDLYLAADPNYSQRCTVPIIWDNKLNTIVNNESSEVIRNLNYCFDDFIPEELRGVTFYPQQLAKEIDAFHDVPVQHQAAVRQPRSHRKDVARWQDLSVR

SEQ ID NO: 12551 - protein, 556 aa, Thermotoga maritima MSB8
MKVVKKPFLLLAFVFLLFLTSCFQTSMSQSLVSSNPHSNSTNTDGTSSNLEEVKYPVVYEIFIRSFYDRDGNGVGDLNGVSQKVDYLKELGVDAVWFMPFNEAVSYHGYDITDYYNVEKDYGTMEDLENMIQVLHENGIKVIMDLVINHTSDEHPWFKDAVENTTSSPYWDYYIMSLEDHSGQDHWHWKINSKGQKVWYFGLFGYNMPDLNHDSQKVREEVKKIVDFWISKGVDGFRIDAAKHIYGWSWDDGIQESAEYFEWFRDYVLSKKPDAILVGEVFSGNTYDLSLYPIPVFNFALMYSIRNYPEGQDGMIENNWVEESFLFLENHDLHRFFSHLQEHYKKFSESDYEFIKKRAALWYFLIFTLKGSPVIYYGGEIGTRGFKWHGPVYDEPVREPMQWYASGTGEGQTFWTKEVYKNAGITFGNADVDGCIYDDPYDGFSVEEQESDPKSLLNFIRFILNFRKDHDAILNGDQTIFRDWKNLIAFYRESSNEKLLVVLNPDPVWQNSFTFEENMTMILEVDFENFIWNESNVSFSAGESFTVDPMKAYIFKK

SEQ ID NO: 12552 - protein, 612 aa, Triticum aestivum
  misc_feature (325)..(325): Xaa can be any naturally occurring amino acid
  misc_feature (501)..(501): Xaa can be any naturally occurring amino acid
  misc_feature (520)..(520): Xaa can be any naturally occurring amino acid
  unsure (1)..(612): unsure at all Xaa locations
MAAAPPPKADELQPHPPKEQLPSVSFCITSPPPWPEAVILGFQHFIVMLGTTVIIPSALVPQMGGGNEEKARVIKTLLFVAGINTLLQTFFGSCLPVVMGGSYTFVAPTISIILAGRYGPGADPHEKFLRTMRGTQGALIIASTIQIILGFSGLWRNVVKLLSPLSAVPLVSLVGFGLYELGFPAVAKCVEIGLPELILMVAFSQYLPHVLHSGKGVFGRFAVLFTVSIVWLYAYILTISGAYKNAKLKTQAHCRVDRSGLIGGAPWISVPYPFQWGAPTFDAGECFAMMMTSFIAIVESTGAFIAASRYASATMIPPSIVSRGXGWQGIGILLDSFLGTANGTSVAVENVGLLAVTHVGSRRVVQISAGFMIFFAVLGNAGAPAPAIPWPIFAGMYCVFFAYVGACGLSFLQFCNLNSFRTKFILGFSFFIGISVPQYFNEYASVSGHGPVHTGARWFNDMINVPFSNKPFVAGLVAYFLDNTMHLHQSAVRKDRGYHWXWDKFRSFKKDARSEESYSXLPFNLQQVLPFRYEYDDAEMPSRRKALWFHLLLLLDLPLCGNFGVFNGRKWTGGPPGWDPCFPGFALPQWLFVNRGNAVPQPREKKSSIIWG

SEQ ID NO: 12553 - protein, 469 aa, Glycine max
MGGAKSYSCFAVIAVALVLLLLNVAVVCNGGKTSTFIRKVEKTEDMPLHSDVFVAPSGYNAPQQVHITQGDQVGRAMIVSWVTVDEPGKSLVHYWSDASQHKRVAKGNHVTYRYFNYSSGFIHHCTLRDLEFNTKYYYEVGIGHTTRQFWFVTPPEVHPDAPYTFGLIGDLGQTFDSNKTLVHYESNPHKGQAVLYVGDLSYADNHPNHDNVRWDTWGRFVERSTAYQPWIWTTGNHELDYAPEIDETEPFKPFRHRYYVPYKASGSTEPFWYSVKIASAHIIVLASYSAYGKYTPQYEWLEAELPKVDRTKTPWLIVLVHSPWYNSYNYHYMEGETMRVMFEPWFVKYKVDVVFAGHVHAYERSERISNTGYNITNGRCRPLKDQSAPVYINIGDGGNIEGLASNMTNPQPEYSAYREASFGHAILEIKNRTHAHYSWHRNEDEYAVTADSMWFFNRYWHPVDDSTTK

SEQ ID NO: 12554 - protein, 300 aa, Isochrysis galbana
KPHVAMDDQMYVNAVKSDIRKALVNQKGNSCPLAVRLAWHASGTYSKHDDTGGSYGATMRFPPEKEDGANAGLDIERDILQEVKRQHPDLSYADIWTLAGAHAIEIAGGPPIEHKLGRTDAQDGSACPAVGRLPDASQGAEHLREVFYRMGFNDEDIVALSGAHTLGRCHKTRSGFDGPWTHEPLKFDNSYFKNLLDLEWKPRQWDGPLQYEDPSHTLMMLPTDLALKTDPKFKEYVVAFAKSETVFRSAFKRAYEQLLCLGCPAHVVPSAAPVAMQSREEADGSLEFAQAARAAGGDPA

SEQ ID NO: 12555 - protein, 409 aa, Nicotiana tabacum
HPFPKPNHEAVVVLAEWWKSDTEAVINEALKSGLAPNVSDAHTINGHPGPVSNCPTQGGYSLSVEPGKTYMLRVINAALNEELFFKIAGHKMTVVEVDATYVKPFKTDTIVIAPGQTTNVIVTADQSFGKYMVAASPFMDAPIAVDNITATATLHYSGALGTSPTTLTSTPPQNATSVANNFLDALKSLNSKKYPAKVPQTVDHSLFFTAGLGINPCPTCKQANGSRVVASVNNVTFVMPTVALLQAHFFGINGVFTTDFPANPPFVFNYTGTPPTNLATTNGTKVYRLPYNATVQLVLQDTGIIAPENHPIHLHGFNFFLVGKGLGNFNSKTDPKNFNLIDPVERNTIGVPSGGWVAIRWLADNPGVWFMHCHLEVHTTWGLKMAFLVDNGKGPKESLLPPPKDLPKC

SEQ ID NO: 12556 - protein, 157 aa, Oryza sativa
  misc_feature (69)..(69): Xaa can be any naturally occurring amino acid
  misc_feature (88)..(88): Xaa can be any naturally occurring amino acid
  misc_feature (141)..(141): Xaa can be any naturally occurring amino acid
  unsure (1)..(157): unsure at all Xaa locations
SLWWALGVHWLPWAFLRSFVVCGCGGVVCPVYVCLFFLLRSVGPCCSCLYVEPSAGELVEWIYSGYGLXAVECAEYVQEVIDITLFWXLMSIWSEKFWWTYLVIPAYGGYKISGLLRGAFFGGSSEVEEEDEKTRKLREKXMEKKASRGKIIETRTR

SEQ ID NO: 12557 - protein, 158 aa, Malus x domestica
MEGKVFTEEQETLVVKSWGVMKKNAAELGLKFFLKIFEIAPSAQKLFSFLRDSDIPLEKNPKLKPHAMSVFVMTCESAVQLRKAGKVTVRESTLKRLGGVHFKSGVVDEHYEVTKFALLETIKEALPEMWSPEMKNAWGEAYDQLVAAIKSEMKPPLN

SEQ ID NO: 12558 - protein, 424 aa, Deinococcus radiodurans R1
MQAVTEVMTSIWPFVQAHPEYAEHALLERLIEPERVISFRVTWVDDAGQVQVNRGYRVQHSSSIGPYKGGMRFHPSVNLSILKFLAFEQTFKNALTTLPLGGGKGGSDFDPKGKSDGEVMRFCQALMTELWRHLGPDTDVPAGDIGVGGREVGYLAGMMKKLANHAGGVFTGKGLSYGGSLLRPEATGYGTVYFVEHMLRDQRMEMEGLRVSVSGSGNVAQYAIEKALHLGAHVLTASNSGGTVVDEDGFTYDKLAVLMDIKNERRGRVEDYAREVGAEFRPGVRPWDVPVDVALPCATQNELGADDARTLIAGGVRVVAEGANMPCDLAAIQAFEEAGVLYAPGKATNAGGVATSGLEMSQNAQRLSWTREEVDQRLRSIMSAIHDSCLEYGRRPDRHVSYLDGANIAGFVKVATAMREQGVL

SEQ ID NO: 12559 - protein, 212 aa, Glycine max
MAAATAPRFIKCVTVGDGAVGKTCMLICYTSNKFPTDYIPTVFDNFSANVVVEGITVNLGLWDTAGQEDYNRLRPLSYRGADVFVLAFSLVSRASYENVLKKWIPELQHFAPGIPLVLVGTKLDLREDRHYMADHPGLVPVTTEQGEELRKHIGATYYIECSSKTQQNVKAVFDAAIRMVIKPPQKQNEKRKKKPRGCFLNVLCGRNIVRLK

SEQ ID NO: 12560 - protein, 195 aa, Magnetospirillum magnetotacticum MS-1
MSNLAALSVLGQVLPDSVILSDAGNHNSMIEGIRRSGGTKAIFPHNDVAALDRLLAQFDPDRPKIVAFESVYSMDGDVAPIAEICDVAERHGALTYLDEVHAVGMYGPHGAGIAEREGVAHRVTLIEATLGKAFGVMGGYVAGPSTVIDVIRSMRRASSSRPRCARTWLPAHGRRCGTSGIAKRNGRRSNGQRRS

SEQ ID NO: 12561 - protein, 411 aa, Rickettsia sp. DaE100R
DSEFAELKIRGKIFKLPILKASIGEDVIDISRVSAEADCFTYDPGFMSTASCQSTITYIDGDKGILRHRGYDIKDLAEKSDFLEVAYLLIYGELPSGEQYNNFTKQVAHHSLVNERLHYLFQTFCNSSHPMAIMLAAVGSLSAFYPDLLNFKEADYELTAIRMIAKIPTIAAMSYKYSIGQPFIYPDNSLDFTENFLHMMFATPCTKYTVNPIIKNALNKIFILHADHEQNASTSTVRIAGSSGANPFACISTGIASLWGPAHGGANEAVINMLKEIGSSEYIPKYIAKAKDKNDPFRLMGFGHRVYKNYDPRAVVLKETCKEVLKELGQLDNNPLLQIAIELEAIALKDEYFIERKLYPNVDFYSGIIYKAMGIPSQMFTVLFAIARTVGWMAQWKEMHEDPEQKISRPR

SEQ ID NO: 12562 - protein, 593 aa, Frankia sp. EAN1pec
MCGLSGELRFDGREADVAAVGRMTAAMEARGPDGVGLWATGPVAFGHRRLKIIDLSERGAQPMVDTALGLTAVFNGCIYNYQELRDRLVDAGYRFFSTSDTEVILKAYHHWGPRCVDHFAGMFAFAVYERDTGRLVLVRDRLGIKPLYVTRDPHRLRFASTLPALLAGGGVSSDIDLVAFHHYLSFHSVVPPPHTILTGVRKLPQATIRTVEADGTTRDEVYWRPDSTRQEEHASWTADDWRDAIGERLRTAVRRRMVADVPVGVLLSGGLDSSLIVALLAEAGQRDLATFSVGFEAAGGESGDEFHYSDIIARRFGTDHHQIRVPGDRLLPAIDAAVAAMSEPMVSHDCVAFYLLSQEVARHVKVVQSGQGADEVFAGYSWYPPLATVPRGDAVDAYLRVFADRPHAELPAMVESHHLIEGDASRHFVAERFAEPGAETSVDAALRIDSTVMLVDDPVKRVDNMTMAAGLEARTPFLDHELVELAAACPPELKLASGGKGVLKDLSRPLMPVDVIDRPKGYFPVPAIRHLGGPFLARVADALTDPVARGRGLFRKDWVDEMLADPNSNRTTLGANALWQAALLEMWLQTQGV

SEQ ID NO: 12563 - protein, 582 aa, Triticum aestivum
MDTHIGSVDGPSPAAVNGAVGCPASAPGCPIMSSHPVVFAVPGDFNLTLLDHLVDEPGLRLVGCCNELNAGYAADGYARARGVGACAVTFTVGGLSVLNAIAGAYSENLPVICIAGGPNSNDYGTNRILHHTIGIPDFSQELRCFQTVTCHQAVVTNLDDAHEQIDTAIATALRESKPVYLSISCNLPGLPHPTFTRDPVPFFLAPKMSNKMGLEAAVEATVEFLNKAVKPVLVAGPKLRVAKAGKAFVDLVDASGYAYAIMPSAKGFVPETHPHFLGTYWGAVSTAFCAEIVESADAYLFAGPIFNDYSSVGYSFLLKKDKAIIVQPERVIVGNGPAFGCVMMKEYLSALAKRVQKNTTAYENYKRIFVPEGHPLKGEANEPLRVNVLFKHIQDMLTGDSAVLAETGDSWFNCQKLKLPEGCGYEFQMQYGSIGWSVGALLGYAQGASDKRVIACIGDGSFQVTAQDVSTMLRCEQNSIIFLINNGGYTIEVEIHDGPYNVIKNWNYTALVEAIHNGEGKCWTAKVKCEEELTAAIETALGEKKDSLCFIEVIAHKDDTSKELLEWGSRVSAANSRPPNPQ

SEQ ID NO: 12564 - protein, 380 aa, Oryza sativa
GHPRHTNMSTLVDALCAPCSDTALIYDTFNASAAASFLFDNAAAFCDADILGATATGEKEATSSAAAAAAEAAPPRKKRRRRAKSCKSREETETQRMTHIAVERNRRRQMNEYLAILRSLMPEPYVQRGDQASIVGGAIEFVKELEQQLQSLEAQKRTLLPHHKARCDDATPMHNASGSNVGAGGCMEPTTITSNCSSSVTEDAPSADAPPFAQFFAYPQYVWCHSPRDSTTTTTAASASASASASSSSPATVAAALQSEHRSGLADIEVSLVETHASVRVMSPRRPGQLLKMIAGLQALRLTVLHLNVTTLDSLVLYTLSVKVEEGCSLTTVDDIAASVHHVLCIVDAEAAASEHLLAAGQLATTATAVAKRELATYMY

SEQ ID NO: 12565 - protein, 306 aa, Thermus thermophilus HB27
MRFFVLGDVSVDLLFFLERIPEPGEEVPSRRALMKPGGAGGTLAAQLASLGHRVFLAGRVGKDPFAELALSRVREVGVDLRHLQEDPEHTTSSVLILVVPGGERAMVSAEGASRYLDPALFKPRFLDQVDAVVLSAYALVGGPSRSYAAEVLEAARRRELPVFADLGAGAVRAAGKELLKHLRGVGWLLMNEGELKALTGASSISQGVARLRQEGFQHLAVKVGAMGSIVVTPEGEELIEPFPVEDIVDSTGAGDAYTAAFAHAILEGLSPVEAGRLANLAGALAATAIGAQGRLVTLEDLKVAAG

SEQ ID NO: 12566 - protein, 357 aa, Zea mays subsp. parviglumis
MEGGAGASEKGTVLVTGASGFVGSWLVMKLLHAGYTVRATVRDPANVGKTKPLMDLPGAKERLSIWKADLAEEGSFHDAIRGCTGVFHVATPMDFLSKDPENEVIKPTVEGMISIMRACKEAGTVRRIVFTSSAGTVNLEERQRPVYDEESWTDVDFCRRVKMTGWMYFVSKTLAEKAALAYAAEHGLDLVTIIPTLVVGPFISASMPPSLITALALITGNAPHYSILKQVQLIHLDDLCDAEIFLFENPAAAGRYVCSSHDVTIHGLAAMLRDRYPEYDVPQRFPGIQDDLQPVRFSSKKLQDLGFTFRYKTLEDMFDAAIRTCQEKGLIPLATAAGGDGFASVRAPGETEATIGA

SEQ ID NO: 12567 - protein, 798 aa, ASPERGILLUS NIDULANS FGSC A4
MSSQGITRKRPAPGTSPAVHPQLGQLPNYPPTSGSPLSNDQFLQWGQNPSPNTVAPGSFPDANTYNTGALPASAHDISGVSTANNQVARRTPSTQIVNRSRSYEQPPAPLSDPSNVPSEPGGWSESLEELYKRALAAKREAQAKRKQIPPFVQKLSSFLDESKNTDLIRWSDDGNSFIVLDEDEFAKTLIPELFKHNNYASFVRQLNMYGFHKKVGLSDNSMRASERKNKSPSEYANPYFKRGHPDLLWLIQKPKNTAGQGTKSGKGYVRVKTEDAENENEDFGDENAGASRDDGARNRQLSLVAQQPSLPKDQFATVYRELQAIRQQQQIISSTINKLRREHEQLYAQAANFQEQHTRHENSINAILTFLATVYNRSLQGQEGQNLANSFAGAISQDQGNVVDMGDGYSFGPLGAPSMNSPGGPRSMKKQPLLLKAPPGSERHGRAATLSPAATAYDRSQSRNNSRQTSTSQSGQVEEVFDNNSPRSKETSSSQAQQYPQRDIMSVIQNANARNGIPTSYSDFPNVLSSLETSNGNVPLTSNQRADMLRLMANESGTNDSGVTVSQNNALISPVPPPMPNNYSARLADTRSEIDNLMKMQAEQDRSVQNLTNLLQPLSPSGTIPGIGSDGTIPPPPLELDQIFNNDYFTDFGDYDQQNRANVDLGDSTGAGQAPPSTEPPAPPDDIAIKHDGNDLFDFDHLAGEGELFAGTNNQSSPGYFPQFDSGYGHSAANTTGASTGVSGSGRVVETLTDSESTSPSNTVDDPTHYSADVFDAGDGSQGGKSSSGGGSKRRRKA

SEQ ID NO: 12568 - protein, 353 aa, Zea mays subsp. parviglumis
MKGGASSKGPVVVTGASGFVGSWLVMKLLQAGYTVRATVRDPENVGKTKPLLDLPGATERLSIWKADLADEDSFDEAIRGCTGVFHVATPTDFESKDPENEVIKPTVEGMIRILRACKEAGTVRRIVFTSSAGTVCVEERQRPVYDHDNWSDVDFCRRVKMTGWMYFVSKSLAEKAAMAYAAEHGLDLVSVIPTLVVGPFLSAAMPPSLVTALALVTGNEAHYSILKQVQFVHLDDLCDAEIFLFEHPAAAGRYVCSSHDATIHGLAAMLRDRYPEYDIPQKLRGIEDGLQPVHFSSKKLLDHGFTFRYTVEDMFDAGIRTCREKGLIPLATAGGVGSASLRTPGETDVTNGA

SEQ ID NO: 12569 - protein, 255 aa, Bothriochloa bladhii
  misc_feature (137)..(137): Xaa can be any naturally occurring amino acid
  misc_feature (143)..(143): Xaa can be any naturally occurring amino acid
  misc_feature (253)..(253): Xaa can be any naturally occurring amino acid
  unsure (1)..(255): unsure at all Xaa locations
CELDNIMRLTGITGIVNGMDVSEWDPSKDKYIAVKYDVSTAVEAKALNKEALQAAVGLPVDSKIPLVAFIGRLEEQKGPDVMAAAIPELMEEDVQIVLLGTGKKKFERMLMSAEEKYPDKVRAVVKFNAALAHHIMXGADLLXVTSRFEPCGLIQLQGMRYGTPCACASTGGLVDTIIEGKTGFHMGRLSVDCNVVEPADVKKVATTLKRAIKVVGTPAYEEMVKNCMIQDLSWKGPAKNWENVLLSLGVAGXEP

SEQ ID NO: 12570 - protein, 421 aa, Bradyrhizobium sp. BTAi1
MMRKAVSPIWHPFTQHALQPEMTPVARGDGAYLITRDGRRIIDAIASWWVVTHGHCHPPIVRAIQEQAGQLDQVIFAGHTHEPAEQLAAGLLDLVPPTLAHVFFSDSGATSVEVALKMALGYFRNIGEPRTRIAVMQHSYHGDTIGTMSVGARGVFNAAYEPLLFDVAVVPFPAEGFEQATLDALAATCERDRPAAFIVEPLVLGAGGMLMYPAALLREMHRICKASGVLFIADEVMTGWGRTGTLFACEQAGIAPDIACYAKGLTGGAMPLAVTLCSADIFEAHYSTDRRRTFFHSSSYTANPIACAAACANLALWRQPEAHARISAVAAAQERSVARFREDERFSDVRRCGTITALDLHADDEGYLADIGPKLQAFFRDSDILLRPLGHTIYVMPPYCVTAADLEAIYATIDAAVDHVI

SEQ ID NO: 12571 - protein, 296 aa, Saccharomyces cerevisiae
MITTPLVHVASVEKGRSYEDFQKVYNAIALKLREDDEYDNYIGYGPVLVRLAWHISGTWDKHDNTGGSYGGTYRFKKEFNDPSNAGLQNGFKFLEPIHKEFPWISSGDLFSLGGVTAVQEMQGPKIPWRCGRVDTPEDTTPDNGRLPDADKDAGYVRTFFQRLNMNDREVVALMGAHALGKTHLKNSGYEGPGGAANNVFTNEFYLNLLNEDWKLEKNDANNEQWDSKSGYMMLPTDYSLIQDPKYLSIVKEYANDQDKFFKDFSKAFEKLLENGITFPKDAPSPFIFKTLEEQGL

SEQ ID NO: 12572 - protein, 588 aa, Thermus sp. YBJ-1
MRKEAIHHRSTDHFAYAYDSETLHLRLQTKKHDVDHVELLFGDPYEWHDGAWQFQTMPMRKTGSDGLFDYWLAEVKPPYRRLRYGFVLRAGGEQLVYTEKGFYHEAPSDDTAYYFCFPFLHRVDLFQAPDWVKDTVWYQIFPERFANGNPAISPKGARPWGSEDPTPTSFFGGDLQGIIDHLDYLADLGITGIYLTPIFRAPSNHKYDTADYFEIDPHFGDKETLKTLVKRCHEKGIRVMLDAVFNHCGYEFAPFQDVLKNGAASRYKDWFHIREFPLQTEPRPNYDTFAFVPQMPKLNTAHPEVKRYLLDVATYWIREFDIDGWRLDVANEIDHQFWREFRQAVKALKPDVYILGEIWHDAMPWLRGDQFDAVMNYPFTDGALRFFAKEEISARQFADIMVRLLHSYPKHVNEAAFNLLGSHDTPRLLTVCGGDVRKAKLLFLFQLTFTGSPCIYYGDEIGMTGGNDPECRKCMVWDPEKQNKELYEHVKQLIALRKQYRALRRGDVAFLAADDEANHLVYEKTDGNETVMIIINRSNEAAEIPMPIDARGKWLVNLLTGERFAAEAETLCVSLPPYGFVLYAVESW

SEQ ID NO: 12573 - protein, 445 aa, Sinorhizobium meliloti
MNAHNKPNAPVLDSYWMPFTANRQFKAAPRLLAAAEGMHYTSVDGRTVLDGTAGLWCVNAGHGRRQIAAAVERQLSTMDFAPSFQMGHPIAFDFAERLAEIAPGPAGAKLDRVFFTGSGSESVDTALKMALAYQRSIGQGTRTRLIGRERGYHGVGFGGISVGGIVNNRRVFPQLPGSDHLRHTHDPAKNAFVKGQPEHGAELADDLERLVALHGAETIAACIVEPVAGSTGVLIPPKGYLERLRAICDKHGILLIFDEVITGFGRLGAAFATDYFGVTPDIVTTAKGLTNGAIPMGAVFASRKVHDALMHGPEGQIELFHGYTYSGHPAACAAGIATLDIYRDEGLMTRAAEIEGDWHEAMHSMKGLPHVIDIRTIGLIAGIELQSRDGAPGARAYDVFVDCFERGLLIRVTGDIIAFSPPLIAEKQHFGEIVSILADALKRVK

SEQ ID NO: 12574 - protein, 296 aa, Saccharomyces cerevisiae
MIVEKLVHVASVEKGRSYEDFQKVYNAIALKLREDDEYDNYIGYGPVLVRLAWHISGTWDKHDNTGGSYGGTYRFKKEFNDPSNAGLQNGFKFLEPIHKEFPWISSGDLFSLGGVTAVQEMQGPKIPWRCGRVDTPEDTTPDNGRLPDADKDAGYVRTFFQRLNMNDREVVALMGAHALGKTHLKNSGYEGPQGAANNVFTNEFYLNLLNEDWKLEKNDANNEQWDSKSGYMMLPTDYSLIQDPKYLSIVKEYANDQDKFFKDFSKAFEKLLENGITFPKDAPSPFIFKTLEEQGL

SEQ ID NO: 12575 - protein, 81 aa, Gaertnera edentata
  misc_feature (17)..(18): Xaa can be any naturally occurring amino acid
  unsure (1)..(81): unsure at all Xaa locations
TPQDEMRAGMSYFHETXXKGVPKFLRRVDTALKNIGINERLPYNAPLIQFSSWMGGDRDGNPRVTPEVTRDVCLLARMMAA

SEQ ID NO: 12576 - protein, 255 aa, Capillipedium parviflorum
  misc_feature (84)..(84): Xaa can be any naturally occurring amino acid
  misc_feature (108)..(108): Xaa can be any naturally occurring amino acid
  misc_feature (146)..(146): Xaa can be any naturally occurring amino acid
  unsure (1)..(255): unsure at all Xaa locations
CELDNIMRLTGITGIVNGMDVSEWDPSKDKYIAVKYDVSTAVEAKALNKEALQAAVGLPVDSKIPLVAFIGRLEEQKGPDVMAXAIPELMEEDVQIVLLGTGKKKFEXMLMSAEEKYPDKVRAVVKFNAALAHHIMAGADLLSVTXRFEPCGLIQLQGMRYGTPCACASTGGLVDTIIEGKTGFHMGRLSVDCNVVEPADVKKVATTLKRAIKVVGTPAYEEMVKNCMIQDLSWKGPAKNWENVLLSLGVAGGEP

SEQ ID NO: 12577 - protein, 81 aa, Gaertnera fractiflexa
  misc_feature (43)..(43): Xaa can be any naturally occurring amino acid
  unsure (1)..(81): unsure at all Xaa locations
TPQDEMRAGMSYFHETIWKGVPKFLRRVDTALKNIGINERLPXNAPLIQFSSWMGGDRDGNPRVTPEVTRDVCLLARMMAA

SEQ ID NO: 12578 - protein, 710 aa, Kineococcus radiotolerans SRS30216
MVRVAGRDLDHQVRVAGDAEALHDLGDAGHVLDHPVELALLHARRDQGAHGQPDPRRVQPRRVQPQRAVAGELLQPAVHRAPGQAQVHGQLRDGGARVAVEGDEDAPVRAVQGGHVDHPRRGRGSGTGRNDQRRRALLRDPPGRACHHGMTPAPAPDTSTTTVGGYLGRRLEQLGVGHVFGLPGDFNLALLDEVLAATGLRWVGSSNELNAGYAADGYARLRRGPAAVVTTFGVGELSAVNALAGSYAEDVPVVHVVGLPPTTAMSRGALLHHSLADGDFGHFVRIAAEVTASAVVVRAQGATTAIDQALLTAVGTSKPVYLGVPADVAVHPVPAAPLSRPLRVLRSDAGAAEEFRTALAQFLGDAPEVTVLAGPRLHRRNLEDLVRAIAAQNGVRVATQSASKAMLDESHPANLGVYAGEFTRSARTRRAVDGARPLVLAGVLMSDFLTGSFSHAFDPEASVDLQLDHARIAGTAFYGLYLEESLRILEEVLDARSPRPGPLPRQEVPALAPHVPAEPDGPLTHADLWPLLQRWLNPGTLLVAEAGTSFYGALELTTPDGCDLLGQPVWSSIGYTLPATLGAMLARPGRETVLVIGDGSAQLTIQELGRILAEGLTPTILLVNNSGYTVERAIRSPEAVYQDVVAWDWTKLPAALGSPGTPTYRAATPADLVEVLGKVRADPDHAAFVELLLPRDDAPDSLVQLARSVR

SEQ ID NO: 12579 - protein, 255 aa, Chrysopogon fulvus
CELDNIMRLTGITGIVNGMDVSEWDPSKDKYIAVKYDVSTAVEAKALNKEALQAEVGLPVDRNIPLVAFIGRLEEQKGPDVMAAAIPELMEEDVQIVLLGTGKKKFERMLMSAEEKYPDKVRAVVKFNAPLAHHIMAGADLLSVTSRFEPCGLIQLQGMRYGTPCACASTGGLVDTIIEGKTGFHMGRLSVDCNVVEPADVKKVATTLKRAIKVVGTPAYEEMVKNCMIQDLSWKGPAKNWEDVLLSLGVAGGEP

SEQ ID NO: 12580 - protein, 254 aa, Elymus abolinii
DNIMRLTGITGIVNGMDVSEWDPTKDKFLAVNYDITTALEGKALNKEALQAEVGLPVDRKVPLVAFIGRLEEQKGPDVMIAAIPEILKDEDVQIVLLGTGKKKFERLLKSVEEKFPGKVRAVVRFNAPLAHQMMAGADVLAVTSRFEPCGLIQLQGIRYGTPCVCASTGGLVDTIVEGKTGFHMGRLSVDCNVVEPADVKKVATTLKRAVKVVGTPAYQEMVKNCMIQDLSWKAPAKNWEDVLLELGVEGSEPG

SEQ ID NO: 12581 - protein, 87 aa, Arabidopsis thaliana
MAPVMGSEITCSKFLPVVVEASKDRVPNIKFNVAKLLQSLIPIVDQSVVDKTIRQCLVDLSEDPDVDVRYFANQALNSIDGSTAAQS

SEQ ID NO: 12582 - protein, 416 aa, Wolbachia endosymbiont of Drosophila melanogaster
MDKKVLLELSNGLKIELPVLSGTTGPDVLNIKDLYKMTGLFTYDPGFVSTASCSSTITFIDGDEGVLKYRGHNIADLAENNNFTAVIYLLLYGELPSSEQHKKFLLKIQESSKVSEQVTNVIKAFPKTAHPMSILVACFASLSASYHEKHGNNVNGEDLDFGISAIAQVSTIIAMIYRHINNQEFINANNELSYSENFLKMIFGDAVDNDKSALFAKALDKIFTLHADHEQNASTAAVRLVGSAGSNLFASLSAGVATLWGPAHGGANEAVINMLKEIEQSGDIDKFIEKAKDDKDPFKLMGFGHRVYKNYDPRARILEGACHEVLSKLEQNNELLKIAKKLEEIALKDEYFIVRKLYPNVDFYSGIIMNAIDIPSNMFTPIFALARTTGWVTQWYEMINDKETKICRPRQLYFGK

SEQ ID NO: 12583 - protein, 597 aa, Triticum aestivum
  misc_feature (229)..(229): Xaa can be any naturally occurring amino acid
  misc_feature (471)..(471): Xaa can be any naturally occurring amino acid
  misc_feature (526)..(526): Xaa can be any naturally occurring amino acid
  misc_feature (532)..(532): Xaa can be any naturally occurring amino acid
  unsure (1)..(597): unsure at all Xaa locations
MASPFGAASSCGLKAAAPSGFATRKQLSLVSPPLVSLPQRARPGRKCSFRVNAAKELYFNKDGSAIKKLQTGVNKLADLVGVTLGPKGRNVVLESKYGSPRIVNDGVTVAKEVELEDPVENIGAKLVRQAAAKTNDLAGDGTTTSVILAQGMIAEGVKIVAAGANPVQIARGIEKTTKALVSELRKMSKEVEDSELADVAAVSAGNNYEIGNMIADAMSKVGRQGVVTXEEGQSAENNSMWSKDAFDRGYISPYFVTDSEKMSVEYENCKLLLVDKKINNARDLITLLEDAIKGGYPILIIAEDIEQEALATLVVNRLRGALKIAAIKAPGFGERKSQYLDDIATLTGGTVIREEIGLSLDKADKEVLGNAAKVVITKDSTTIVGDGTTQEEVTKRVTQIRNQIEASEQEYEKEKLNERIAKLSGGVAVIQVGAQTETELKEKKLRVEDALNATKAPVEKRIVVGGGCTLXRLLSKVDAIKETLENDEQKVGAEIVRKSLSYPLKLIAKNAGVNGSVVTEKVLVNXNFRYGXNAATGKYEDLMAAGIIDPTKVVRCCLEHAASVAKNLITSEAVVVEIKEFEQAPAANPMAGSGYGF

SEQ ID NO: 12584 - protein, 253 aa, Chrysopogon gryllus
CELDNIMRLTGITGIVNGMDVSEWDPSKDKYIAVKYDVSTAVEAKALNKEALQAEVGLPVDRNIPLVAFIGRLEEQKGPDVMAAAIPELMEEDVQIVLLGTGKKKFERMLMSAEEKYPDKVRAVVKFNAPLAHHIMAGADLLAVTSRFEPCGLIQLQGMRYGTPCACASTGGLVDTIIEGKTGFHMGRLSVDCNVVEPADVKKVATTLKHAIKVVGTPAYEEMVKNCMIQDLSWKGPAKNWENVLLSLGVAGG

SEQ ID NO: 12585 - protein, 255 aa, Coix aquatica
CELDNIMRLTGITGIVNGMDVSEWDPSKDKYITVKYDVSTAVEAKALNKEALQAAVGLPVDRKIPLVAFIGRLEEQKGPDVMAAAIPELMDEDVQIVMLGTGKKKFERMLTSAEEKYPDKVRAVVKFNAALAHHIMAGADLLAVTSRFEPCGLIQLQGMRYGTPCACASTGGLVDTVIEGKTGFHMGRLSVDCNVVEPADVKKVATTVKRAIKVVGTPAYEEMVKNCMIQDLSWKGPAKNWENVLLSLGVAGGEP

SEQ ID NO: 12586 - protein, 479 aa, Wigglesworthia glossinidia endosymbiont of Glossina brevipalpis
MHRIIRRTKIVATLGPSTDLNNNLEKMILAGANMVRMNFSHGNFYDHARRTKQVRNISHKLGKNIAILGDLQGPKIRISTFMTGKVFLSPGDQFILDASLSKDLGTVESVGIDYKYLPKDVFPGDVLLLDDGRIQLKVKKIVNKKIFTTVYIGGYLYNNKGINKLGGGLSANSLTEKDKKDIICAAKIGIDYLAVSFPRTGKDLKYARNLLNNVESHAKIISKIERAEAVANNDIIDEIITESDAIMVARGDLGIEIGDPELVGVQKKLIQRARDLNRAVITATQMMESMVYNPMPTRAEVMDVANAVLDGTDAVMLSAETAIGKYPVETVESMSNVCIGAEKISNINSLKNRLNIKFKTVEESMAVSAMYIANHLNMIKAIISLTESGKTPLIMSRISSGLPIFALSKHEHTLNLTALYRGVTPVYFKNNEKGISAADSAINLLKEKKFLFSGDFVVITQGDVMGTIGKTNTSRILIV

SEQ ID NO: 12587 - protein, 379 aa, Triticum aestivum
  misc_feature (153)..(153): Xaa can be any naturally occurring amino acid
  misc_feature (168)..(168): Xaa can be any naturally occurring amino acid
  misc_feature (183)..(183): Xaa can be any naturally occurring amino acid
  misc_feature (260)..(260): Xaa can be any naturally occurring amino acid
  misc_feature (278)..(278): Xaa can be any naturally occurring amino acid
  misc_feature (289)..(289): Xaa can be any naturally occurring amino acid
  unsure (1)..(379): unsure at all Xaa locations
AGQDITLEVESSDTILDVKAGIQDKEGIPPDQQRLIFAGKQLEDGRTLADYNIQKESTLHLVLRLRGGMQIFVKTLTGKTITLEVESSDTIDNVKAKIQDKEGIPPDQQRLIFAGKQLEDGRTLADYNIQKESTLHLVLRLRGGMQIFVKTLXTGKTITLEVESSDTXIDNVKAKIQDKEGIXPPDQQRLIFAGKQLEDGRTLADYNIQKESTLHLVLRLRGGMQIFVKTLTGKTITLEVESSDTIDNVKAKIQDKEGIXPPDQQRLIFAGKQLEDGXRTLADYNIQKXESTLHLVLRLRGGMQIFVKTLTGKTITLEVESSDTIDNVKAKIQDKEGIPPDQQRLIFAGKQLEDGRTLADYNIQKESTLHLVLRLRGGQ

SEQ ID NO: 12588 - protein, 386 aa, Pasteurella multocida subsp. multocida str. Pm70
MINGKLASILCDKNKKIEKMKIDKTLVVKFGTSTLTQGSAKLNLPHMMDIVRQLAQLHQAGFRLVIVTSGAIAAGRHYLNHPQLPPTIASKQLLAAVGQSQLIQTWEKLFAIYDIHIGQILLTRADIEDRERFLNARDTLRALLDNQIIPVINENDAVATSEIKVGDNDNLSALVAILVQAEQLYLLTDQQGLFDRDPRKHPDAKLIADVDKITDHIRAIAGGSGTSLGTGGMSTKISAADVATRSGIETIIAPGNRPNVIVDLAYGQAIGTKFSVQADRLESRKQWLYAAPSAGIITIDAGAENAMLMQHKSLLPAGIVNVEGRFSRGEVVKIRTQQGKDVALGMPRYNSDALHLIQGKHSQDIEQVLGYEYGAVAVHRDDMIVL

SEQ ID NO: 12589 - protein, 208 aa, Sagittaria montevidensis
MGRGKIEIKRIENSANRQVTYSKRRNGIIKKAREISVLCGCEVSLVIFSSSGKMSEFHSTTLSKILETFQQNQGQTLWGAKHESLKAEIDRMKKENDNMRIQLRHMKGEDLTSMEPRDLYTIETALINGIANVRGKQMEIFKKKAKNQKALEEENKQLAYILHQQSLAMNGNLREMPQDYHQKDRDFTAPVPFGFRVQPMQPNLQENK

SEQ ID NO: 12590 - protein, 457 aa, Wigglesworthia glossinidia endosymbiont of Glossina brevipalpis
MKKIFLFKILIILILTLNFIFNKDAKAFFYGENKEQIMPSLAPMLTKVLPAVVSVHVEGSQPIKRFVLPKEFKYFFGPDLPFGSNGIKPFEGLGSGVIIDAINGYVITNNHVINGADKIKIQLNDNREFVAKLIGKDDQTDLALLQIPINKNLIAIQIADSDNLKVGDFAIAIGNPFGLGQTVTSGIVSALGRSGLNLEGLENFIQTDASINRGNSGGALVNLNGELIGINTAILAPGGGNIGIGFAIPSNIVKNLCQQIIEHGKVKRGQLGIKGTELTYDIAKAFNIDAQRGAFVSEVIPNSAASKAGMKAGDIILSVNGKSIKSFAELRVKVGITAPGKTISLGILRNGKPKNISVTLDDKSNIYTLEDISIPSLQGVSLSNGSLKDGTLGVKVEDVIKDSPAYVIGLKKNDIIIGINRERVQNLDQLKKALNSKPSVIALNIVRGEAKIFLLLR

SEQ ID NO: 12591 - protein, 494 aa, Zea mays
  misc_feature (211)..(211): Xaa can be any naturally occurring amino acid
  unsure (1)..(494): unsure at all Xaa locations
MVLSHGVGGSDESVHSTFASRYVRTSLPRYRMPEQSIPKEAAYQIINDELMLDGNPRLNLASFVTTWMEPECDKLIQASVNKNYVDMDEYPVTTELQNRCVNMIAHLFNAPLGDAETAVGVGTVGSSEAIMLAGLAFKRRWQNKMKAAGKPCDKPNIVTGANVQVCWEKFARYFEVELKEVKLSDGYYVMDPQKAVDMVDENTICVAAILXGSTLNGEFEDVKLLNDLLTKKNAETGWDTPIHVDAASGGFIAPFLYPELEWDFRLPLVKSINVSGHKYGLVYAGIGWCIWRTKADLPEELIFHINYLGADQPTFTLNFSKGSSQVIAQYYQLIRLGFEGYKNIMENCQENATVLKQGLEKTGKFNIVSKDNGVPLVAFSLKDNSRHNEFEISDFLRRFGWIVPAYTMPPDAQHVTVLRVVIREDFSRTLAERLVLDIEKVLHELDALPARVPSGDLAALAAAESSEREMEKKRQVISLWKRAVLAKKKTNGVC

SEQ ID NO: 12592 - protein, 1010 aa, Thermotoga maritima MSB8
MKGRLWRMLSEIVPYTVLRRERIESWIFSDDAVERIVDPSFEWDFSSAPVRFRKELEPFSVAGEQRAYLKLWFGGETLVLIDGKPYGEINEYHRMLNITPLADGKPHTIEAQVMPRGLFGKPEKPVFTEAFFIVVDEALMKVVKTLELTIKTAEVIEDESLSKKLLDISEEFLSKVWIPRDTGTYLMTALEDPGIKDEIKNTWNTPEFKEFTGVKLPEELRNQILEEFEKFKEKLDRIRKNHPGFGTIHLVGHAHIDYAWLWPVEETKRKILRTFANSVLLSKLYPEFVYTQSSAQMYEDLKQNSPELFEEVRKLVEEGRWEPVGGMWVESDCNVPSIESLVRQFYYGQKFFEREFGKKSKVCWLPDVFGFSWVLPQILKEAGIKYFVTTKLNWNDTNEFPYDLCRWRGIDGSEVIYFSFKNPNEGYNGKIDPDTVYKTWKNFRQKDLTNRVLLSFGHGDGGGGPTEEMLENYEVLKDFPGLPHLEMGTVEEFFKKVEIDEELPVWDGELYLELHRGTYTSQFRTKKLHKEAEDSLYLAELISAFTDKDFSDEIDELWKILLRNEFHDILPGSSIKEVYEDTEKELRHVIEKSKDIVIESLKVLSSENKDVLTILNASSFPKKCLFFLNEDLAISFEGEALLKQKTHDGRYVYFIDREIPPFTKVELKVRKATSEETPSELRETNIMENEFLRVHVNDDGTIQIYDKELDRYVFEEKGNILKLHKNIPAYWDNWDIAENVEKTGYTLRAKNIEKIESGPVREVIRVEHESEGSRITQHYILYRKSRRLDIETKVDWHTRRALLRAYFPTTVLSRKARFDISGGFIERPTHRNTSFEQARFEVPFHRWMDLSQTDFGVSILNDGKYGGSVHQGIMALSLIKAGIFPDFLCDEGEHTFTYSVYVHPGDSLRDVVKESEDLNRSFIVHRGVLNLPSPLLEISPQNFRLTSLRRVKDKIVLRLVEIFGTSGKLSIKLPWHGEIYQTNVLEEKKQKVTFPVVYHPFKIYTFVVEG

SEQ ID NO: 12593 - protein, 306 aa, Vibrio cholerae O1 biovar eltor str. N16961
MNKLVVLGSVNADHVLQVPSFPRPGETLHGRNYQVIPGGKGANQAVAAARMQADVGFIACVGDDSFGINIRESFKLDGINTAGVKLQPNCPTGIAMIQVSDSGENSICISAEANAKLTAAAIEPDLAAIRDARYLLMQLETPLDGILKAAQEAKTAKTNVILNPAPARELPDELLKCVDLITPNETEAEVLTGITVYDDSSAQQAADALHCKGIEIVIITLGSKGVWLSQNGRGQRIPGFVVKATDTTAAGDTFNGALVTGLLQEMPLESAIKFAHAAAAISVTRFGAQTSIPTRAEVEAFLAEHS

SEQ ID NO: 12594 - protein, 333 aa, Bradyrhizobium japonicum USDA 110
MADVKYDVLGIGNALFDVLVRTDEAFLAKHGMTKGSMSLIDEARAAAIYQDMGPATEVSGGSAANTIVGIGSLGARAAYVGKVKDDQIGKLYVHDIRAAGVAFNTPAAKDGPATGCSYILVTGDGERTMNTYLGAAQDLSPADIDPAEIASAGIVYLEGYLWDPKNAKEAFVKAAKIAHDARRKVALTLSDSFCVDRYRDEFLSLMRNGTVDIVFANESELHSLYMTSDFDTALKQLRNDVNLGVVTRSEKGCMVVSAEDAVAAPAAPIAKLVDTTGAGDLFAAGFLYGLARNLPYKQCGELGALAAAEVIQHIGARPQVSLKELAEQRGLTA

SEQ ID NO: 12595 - protein, 136 aa, Candida glabrata
MARTKQTARKSTGGKAPRKQLASKAARKSAPSTGGVKKPHRYKPGTVALREIRRFQKSTELLIRKLPFQRLVREIAQDFKTDLRFQSSAIGALQESVEAYLVSLFEDTNLAAIHAKRVTIQKNDIKLARRLRGERS

SEQ ID NO: 12596 - protein, 256 aa, Heterocapsa triquetra
IVGILRLVRVLPSLTSTMLNCCTAPAPVTAEDFEVREVYEARTTKSPAVPPEEALRLLQEGNARYTKANNTVVRKGLAEQRKQLVEYGQKPMAVVFGCADSRAPIDTIFDALPGDLFILRNAGNTCTRAEGSMVGSIEYAISHLDSKLILVLGHTKCGAIAGATKTMLAQKEKKDCSCLAKGSSALDILLDGLVPVAKQAADENPGAAEAEIATKAVHVNVFHTICRLFSYSKALRDMVSSGEVQVHGGIYDLESG

SEQ ID NO: 12597 - protein, 585 aa, Petunia x hybrida
MAVLPGENPIAVHNNKEMGKIPPLNSLPVGYRFRPTDEELVNHYLRLKINGADNEVSVIREVDICKLEPWDLPIWSVVESNDNEWFFFCPKDRKYQNGQRLNRATERGYWKATGKDRNIVTKKGAKIGMKKTLVYYIGRAPEGKRTHWVIHEYRATDKSLDGTHPGQGAFLLCRLFRKNDLKQDEHVESSNLDDAEQNATAAKSPTDDELSEAATPLVAGQPLGDSDKSYAAKFPKGEPYGKQLPLESHSNSCIADDTEDQMVDITSIPPDLELEKALGNFCDQSSQPLDWKIFSPLHAQMQVEFGSSYLQAPMNNDMSAFQKDVQFQYGTNALDINDFLDSVIVSSDEFSCGDSGQEVGLHNFDTTIHSFTGAPVKDSGSCSESEAEVTQRLVEPDFFEPEILLGNFDQATDVKGGVNSIQTTVQDAAGAPYFSNDHVMGNVGFLQNTYIGQNDFSAGYGGIQVPNFLTVQESGGYNNVVSSDSGSGTGIKLRTRQMQNQPDDRQSRMQGTANRRIRLQMKLQVGPVKSRIHSDSSQGAESDEAATEGERVSDEHSSTTSAAITSDEARDATHEEFKSKLVKEA

SEQ ID NO: 12598 - protein, 497 aa, Bradyrhizobium japonicum USDA 110
MTPTAAARAQHATATLRDRLKDPSLLKEACYIDGAWVGTPVFAVNNPATGVELAKVPQLGADDTTKAVEAAERAFPAWAKHTAKQRSNILRKWFELIIANREDLALILTSEQGKPLSEALGEVDIGAAYIEFFAEEARRVYGETIPTQRPDARLLAIKQPIGVCGAITPWNFPNSMITRKVSPALAAGCTVVLKPANETPLSALALAVLAEKAGIPKGVLNIITGDAPPIGKVLCEHPAVRFVGFTGSTAVGKILYQQASVGVKRLGLELGGNAPFVVFDDADIDAAVEGAIVSKYRNMGQTCVCANRLYAQDKIYDEFVQKLSKKVAVMKIGDGTEAGVTQGPLINLKAVDKVERHIADAVKRGAKVVTGGKRSELGRSFFEPTVLADVKPDSLVAQEETFGPLAPVIRFKDEADVIAMCNASPFGLASYFYSRDLGRVWRVAEALESGMVGVNTGLITTEVAPFGGVKESGLGREGSRHGMEEYVEIKYVMMAGV

SEQ ID NO: 12599 - protein, 111 aa, Glycine max
MEKKKAAVPLVCHGHSRPVVDLFYSPVTPDGYFLISASKDSNPMLRNGETGDWIGTFEGHKGAVWSCCLDTNALRAASGSADFSAKVWDALTGDELHSFEHKHIVRACACP

SEQ ID NO: 12600 - protein, 158 aa, Pyrus communis
MEGKVFTEEQETLVVKSWGVMKQNAADLGLKFFLKIFEIAPSAQKLFSFLRDSNIPLEKNPKLKPHAMSVFVMTCESAVQLRKAGKVTVRESTLKRLGGVHFKSGVVDEHYEVTKFALLETIKEAVPEMWSPEMKNAWGEAYDQLVTAIKLEMKPPLN

SEQ ID NO: 12601 - protein, 680 aa, Nostoc sp. PCC 7120
MQPEPKVNILLVDDKVENLLALEAILERLGANLVRATSGEEALRCLLHQDFAVILLDVQMPGMDGFETATLIRNRGRSRQTPIIFLTAFSTSDQMLFKGYALGAVDYLLKPIDANILTSKVTVFVELFKKTQAIQHQAAQLAAINAELRQSEERFRSLSTCSPIGIFETDTAGCCKYTNPRYQAICGLDATESLDKRWLESVHSEDQERAIASWSTYIYQGGDYSDEFRFQTVDGSLRWVQVRSSPMLSGNGELLGYVGTLEDITARKQSEEIRAQVIREQTARQEAEATNRMKDEFLAVLSHELRTPLTSMLGWSKILRAKKLDEKATARALEAIERNANSQVQLIEDILDVSRIIRGQLRLNLSPVNLITVVEAALEAVRPLADTKNMTINTVLDYTLSPVSGDFARLQQIVWNLLTNAIKFTPKEGQVEIRLEGINGELSDDLTHAQIQVIDTGVGIASEFLPKVFERFRQADSTTTRSHNGLGLGLAIVRHLVELHNGTILAESPGVGKGATFTVRFPLIQENRETRPTPTEKLSGDAANSSPLAGLKVLIVDDETDTRNFLGFLFEEYGAISSTSASVETALAVIEQLKPDILISDIGMAEQDGYSLIRKLRSLPPEQGGKIPAIALTAYSREEDRQQIIEAGFQHHLSKPIDPNKLISVVASIFHLSPALSGSV

SEQ ID NO: 12602 - protein, 133 aa, Zea mays
TPGHSENFETPGVEVTTGPLGQGIANAVGLALAEKHLAARFNKPDSEIVDHYTYCIVGDGCNMEGILTEACSLAGHWGLGKLIVFYDDNHISIDGDTGIAFTEDVSGRFEALGWHTLWVKNGNDGYDEIRKAI

SEQ ID NO: 12603 - protein, 679 aa, Bacillus agaradhaerens
QQATDRSNSVNYSTDVIYQIVTDRFYDGDESNNPSGELYSEDCKNLRKYCGGDWQGIIDKIDDGYLTNMGVTALWISPPVENIFETIDDEFGTTSYHGYWARDYKKTNPFFGSTEDFERLIETAHSHDIKIVIDLAPNHTSPADFDNPDYAENGVLYDDGNYLGSYSDDSDLFLYNGGTDFSNYEDEIYRNLFDLASFNHINSELNNYLEDAVKKWLDLGIDGIRIDAVAHMPPGWQKAYMDTIYDHRAVFTFGEWFTGPSGNEDYTKFANNSGMSVLDFRFAQTTRNVIGNNNGTMYDIEKMLTDTENDYDRPQDQVTFLDNHDMSRFTNGGESTRTTDIGLALMLTSRGVPTIYYGTEQYMEGDGDPGSRGMMASFDENTDAYKLIQKLAPLRKSNPAYGYGTTTERWINDDVLIYERHFGENYALIAINRNLNTSYNIQGLQTEMPSNSYDDVLDGLLDGQSIVVDNKGGVNEFQMSPGEVSVWEFEAENVDKPSIGQVGPIIGEAGRTVTISGEGFGSSQGTVHFGSTSAEILSWNDTIITLTVPNNEAGYHDITVVTEDEQVSNAYEFEVLTADQVTVRFIIDNAETKLGENVFLVGNVHELGNWDPEQSVGRFFNQIVYQYPTWYYDVNVPANTDLEFKFIKIDQDNNVTWQSGANQTYSSPESGTGIIRVDW

SEQ ID NO: 12604 - protein, 133 aa, Glycine max
AGVSNPTHKEIRYRGVRKRPWGRYAAEIRDPGKKTRVWLGTFDTAEEAARAYDTAAREFRGTKAKTNFPTHAAVARSPSQSSTLDSSSPPPLDLTLAAPLTAAGALVFPVARPVVFFDAFARAEVRASFDLPV

SEQ ID NO: 12605 - protein, 254 aa, Elymus caninus
  misc_feature (6)..(6): Xaa can be any naturally occurring amino acid
  misc_feature (50)..(50): Xaa can be any naturally occurring amino acid
  unsure (1)..(254): unsure at all Xaa locations
DNIMRXTGITGIVNGMDVSEWDPTKDKFLAVNYDITTALEAKALNKEALXAEVGLPVDRKVPLVAFIGRLEEQKGPDVMIAAIPEIVKEEDVQIILLGTGKKKFERLLKSVEEKFPGKVRAVVRFNAPLAHQMMAGADLLAVTSRFEPCGLIQLQGMRYGTPCACASTGGLVDTIVEGKTGFHMGRLSVDCNVVEPADVKKVATTLKRAIKVVGTPAYQEMVKNCMIQDLSWKGPAKNWEDVLLELGVEGSEPG

SEQ ID NO: 12606 - protein, 255 aa, Cymbopogon flexuosus
CELDNIMRLTGITGIVNGMDVSEWDPSKDKYIAVKYDVSTAMEAKALNKEALQAEVGLPVDSKIPLVAFIGRLEEQKGPDVMAAAIPQLMEEDVQIVLLGTGKKKFECMLMSAEEKYPDKVRAVVKFNAALAHHIMAGADVLAVTSRFEPCGLIQLQGMRYGTPCACASTGGLVDTIIEGKTGFHMGRLSVDCNVVEPADVKKVATTLKRAIKVVGTPAYEEMVKNCMIQDLSWKGPAKNWENVLLSLGVAGGEP

SEQ ID NO: 12607 - protein, 107 aa, Arabidopsis thaliana
MSESSRIREKYPDRIPVIVEKAGQSDVPDIDKKKYLVPADLTVGQFVYVVRKRIKLGAEKAIFVFVKNTLPPTAALMSAIYEEHKDEDGFLYMTYSGENTFGSLTVA

SEQ ID NO: 12608 - protein, 81 aa, Gaertnera junghuhniana
  misc_feature (48)..(48): Xaa can be any naturally occurring amino acid
  misc_feature (54)..(54): Xaa can be any naturally occurring amino acid
  unsure (1)..(81): unsure at all Xaa locations
TPQDEMRAGMSYFHETIWKGVPKFLRRVDTALKNIGINERLPYNAPLXQFSSWXGGDRDGNPRVTPEVTRDVCLLARMMAA

SEQ ID NO: 12609 - protein, 489 aa, Glycine max
MASTTTSSLCTWLVAACMSVTCDADRTRTPHAIFRSSKKSRKSQFNVSRSTHSGKTMAVALQPTQEVTTIKKPPTKQRRVVVTGLGVVTPLGHEPDIFYNNLLDGVSGISEIETFDCAEYPTRIAGEIKSFSTDGWVAPKLSKRMDKFMLYMLTAGKKALVDGGITDDVMDELNKDKCGVLIGSAMGGMKVFNDAIEALRISYKKMNPFCVPFATTNMGSAMLAMDLGWMGPNYSISTACATSNFCILNAANHIIRGEADVMLCGGSDAAIIPIGLGGFVACRALSQRNTDPTKASRPWDINRDGFVMGEGAGVLLLEELEHAKKRGATIYAEFLGGSFTCDAYHVTEPRPDGAGVILCIEKALAQSGVSKEDVNYINAHATSTPAGDLKEYQALMHCFGQNPKLRVNSTKSMIGHLLGAAGAVEAVATIQAIRTGWVHPNINLEKPDNGVDAKVLVGSKKERLDVKAALSNSFGFGGHNSSIIFAPYK

SEQ ID NO: 12610 - protein, 255 aa, Cymbopogon jwarancusa
CELDNIMRLTGITGIVNGMDVSEWDPSKDKYIAVKYDVSTAMEAKALNKEALQAEVGLPVDSKIPLVAFIGRLEEQKGPDVMAAAIPQLMEEDVQIVLLGTGKKKFERMPMSAEEKYPDKVRAVVKFNAALAHHIMAGADVLAVTSRFEPCGLIQLQGMRYGTPCACTSTGGLVDTVIEGKTGFHMGRLSVDCNVVEPADVKKVATTLNRAIKVVGTPAYEEMVKNCMIQDLSWKGPAKNWENVLLSLGVAGCEP

SEQ ID NO: 12611 - protein, 644 aa, Thermus thermophilus HB27
MKALRPSYEMKRYTLPQLLRLRAEHEGDRVALREKDYGIWNEITYAQYYENVLLFAHGLLSLGFGPGERLAVIADNIPEWLYAELGAQAVRGISVGVYQSSLPPEIAYMLQYTGASVVLAEDQEQVDKLYEIRSEIPHVRYVIYEDEKGMRGYKDPWLLSFAEVLERGREHRRKHPDAVERLLLEASPEEVCHLSSTSGTTGRPKAAMLRHRNLIHMGVALQEVDPLLPTDDYLSFLPLAWIGEQMMSVAMALTGGFAVNFPEEVETALQDLKEIGPHVMFSPPRVWEGIQSQVWVRISESPRFNRFVYERLLKVGYRAAEYRMRGRPMPLGLRLAYWLADQVLFKPLRDQLGFLRLRRAYTGGAALGPDVFRFFHAIGVNLKQVYGQTEIIGIAFVHRDGDVRHDTVGLPIPGTEVRISEAGEILLRSDAVCAGYWERPEATQETFGDGWLHTGDAGYLTEDGHLVVIDRLSDVMRTEKGTVFSPQFLENKLKFSPYIKEAVVFGDRKPYLAAFINIDPQTVGKWAEDRGLAYTTYLDLSLKPEVAELIRKEVEKVNKELPEELRIRRFVLLYKLLDADDEELTRTGKVRRGHIAKKYAPLVEALYSGAKEVEVEAEYRYQDGTLQRLRARVPVLGFAEEVPA

SEQ ID NO: 12612 - protein, 378 aa, Capsicum annuum
MNLTLAQSPLFMIPSGFSPSGFLNSPGFLSPLQSPFGMSHQQALAHVTAQAECSSSYMQMQAEDQCSAQVASAEAALGNELLTDPKESSLQIKECLQPRLDKKPSDKQGKQFELTEVPQFENKTSFGAFDKSACDGYNWRKYGQKKVKATECPRSYYKCTHLKCPAKKKVEKSVDGHITEITYNGRHNHAQPTKQRKDGSALDSTDGSGVQPDISTHDWTVMNSSDGSSPSHSEQVPNQMASELVKKECDETKSNLIEVDEGHDEPDAKRTKMAVEALASSHGTVAESKIILQTRSEVDILDDGYRWRKYGQKAVKGTQHPRSYYRCTYAGCNVRKQVERASTDPKAVITTYEGKHNHDIPTVIRNRGTRNTAKDTWR

SEQ ID NO: 12613 - protein, 255 aa, Cymbopogon martinii
  misc_feature (203)..(203): Xaa can be any naturally occurring amino acid
  misc_feature (221)..(221): Xaa can be any naturally occurring amino acid
  unsure (1)..(255): unsure at all Xaa locations
CELDNIMRLTGITGIVNGMDVSEWDPSKDKYIAVKYDVSTAMEAKALNKEALQAEVGLPVDSKIPLVAFIGRLEEQKGPDVMAAAIPELMEEDVQIVLLGTGKKKFERMLMSAEEKYPDKVRAVVKFNAALAHHIMAGADVLAVTSRFEPCGLIQLQGMRYGTPCACASTGGLVDTIIEGKTGFHMGRLSVDCNVVEPADVKXVATTLKRAIKVVGTPAYXEMVKNCMIQDLSWKGPAKNWENVLLSLGVAGGEP

SEQ ID NO: 12614 - protein, 322 aa, Candida albicans SC5314
MFGQKKCSNKPQQGTILANSNQVNMDTSTVLEKYTQDLSNLPLEVRHLLEEIKSKDVQVSEARKRYQTRDHQLHKFIRTNGTLTKHPKEDQLYSKIEEDMKLVQKLQKEKILLANTALFLISKHLYHFETDIAKLERDELLPPLEHPIELTEVSKDEYAKSLNGFSDSASATPTPRNGSSATPVAETVKKIQKKKLSVKGASSSSAQSSSASRQVKRLRSEEIEDPLPYEGGSLAFNGNVAMSINSAADANGPNGEDADNNLYCFCQRVSFGEMIGCDNEDCKYEWFHWSCVGITSPPKDDEIWYCPDCASKMEKRKKKRKN

SEQ ID NO: 12615 - protein, 81 aa, Gaertnera lowryi
  misc_feature (27)..(27): Xaa can be any naturally occurring amino acid
  unsure (1)..(81): unsure at all Xaa locations
TPQDEMRAGMSYFHETIWKGVPKFLRXVDTALKNIGINERLPYNAPLIQFSSWMGGDRDGNPRVTPEVTRDVCLLARMMAA

SEQ ID NO: 12616 - protein, 255 aa, Cymbopogon obtectus
  misc_feature (146)..(146): Xaa can be any naturally occurring amino acid
  unsure (1)..(255): unsure at all Xaa locations
CELDNIMRLTGITGIVNGMDVSEWDPSKDKYIAVKYDVSTAMEAKALNKEALQAEVGLPVDSKIPLVAFIGRLEEQKGPDVMAAAIPQLMEEDVQIVLLGTGKKKFERMLMSAEEKYPDKVRAVVKFNAALAHHIMAGADVLAVTXRFEPCGLIQLQGMRYGTPCACASTGGLVDTIIEGKTGFHMGRLSVDCNVVEPADVKKVATTLKRAIKVVGTPAYEEMVKNCMIQDLSWKGPAKNGEDVLLSLGVAGGEP

SEQ ID NO: 12617 - protein, 81 aa, Gaertnera macrostipula
  misc_feature (70)..(70): Xaa can be any naturally occurring amino acid
  unsure (1)..(81): unsure at all Xaa locations
TPQDEMRAGMSYFHETIWKGVPKFLRRVDTALKNIGINERLPYNAPLIQFSSWMGGDRDGNPRVTPEVTXDVCLLARMMAA

SEQ ID NO: 12618 - protein, 255 aa, Cymbopogon commutatus
CELDNIMRLTGITGIVNGMDVSEWDPSKDKYIAVKYDVSTAMEAKALNKEALQAEVGLPVDRKVPLVAFIGRLEEQKGPDVMAAAIPQLMEEDVQIVLLGTGKKKFERMLMSLEEKYPDKVRAVVKFNAALAHHIMAGADVLAVTSRFEPCGLIQLQGMRYGTPCACASTGGLVDTIIEGKTGFHMGRLSVDCNVVEPADVKKVATTLKRAIKVVGTPAYEEMVKNCMIQDLSWKGPAKNWENVLLSLGVAGGEP

SEQ ID NO: 12619 - protein, 468 aa, Pasteurella multocida subsp. multocida str. Pm70
MKSRMLGDYNKLFRLCKYLREFTPVERAIHNRGETMNEQQLLECDRQHIWHPYAALNADFPLFVVERAEGVYIQLKNGQQLIDGMSSWWSAIHGYNHPRLNHAATQQLSQMSHVMFGGLTHQPAVELAQQLVNILPESLDKIFFADSGSVAVEVAMKMAVQYQHAKGETQRCKFATIRSGYHGDTWHAMSVCDPVTGMHSLFAKGLPVQYFLPQPPVKFGQAWQPEAMQPLQDLLAQHGDEIAGLILEPVVQGAGGMYFYSPEYLVQAKALCEQYGILLIFDEIATGFGRTGKLFACEHANVVPDVMCIGKALTGGYLTLSATITNQTVADVICSGEAKCFMHGPTFMANPLACAVAAESIKLLLASPWQQRIQQIEQQLRQELRQAEALDCVAEVRVLGAIGVIEMKAPVNMASLQPRFVQNGVWVRPFGKLVYLMPPYIISSDQLSQLIHGTIRTLQEEYAHKESL

SEQ ID NO: 12620 - protein, 369 aa, Streptococcus thermophilus LMG 18311
MVTKKQNTAFNVQVADFIRNHKKAGTAIDDEITEKLVIPFVLDADGIDDLLERLTDGGISITDKDGNPSSKYVVEAPKPEELTDEELLGSNSAKVNDPVRMYLKEIGVVPLLSNEEEKKLAIAVENGDLEAKQRLAEANLRLVVSIAKRYVGRGMQFLDLIQEGNMGLMKAVDKFDYSKGFKFSTYATWWIRQAITRAIADQARTIRIPVHMVETINKLVREQRNLLQELGQDPTPEQIAERMDMTPDKVREILKIAQEPVSLETPIGEEDDSHLGDFIEDEVIENPVDYTTRVVLREQLDEVLDTLTDREENVLRLRFGLDDGKMRTLEDVGKVFNVTRERIRQIEAKALRKLRHPSRSKQLKDFIED

SEQ ID NO: 12621 - protein, 481 aa, Methanococcoides burtonii DSM 6242
MKGIKSSRMKAIDENCEHLGLKGLQLMENAGAAIAHEVRERVQKGNVLIVAGRGNNGGDAFVAARHLAYDPAITINIALIGSASQIRSEDAINNYGLLEHCRINALIEITDPQKLKEMGWLDNADIIVDALLGTGITGKLKETEATIIDLINDSNVPVIAVDVPSGFDPDGGEFERSVRADVTLTFHRMKKGLVSGHAKEYTSEVKVINIGVCEDAEKYVGEGDINAFRTRHGDSHKGQHGKILIIGGGPYSGAPALTAMAALRAGADIVTVAAPANVADIIASFSPNIIVKALSSNILCKEDMGTITKLIESHDVVVIGMGLGRAEQTKDTVSKIIPLCTKVVADADALYGIDLPVPKGIEMIITPHAGEYNALGGNGKEDTLEFSKRNNVTILLKGREDHISNGKRIAINRNGNPGMTVGGTGDVLAGIAGALFATACKMDAACGAAYINGAAGDLAFERMGSGLLATDIIDMITEVMK

SEQ ID NO: 12622 - protein, 695 aa, Solibacter usitatus Ellin6076
MERQCISEYNFESTDCAGASAARDNTSRKVPRVVAAILTSVIRSTPAATTSAVCRRDGKFERVPMCGIAGYALIDQSAQRARVQAMCDQIRHRGPDDEGVHVDRNCAIGMRRLSIIDLSTGHQPMCNEDGSVWIVFNGEIYEYKELRAELIAHGHQFRTASDTETLLHLYEEEGVEGLRRLRGMFAFAIWDARRNRLMLARDPFGKKPLYYAVLPTGIYFGSEISCLREAGVPLEPDPEALRLYFQFNYIPDPMSAYRAVRRLPAGSWLTWENGQVRQGRYWQPPVPAAQPVAGLSHADAVVKVREKFDEAVRIRMIADVPLGAFLSGGIDSSSIVASMAMQSREPIKTFSIGFEESEFNELPYAAMVARKYGADHHEIVVRPDSIGIIRKFARHFGEPFADASAIPTYIMSEFAARYVKVALSGDGGDELFGGYTSLRQVQKLAAFDRVPQAVRLMMSWASSRMPYSAYGKNFLHMLGRRSALDRYFAFNYAPFHMRSKLLRPDWMLPAESGFLARALPDCILPEDAGALSQVMYFEGTANLTGDMLVKVDRMSMAASLEVRCPLLDHELAELAATIPHAWKVVGGQGKRILLDALGDRLPPELLNRPKTGFGVPLVDWFRTSLRELLWDTLTAERFLAHNIVAPEFLRTLLEEHDSGRRDNSQWLFTLLVLALWFEDIEQPLASPVPARVEGA

SEQ ID NO: 12623 - protein, 264 aa, Synechococcus sp. PCC 7002
MTSVSERFRSLKQAGQCALIPFITAGDPDLETTEQALKILDAAGADFIELGVPYSDPLADGPTIQAAATRALSRGVTLEQVLAIVQRVHGQLTAPIILFTYYNPIFYRGIDAFMAQVAAAGVKGLVIPDLPLEESQMVLDAATSHGLDLILLVAPTSPTERIEAIAKASQGFIYLVSVTGVTGARTSVASRVGELLPKLRQVTDKPIGVGFGVSDPAQARQLKEWGADGVIVGSAVVKRLATGTPAEGLAAVKEFCESLKEAIA

SEQ ID NO: 12624 - protein, 299 aa, Pavlova lutheri
RNSARGPPARATYDAEYESDIAEEAAEEKTSRANARRRRSQTPPNLDPIIETITTEGALASAPQKPPLRSTGSIVEEALREQEQRNELVKKQTPVQILEELKAGNARFAAGEQSYPTPSLVARREFSRGQVPKVMVIGCADSRVPIEILFDQGIGDVFVSRNAGNLFDDKVGGTLDYAVNHLGIRLVVVMGHEACGAVRAAGLSTSALMREPPHLRAMLLGMQRELALCKESLDAIAEPSTRERATVIANAVGQARKILEDPLVHAKHTDGKLLVVAAYYEITTGLVQFIELPKDTLVA

SEQ ID NO: 12625 - protein, 211 aa, Streptomyces coelicolor A3(2)
MDHKGTDPGFMNPVAGFGVTFKAMFKKRLTEQYPEQQKTTAPRFHGRHQLNRHPDGLEKCVGCELCAWACPADAIYVEGADNTDEERYSPGERYGRVYQINYARCILCGLCIEACPTRALTMTNEFELADSSRANLIFTKEQLLAGLEEGMVDSPHAIYPGTDEQDYYRGLVTEAAPGTVQQVAHSKGEVVQEGDSTFGATEPASEEVIRR

SEQ ID NO: 12626 - protein, 386 aa, Glycine max
  misc_feature (110)..(111): Xaa can be any naturally occurring amino acid
  unsure (1)..(386): unsure at all Xaa locations
MRIKRVLRIELSTACFTGNNLSCGASYHQPCETDNADQGSSHKPKTGLIVGIVIGLVVILFLGGLMFFGCKGRHKGYRREVFVDVAEVPAKRLTDYKSPGGNAAFQREVXXISVAVHRNLLRLIGFCTTPTEKTPDYPFMQNLSVAYGLREIKPGEPVLDWPTRRQVALGTARGLEYLHEHCNPKIIHRDVKAANVLLDEDFEAVVGDFGLAKLVDVRKTNVTTQVRGTMGHIAPEYLSTGKSSERTDVFGYGIMLLELVTGQRAIDFSRLEEEDDVLLLDHVKKLEREKRLDAIVDHNLNKNYNIQEVEMMIKVALLCTQATPEDRPPMSEVVRMLEGEGLAERWEEWQHVEVNRRQEYERLQRRFDWGEDSVYNQDAIELSGGR

SEQ ID NO: 12627 - protein, 409 aa, Triticum aestivum
  misc_feature (228)..(228): Xaa can be any naturally occurring amino acid
  misc_feature (345)..(345): Xaa can be any naturally occurring amino acid
  unsure (1)..(409): unsure at all Xaa locations
MASPSVFAGIAQGPEDPILGVTVAYNKDPSPVKVNLGVGAYRTEEGKPMVLNVVRRAEQMLIQNESRVKEYLPITGLADFNKLSAKLIFGADSPAIQENRVATVQCLSGTGSLRVGGEFLARHYHERTIYIPQPTWGNHPKVFTLAVLTARSYRYYDPATCGLDFQGLLEDLSSAPSGAIVLLHACAHNPTGVDPTLEQWEQIRQLMRSKALLPFFDSAYQGFASGSXLDKDAQSVRMFVADGGELLMAQSYAKNMGLYGERVGALSIVCGSADIAVKVKSQLKLVIRPMYSNPPLHGASIVATILKDSAMFDEWTLELKAMADRIISMREQLFNALKIRETPGXDWSHIIKQIGMFTFTGLNSDQVAFMRQEYHIYMTSDGRISMAGLSSRTVPHLADAIHAAVTKLK

SEQ ID NO: 12628 - protein, 229 aa, Glycine max
MAGAGAGGGYGDANQRIDYVFKVVLIGDSAVGKSQILARFARNEFSLDSKSTIGVEFQTRTLVIDHKTVKAQIWDTAGQERYRAVTSAYYRGAVGAMLVYDITKRQTFDHIPRWLEELRNHADKNIVIILTGNKCDLENQRDVPTEDAKEFAEKEGLFFLETSALEATNVETAFITVLTEIYNIVNKKNLTADENQGNGNSASLSGQKIIVPGPAQEIPAKRNMCCQSS

SEQ ID NO: 12629 - protein, 370 aa, Arabidopsis thaliana
MQKQSTTMLSDLPKDVAEEVLSKFPVTSLRRVRFTCKKLNTLSKDMSFTRKHIDKEEAKKKQSKEFHVVMMLDFRVSLFSLNLLNPNPIERLGQLVSLDGGAQVDISNIFHCEGFLLCTTKDISRVVVWNPCVGQTIWIKPRNSFNKWDRYALGYDVMKNHKVLRFVDDGEYGRRHLLCEFEIYSFESDSWEVLDVNPDWEIDFVHRGLSIDGNSYWFARDKVVPYGGQDPSYFLLCFDFTTERFRPPLPLPFQPYFGDTVALSSVGDNQIAVLCQRSSSPYTLKIWISSKVEPNAVSWNKLFLKVDMKPLTGNSFSYSGGSFFVDEEKKMAVVLDKNIGGGFDPTRNIAYIIGKEGYFKKVDLGESRHL

SEQ ID NO: 12630 - protein, 627 aa, Medicago truncatula
MEETKFCALAFICAFFLLLLHPLWLVSANMEGDALHNLRTNLQDPNNVLQSWDPTLVNPCTWFHVTCNNDNSVIRVDLGNAALSGTLVPQLGQLKNLQYLELYSNNITGPIPSDLGNLTNLVSLDLYLNRFNGPIPDSLGKLSKLRFLRLNNNSLMGPIPMSLTNISALQVLDLSNNQLSGVVPDNGSFSLFTPISFANNLNLCGPVTGHPCPGSPPFSPPPPFVPPPPISAPGSGGATGAIAGGVAAGAALLFAAPAIAFAWWRRRKPQEFFFDVPAEEDPEVHLGQLKRFSLRELQVATDTFSNKNILGRGGFGKVYKGRLADGSLVAVKRLKEERTPGGELQFQTEVEMISMAVHRNLLRLRGFCMTPTERLLVYPYMANGSVASCLRERPPHQEPLDWPTRKRIALGSARGLSYLHDHCDPKIIHRDVKAANILLDEEFEAVVGDFGLAKLMDYKDTHVTTAVRGTIGHIAPEYLSTGKSSEKTDVFGYGIMLLELITGQRAFDLARLANDDDVMLLDWVKGLLKEKKLEMLVDPDLKTNYIEAEVEQLIQVALLCTQGSPMDRPKMSDVVRMLEGDGLAERWDEWQKGEVLRQEVELAPHPNSDWIVDSTENLHAVELSGPR

SEQ ID NO: 12631 - protein, 234 aa, Mesorhizobium loti MAFF303099
MADLSAFPITTRWPAKYPDQIQLYSATTPNGVKISIALEEVGLPYEPHLVNISKDESWTPEFLSLNPNGKIPAIIDPNGPDGKPIGLFESGAILLYLADKTGLLVPADAARRYETIQWVFFQMASVGPMFGQVGFFHKFAGREIADKRPLERYRDESRRLIGVLDGRLKGRKWIMGNDYTIADISLLGWVRNLIGFYEARELVGFDDFANVAAWLERGLARPAVQKGLTIPAKG

SEQ ID NO: 12632 - protein, 473 aa, Clostridium acetobutylicum ATCC 824
MQKTKMIFTVGPASETEEIVTAFIKAGMNASRHNFSHGDHAEHGGRIALVKKVRAKLNKPVAICLDTKGPEIRTGDFNPSKLELQKGSKFTIVCGEEIVGDATKCSISYKDLYKDVKPGNTILIDDGLVGLTVEAIEGTNVICTVANTGLVGSHKGVNVPNVSIQLPAMTEKDKSDLIFGCKEEIDMVSASFIRKPEDVLAIRKVLNENGGENIQIFSKIENQEGVDNIDAIIEVSDGIMVARGDMGVEIPIQRVPLIQKMIIKKCNAVGKPVITATQMLDSMMRNPRPTRAEASDIANAIFDGTDAIMLSGESANGSYPIEAVTTMAKIAQEAENEINYDKFLAERKGNEKKNTSDVISLGTCTAAADLEASAIITATQTGSTARTVSKYRPKAPVIAVTPSEKVARKLAMSWGVHPIISDKFGSTDELISTSVDKALEAGYVQKGDLVVVAAGVPTNVSGTTNMLKVQVVE

SEQ ID NO: 12633 - protein, 691 aa, Arabidopsis thaliana
MIPYAAGVIVPLALTFLVQKSKKEKKRGVVVDVGGEPGYAIRNHRFTEPVSSHWEHISTLPELFEISCNAHSDRVFLGTRKLISREIETSEDGKTFEKLHLGDYEWLTFGKTLEAVCDFASGLVQIGHKTEERVAIFADTREEWFISLQGCFRRNVTVVTIYSSLGEEALCHSLNETEVTTVICGSKELKKLMDISQQLETVKRVICMDDEFPSDVNSNWMATSFTDVQKLGRENPVDPNFPLSADVAVIMYTSGSTGLPKGVMMTHGNVLATVSAVMTIVPDLGKRDIYMAYLPLAHILELAAESVMATIGSAIGYGSPLTLTDTSNKIKKGTKGDVTALKPTIMTAVPAILDRVRDGVRKKVDAKGGLSKKLFDFAYARRLSAINGSWFGAWGLEKLLWDVLVFRKIRAVLGGQIRYLLSGGAPLSGDTQRFINICVGAPIGQGYGLTETCAGGTFSEFEDTSVGRVGAPLPCSFVKLVDWAEGGYLTSDKPMPRGEIVIGGSNITLGYFKNEEKTKEVYKVDEKGMRWFYTGDIGRFHPDGCLEIIDRKKDIVKLQHGEYVSLGKVEAALSISPYVENIMVHADSFYSYCVALVVASQHTVEGWASKQGIDFANFEELCTKEQAVKEVYASLVKAAKQSRLEKFEIPAKIKLLASPWTPESGLVTAALKLKRDVIRREFSEDLTKLYA

SEQ ID NO: 12634 - protein, 106 aa, Parachlamydia sp. UWE25
MTQTQTVSQITKLKPLGNRVLVRRLAAEEKLKGGIILPDTAKKKQEQAEVIAIGTGKKDKNGTLVPMPVKIGDVILMEKYSGQEITLNDEELVILRADDIIAIVEK

SEQ ID NO: 12635 - protein, 255 aa, Populus deltoides
MGRGRVQLKRIENNISRQVTFSKRRTGLLKKAHEISVLCDADVAVIVFSTKGKLFEYSTDSSMESILERYERCSYAEQQFVPHGPEHQGSWFLEHPKLRARVELLQRNLRNYTGQDLDPLSYKELHHLEQKIDTALKSVRSRKNQLVHESLAEMQKKEKALQDQNNILVEQVKKKLKALTEQAQWEQQNLGQNSSSFMLPQAQPPLQPSMLSHPPPTLGGSFQIRGFLNGNKDVEVQTQPSTMPHWMLRHVNDRI

SEQ ID NO: 12636 - protein, 81 aa, Gaertnera madagascariensis
  misc_feature (59)..(59): Xaa can be any naturally occurring amino acid
  unsure (1)..(81): unsure at all Xaa locations
TPQDEMRAGMSYFHETIWKGVPKFLRRVDTALKNIGINERLPYNAPLIQFSSWMGGDRXGNPRVTPEVTRDVCLLARMMAA

SEQ ID NO: 12637 - protein, 467 aa, Agrobacterium tumefaciens str. C58
MQTFVENFENSDRLRQRARNIIPGGAHTYAKGDDQYPVLSPGFIERGYGCHVWDVDGNEYIEYGMGNRAVGLGHAYADVVEAARAELYRGCNFTRPSKIEVDCASTFLDTVQTAEMVKFCKNGSDATSAAIRLARAVTGRDLIARCSDHPFFSTDDWFIGTTEMNAGIPEAIQNLVLGFSYNDLASARSLFDRFKGRIAAFILEPSRGDPPRDQFLHKLQKLCHENGALFILDEMITGFRWDAGGAQKTYDIVPDLSCFGKALGNGFSISALAGKREFMERGGIDQTDAPRVFLLSTTHGAETHAMAAAIATMKVYTHEPVVPHLVRQGNSLRAAISQIAIAHGLDSYFGIQGHSACLSYFTLDQTGKPSQAFRSLFLQETIRRGLLAPSLVVSYTHEDEDIAKTLDAIDGALVVYRKALEYGVDKFLTGRPSDVVFRRFNGNAQHQAGHGLVMADMPGLSESIRKP

SEQ ID NO: 12638 - protein, 265 aa, Cymbopogon pospischilii
CELDNIMRLTGTTGIVNGMDVSEWDPSKDKYIAVKYDVSTAMEAKALNKEALQAEVGLPVDRKVPLVAFIGRLEEQKGPDVMAAAIPQLMEEDVQIVLLGTGKKKFERMLMSAEEKYPDKVRAVVKFNAALAHHIMAGADVLAVTSRFEPCGLIQLQGMRYGTPCACASTGGLVDTIIEGKTGFHMGRLSVDCNVVEPADVKKVATTLKRAIKVVGTPAYEEMVKNCMIQDLSWKGPAKNWENVLLSLGVAGGEAGDRSGIAPLA

SEQ ID NO: 12639 - protein, 540 aa, Parachlamydia sp. UWE25
MAAKIIKFKEDARQKILKGVRTLADAVKVTLGPKGRNVVIDKSYGTPHITKDGVTVAKEIELEDKFENMGAQMVKEVASKTADKAGDGTTTATVLAEAIYSEGLRNVAAGANPLDLKRGMEKAVKVIVQELKKRSKTVDDRNEIAQVATISANNDAEIGEMIAQAIEKVGRDGTITVEEGKGFETELDVVKGMKFDRGYLSAYFMTNSESQECILEDAYVLIYEKKISAIKEIIPLLQAVVETGRPLLIIAEDVEGEALATLVVNRLRAGLKVCAVKAPGFGDRRKAMLQDIAILTGGELISEEIGLKLETTTIEQLGRVKKAVLTKDETTLVEGAGTKAAILDRASQIKRQIEESTSDYDKEKLQERLAKLVGGVAVIHVGAATEIEMKEKKDRVDDAQRATAAAVEEGILPGGGTAFIRCIPAVNSLADSLEGDEKTGAKIMARSLSAPLRQIAENAGQEGAIILQAVEKMKEKEGYNALTGEYVDMITAGILDPTKVVRCALENAVSVAAMLLTTEAIVADIPEEKPAPAAPVGMDY

SEQ ID NO: 12640 - protein, 158 aa, Triticum aestivum
  misc_feature (40)..(40): Xaa can be any naturally occurring amino acid
  misc_feature (117)..(117): Xaa can be any naturally occurring amino acid
  misc_feature (123)..(123): Xaa can be any naturally occurring amino acid
  misc_feature (130)..(130): Xaa can be any naturally occurring amino acid
  misc_feature (136)..(136): Xaa can be any naturally occurring amino acid
  unsure (1)..(158): unsure at all Xaa locations
MAPTVMASSATSVAPFQGLKSTAGLPISRRSSSAGLSSVXNGGRIRCMQVWPIEGIKKFETLSYLPPLSTEALLKQVDYLIRSKWVPCLEFSKVGFVFREHNSSPGYYDGRYWTMWXLPMFGXTDATQVXNEVEEXKKEYPDAMSAYGLTTAQVSGYA

SEQ ID NO: 12641 - protein, 345 aa, Bradyrhizobium sp. BTAi1
MLDFTSDVAGDALSPAQASGAAPADDRALLDAYSNAVIDVTERVGPAVVRVETGPKVGSRGERGGLGSGIVISPDGLVLTNSHVVGSSKTIRLRDVEGVVTDAQVLGVDPDTDLALLRANHARDLRYAALGNSKSLRRGQLVVAIGNPLGFESTVTAGVVSALGRSIRSVSGRMIEDVIQTDAALNPGNSGGALVSSAAEVIGINTAIIQGAQGICFAVASNTAQFVLSEIIRHGYVRRAYVGVSGQTAPVPRRHAVLAGVENKMGALLMQIEPDGPAARAGLLPGDVVIRLDGVDINGVDDLIRVLDRDRIGRTVAMDVLRLGRLRGIDIHPVERKPASRQPAT

SEQ ID NO: 12642 - protein, 81 aa, Gaertnera paniculata
TPQDEMRAGMNYFHETIWKGVPKFLRRVDTALKNIGINERLPYNAPLIQFSSWMGGDRDGNPRVTPEVTRDVCLLARMMAA

SEQ ID NO: 12643 - protein, 255 aa, Cymbopogon refractus
  misc_feature (243)..(243): Xaa can be any naturally occurring amino acid
  unsure (1)..(255): unsure at all Xaa locations
CELDNIMRLTGITGIVNGMDVSEWDPSKDKYIAVKYDVSTAMEAKALNKEALQAEVGLPVDSKIPLVAFIGRLEEQKGPDVMAAAIPQLMEEDVQIVLLGTGKKKFERMLMSAEEKYPDKVRAVVKFNAALAHHIMAGADVLAVTSRFEPCGLIQLQGMRYGTPCACASTGGLVDTIIEGKTGFHMGRLSVDCNVVEPADVKKVATTLKRAIKVVGTPAYEEMVKNCMIQDLSWKGPAKNWEXVLLSLGVAGGEP

SEQ ID NO: 12644 - protein, 145 aa, Brassica napus
  misc_feature (10)..(10): Xaa can be any naturally occurring amino acid
  misc_feature (24)..(25): Xaa can be any naturally occurring amino acid
  misc_feature (47)..(47): Xaa can be any naturally occurring amino acid
  misc_feature (59)..(59): Xaa can be any naturally occurring amino acid
  misc_feature (62)..(62): Xaa can be any naturally occurring amino acid
  misc_feature (64)..(64): Xaa can be any naturally occurring amino acid
  unsure (1)..(145): unsure at all Xaa locations
TLEVLSTGVXGNYNGALQVMTAEXXVPSPLVPTRENYFVRYCKQHSXNTWAVVDVSLDXLRXSXITRNRRRPSGCLIQELQNGYSKVTWVEHTEVDDRSVHTMYKPLVNTGLAFGAKRWVATLDRQCERLASSMASNIPAGDLSV

SEQ ID NO: 12645 - protein, 353 aa, Cymbidium hybrid
METERKGPVVVTGASGYVGSWLVMKLLQKGYEVRAAVRDSTNFEKVKPLLDLPGSNELLSIWKADLNDIDETFDEVTRGSVGLFHVATPMNFQSEDPENEVIKPTISGLLGILRSCKRVGTVKRVIFTSSAGTVNVEEHQATVYDESSWSDLDFVTRVKMTGWMYFVSKTLAEKAAWEFVSDNDIHFITIIPTLVVGSFLISRMPPSLITALSLITGNEAHYSILRQAQFVHLDDLCDAHIFLFEHHKANGRYICSSHDSTIYSLAKMLKNRYATYDIPLKFKEIDPNIESVSFSSKKLLDLGFKYKYKYTMEEMFDDAIKTCRDKNLIPLHTEEMVSANEKFDEVKEQIAVK

SEQ ID NO: 12646 - protein, 255 aa, Cymbopogon schoenanthus
CELDNIMRLTGITGIVNGMDVSEWDPSKDKYIAVKYDVSTAMEAKALNKEALQAEVGLPVDSKIPLVAFIGRLEEQKGPDVMAAAIPQLMEEDVQIVLLGTGKKKFERMLMSAEEKYPDKVRAVVKFNAALAHHIMAGADVLAVTSRFEPCGLIQLQGMRYGTPCACTSTGGLVDTVIEGKTGFHMGRLSVDCNVVEPADVKKVATTLKRAIKVVGTPAYEEMVKNCMIQDLSWKGPAKNWENVLLSLGVAGGEP

SEQ ID NO: 12647 - protein, 255 aa, Danthoniopsis dinteri
  misc_feature (248)..(248): Xaa can be any naturally occurring amino acid
  unsure (1)..(255): unsure at all Xaa locations
CELDNIMRLTGITGIVNGMDVSEWDPSKDKYITVKYDAATAVEAKALNKEALQAEVGLPVDRKIPLVAFIGRLEEQKGPDVMAAAIPELMEEDVQIILLGTGKKKFERLLMSAEEKYPDKVRAVVKFNAPLAHHIMAGADLLAVTSRFEPCGLIQLQGMRYGTPCACASTGGLVDTVIEGKTGFHMGRLSVDCEVVEPADVKKVATTVKRAIKVVGTPAYEEMVKNCMMQDLSWKGPAKNWENVLLSXGAAGSEP

SEQ ID NO: 12648 - protein, 346 aa, Legionella pneumophila str. Paris
MNTAPKQYGFYMPAEWYPHERCWMAWPCHHETWSKIGLDKAKMAYARVAKAIAQFEPVTLLVNPGDEDSATNLCKGHNIEIISLPINDSWTRDTGATFLINNEKQLAGVDWIHNAWGGNYADCSLDNLIASHLIKCTEAQYFHAPLVMEGGSFHVDGEGTILTSKECLLNSNRNPHLSQQEIEQYLINYLGAERIIWLNMGLIGDETDGHIDEIATFIAPGKVLCLITKDKEDPNYHRLQENFEILKSSKDARGRTFEVYTVEQPPATYLNGERLTLSYINFYMANQGIVMPAFGYESFDRLAYQLFVQIFPGYQITQIDALDVFSGGGGIHCITQQQPKSYKLGE

SEQ ID NO: 12649 - protein, 630 aa, Legionella pneumophila str. Paris
MNNNTLSDDNLYNIENWGEGYFRINSKGNIEISKKPGKPGVELQTIVDAADRAGLHLPLLIRCSDILHDRVHRIYQAFTQAREDTYYAGNYQLVYPIKVNQEQSVVRELLKSPDNQIGLEAGSKPELMAVIGMLGDHQSTIVCNGYKDTSYIRTALIAQQMGHKVFIVIEKKSELDIILKESARLQIKPTLGVRIRLVSKSAGKWENTGGVKSKFGLNAKQVLELILQLKANDMLDCLQLMHCHLGSQIANIHDIRHCMQEVARYYIELRQLNAPISTIDVGGGLSVDYEGTRSNKGCSMNYSLVEYATHIMLALKHLCQEAEIPEPDLISESGRALTAHHAVLVSNITDVEIINKAPVLPEISEDDSHVIRDIYDTYQAITDSSPTEIYNYAAHSLNEAHSLFKHGVISLQEKAKVEAFYTNICMEIKDKLDEENPSEKALLMRINECMAAKIFCNISFFQSIPDAWAIGQIFPVAPISQLNRTLSMHSILQDLTCDSDGTIKQYPGSSCVTTTLMLPSYDINNPYNIGFFLVGAYQEILGNLHNLFGDTNSLDVKLSDDGQFELDDLVSGDTVTNVLNLAHFDTKKLIQSYEKQLIKSELPKEKALSYLNELRSIFSQLTYLDGNIAQ

SEQ ID NO: 12650 - protein, 255 aa, Dichanthium aristatum
  misc_feature (51)..(51): Xaa can be any naturally occurring amino acid
  misc_feature (71)..(72): Xaa can be any naturally occurring amino acid
  misc_feature (83)..(83): Xaa can be any naturally occurring amino acid
  misc_feature (199)..(199): Xaa can be any naturally occurring amino acid
  misc_feature (240)..(240): Xaa can be any naturally occurring amino acid
  misc_feature (242)..(242): Xaa can be any naturally occurring amino acid
  misc_feature (254)..(254): Xaa can be any naturally occurring amino acid
  unsure (1)..(255): unsure at all Xaa locations
CELDNIMRLTGITGIVNGMDVSEWDPSKDKYITVKYDVSTAMEAKALNKEXLQAEVGLPVDSKIPLVAFIXXLEEQKGPDVMXAAIPELMEEDVQIVLLGTGKKKFERMLMSAEEKYPDKVRAVVKFNAALAHHIMAGADLLAVTSRFEPCGLIQLQGMRYGTPCACASTGGLVDTIIEGKTGFHMGRLSVDCNVVEPXDVKKVATTLKRAIKVVGTPAYEEMVKNCMIQDLSWKGPAKXWXDVLLSLGVAGGXP

SEQ ID NO: 12651 - protein, 350 aa, Citrus unshiu
MADNHNPTSGAGSKDLSASMDGGSGAYDRLVVCFGEMLIDFVPTVGGVSLAEAPAFKKLLCAPANVAVGISRLGGSSAFVGKLGDDEFGYMLANILKENNVDTSGVRYDSTARTALAFVTLRADGEREFLFFRHPSADMLLCESELDKNLIKQGSIFHYGSISLIAEPCRSTQLAAMNLAKESGSILSYDPNLRLPLWPSEEAAREGIMSIWDQADIIKVSDDEITFLTGGDDHNDDHVVLEKLFHPNLKLLIVTEGSKGCRYYTKEFKGRVPGVKTKAVDTTGAGDSFVSGILNCLAADQNLIKDENRLREALLFANACGALTVTERGAIPALPTKEAALKLLHTVAAL

SEQ ID NO: 12652 - protein, 136 aa, Mycobacterium bovis AF2122/97
MTRPKLELSDDEWRQKLTPQEFHVLRRAGTERPFTGEYTDTTTAGIYQCRACGAELFRSTEKFESHCGWPSFFDPKSSDAVTLRPDHSLGMTRTEVLCANCDSHLGHVFAGEGYPTPTDKRYCINSISLRLVPGSV

SEQ ID NO: 12653 - protein, 497 aa, Pseudomonas saccharophila
MKNQVQLITYVDRLGGQRDGADLARLKKLLCEPGQPLADVFGGVHLLPFFHAIDGADAGFDPIDHTLVDPRLGDWSDIKALTEGLEVMGDVIVNHMSSESPQFQDFSAKGRESAYDGLFLTLDAVFPNGATERDLLTVYRPRPGPAAELCDAEERRARILWTTFTAAQIDIAVHHPQGRAYLESILQTFAANGIRMVRLDAVGYAIKKAGASCFMMPETFGFIAEFAQAARALGIEVLVEIHAYYQRQIEIASQVDWVYDFALPPLVLHAFEFKTAGALKRWIAVRPTNALTVLDTHDGIGIIDIGADASDRAAHPGLVPPEELDALVERIHAASQGQSRKPTGAAASNLDLYQVNCSFFDAMGRNETAYLLARAIQFFLPGVPQVYYVGLLAGHNDMELLARTQVGRDINRHYYDAAEIASDCERPVVRRLIELIRLRNRHPAFGGVFSVEAGGDDELHLRWQQGGDWGPLRVNFASLDHELSCSRRRRDRAFAFS

SEQ ID NO: 12654 - protein, 150 aa, Zea mays
  misc_feature (129)..(129): Xaa can be any naturally occurring amino acid
  unsure (1)..(150): unsure at all Xaa locations
MGLYGERVGAFSVVCESAEEKKRVDSQIKILVRPLYSNPPVHGARIASEILNDASLNKQWLGEVKGMADRIITMRALLKENLEKLGSKHDWSHITSQIGMFAYTGLTPEQMDKLAKEHSVYATKDGRIXVAGITSENVGRLAEAILQGQG

SEQ ID NO: 12655 - protein, 466 aa, Bradyrhizobium japonicum USDA 110
MTMLDTVQHHSQPQSGVPQNHLADEFVETLRLAVPMMLTQLGQIAMITTDLALIGRLGEDAVAAAALAHTVYFVSFTFGLGLMAAVSPLVAQAFGAGDVRRIRRALRVGLWVALLISLPMMASPLYGEHILIALGQVPQSAALAQRYLNGLAWGIAPALGFIALRGMMSAVNRPQPPLWITVAAIPVNAALVYVLIHGLFGLPELGLFGAGLATTLVNLGTFLAVLAIAAWRKPFSDYRPLAHLWRIDWPLVRQLIALGAPISSSLLLEYGLFSSAALLMGLISTTALAAHQIALQVTAVLFMVPLGIGMAATVRVGHAFGRNDPAAVRRAGLVAAVLGVALVSALTVAIILGRYELGRLFFGGSEASAATVELTATLLLVGATFFIADGLQTIMGGALRGINDTRMTLAFAAIGYWCVAFPVAWVLAFHTGLGAVGVWIGFSIGTFVYAGLLVLRFRMLARRLVG

SEQ ID NO: 12656 - protein, 175 aa, Arabidopsis thaliana
  misc_feature (106)..(106): Xaa can be any naturally occurring amino acid
  misc_feature (130)..(130): Xaa can be any naturally occurring amino acid
  misc_feature (137)..(137): Xaa can be any naturally occurring amino acid
  misc_feature (140)..(140): Xaa can be any naturally occurring amino acid
  misc_feature (142)..(142): Xaa can be any naturally occurring amino acid
  misc_feature (145)..(145): Xaa can be any naturally occurring amino acid
  misc_feature (148)..(148): Xaa can be any naturally occurring amino acid
  unsure (1)..(175): unsure at all Xaa locations
MSKRKTKEPKVETVTLGPSVREGEQVFGVVHIFASFNDTFIHVTDLSGRETLVRITGGMKVKADRDESSPYAAMLAAQDVAQRCKELGITAMHVKLRATGGNKTKXPGPGCSSLLLEALSRSGMKIGRIXDVTPIPXGSXGXKGXPRXRRLFHGIVNLAWDFLARSFPIFPFGGF

SEQ ID NO: 12657 - protein, 322 aa, Yarrowia lipolytica CLIB122
MTDAIVHSPETPLWPRIRHQLREPFAEFWGCLILILLGDGVVAQVTLSGGKNGDYQSISWGWGLGVMFGVYAAGGISGGHLNPAVTLCSCIYRGFPWRKFPIYLVAQLLGCMTGAALVYGNHRSAIDVFEGGKGIRTVGLPTSTAGIFCTYPAEFMSTTGQFFSEVIASAVLQFAIFAINDQKNLAAGPLAPLILFFLIFAIGACLGWETGYAINLARDFGPRLVTAMIGYGSKVWTTGNYYFWVPIIAPFIGAALGGFFYDLFLYTGDESPLNWPYMGFDRIFYLLGKKEAPRIEHDMGMVEEAPSKEEIAHFSNSPNVSS

SEQ ID NO: 12658 - protein, 164 aa, Brassica napus
  misc_feature (149)..(149): Xaa can be any naturally occurring amino acid
  unsure (1)..(164): unsure at all Xaa locations
MDSSQYDGVYQPLLYPPADGTVPLSPSTESSNGELERVLSDVETPFFHRLREATMIESKLLFKLAAPAVIVYMIGNLELAAASLGNTGIQISAYGLMLGMGSAVETLCGQAFGGRKYEMLGIYLQRSTVLLTLTGLLLTLIYVFSKPIXLLFLGESPEIASAAS

SEQ ID NO: 12659 - protein, 364 aa, Yarrowia lipolytica CLIB122
MVLSKYLDLPQHGAVLAEYIWIDAHFNIRSKCKTLDKKPTSIEDLPEWNFDGSSTDQAPGHDSDIYLRPAAIYPDPFRRGDNIIVLAECWNNDGTPNKFNHRHECAKLMSAHEKEVIWFGIEQEYTMFDESDNPVGWPKGGFPAPQGPYYCGVGTGKVFARDVVEAHYRACLYSGINISGINAEVMPSQWEYQVGPCEGISMADELWMSRYLLHRVAEEFGIKISFHPKPLQGDWNGAGCHTNVSTKSMREPGGMKHIEAAIEKLAARHKEHIAVYGEDNDMRLTGRHETGSIGSFSSGVANRGCSIRIPRSVAKEGYGYFEDRRPASNIDPYLVTGIMTETICGSIPDADMVEETKRGEEEGF

SEQ ID NO: 12660 - protein, 580 aa, ASPERGILLUS NIDULANS FGSC A4
MHAIYGSLALLLGLAVSSRASTVRHDHSFQPDHILRVTADIYNEACSERYSVLVNGSSPGPELRLREGEVSWIRVYNDMTDANTTIHWHGLTAFTAPFSDGSPAASQWPIPPGHFFDYEVKPEPGSAGSYFYHSHVDFQSVTAKGPLIVDSSEPAPYHYDEERTVMISDYFSEPDDEIVDGLVSTNFTWSGETEAILVNGQSRPATNATGACKLAAISVEAGKTYRLRFIGATALSFVSLAIESHHMHIIEADGHYTKPLETDFLQIGSGQRYSVLLTAKGEDELKALDRRQFYLQITTLERPAVLTSFAVLDYTSDAAPDLTTVPSPPPLPVATTVQGWLDYELEPAHPNEDFPTLDEVTRRIVIDVHQNVSDRTIWLQNGYDWVESFPKSPYLVDIYQDRLDLDASYHRALTRGNGFDNITRTFPARVGEVLEIVWQNRGTVENGGVDAHPFHAHGRHFYDIGGGDGLYNATANEIRLRGTHPIQRDTSVLYRYRSKTSQLVPSGWRAWRIRVTNPGVWMYHCHVLQHMIMGMQTVFTFGDREDILAKTGQVDDGYLTYGGSAYGNGTWDPMVQDFDV

SEQ ID NO: 12661 - protein, 601 aa, Arabidopsis thaliana
MGLCTSKPNSSNSDQTPARNSPLPASESVKPSSSSVNGEDQCVTTTNNEGKKSPFFPFYSPSPAHYFFSKKTPARSPATNSTNSTPKRFFKRPFPPPSPAKHIRAVLARRHGSVKPNSSAIPEGSEAEGGGVGLDKSFGFSKSFASKYELGDEVGRGHFGYTCAAKFKKGDNKGQQVAVKVIPKAKMTTAIAIEDVRREVKILRALSGHNNLPHFYDAYEDHDNVYIVMELCEGGELLDRILSRGGKYTEEDAKTVMIQILNVVAFCHLQGVVHRDLKPENFLFTSKEDTSQLKAIDFGLSDYVRPDERLNDIVGSAYYVAPEVLHRSYSTEADIWSVGVIVYILLCGSRPFWARTESGIFRAVLKADPSFDDPPWPLLSSEARDFVKRLLNKDPRKRLTAAQALSHPWIKDSNDAKVPMDILVFKLMRAYLRSSSLRKAALRALSKTLTVDELFYLREQFALLEPSKNGTISLENIKSALMKMATDAMKDSRIPEFLGQLSALQYRRMDFEEFCAAALSVHQLEALDRWEQHARCAYELFEKEGNRPIMIDELASELGLGPSVPVHAVLHDWLRHTDGKLSFLGFVKLQHGVSSRTIKAH

SEQ ID NO: 12662 - protein, 476 aa, Triticum aestivum
ESRRGGGGPAAAAAAAGDPRGPMPGFGAPQHTIPTNVNVMQPSRVADLGALAHSAGFRIEDLANFSTNNLFNLKPNTHAYTSDPLQFGNYGKSISPTDLATTAAAAAAVTAVDPQALLQQKGVQPNLVALRTHNNDNWGESSMADTSPRTDTSTDPDIDIDERNQMFEQGQLAAPTASDSSDKSRDKLDHKSLRRLAQNREAARKSRLRKKAYIQNLESSRLKLTQLEQELQRARQQGIFISSSGDQSQSASGNGAVAFDMEYARWLEEHNKHINELRAAANAHAGDDDLRKIVDSIMSQYDEFFRLKGVAAKADVFHVLSGMWKTPAERCFMWLGGFRSSELLKLLAGQLEPLTEQQLTGICNLQQSSQQAEDALSQGMEALQQSLAETLASGSLGPAGSSGNVASYMGQMAMAMGKLGTLENFLRQADNLRLQTLQQMQRILTTRQSARALLAISDYFSRLRALSSLWLARPRE

SEQ ID NO: 12663 - protein, 585 aa, Actinoplanes missouriensis
MELTSEHDPVEGSHTEDGVVEHPTSDDFGHARALPADRTWFQRAVFYEVLVRAFYDSGSDGGGDLRGLIERLDYLQWLGVDCLWLPPFYDSPLRDGGYDIRDFYKVLPEFGTVEDFVALLDAAHKRGIRVITDLVMNHTSDSHPWFQASRHDPDGPYGDFYVWNDNSDKYKDARIIFVDTEESNWTFDPVRRQFYWHRFFSHQPDLNYENPKVQEAMMDALRFWLDLGIDGFRLDAVPYLFEEEGTNCENLPATHAFLKHCRKVIDDEFPGRVLLAEANQWPADVVEYFGDPRSGGDECHMAFHFPLMPRIFMAVRRESRFPISETLANTPAIPDNCQWGIFLRNHGELTLEMVTDEERDYMYSEYAKDPRMKANVGIRRRLAPLLENDRNQIELFTAMLLSLPGSPVLYYGDEIGMGDNIWLGDRDGVRTPMQWTPDRNAGFSTATPGRLYLPVNQDPVYGYQAVNVEAQRDSATSLLNVDPDHAAVRRRHEAFAVGTFRELGGSNPSVLAYLREYGDDVVLCVNNLSRFPQPIELNLQHWNGYTPVELTGHVNFPRIGQLPYLLTLPGHGFYWFQLCGSEEKQ

SEQ ID NO: 12664 - protein, 351 aa, Bacteroides fragilis NCTC 9343
MLLDKIQNLIIQSDISIFQSMKKMDEEKVKLLFVFRGDCFVGILTIGDIQRAIIKQNDTSMQINNILDQNKVFAYKGESLEIIKNKMIHLRAECMPILDSKGELVDVLFWKDLFIDEVRVDDRKIDLPVVIMAGGKGTRLKPLTNVIPKPLIPIGDKTILEAILDQFESIGCSKFYMSVNYKYDILKFYLAQLDHKYDIRFFKEDKPLGTIGSVSLLKDKISTPFFVSNCDIIIDQDYRDVYDYHINNSNDLTIVTAVKRTRIPYGVIETIENGLMTELIEKPEFTYMINSGVYILQPELINEIPENELFHITHLMEKVKSRGGKIGCFPVSEKSWTDIGEWNEYLKLLGI

SEQ ID NO: 12665 - protein, 441 aa, Deinococcus radiodurans R1
MNRNLSILALTGTLALGGLLGYQAKERGALDSQPTATVQQTTAQNAASQTAVEQGTLVQTRAGTPATSYDAGRARTESEANTVQVVKERQDGLVYISVTEADTGSAEAQMRQKLQDQFGFALPEDQGGGAPATGTGSGFFVNAQGDIVTNNHVVDGASDITIRLHGGKQTYKAKVIARAPDYDLALIRAEGVPRASIKPLPLGDSDKLDVGLKAIAMGAPFNLDFSVSEGIISSLERQVPVGSREVSQPVIQTDAAINPGNSGGPLLSSAGQVIGVNTQILTGGAGQSAGVGFAIPINTVKRLLPQLQAGKGGVVSPPSLGVVFSDLSSLPPQQLKAAGLPSSGALLQKVYPGSPAAAAGLRGGNNGKLSLPSAQGTSSISTDGDLITAVNGQPLEDAGSLQEAVLATGEGQPLRLTVRRGGKTREVEVTLQAFRFPQDQQ

SEQ ID NO: 12666 - protein, 227 aa, Sinorhizobium meliloti
MPQERVDETGLPMDIQGFPEHLLTGYRNFMSGRFNEQQQRYKTLAESGQKPKTMVIACCDSRAAPETIFDSGPGELFVVRNVANMMPPYEPDGHYHSTSAALEFAVQSLRVTNIVVMGHGRCGGIKAALDPDAEPLSPGDFIGRWMNLLKPAAEQIQSNDVMTQAERQRALERVSIRNSIANLRTFPCVNILESKGKLRLHGAWFDISTGELWVMDAKTGDFSRPGM

SEQ ID NO: 12667 - protein, 347 aa, Mycosphaerella fijiensis
IQTISGEHGLDGAGVYNGTSDLQLERMNVYFNEASGNKYVPRAVLVDLEPGTMDAVRAGPFGQLFRPDNFVFGQSGAGNNWAKGHYTEGAELVDQVLDVVRREAEGCDCLQGFQITHSLGGGTGAGMGTLLISKIREEFPDRMMATFSVMPSPKVSDTVVEPYNATLSVHQLVENSDATFCIDNEALYDICMRTLKLNNPSYGDLNHLVSAVMSGVTTCLRFPGQLNSDLRKLAVSMVPFPRLHFFMVGFAPLTSRGAYSFRAVTVPELTQQIFDPKNMMAASDFRNGRYLTCSAIYRGKVSMKEVEDQIRNVQNKNTAYFVEWIPSNVQTALCSIPPRGLKMSSKS

SEQ ID NO: 12668 - protein, 383 aa, uncultured bacterium pCosFS1
  misc_feature (15)..(15): Xaa can be any naturally occurring amino acid
  unsure (1)..(383): unsure at all Xaa locations
MSWQQRIEQALEERXQSAAYRHRLVIKGGNGRYLQLNDQRYLNFSGNDYLGLSQNAQVIAAWQQGAQQYGVGSGGSGHVTGFCTAHQALEQQLAQWLGYPRSLLFISGYAANQALLAALMQGEDRILADRLSHASLLEAAAHSPAQLRRFRHNQPQALADLLAKPCSGQTLAVTEGVFSMDGDSAPLAELYRLTRDAGAWLMVDDAHGIGVQGEQGRGSCWQQGVRPELLVVTFGKAFGLSGAAVLCDESTAEYLLQFARHLIYSTAMPPAQACALQAALHCIQQGDELRTRLNTNIQRFRQGAAQLSLTLTESLTAIQPLLVGDNQRALDLAQHLRGQGLWVSAIRPPTVPPGGARLRITLTAAHQPQDIDRLLEVLHDVSV

SEQ ID NO: 12669 - protein, 327 aa, Caulobacter crescentus CB15
MQTVLVTGGAGYVGSHCCLALAEAGFRPVVFDDLSNGHREHVQWGPLEVGDIRDAARLDAVFAAYAPVAVLHFAARIEVGESVKNPGAFFDTNVGGTITLIEAARRAGVKVVVFSSTCATFGDPVDLPMKETHPQAPLNPYGRSKLMVEQALADYDRYVGLKSAVMRYFNAAGADPQGRIGEWHEPETHAVPLAIQVALGQRPRFTIFGDDYDTRDGTAVRDYVHVLDLADAHVAALKRLLVGGSSETYNLGTGTGTTVRELVDGVGKVAGAPLPVEIASRRPGDAPVLVGDHAKARAELGWKASRSLDEILSTAWRWHRGRLEQEP

SEQ ID NO: 12670 - protein, 392 aa, uncultured bacterium pCosFS1
MSVTDSDLEFDQRHIWHPYTSMSHPLPCYPVEAASGVELQLADGRRLIDGMSSWWAAIHGYNHPQLNLAATQQLEKMSHVMFGGITHPAANELCRKVVAMTPEALQCVFLADSGSVAVEVSLKMALQYWQARGERRQRILTLRHGYHGDTFGAMSVCDPDNSMHSLYQGYLAPHLFATAPQCGFDQAWDENDIAPFAALLEQHAGEVAAVILEPVVQGAGGMRIYHPTYLERVRELCDRYQVLLIADEIATGFGRTGKLFACEHAEVVPDILCLGKALTGGYMTLSATLTTRHVAETISNGAAGCFMHGPTFMGNPLACAVANASLSLLAENRWQQQVAAIETQLKQQLLPLKMQPKVADVRVLGAIGVVEMREPVDMAQLQRGFVERGVWI

SEQ ID NO: 12671 - protein, 255 aa, Heteropogon contortus
CELDNIMRLTGITGIVNGMDVSEWDPSKDKYIAVKYDVSTAMEAKALNKEALQAAVGLPVDRNVPLVAFIGRLEEQKGPDVMAAAIPLLMEEDVQIVLLGTGKKKFERMLMSAEEKYPEKVRAVVKFNAPLAHHIMAGADLLAVTSRFEPCGLVQLQGMRYGTPCACASTGGLVDTIIEGKTGFHMGRLSVDCNVVEPADVKKVATTLKRAIKVVGTPAYEEMVKNCMIQDLSWKGPAKNWENVLLSMGVAGGEP

SEQ ID NO: 12672 - protein, 448 aa, Xylella fastidiosa Temecula1
MISRFGSEVRPTLLLALPLVLGHVSTGLIGFVLNVIAGHHSTVTLAASTIGTALLWLPMLVPMGTLISLTVLVSQLHGAERERDIGPLFRQALWLAMLLGLVMFTFLSVVPALLPLFGIVPDIVPGAAKFLHVVRWGSLAFPLYFCMRYFCEGMHCTFPTMLLGFGGLLVLVPLSYALTYGRFGFAEYGVEGLGIATVTVMWLQAVVFALYLWRSRRFAHLQLFAHLELPCWARIRDLLNIGLPIGISILMEGGLFIVTTLLIGRFGTDEIAAHQIALSVAQLCFMIPMGVAEATTVRIGHAVGRCDLLVMRRVAWAGYAIVIGTQTLSASVLLLGYDVIVAAYTDDLVVASLASKLLLFAAIFQFPDGLQMLSSGVLRGMKDTRVPMLLAMISYWGLGMPLGLGLGFALEWNSRGMWIGLIIGLTAAALLLGWRFRVVSERMFAGIP

SEQ ID NO: 12673 - protein, 296 aa, Caulobacter crescentus CB15
MVGRLNGKVAVITGGCSGIGLGTVELFVAEGACVVAADLQDEKGRMLEQRFPDQVRFARCDVTADDDLAKTMALAESSFGGLDILFNNAGHGGTPASVPELTAEAWDKTFALLVRGPAMGMTHALPLMQKRGGGSIINTASIAGLQAGFGPLAYSSAKAAVIHMSRCAAAELSPQKIRVNAICPGLIATSIFGASMGLPREVADQMAAQIASIGPKIQPIPKSGLPEDIAAAALYLASDDSRFVTGTHIVVDGGITVGPRSAWDINTPSPILAAMGITPEQAEQMRAQLLAAGGTG

SEQ ID NO: 12674 - protein, 139 aa, Wolbachia endosymbiont of Drosophila melanogaster
MAIERTLSILKPDAVKNNITGNINSYIEQSGLKITAQKMMLLTKKQAELFYEIHKDRPFFGELVEFMTSGSVVVQVLVGENAVSKYRQIMGATDPKQADKGTIRGDFADDISENRVHGSDSLENARKEIAFFFAECELV

SEQ ID NO: 12675 - protein, 255 aa, Hyparrhenia hirta
  misc_feature (56)..(56): Xaa can be any naturally occurring amino acid
  misc_feature (75)..(75): Xaa can be any naturally occurring amino acid
  unsure (1)..(255): unsure at all Xaa locations
CELDNIMRLTGITGIVNGMDVSEWDPSKDKYITVKYDVSTAVEAKALNKEALQAEXGLPVDRKIPLVAFIGRLEXQKGPDIMAAAISELMEEDVQIVLLGTGKKKFERMLMSAEEKYPDKVRAVVKFNAALAHHIMAGADVLAVTSRFEPCGLIQLQGMRYGTPCACASTGGLVDTIIEGKTGFHMGRLSVDCNVVEPADVKKVATTLKRATKVVGTPACEEMVKNCMIQDLSWKGPAKNWENVLLSLGVAGGEP

SEQ ID NO: 12676 - protein, 268 aa, Haemophilus influenzae Rd KW20
MSRFETQFATLNAKNEGAFVPFVTLCDPTFDRSFEIICTLVDNGADALELGFPFSDPLLDGPVIQAANNRALTAGHSSEDSLKLLEKVRSKYPEIPISLLLCANLIFAKGLDAFYQRCAEVGVDAVLVADIPLLAKGDYVQTAKKHGIQPVFICPPNADEKTIQGVAKNSEGYTYLVSRAGVTSAENQAHAANLDTLVEKLKAHNAPPILQGFGIAQPEQVKEALSLGTAGAISGSATVKIIERNLDNHEQCLAELAEFVQTMKAATK

SEQ ID NO: 12677 - protein, 255 aa, Ischaemum santapaui
CELDNIMRLTGITGIVNGMDVSEWDPSKDKYIAVKYDESTAVEAKALNKEALQAEVGLPVDRKVPLVAFIGRLEEQKGPDVMAAAIPELMEEDVQIVLLGTGKKKFERMLMSAEEKFPDKVRAVVKFNAALAHHIMAGADLLAVTSRFEPCGLIQLQGMRYGTPCACASTGGLVDTIIEGKTGFHMGRLSVDCNVVEPADVKKVATTLKRAIKVVGTPAYQEMVKNCMIQDLSWKGPAKNWENVLLSLGVAGGEP

SEQ ID NO: 12678 - protein, 255 aa, Schizachyrium scoparium
CELDNIMRLTGVTGIVNGMDVSEWDPSKDKYIAVKYDVSTAVEAKALNKEALQAEVGLPVDRKIPLVAFIGRLEEQKGPDVMAAAIPQLMEEDVQIVLLGTGKKKFERMLMSVEEKYPEKVRAVVKFNAALAHHIMAGADVLAVTSRFEPCGLIQLQGMRYGTPCACASTGGLVDTIIEGKTGFHMGRLSVDCNVVEPADVKKVATTVKRAIKVVGTPAYEEMVKNCMIQDLSWKGPAKNWENVLLGLGVAGGEP

SEQ ID NO: 12679 - protein, 353 aa, Burkholderia sp. 383
MEQHARPPISTTQFPVDRWWVAALSSELTDKPVARTLLGHPVVLFRLPSGEVGALEDRCCHKSLPLSCGSLEARGLRCGYHGLLFDRGGACVEIPGQERIPAKACVSSYPVQEQDALVWIWIGADAHAQPTCAPPRYAFHADPQYRFGGGNYHYDAPYQLIHDNLMDLSHLGYVHLKTIGGNAPLHMGAETRVSSDGDTVTLVRRMPDSTPPPTYTAAWPFAGSVDRWQEIEFHVSHIRIWTGAMDAGAGDLHDPARGGFHMRGFHGITPETATTTHYFWTVATNPQHDVERVAQTVIEQSAATFDEDKTVIEAQYRNQLRFPDSRQIDIHVDAGPNRARRVIERLLRQPEPA

SEQ ID NO: 12680 - protein, 212 aa, Paxillus involutus
MVLKLHGFPMSTCTRLVALICKEKDIPYELIVVDLTKGEHKKPDHTEKQPFGQIPYIDDNGFILYESRAIARYLIKNYPEKGTQGLIPSDPKAEALFEQAASIEVSNFNAFAAAVAVEKVFKPRRNLQADEAKVAENIATLKAKLDVYEVILGKQDYLAGDNVTLADLQHLPYGSLLFPAGYGDVFTSRKNVARWWQAISSRDAWNAVKGGA

SEQ ID NO: 12681 - protein, 255 aa, Sorghastrum nutans
  misc_feature (51)..(51): Xaa can be any naturally occurring amino acid
  misc_feature (254)..(254): Xaa can be any naturally occurring amino acid
  unsure (1)..(255): unsure at all Xaa locations
CELDNIMRLTGITGIVNGMDVSEWDPSKDKYIAVKYDVSTAVEAKALNKEXLQAEVGLPVDRKIPLVAFIGRLEEQKGPDVMAAAIPELMEEDVQIVLLGTGKKKFERMLMSAEEKYPDKVRAVVKFNAALAHHIMAGADLLAVTSRFEPCGLIQLQGVRYGTPCACASTGGLVDTIIEGKTGFHMGRLSVDCNVVEPADVKKVATTVKRAIKVVGTPAYEEMAKNCMIQDLSWKGPAKNWENVLLSLGVAGGXP

SEQ ID NO: 12682 - protein, 373 aa, Burkholderia sp. 383
MPRTGGIDLKETTNVFLKNAWYVAGTPDEIDGKPLGRKICNESMVFYRAADGQVAALEDFCPHRGAPLSLGFVRDGVLVCGYHGLEMGCNGKAAGMPGQRVGGFPPIRSFPAVERYGFIWVWPGDASAADPAKLPVLAWAEDPAWAHGGGLYHIRCDYRLMIDNLMDLTHETYVHATSIGQKEIDEAPPKTASHGDEVVTSRFMENVMPPPFWQMGLRGNGLADDVPVDRWQICRFTPPSHVMIEVGVAHAGHGGYDAPADLKASSIVVDFITPETDTSIWYFWGMARNFRPDDHALTAEIREGQGRIFAEDLEMLERQQLNLEKWPDRKLLKLNIDAGGVLSRKVIERLLADENASSSQRPVIPVAQIKEAS

SEQ ID NO: 12683 - protein, 225 aa, Thermus thermophilus
MSWWQRAVIYQVYPRSFQDTNGDGVGDLEGIRRRLPYLKSLGVDALWLSPFYKSPMKDFGYDVADYCDVDPVFGTLQDFDRLLEEAHALGLKVLVDLVPNHTSSEHPWFLESRASRNSPKRDWYIWKDPAPDGGPPNNWQSFFGGPAWTLDEATGQYYLHLFLPEQPDLNWRNPEVREAIKEVMRFWLRRGVDGFRVDVLWLLGKDPLFRDEPGSPLWRPGLPDR

SEQ ID NO: 12684 - protein, 234 aa, Thermus thermophilus
MRAENPVFFLDYDGTLAPIAQRPEEAFPHPEAPRVLRALMERHPVYVVTGRRVRGLEPLLPLPGLPVVGGHGLEEGVLFGEVRPLFPVDLGPLRARLPSCPGVRVEDKGFALALHYRGAEDEEKARACLEAWLKAVEGLLEALGLEALPGKKVLELKPKGVDKGQAVLRLLGRHPDHTPVYIGDDTTDEAAFLALRGRGLTFKVGEGPTAAQGRLKDVEEVLAYLQTYLRPTSL

SEQ ID NO: 12685 - protein, 393 aa, Arabidopsis thaliana
MSCFKSKFAGKSYFRRTFHSSIVQFHPQLSILIWHRRYSIIRTYELIANAAYIGTPGKGILAADESTGTIGKRFVSINVENVESNRRALRELLFTTPGALQYISGIILFEETLYQKTASGKLFVDVMKEAGVLPGIKVDKGTVELAGTNGETTTIGLDGLGDRCKKYYEAGARFAKWRAVLKIGNNEPSELAIHENAYGLARYAVICQENRLVPIVEPEILVDGSHDIEKCAYVTERVLAACYKALSDHHVILEGTLLKPNMVTPGSDSGSKVKPEVIAKHTVRALQRTVPAAVPAVVFLSGGQSEEEATVNLNAINQLKGKKPWSLTFSYGRALQQSTLKAWGGKEENVDKAQKAFLARAKANSEATLGGYKGDAQLGEGASESLHVKDYKY

SEQ ID NO: 12686 - protein, 105 aa, Candida albicans SC5314
MNQQNARDIELREQDRWLPIANVARIMKNTLPPTAKVSKDAKECMQECVSEFISFITSEASDKCLKEKRKTINGEDILYSMYDLGFENYAEVLKIYLAKYREARK

SEQ ID NO: 12687 - protein, 235 aa, Oryza sativa
MEVEVVEGTTMVGWVVSGVAFWWTAFLLARGAFPKRSYDFCNRAVSAAHAAAAVSLACLSVADWSRPLSPLAAASSPPQMKALAVTLSYMVYDAACCYLNDDVRVDNTVHHLVSIVGIAAGLAYRRCGTEMVASLFVTEISSPLLHLREILKEFGIKDTDLNLLVDILFAVIFSVARMGFGPYLTYVTVTADNPILIKAMATGLQLVSAYWFLRILRMVRHKLGKKRPAPKVAGD

SEQ ID NO: 12688 - protein, 643 aa, Chromobacterium violaceum ATCC 12472
MAASPENQKDVKDSQQEVMSLEEQRKRLRQLIALGKERGYLTYAEINDHLPEDVSDAEQIENIVTMIAGLGIQVCEEAPDAETLLMSDATPSVADEDAVEEAEAALSSVDSEFGRTTDPVRMYMREMGSVELLTREGEIEIAKRIEDGLKYMIQAISACPGTIAEVLELMERVARDEIRVDEVVDGFIDLNAPTEDEAQFAEPEDSDDLLDEEEEEEEDEDGAPVDADADAAANLEELKQQALEHFAGVRMLFDKMVKALNAKGQQSKEYLELQDAITTEFMLVRFATRQVESLCESLRGRVNEIRTYERDIQDICVSRVRMDRAHFIKVFPGNETNLDWVENEIDSGKAWSEALTRFKHAIIEKQTRLSDLQDKAMLSIKALKEINRQMSAGESKARRAKKEMIEANLRLVISIAKKYTNRGLQFLDLIQEGNIGLMKAVDKFEYRRGYKFSTYATWWIRQAITRSIADQARTIRIPVHMIETINKMNRISRQILQESGREPDPAELAEKMEMPEEKIRKIMKISKEPISMETPIGDDDDSHLGDFIEDQNNLAPSDAAMYSSLKDATKEVLDTLTPREAKVLRMRFGIDMNTDHTLEEVGKQFDVTRERIRQIEAKALRKLRHPTRSERLRSFLDSEPGGQ

SEQ ID NO: 12689 - protein, 152 aa, Zea mays
MSLVRRSNVFDPFSMDLWDPFDTMFRSIVPSATSTNSETAAFASARIDWKETPEAHVFKADLPGVKKEEVKVEVEDGNMLVISGQRSREKEDKDDKWHRVERSSGQFVRRFRLPENTKVDQVKAGLENGVLTVTVPKAEEKKPEVKAIEISG

SEQ ID NO: 12690 - protein, 210 aa, Thermus thermophilus
MSWWQRAVIYQVYPRSFQDTNGDGVGDLEGIRRRLPYLKSLGVDALWLSPFHKSPMKDFGYDVADYCDVDPVFGTLQDFDRLLEEAHALGLKVLVDLVPNHTSSEHPWFLESRASRNSPKRDWYIWKDPAPDGGPPNNWQSFFGGPAWTLDEATGQYYLHLFLPEQPDLNWRNPEVREAIKEVMRFWLRRGVDGFRVDVLWLLGKDPLFR

SEQ ID NO: 12691 - protein, 315 aa, Triticum aestivum
  misc_feature (57)..(57): Xaa can be any naturally occurring amino acid
  misc_feature (236)..(236): Xaa can be any naturally occurring amino acid
  misc_feature (265)..(265): Xaa can be any naturally occurring amino acid
  misc_feature (274)..(275): Xaa can be any naturally occurring amino acid
  misc_feature (280)..(280): Xaa can be any naturally occurring amino acid
  misc_feature (282)..(283): Xaa can be any naturally occurring amino acid
  misc_feature (289)..(289): Xaa can be any naturally occurring amino acid
  misc_feature (293)..(293): Xaa can be any naturally occurring amino acid
  misc_feature (295)..(295): Xaa can be any naturally occurring amino acid
  misc_feature (297)..(297): Xaa can be any naturally occurring amino acid
  misc_feature (302)..(302): Xaa can be any naturally occurring amino acid
  misc_feature (304)..(304): Xaa can be any naturally occurring amino acid
  unsure (1)..(315): unsure at all Xaa locations
MTMGCVDHDHGNVESHDVPEAKPSEIYTYEAGWHIYGMNCSERGDKKYRLAIASFLXQLVNRVEVVHLDESTGDIAPVLSFHHPFPPPKSMFFPYPQSLRPDLLVTSADLLRIWCIKDVHAAVPVAADSKNGSVSCNGVCSPAGHHPSVKLCCEINVNRNSDFCVTLTSFDWHEAYPRRIGTSSIDTTCTIWDVEREVVDTQLIAHDKEVYDIAWGGAGVFASVSADGSVRVFDLXRDKEHSTIIYESILGGGPILAATDGGLCXRHIWLSWGXXKQDPXYXXTSSMVXKVAXLXRXPTLLXLXQRHQAPGMPMG

SEQ ID NO: 12692 - protein, 234 aa, Thermus thermophilus
MRAENPVFLLDYDGTLAPIAQRPEEAFPHPEAPRVLRALMERHPVYVVTGRRVRDLEPLLPLPGLPVVGGHSLEEGVLFGEVRPLFPVDLGPLRARLPSCPGVRVEDKGFALALHYRGAEDEEKARACLEAWLKAVEGLLEALGLEALPGKKVLELKPKGVDKGQAVLRLLGRHPDHTPVYIGDDTTDEAAFLALRGRGLTFKVGEGPTAAQGRLKDVEEVLAYLQTYLRPTSL

SEQ ID NO: 12693 - protein, 177 aa, Cicer arietinum
LDIAVRLLEPLKEQFPIISYADFYQLGGVVAVEVTGGPEVPFHPGREDKPEPPPEGRLPDATKGSDHLRDVFGKAMGLSDQDIVALSGGHTIGAAHKERSGFEGPWTSNPLIFDNSYFTELLNGEKEGLLKLPSDKALLSDPVFRPLVEKYAADEDAFFADYAEAHLKLSELGFAEA

SEQ ID NO: 12694 - protein, 1125 aa, Yarrowia lipolytica CLIB122
MCFNLPLPHLPPYLPFITSSFFFFSFFPFSLTNTDAPIEFETTIIDPAEQTSHHVSESRPTHLSFSSSSESPRDQSREQSSRDVSASPVFPKRQQSLLRLDEHMAGGAGESRDEPHGEPSDDAHKSRASSTSSSSSFGQSWNQSSASQRASVSSMGGVDVAQKRPGPSSGGLTGASAASGMPPAPTSQAPAIPPITPQMQTGAFEQYTPQTAPPIPTQSQLGQDGRKRAATLDRQQQYVPSYGYSSPANGERGGPTGGTPGGTPMSPGGVAHVTSPGGGPSAASVHRSFSTTTPHAPTKNSRRIVSTSAAPMRKQIDDANAALGRAVDPSRDSQPMQSRDKRSKSISSRGGMKGVFSNLVSSMGTLSRKNTTVRRSESDTSAPSTPKISGPYDAKHVTHVGFNFDTGEFTGLPKPWQKLLSESGISKVEAEQHPQAVMDIMAFYTDQKDDGVWQKFGGANQAGSGATATTPYNAQNGFSPIASPGATTPTLGALNLGTPLSVDLDTEGDTSTSTGGGGGVGGGDYFAKPRSAPFPPAAGGGSASSSTATLGTGATASGGATTATPAIPSRDRTRESSLSSGTSNQGPPVTPLALSQSRQNLREEAPATPEEKPLAHFVASRKAPRPPSASPKKTGGAGASGDSGAGAAPPSAAPKSPPPRPPPAPPLGVPSVHAPNSEYRQKMITQLEAFNAKRQQERAERHAQKQKLAAAHAQAVQRQQRQQQQQQQQQQQQQSAQQGAMPSVMPQMQHGSMQQAQQSVSGGSSGLTPQQKQLIQQKQLLELQKATGGQVGGPVTSSTQQVLSNPAAAAAASQRKREQRLRKDQQVVARLNQICTPGDPTKLYRNLVKIGQGASGGVFTAYEVGSNLSVAIKQMNLEHQPKKELIINEILVMKDSKHKNIVNFIDSYLHGGDLWVVMEYMEGGSLTDVVTYNMMTESQIGAVCRETLLGLQHLHSKGVIHRDIKSDNVLLSMRGEIKLTDFGFCAQINESNLKRTTMVGTPYWMAPEVVSRKEYGSKVDIWSLGIMSIEMIEGEPPYLNESPLRALYLIATNGTPQLKEPDALSTIFKAFLAWALQVSADQRASASELLKHEFLLTADDVSTLAPLVKAARMAKIQEKNEKAQR

SEQ ID NO: 12695 - protein, 218 aa, Bradyrhizobium japonicum USDA 110
MLFMRKTTALPSATEALPGRAQAIPTASTHFVNGSKLQPPYPAGLEQAVFGLGCFWGAERKFWELGDGVYTTAVGYAGGHTPNPTYEETCSGRTGHTEVVLVVFDPKKVSYEKLLKTFWESHNPTQGMRQGNDVGTQYRSAIYTYSDAQKKAADESKALYQKALAAKGLGAITTEIAPAGAFYFAEDYHQQYLAKNPAGYCGLGGTGVSCPIGVGVSA

SEQ ID NO: 12696 - protein, 430 aa, Glycine max
LLSSLTRILSSLLASVVQQLHHATSLGASARTDKKHAHRHNLSECASDLSESCSTPRGNNSSNTLLYTHVIAFTLYELETITKSFRADYILGEGGFGTVYKGYIDENVRVGLKSLPVAVKVLNKEGLQGHREWLTEVNFLGQLRHPNLVKLIGYCCEDDHRLLVYEFMFRGSLENHLFRKATVPLSWATRMMIALGAAKGLAFLHNAERPVIYRDFKTSNILLDSDYTAKLSDFGLAKAGPQGDETHVSTRVMGTYGYAAPEYVMTGHLTARSDVYSFGVVLLELLTGRKSVDKTRPGKEQSLVDWARPKLNDKRKLLQIIDPRLENQYSVRAAQKACSLAYYCLSQNPKARPLMSDVVETLEPLQSSSVGPGEVSLSGSNSGSAGPFAMNKISDCRMRHKFSNNVGPGATCRSPNPNCSPGGPATLRVR

SEQ ID NO: 12697 - protein, 377 aa, Sulfolobus solfataricus P2
MSVVSKGLENVIIKVTNLTFIDGEKGILRYRGYNIEDLVNYGSYEETIYLMLYGKLPTKKELNDLKAKLNEEYEVPQEVLDTIYLMPKEADAIGLLEVGTAALASIDKNFKWKENDKEKAISIIAKMATLVANVYRRKEGNKPRIPEPSDSFAKSFLLASFAREPTTDEINAMDKALILYTDHEVPASTTAALVAASTLSDMYSSLTAALAALKGPLHGGAAEEAFKQFIEIGDPNRVQNWFNDKVVNQKNRLMGFGHRVYKTYDPRAKIFKKLALTLIERNADARRYFEIAQKLEELGIKQFSSKGIYPNTDFYSGIVFYALGFPVYMFTALFALSRTLGWLAHIIEYVEEQHRLIRPRALYVGPEYQEYVSIDKR

SEQ ID NO: 12698 - protein, 423 aa, Yarrowia lipolytica CLIB122
MSPTAEQIAWLFVSQYFKRLHSDPSELHHFYDVDAKLLHGKEQDDTAAISGTESIQERISQLHTKGCKTLISCLDAMEGPNKSILIQIIGQMSSTDDGVPQKFVQSVVLESKSGTNYSIYSDVFRFLKDDDEEVAKEDVKEEPKEDVKEEPKKEVEAKKEPKKEEPKKEETKKEEPKKEEALKKEEPKKDEPKKEAPVAAPVATPATPVAASSSSAASAAPETKEEPKKETAAAAPPAAATSAPAEPTKPSGPISWAARARSSDKPAPAGSATPAETPSPVAAAAVAKKEPSSSPTVAAATTSSASSAAGNRKGTFHSAYIKGVDGNTDLAVVEAALKKIGNGISHFEVTKSRNSVFVDFNDAQTLRKALELRELKVGDLTIIIDERKRRKPGSGSGTSNGGGSGSGSSGNRDSNKRQGTKRR

SEQ ID NO: 12699 - protein, 411 aa, Bacillus halodurans C-125
MNRRVVVTGIGAVTPLGNTAEETWEKAIAGQSGVGLLTRVEAADFPMKVAAEVKEFDPTTHIDRKEARKMDRFTQFAVASALMALKDADLEITEDIAPRVGVWIGSGIGGMETYENQFRMFIEKGYRRVSPFFVPMMIPDMASGQVSIITGARGINSCSVTACASGANSIGDAFKVIQRGDADVMITGGAEAPITNMAVAGFSMAKAISTSEDPNTASRPFDANRDGFVMGEGSGILILESLESAEKRGAKIYAEIVGYGATGDAYHVTQPAPEGEGAARAMKQAIEDAGLTPEDIQYMNAHGTSTYYNDKYETLAAKQVFGDHVNNLAISSTKSMTGHLLGAAGAVEAIFSVKAIEEGIIPPTINYETPDPDCDLDYVPNEARKQGVNAVLSNSLGFGGHNATLVFKKYQ

SEQ ID NO: 12700 - protein, 449 aa, Emericella nidulans
MREIVHLQTGQCGNQVGSAFWQTISGEHGLDASGIYTGDSDLQLERMNVYFNEAGGNKYVPRAVLIDLEPGTMDALRSGPNGALYRPDNFIYGQSSAGNNCAKGHYTEGAELVDQVIDVVRREAESCDCLQAFQVTHSLGGGTGSGMGTLLISKIREEFPDRMMATFSVMPSPKVSDTVVEPYNATLSVHQLVEHSDETFCLDNDALYDICIRTLKLSSPSYGDLNHLVSAVMSGITVSLRFPGQLNSDLRKLAVNMVPFPRLHFFMVGFAPLTSRSSSSFRTISVPELTQQMFDSRNMMTAANYQNGRFLTCSTLFRGKVAMKEVEDQMRNMQNKYSSYFVEWIPNNVQTALCSMPPKGLKMAATFVGNSTSVQELFNRVSNQFTAMFRRKAFLHWYTGEGMDEMEFTEAESNMNDLMSEYQQYQEATVSDGEGAYDAEEGEAYEQEE

SEQ ID NO: 12701 - protein, 452 aa, Klebsiella pneumoniae
MTQRLELQKLLNAAPVGARQWRVIICCFLVVMLDGFDTAAIGFIAPDIRSHWQLTAGDLAPLFGAGLLGLTAGALLCGPLSDRFGRKRVIEFCVALFGLFSLLSAFAPDLQMLVFLRFLTGLGLGGAMPNTITMTSEYLPARRRGALVTLMFCGFTLGSAFGGVVSAQLVPLIGWHGILVLGGVLPLILAVALVPLLPESPRWQIRRQLPQATIARTVGAITGERYNDTHFWLDEPAAGAKGSISQLFAGRQLAITLMLWVVFFMSLLIIYLLSSWMPTLLNHRGIDLQHASWVTAAFQIGGTFGALLLGVLMDRFNPYRVLALSYGLGAVCIVMIGLSENGLWLMALAIFGTGIGISGSQVGLNALTATLYPTQSRATGVSWSNAVGRCGAIVGSLSGGVMMAMNFSFDTLFFVIAVPAVVSAVMLILLTLAVRNPTSVPAALPSAGIVNK

SEQ ID NO: 12702 - protein, 388 aa, Oryza sativa
  misc_feature (124)..(124): Xaa can be any naturally occurring amino acid
  misc_feature (165)..(165): Xaa can be any naturally occurring amino acid
  unsure (1)..(388): unsure at all Xaa locations
MVKKKPAGDAEADERRRLRSLAFSNGLLQRGEPAAPRSALAPSTAVSRLQGRDIVRRGGQRKSRFLFSFPGLLAPAAAASGGRVGELADLGTKNPLLYLDFPQGRMKLLGTHVYPKNKYLTLQXDVFESLIVFSEAWWIGTKEEENPQELKLDFPKEFQNTGRMXAVADSDFKGGAGASCDEAVSINKPPKETTTGSLSPKIESDIDSSEDSDLKDEDNTQSTSQAPSVRQSARTAGKALKYTEISSGDDSSDNDDEIDVPEDMDEKVKSPAVKNESQSEDIKPADSSAQPISAKKEPLVQATLSSMFKKAEEKKRCTRSPKGSPATKGPAAKKQRASPEEKHPTGKKSAGRSQKKRKTQVEDDEIEVLSSSSQDNNVDDDSDEDWAE

SEQ ID NO: 12703 - protein, 472 aa, Nostoc sp. PCC 7120
MRILFVAAEAAPIAKVGGMGDVVGALPKVLRKMGHDVRIFLPYYGFLPDKMEIPKDPIWKGYAMFQDFTVHEAVLPGTDVPLYLFGHPAFTPRRIYSGDDEDWRFTLFSNGAAEFCWNYWKPDIIHCHDWHTGMIPVWMNQSPDITTVFTIHNLAYQGPWRWYLDKITWCPWYMQGHNTMAAAVQFADRVNTVSPTYAEQIKTPAYGEKIEGLLSFISGKLSGIVNGIDTEVYDPANDKYIAQTFTADTLDKRKANKIALQEEVGLEVNSNAFLIGMVTRLVEQKGLDLVIQMLDRFMAYTDAQFVLLGTGDRYYETQMWQLASRYPGRMATYLLYNDALSRRIYAGTDAFLMPSRFEPCGISQMMALRYGSIPIVRRTGGLVDTVSHHDPINEAGTGYCFDRYEPLDLFTCMIRAWEGFRYKPQWQELQKRGMSQDFSWYKSAKEYDKLYRSMYGLPDPEETQPELILTNQ

SEQ ID NO: 12704 - protein, 246 aa, Zea luxurians
CELDNIMRLTGITGIVNGMDVSEWDPSRDKYIAVKYDVSTAVEAKALNKEALQAEVGLPVDRNIPLVAFIGRLEEQKGPDVMAAAIPQLMEMVEDVQIVLLGTGKKKFERMLMSAEEKFPGKVRAVVKFNAALAHHIMAGADVLAVTSRFEPCGLIQLQGMRYGTPCACASTGGLVDTIIEGKTGFHMGRLSVDCNVVEPADVKKVATTLQRAIKVVGTPAYEEMVRNCMIQDLSWKGPAKNWENV

SEQ ID NO: 12705 - protein, 502 aa, Arabidopsis thaliana
MGKVAVATTVVCSVAVCAAAALIVRRRMKSAGKWARVIEILKAFEEDCATPIAKLRQVADAMTVEMHAGLASEGGSKLKMLISYVDNLPSGDETGFFYALDLGGTNFRVMRVLLGGKHDRVVKREFKEESIPPHLMTGKSHELFDFIVDVLAKFVATEGEDFHLPPGRQRELGFTFSFPVKQLSLSSGTLINWTKGFSIDDTVDKDVVGELVKAMERVGLDMLVAALVNDTIGTLAGGRYTNPDVVVAVILGTGTNAAYVERAHAIPKWHGLLPKSGEMVINMEWGNFRSSHLPLTEYDHSLDVDSLNPGEQILEKIISGMYLGEILRRVLLKMAEEAAFFGDIVPPKLKIPFIIRTPNMSAMHSDTSPDLKVVGSKLKDILEVQTSSLKMRKVVISLCNIIASRGARLSAAGIYGILKKIGRDATKDGEAQKSVIAMDGGLFEHYTQFSESMKSSLKELLGDEVSESVEVILSNDGSGVGAALLAASHSQYLELEDDSETS

SEQ ID NO: 12706 - protein, 425 aa, Clostridium perfringens
MDRNKEIFEESKKYMPGGVNSPVRSFGSVGINPPVIKSGKGAMIKDENGNEYIDFVLAWGPMILGHCDEDVVKAIKKTSEESIAFGASTKLELDLAKLLCETLDNVDMIRMVNSGTEATMSAVKLARGYTKKDKIIKFAGCYHGHFDGFLIEAGSGVLTEGIPGCLGVPEESIKNTLIGIYNDEKQVEELFEKYGNDIAGIIIEPVAGNMGVVKCDPKFMRKLRELCDKYGALLIFDEVMCGFRVAYKGAQTLFDVKPDLVTYAKIMGGGLPCGAYGGRREIMENLSPLGGVYQAGTMSGNPIVMSAGLATVKKLYENPSYYDHIEKIGSKLEKGVLEIAKKKGLGLVVNRQGGMMTLFFTDLKEVKCYDDVKTCDGERFKRYFLHMLNKGFNIPPSQFEAMFLSVKHTEEHIDKFLEAFESFEG

SEQ ID NO: 12707 - protein, 423 aa, Wolbachia endosymbiont of Drosophila melanogaster
MSRRVVVTGVGLITPLAADVDNTWSRLIKSESGIKAINTERFDSSDLACKIAGQVPLQSDNIEHHFNPLDYISEKDSKRTDRFIHYGIAAAIQAVDDSLILESQNINRERVGVTIGSGIGGLPSIQENVITMQEKGPRRVSPFFVPASLINLISGHISIKYEFTGPNDSAVTACATGAHAIINSARTIKLGEADVMIAGGAESALCRVGIAGFASMKALSTKFNDKPEEASRPWDEERDGFVMGEGAGILVLEEYEHAKKRGAKIHAELVGYGLTGDAHHITAPHPEGRGAFKAMQLALKSAQINPNQVGYINAHGTSTPLGDKIEVIAMKQLFGDYVYKIPVSSTKSSIGHLLGAAGSVEAIFSILALNNGIIPPTLNLHKPSEGCDLNFVPFKAQEHKIQYALSNSFGFGGTNASLIFGQV

SEQ ID NO: 12708 - protein, 256 aa, Zea mays subsp. mexicana
ELDNIMRLTGITGIVSGMDVSEWDPSRDKYIAVKYDVSTAVEAKALNKEALQAEVGLPVDRNIPLVAFIGRLEEQKGPDVMAAAIPQLMEMVEDVQIVLLGTGKKKFERMLMSAEEKFPGKVRAVVKFNAALAHHIMAGADVLAVTSRFEPCGLIQLQGMRYGTPCACSSTGGLVDTIIEGKTGFHMGRLSVDCNVVEPADVKKVATTLQRAIKVVGTPAYEEMVRNCMIQDLSWKGPAKNWENVLLSLGVAGGEP

SEQ ID NO: 12709 - protein, 156 aa, Paxillus involutus
MSLMRFYYNPFTEFDRLFDDAFAARFRPPTTTSEVGHAVNSNNAVTSFRPRMDLHEANDGNTVTATFELLGMKSEDVTIDIHQGRLTVSGETTSSHAQEEGGYAVRERHYGKFSRTLQLPIGTKPDDVNAKMDDGVLRVTFPKVTAEQQPHRITVQ

SEQ ID NO: 12710 - protein, 257 aa, Zea mays subsp. parviglumis
CELDNIMRLTGITGIVNGMDVSEWDPSRDKYIAVKYDVSTAVEAKALNKEALQAEVGLPVDRNIPLVAFIGRLEEQKGPDVMAAAIPQLMEMVEDVQIVLLGTGKKKFERMLMSAEEKFPGKVRAVVKFNAALAHHIMAGADVLAVTSRFEPCGLIQLQGMRYGTPCACSSTGGLVDTIIEGKTGFHMGRLSVDCNVVEPADVKKVATTLQRAIKVVGTPAYEEMVRNCMIQDLSWKGPAKNWENVLLSLGVAGGEP

SEQ ID NO: 12711 - protein, 419 aa, Glycine max
MASLPLGHHHHHQPAAATIHPSQPPQCQPQPEVPRRSSDMETDKDMSATVIEGNDAVTGHIISTTIGGKNGEPKQTISYMAERVVGTGSFGVVFQAKCLETGEAVAIKKVLQDRRYKNRELQLMRLMDHPNVISLKHCFFSTTSKDELFLNLVMEYVPESMYRVIKHYTTMNQRMPLIYVKLYTYQIFRGLAYIHTALRVCHRDVKPQNLLVHPLTHQVKLCDFGSAKVLVKGESNISYICSRYYRAPELIFGATEYTPSIDIWSAGCVLAELLLGQPLFPGENQVDQLVEIIKVLGTPTREEIRCMNPNYTDFRFPQIKAHPWHKVFHKRMPPEAIDLASRLLQYSPSLRCTALEACAHPFFDELREPNARLPNGHPLPPLFNFKQELAGASPELINRLIPEHIRRQMGLSFPHSAGS

SEQ ID NO: 12712 - protein, 559 aa, Pirellula sp. 1
MSPHPMTLLRRSMLRYKIGRLQRYLADAERARDIQRENLLHRIHQNADTAFGRDHGFSEIRTLEDFRRRVPIAGYEAARPYVDRVIQGETTALFPENTKVVMFATTSGTTDHPKMIPVTEDFYRQYKAGWQYWGTGVYRDYPHLLQMKSLQFSSHWNVTQTPSGAPCGNISGLAAETRPFYIGSLFVLPACVIQITEHLAKHYTALRLSLACDRVGKIVTANPSTLVEVAKFADTMKETLIRDIHDGTLTGDQPIPDAIRQQLRSRLRPNPRRARQLQQIVDRTGHLYPKDAWPDLTLLAVWTGGSVGLYLNQLPEYYGDAAIRDHGLSASEGRMTVPLQNGSPSGMLDYSSHHFEFIPESERDSKTPHVLEAWELTEGENYFIVLTTASGLYRYDIHDLVRCDGFCGQTPMLSFLNKGKNFCSFTGEKLSEHQVMQAMQQTLQSINAPSCTFTLAPTLGERPRYHLVLDDSSLPNLCERIGQELQNQLAQVNCEYADKCASGRIEPIQVTRVPAGTWEKLRASKTSKRGNFEEYKHPCLTNDPNFLQNLSKLDSASPS

SEQ ID NO: 12713 - protein, 255 aa, Aegilops markgrafii
ELDNIMRLTGITGIVNGMDVSEWDPTKDKFLAANYDITTALEGKALNKEALQAEVGLPVDRKVPLVAFIGRLEEQKGPDVMIAAIPEILKEEDVQIVLLGTGKKKFERLLKSVEEKFPSKVRAVVRFNAPLAHQMMAGADVLAVTSRFEPCGLIQLQGMRYGTPCACASTGGLVDTIVEGKTGFHMGRLSVDCNVVEPADVKKVVTTLKRAVKVVGTPAYHEMVKNCMIQDLSWKGPAKNWEDVLLELGVEGSEP

SEQ ID NO: 12714 - protein, 356 aa, Synechococcus sp. CC9605
MVPPTAVAEGSAVAIKDPVKDTILTPRFYTTDFEAMAAMDLQPNEAELEAICEEFRKDYNRHHFVRNEEFEGAADKLDPETRKVFIEFLEQSCTSEFSGFLLYKELSRRIKAKNPLLAECFAHMARDEARHAGFLNKSMSDFGMQLDLGFLTANKDYTFFKPKFIFYATYLSEKIGYWRYIAIYRHLEKNPDSKIFPIFNFFENWCQDENRHGDFFDALMKAQPDTVRGPIAKLWCRFFLLAVFATMYVRDVARKEFYEALGLDARTYDKMVIEKTNETSARVFPVVLDVNNDKFWTRLERLVANNAALDKADASDAIAPVKLLRKLPFWIGNGAEMAKLFLMPAIDSDRFQPAVR

SEQ ID NO: 12715 - protein, 173 aa, Arabidopsis thaliana
MCGLYWIFRFKLCLEMGEIGFTEKQEALVKESWEILKQDIPKYSLHFFSQILEIAPAAKGLFSFLRDSDEVPHNNPKLKAHAVKVFKMTCETAIQLREEGKVVVADTTLQYLGSIHLKSGVIDPHFEVVKEALLRTLKEGLGEKYNEEVEGAWSQAYDHLALAIKTEMKQEES

SEQ ID NO: 12716 - protein, 202 aa, Cicer arietinum
MNPEYDYLFKLLLIGDSGVGKSCLLLRFADDSYLDSYISTIGVDFKIRTVEQDGKTIKLQIWDTAGQERFRTITSSYYRGAHGIIVVYDVTDQESFNNVKQWLNEIDRYASENVNKLLVGNKCDLAANKVVSSETAKAFADEIGIPFMETSAKNATNVEQAFMAMAAEIKNRMASQPANNARPPTVQIRGQPMNQKSGCCST

SEQ ID NO: 12717 - protein, 119 aa, Cicer arietinum
LVNVMKSFENLNHWREEFLIQASPSDPENFPFVVLGNKIDVDGGNSRVISEKKAKAWCASKGNIPYFETSAKEGFNVEAAFQCIAKNALKNEPEEEMYLPDTIDVGSGGRQQRSTGCEC

SEQ ID NO: 12718 - protein, 939 aa, Oryza sativa (japonica cultivar-group)
MRARHLSLSLSLSLPPSLSPLLPLPFPQTSPICNPARLHTISRRNRNPLGFPAVALEYGRGIRGIRILLPLLLLRFVTLDLGFLQGGFEEWMALVRKRNGSGTPSSSSPQQPRSGGFAAQSSVSSEGLELGHPYSDAIDYSLSYQLPTTSLWDRLGRVTMMDIESSDFNWSSLSSLHHTKHTDTSTEPYEDDTSRSFEVTVNSGGVVFIALFKTSEYDDLPSKETAAVIKIAPSRMATQSERFGYELAKWLGVRTPQGRVIHNFSSEWHQMKDAVENARDAAISSCDELEEMICTEMLEALELSRCLFLMNYVHGSPLLENTMPFDSHDSAEKTAEALGRVLILDLVLRNEDRLRCRPLGWRGNYANLLVADRNAYANLDSLDDVYDSAIIRYKPEIIRSPQNRKPRRAVSISGSIGSDTSDLMLPDNPSQPEISSFHIIAIDSGVPRRPPACKRAKDQESYPKLVELTLNNWDYSSNLLFELSFGKLGIPGPEEFDVSSDLSYHSPLSESDMVAAVNSFRGGFRSALRDLQRFHIFLVTLYQKLDGLLKIFFNLMYKVLNEYDREDAGSSDSPCSTETHMDSHDSEVPKHMRRPSRTLSRDNFDLSSPSSRENFMIKNFKGSSDASRGLRLTMKLRDFNKYAKADGELCKEIEQWNDMLRTEVVKLCQDNSFNTGFFEGIDNSIAVDAYELKVRLEHILERISLISDAASTERPSQITDYLYIGGALAARSTYTLKHLGITHVLCLCANEIGQAESQQPDRFDYQNFSINDDENADISDVFQDASDFIDYVQHLHGKVLVHCFEGKSRSATVVLAYLMLRKKFTLLEAWNMLKKVHRRAHPNDGFAKVLLDLDKKLHGKISMEWHHRRPAMKVCPICGKNAGLSSSSLKLHLQKAHRKISSGSVDTAMSLEIQKAVEAIKAGRGGGDSPTHSAEKVTS

SEQ ID NO: 12719 - protein, 197 aa, Cicer arietinum
MSGSRFIKCVTVGDGAVGKTCLLISYTSNTFPTDYVPTVFDNFSANVVVDGSTINLGLWDTAGQEDYNRLRPLSYRGADVFLLAFSLISRASYENIAKKWIPELRHYAPGVPIILVGTKLDLRDDKQFFQDHPGAVPITTAQGEELRKLIGAPVYIECSSKTQKNVKAVFDAAIKVVLQPPKQKKTKRKGQKACSIL

SEQ ID NO: 12720 - protein, 91 aa, Zea mays
  misc_feature (60)..(60): Xaa can be any naturally occurring amino acid
  unsure (1)..(91): unsure at all Xaa locations
MAAVETVVLKVAMSCEGCAGAVRRVLSKMEGVETFDIDLKEQKVTVKGNVKPEDVFRTVXMSGMSTLYWEGQAATPDAPAAPEITPAKADA

SEQ ID NO: 12721 - protein, 154 aa, Cicer arietinum
IAPTTRHYRSVSMDSFIGKLNFNDESSKLPPSPGLMSPGNSVDGNSAAAFSLEFGNGEFSGPELKKIMANEKLAEIAMADPKRAKRILANRQSAARSKERKMRYISELEHKVQTLQTEATTLSAQLTLLQRDSVGLTNQNSELKFRLQSMEQQA

SEQ ID NO: 12722 - protein, 565 aa, Thermoplasma volcanium GSS1
MVAFWYFGHLGYVKLAIASLLVAPLFYITYLVASYAGPKKSKLYGLENLTAKLPAVKKAKGHVEFKYKMLWTAVIVILYFALSNIYIYGLNTAKTIDVFASFREIFAGASGSLMDLGIGPIVTASIVMQLFVGAKIFNLDLQNSEDKAIYQGVQKLLVIIMIFVEAIPQAFGYLVPDTKFVNSINSVLPGYGEFLAQTTIIMQLFFGSYLVFLMDEVVSKYGIGSGISLFIAADVSEQLFIGAFNWQALNNALTYSLKNPPAGAFPKMFYIIMHSSSAYLLTNGVVQILFAPPNPMIAVLGTLLIFFLVAYFQSSKIELPIAHERVRGARGRYPLQLLYASNIPVILATALLANVSMWTLLFWSSPVLSKVPLLGHNKFLGSYPSAAQAAALNISSTTPTGGLAYYLFSPNGLSDWLFPILQPSAYQNILLGHTPIEEAIHIIVFTAFMVGFSVLFAIFWIETTNMGASAVAKQIQSSGMQIPGFRRDPRVMERVLKKYIPAITIFSGAAVGLLAAGANLIGTVGDTSGTGLLLAVGIIIQFYEAMGREQLMEMHPVIRQFFVGG

SEQ ID NO: 12723 - protein, 620 aa, Perilla frutescens
MATANQKGVTDNLRNQLALAVRSIQWSYAVFWSFSAKQSGSLEWGEGYYNGDIKTRKTVQAVELNSDPLGLQRSDQLRELFESLSLGETSPQPKRPTAALSPEDLTDTEWYFLVCMSFVFNVGQGLPGRSFAKNDTIWLRNAHLADTKLFSRSLLAKSASLQTVVCFPHLGGVVELGTTELVAEDRNLIQHIKTSFLESSSDTVINPNHDLVYQVLDHANDPENNLDDVEVCSPDTSSDDFADNVLIEGSSLADGADGEASQLQNWQFKDDAISNGLNNSTSSSDCVSQTQGNPVTVVQQLDGKKTSDNCMPVNQECNQQKSPPGFNGSDVHYQSVLSSLLKSSHQLMLGPNRNGKQESSFISWKDRKLSSRLPQILSPQRLLKKVLFEVARMHENARIESAKQKDKCDDHSGQEADEVDRNHVLSERKRREKISERFSILVSLVPSGGKVDKVSILDHTIEYLRELERKVKDLESYKEATERESTTQSKAHDSIERTSDNYGHSKFGSITKLLGNKRKSCDTEKMAGENKRGRSSSSTDSITISITDKDVLIEMRCSWRQCVLLEVMEALTQLNLDSQSVQSSNTDGILSLSINAKSKGVKGASAGAIKQALQRIIKKC

SEQ ID NO: 12724 - protein, 370 aa, Tropheryma whipplei TW08/27
MKDKGYPVVQFLRPDGSFCPSETAEPFLSHAQSLDVEDIQRFYRDIILVRQIDHEAALLQRRGELALWPPVYGQEASQIGATYACSENDMIFPSYRDHAVMHARGIDLVHIAKLFRGASNNDWDVRQHKVWGYTLCIGAQVLHSTGYAIGIVLERQMSCTDDNSGYPEAVMVWFGDGASSQGDVSESMVFAARYQTPQVFMLQNNQYAISVPASVPSAACPLYKRGYGFGIPGIRIDGNDVIAAYAVVREYMDRARSGKGPHLIEAFTYRLGAHTTSDDPTRYRSEDEHREWLALDPIIRLERYLFSLGVEKTWFDRIRADIQLSVIGFRNAVLSIPQPDTKKIFDNVYSAYHPLVSSQSAHLLGLTESR

SEQ ID NO: 12725 - protein, 243 aa, Oryza sativa (japonica cultivar-group)
MEIDDDMIYSLIRNWDNDSSSSWIELLDHVVVSPASCFVPWKRTELDKQAVAGGGEAAQRLLKKAVGGGGAWMNRAAGSSIKNHVMSERRRWEKLNEMFLTLKSLVPSIDKVDKASSLAETIAYLKELERRVQELESGKKVSRPAKRKPCSERIIGGGDAGAVKEHHHWVLSESQEGTPSNVRVIVMDKDELHLEVHCRWKELMMTRLFDAIKSLRLDVLSVQASAPNGLLGLKIRAKVVSLT

SEQ ID NO: 12726 - protein, 464 aa, Pseudomonas aeruginosa PAO1
MSQILKTSLLIVGGGPGGYVAAIRAGQLGIPTVLVEGAALGGTCLNVGCIPSKALIHAAEEYLKARHYASRSALGIQVQAPSIDIARTVEWKDAIVDRLTSGVAALLKKHGVDVVQGWARILDGKSVAVELAGGGSQRIECEHLLLAAGSQSVELPILPLGGKVISSTEALAPGSLPKRLVVVGGGYIGLELGTAYRKLGVEVAVVEAQPRILPGYDEELTKPVAQALRRLGVELYLGHSLLGPSENGVRVRDGAGEEREIAADQVLVAVGRKPRSEGWNLESLGLDMNGRAVKVDDQCRTSMRNVWAIGDLAGEPMLAHRAMAQGEMVAELIAGKRRQFAPVAIPAVCFTDPEVVVAGLSPEQAKDAGLDCLVASFPFAANGRAMTLEANEGFVRVVARRDNHLVVGWQAVGKAVSELSTAFAQSLEMGARLEDIAGTIHAHPTLGEAVQEAALRALGHALHI

SEQ ID NO: 12727 - protein, 644 aa, Mesorhizobium loti MAFF303099
MSEAVDAKQAPLDVITIGRASVDLYGQQIGSRLEDITSFAKSVGGCPANISVGTARLGLRSALLTRVGDEQMGRFIREQLRREGVNTDGLKTDKERLTALVLLSVESEGVSPMIFYRSDCADMALAPEDIDEAFIASARSIVVTGTHFSRPNSDAAQRKAIRIMKAKGGKVVFDIDYRPNLWGLAGHAEGFERYVKSDRVSAQLKTVLPDCDLIVGTEEEIMIASGADDCLSALKTIRALSAATIVLKRGAMGCIVYDGPISDDLEDGIVGKGFPIEIYNVLGAGDAFMSGFLRGWLGGEDHATAATWANACGAFAVSRLLCAPEYPTFEELQFFLKNGSKYRALRKDEAINHIHWATTRRRDIPSLMALACDHRVQLEDVAAKAGADPARIRDFKVLAVKAAAKVAAGRDGYGMLIDEKHGREAMFEFARHPFAWLGRPVELPGSRPLRFEFSQDIGSQLVEWPVDHCIKCLCFYHPDDPAALKEEQQQKLRALFEAARKVGRELLVEIIAGKHGKLDNTTIPRALEELYALGIKPDWWKLEPQASAGAWTRIEAVILKHDPWCRGIVLLGLEAPQDELEAAFAATAKAPIVKGFAVGRTIFVHAAEEWLAGRMSDDEAVADMASRFEQLTEAWLAARGRKAA

SEQ ID NO: 12728 - protein, 358 aa, Nostoc sp. PCC 7120
MVNSLTTPEPQTLKPGVKAPVQETLLTPRFYTTDFDAVANLDISANETEIRAIVEELRADYNRHHFVRDEEFKQSWDHITGEKRRAFIDFLERSCTSEFSGFLLFKELSRRIKSRNPLLAEAFEFMARDEARHAGFLNKSMSDLNLSLDLNYLTKNRTYTFFPPEWVIYTVYLSEKIGYWRYILVHQHMQEHPEYQFYPLFRKFESWCQDENRHGDFFKALLRSQPQLWKNWKARLWVRFFLLTVFVTHTMTVFERASFYESIGIHPRKYNNRVIQETNNTSARAFPLILNTNHPLFFWRLEQCWENNFKLAAIKNSKLPNFVKFFQRIPPATAIFWNMLRLFLIKPIDTEATRGTVL

SEQ ID NO: 12729 - protein, 1550 aa, Arabidopsis thaliana
MVHPLVDRATSDMLIGPDWAMNLEICDMLNHEPGQTREVVSGIKKRLTSRTSKVQLLALTLLETIITNCGELIHMQVAEKDILHKMVKMAKRKPNIQVKEKILILIDTWQESFSGPQGRHPQYYAAYQELLRAGIVFPQRPQITPSSGQNGPSTRYPQNSRNARQEAIDTSTESEFPTLSLTEIQNARGIMDVLAEMMNAIDGNNKEGLKQEVVVDLVSQCRTYKQRVVHLVNSTSDESMLCQGLALNDDLQRLLAKHEAIASGNSMIKKEEKSKKEVPKDTTQIIDVGSSETKNGSVVAYTTNGPKIDLLSGDDFETPNADNSLALVPLGPPQPSSPVAKPDNSIVLIDMLSDNNCESSTPTSNPHANHQKVQQNYSNGFGPGHQEQSYYGQGSSAPVWNLQITQQPSSPAYGNQPFSPNFSPPASPHYGGQNNNVLALPPPPWEAQSPSSSPQYSPTHPMQVTQVVITTHTHQPLGYNPQGGSPHATNNNNNNMFGMFLPPMTGGHMPPPFGHNGHVTNNNYNPNMYGGYGGQAQPPQQYLVEQQMYGMSLQDNGNNNTNPYQVSSHQPPPMMKPMNKKPEDKLFGDLVELSKFKKPTSGRAGSMVSHFFFFMTSSMEEDDSISPESISLDTLASIRSLIINADTSDSVISSVFDFLTGLLSRGNSAILHHVLKLLSDLAFRRKELAPQIFDSILSNLLRLHNTVAEASHERAAVESLAVLASLSERTPSIAAALSKIDDEVFASICLGAPISSRLWLLRNADRFNVPSSVLFTLFLGFSKDPYPYIRKVALDGLINICNAGDFNHTHAVEGCYTRAVELLSDAEDSVRSSAVRAVSVWGKVMIASKEEEMNRRDCTDAVFLQLCSVVRDMSVDVRVEVFKAFGIIGTASESIILQTLSKKVLGAGKGKKPQNLLSNGSADVSSAAGVYIHGFEDEFYEVREAAVDSFHSLSVNSIKFPDEAVYLLMDMLYDDYMVVRLKALKALHHIADLGNLKIQETYMPAFLDAIVDTSENIRVEARNILKLAKLPDLKLVNKCIDGVLKSLEMYPQDEPDILSALFHFGQNHTNFLVSMVKRFSEKLGTASGSKAEFNSRQLSASLTLIISAPLSNKQSITSIPPLAFSYSLAMLGKFSSGLHDMMDQDMLLAYLTHCAILSSSSGTEFNKGDVFFHAYRDSNADLAGNPVLLPGKDIPAESKYMACKAELEIGNQALKFVNHILLKIKAAWLLSQSGCSKEALRALRACKQELATLTADSSISKGTLDFICQYVHVIELLVQVWPHFNYSRHISTCSSVEVELLMEEVEIKLMEIRCRFTGLSTEESLVLELVIFGCLLRLYKFEICCRLSCMEKLSSTISQLELHHEQQCTKPSDFLTETKKSLEEFGSSDDINSCRLLDLIKIFKCFSPEQFTFSVNLQCVSAEVEVPGNGPYSPISFVPGLPVAIPCEITLLNVPRDTCLWLRISRNDETCQFVYLDPNLYNGNGREKRFMFTAVTYMTPRAVVFTLRVSIGIECLFEDICYRKQRHGPKHPVAYLCKEREIHLSLVSRT

SEQ ID NO: 12730 - protein, 363 aa, Arabidopsis thaliana
MISLQTSGGSSEEEDMLLAIQLGGLNFVPYIVKTARELDLFEIMAKARPLGSYLSPVDLASMAAPKNPHAPMMIDRLLRFLVAYSVCTCKLVKDEEGRESRAYGLGKVGKKLIKDEDGFSIAPYVLAGCTKAKGGVWSYLTEAIQEGGASAWERANEALIFEYMKKNENLKKIFNESMTNHTSIVMKKILENYIGFEGVSDFVDVGGSLGSNLAQILSKYPHIKGINFDLPHIVKEAPQIHGVEHIGGDMFDEIPRGEVILMKWILHDWNDEKCVEILKNCKKALPETGRIIVIEMIVPREVSETDLATKNSLSADLTMMSLTSGGKERTKKEFEDLAKEAGFKLPKIIYGAYSYWIIELYPN

SEQ ID NO: 12731 - protein, 152 aa, Paxillus involutus
MPNAAERTYIMLKPDGVDRGLIGEILARFEKRGFKLIAAKLALPSKEHLEKHYADLKDKPFFPGMIKYMQSGPVFCMVFEGLDAVKTGRAMLGATNPLASQPGTIRGDYALAVGRNICHGSDSVENAEKEIALWFPDGTLQYRLSQEAMIYE

SEQ ID NO: 12732 - protein, 256 aa, Aegilops comosa
CELDNIMRLTGITGIVNGMDVSEWDPTKDKFLAANYDITTALEGKALNKEALQAEVGLPVDRKVPLVAFIGRLEEQKGPDVMIAAIPEILKEEDVQIVLLGTGKKKFERLLKSIEEKFPSKVRAVVRFNAPLAHQMMAGTDVLAVTSRFEPCGLIQLQGMRYGTPCACASTGGLVDTIVEGKTGFHMGRLSVDCNVVEPADVKKVVTTLKRAVKVVGTPAYHEMVKNCMIQDLSWKGPAKNWEDVLLELGVEGSEP

SEQ ID NO: 12733 - protein, 490 aa, Glycine max
  misc_feature (224)..(224): Xaa can be any naturally occurring amino acid
  unsure (1)..(490): unsure at all Xaa locations
KKKGGVFKTKNWGAAPPPPPFGAHIFLGKGPLVGPSFFFLYPSGGKGGGFFPQGFFYLWTPPGFFPPQGPKKRGPPPVAGGKNFFFKIYPSNPKSGSPLGGNLGNRAPPSSSYVGPPPPIFKEQFPAHFAEVIDALPVQEYMHPLCGLLNLAANLPHGSAKHDIGPYVYISYGSADKETDSVTKLCYDSYDVVNIMTHTTDAPLSTEQLTKIRKLLKKHKTLCXMETIATEEPREQKLNGMALLHGPETERKGSWSMVEEGMNFFRRVNRTSCISTEAKKVSSQSMDSNGECDFISDSDSGSTLLLLGTVQTAELSKHNNPRNPFESSKRHKKKFTEHLGAQWDVFRRQDVPKLIEYLKRHYAEFSYTHDYDKKMVHPILDQSIFLDSTHKKRLKEEFKIEPWTFQQHVGQAVIIPAGCPYQMRNSKSSVHAVLEFVSPENVTEGIQLIDEVRLLPEDHKAKADLLEVKKMALHSMNTAIKEVRQLTSKT

SEQ ID NO: 12734 - protein, 256 aa, Aegilops searsii
CELDNIMRLTGITGIVNGMDVSEWDPTKDKFLAANYDVTTALEGKALNKEALQAEVGLPVDRKVPLVASIGRLEEQKGPDVMIAAIPEILKEEDVQIVLLGTGKKKSERLLKSVEEKFPSKVRAVVRFNAPLAHQMMAGADVLAVTSRFEPCGLIQLQGMRYGTPCACASTGGLVDTIVEGKTGFHMGRLSVDCNVVEPADVKKVVTTLKRAVKVVGTPAYHGMVKNCMIQDLSWKGPAKNWEDVLLELGVEGSEP

SEQ ID NO: 12735 - protein, 479 aa, Kineococcus radiotolerans SRS30216
MSPTSASPKAQATRVAILGGGPGGYEAALVAAQLGADVTVVERDGLGGSTVLTDVVPSKTLIATAELMSTVGGSAELGVRFPGGPTPDAEPRGAVTVDLARVNERVKALAAAQSGDVRARLEKEGVRLLSGRGALDGPQAVVVTDGEDEGARVEADIVLLSTGSSPRTLPDAQPDGERILTWKQVYDMTELPEHLIVVGSGVTGAEFANAYDALGAHVTLVSSRDRVLPGEDADAAEVLEGVFRRRGMDVLSRSRAEKVERHGDTVTVTLSDGRTVEGSHCIVAVGAIPNTAGIGLEEAGVWTSDSGHVDVDKVSRTSARGVYAAGDCTGVFPLASVAAMQGRIAMWHALGDSVGPLKLRSVSSTVFTSPEIATVGWTQAQIDSGEAQGEIVKLPLSTNARAKMLGIHDGFVKLFCRKGSGTVIGGVVVAPRASELIFPVTLAVEKRLNVDDVAHAFTVYPSLSGSLAEAARQLHVMAE

SEQ ID NO: 12736 - protein, 211 aa, Paxillus involutus
MAEGSNYDFLFKVVLIGDSGVGKSNLLSRFTRNEFNLDSKSTIGVEFATRSINVDSKTVKAQIWDTAGQERYRAITSAYYRGAVGALLVYDISKHATYVNVTRWLKELRDHADSNIVIMLVGNKSDLKHLRAVPTEEAKNFSAENELSFIETSALDASNVESAFQTILTDVYRIVSTKSLEQSSDPIRAPTSDTIPVAIDSSAPTKNGSCC

SEQ ID NO: 12737 - protein, 256 aa, Aegilops bicornis
CELDNIMRLTGITGIVNGMDVSEWDPTKDKFLAVNYDITTALEGKALNKEALQAEVGLPVDRKVPLVAFIGRLEEQKGPDLMIAAIPEILKEEEVQIVLLGTGKKKFERLLKSIEEKFPSKVRAVVRFNAPLAHQMMAGADVLAVTSRFEPCGLIQLQGMRYGTPCACASTGGLVDTIVEGKTGFHMGRLSVDCNVVEPADVNKVVTTLKRAVKVVGTPAYHGMVKNCMIQDLSWKGPAKNWEDVLLELGVEGSEP

SEQ ID NO: 12738 - protein, 256 aa, Aegilops longissima
CELDNIMRLTGITGIVNGMDVSEWDPTKDKFLTANYDITTALEGKALNKEALQAEVGLPVDRKVPLVAFIGRLEEQKGPDVMIAAIPEILKEEEVQIVLLGTGKKKFERLLKSIEEKFPSKVRAVVRFNAPLAHQMMAGADMLAVTSRFEPCGLIQLQGMRYGTPCACASTGGLVDTIVEGKTGFHMGRLSVDCNVVEPADVNKVVTTLKRAVKVVGTPAYHGMVKNCMIQDLSWKGPAKNWEDVLLELGVEGSEP

SEQ ID NO: 12739 - protein, 248 aa, Candida albicans SC5314
MPKLVLVRHGQSEWNEKNLFTGWVDVRLSETGQKEAKRAGELLKEAGINVDVLHTSKLSRAIQTANIALDAADQLYVPVKRSWRLNERHYGALQGKDKAQTLEAYGQEKFQIWRRSFDVPPPKIDPKDEYSQVGDRRYADVDPAVVPLTESLALVIDRLLPYWQDEIAGDLLAGKVVLIAAHGNSLRALVKHLDNISDEDIAGLNIPTGIPLVYELDENLKPTKPSYYLDPEAAAAGAAAVAAQGQKK

SEQ ID NO: 12740 - protein, 161 aa, Arabidopsis thaliana
MNSVCISSCINDAHDPRVPVRPVRASYVNLYKWPESDAEFVRSVRRGGGLPATRVVDSISCRQMYLRSYTFSREDDESKSEKVSSGTQTSCLGRVKGTASSRRKSKEENGIIIVESTKPRRRGEKRRVSRKNKQEQACSVILRIFRRLLSCAATVDVVDPN

SEQ ID NO: 12741 - protein, 254 aa, Aegilops speltoides
LDNIMRLTGIAGIVNGMDVSEWDPTKDKFLATNYDITTALEGKALNKEALQAEVGLPVDRKVPLVAFIGRLEEQKGPDVMIAAIPEILKEEDIQIVLLGTGKKKFERLLKSVEEKFPSKVRAVVRFNAPLAHQMMAGADVLAVTSRFEPCGLIQLQGMRYGTPCACASTGGLVDTIVEGKTGFHMGRLSVDCNVVEPADVKKVVTTLKRAVKVVGTPAYHEMVKNCMIQDLSWKGPAKNWEDVLLELGVEGSEP

SEQ ID NO: 12742 - protein, 344 aa, Kineococcus radiotolerans SRS30216
MSTPVVVLAGFLGAGKTTVLNQLLRSATDVRLGVVVNDFGAVGIDALLVAGWADSAVSLENGCLCCSTDDGSVDELLARLTAPRRGPGLDAVVIEASGVADPAAMVRRVLTSSVPGVSYGGLVVVVDAVEFAAARRRHPELDDHVAMADVVLLTKTDLVGPEEAARTAAACRELNAWAPVVPAARGQLDARLLFEPRPPRQRQLALGEVVAGHPDGPDGPDGHGTHLHALYDTLTFRSEDPLDPRRFVEFFQRRPSGVFRVKGFVRFAVQGFPQRYLLHTVGAAVRFERGPWPRGAPRVTELVLVGAGLDAEGLRTALRACVHEGPPLTDEMAMMGVLRDTEGA

SEQ ID NO: 12743 - protein, 528 aa, Mycobacterium bovis AF2122/97
MAATKASTATDEPVKRTATKSPAASASGAKTGAKRTAAKSASGSPPAKRATKPAARSVKPASAPQDTTTSTIPKRKTRAAAKSAAAKAPSARGHATKPRAPKDAQHEAATDPEDALDSVEELDAEPDLDVEPGEDLDLDAADLNLDDLEDDVAPDADDDLDSGDDEDHEDLEAEAAVAPGQTADDDEEIAEPTEKDKASGDFVWDEDESEALRQARKDAELTASADSVRAYLKQIGKVALLNAEEEVELAKRIEAGLYATQLMTELSERGEKLPAAQRRDMMWICRDGDRAKNHLLEANLRLVVSLAKRYTGRGMAFLDLIQEGNLGLIRAVEKFDYTKGYKFSTYATWWIRQAITRAMADQARTIRIPVHMVEVINKLGRIQRELLQDLGREPTPEELAKEMDITPEKVLEIQQYAREPISLDQTIGDEGDSQLGDFIEDSEAVVAVDAVSFTLLQDQLQSVLDTLSEREAGVVRLRFGLTDGQPRTLDEIGQVYGVTRERIRQIESKTMSKLRHPSRSQVLRDYLD

SEQ ID NO: 12744 - protein, 309 aa, Triticum aestivum
  misc_feature (103)..(103): Xaa can be any naturally occurring amino acid
  misc_feature (172)..(172): Xaa can be any naturally occurring amino acid
  misc_feature (194)..(194): Xaa can be any naturally occurring amino acid
  misc_feature (204)..(204): Xaa can be any naturally occurring amino acid
  misc_feature (249)..(249): Xaa can be any naturally occurring amino acid
  misc_feature (252)..(253): Xaa can be any naturally occurring amino acid
  unsure (1)..(309): unsure at all Xaa locations
MQIFVKTLTGKTITLEVESSDTIDNVKAKIQDKEGIPPDQQRLIFAGKQLEDGRTLADYNIQKESTLHLVLRLRGGMQIFVKTLTGKTITLEVESSDTIDNVXAKIQDKEGIPPDQQRLIFAGKQLEDGRTLADYNIQKESTLHLVLRLRGGMQIFVKTLTGKTITLEVESXSDTIDNVKAKIQDKEGIPPDQXQRLIFAGKQXEDGRTLADYNIQKESTLHLVLRLRGSMQIFVKDLTGKTHLEVGSXDTXXNSREVQDKEAPPGQQRSLASIQDGLPCDTRSTQLSRLGEITWKGGLGHQTQEKDPR

SEQ ID NO: 12745 - protein, 440 aa, Candida albicans SC5314
MPSIDNDAGASTVSSSISLVKTIIGAGLLSMPLAYSTDGIIFGTFIILLAAFTSGFGLFLQCYVSRYVPVKHATFFNLCSITYPHLSVVFDFAIAVQCFGCAVSYLVLIRDLMPTIVTYVPYIDEKHYPSFWLLVSTVLTIPLSFLKNLDSLKYSSILGLVAIFYMTILVIGHYFAGDIERQGQITLFPTSVTGVFSTFSIIVFAFTGHQNMFSIINEARDKSLTSLTKLVNFAIGISSLLFIAVGLSGYLTFGQDVDGNVILSYPNGLTTTIGRFCIVFMVTFSFPLMIHPARISINNIYHWVTTNYFDKDEANESTALLGNESQESQIAEDEEQGKTHLSHVVPFPHKHFVIVTTSLLIIGYLLAISIKSFALILAIVGASGSTSISFILPGLFGYKLIGSESDDPSTLEVAFKNLSLGLTFWGVAVMILCLYSSLTL

SEQ ID NO: 12746 - protein, 500 aa, Yarrowia lipolytica CLIB122
MGNAESKPRRKQRSTGSESSQTSTQSLPAQTQTQTHSAAIKASSRPKRTQRPASAHPAVPIPTKSFQEKSALMNRLVTPAQPCSARVTYIKPVTVSPDDEKDADIGPTAKAPVVVATEIPSILTPEDSPKYLEPSEAAPFGKLHVGAQVAEGLQGNRRDSDNRNIVNSKIQLRDDSPAEDDEDDSEDYYYKNNLTYGLKQLKLGTDVANMNIEVVGQDAVSKPLSRVDSGDEVELRYQGHDDVSSSSGHGPRPGAVRTKICYKQGGNKAYITGTFTGWRKMLPMDRQSDGTFSVTLDLPEGTHRFRFVIDGELKCADDIGTATDSSGFLVNYLDVGNDDSDNVPASFSEENIPLCREGDLKKPQTTSATQPQTTHHASSNHHSHGDDGITQYEDETPIPPPLEYTNEIPSMFLTLDVAELDIPESQAVPPHLPPHLDTVILNTNSNEKDDSSVLPAPNHVVLNHLATSSIKHNVLAVASVNRYGKKFVTQILHAPMPSLN

SEQ ID NO: 12747 - protein, 253 aa, Glycine max
MMNFDGFQKALAEFQGRCSTLLGSLTRLQPNRARPPWARIAQPWGGRPMAMTVEAIEERLEGIPVYALSNASEEFLLVSGSSSGKNLGLFCFNKDDAEALLNQVTLIDPHARQGSKVVPVALNKVFQLKVNGVAFRLIPEFSQVKNALQEREKSGFASSGFSGVPVFQSRSLILKSQNKRFRPLFFRKEDLENTLKSAAREQNKLNPTMRKGDIQVATLEDVIKEMKENSTSNWDDVIFIPPGFDVSDDSNEQ

SEQ ID NO: 12748 - protein, 108 aa, Cicer arietinum
MQIFVKTLTGKTITLEVESSDTIDNVKAKIQDKEGIPPDQQRLIFAGKQLEDGRTLADYNIQKESTLHLVLRLRGGMQIFVKTLTGKTITLEVESSDTIDNVKAKIQD

SEQ ID NO: 12749 - protein, 148 aa, Cicer arietinum
MSNFKSKYHDELIANAAYIGTPGKGILAADESTGTIGKRLASINVENVETNRRALRELLFTAPNVLQYLSGVILFEETLYQSTAAGKPFVDVLNEAGVLPGIKVDKGTVELAGTDGETTTQGLDGLGARCAKYYEAGARFAKWRAVLK

SEQ ID NO: 12750 - protein, 356 aa, Lactococcus lactis subsp. lactis Il1403
MRAARFYDRGDIRIDEINEPIVKAGQVGIDVAWCGICGTDLHEFLDGPIFCPSAEHPNPITGEVPPVTLGHEMSGVVNFIGEGVSGLKVGDHVVVEPYIVPEGTDTSETGHYNLSEGSNFIGLGGNGGGLAEKISVDERWVHKIPDNLPLDEAALIEPLSVGYHAVERANLSEKSTVLVVGAGPIGLLTAAVAKAQGHTVIISEPSGLRRKKAQEAQVADYFFNPIEDDIQAKVHEINEKGVDAAFECTSVQPGFDACLDAIRMGGTVVIVAIWGKPASVDMAKLVIKEANLLGTIAYNNTHPKTIDLVSTGKIKLDQFITAKIGLDDLIDKGFDTLIHHNETAVKILVSPTGKGL

SEQ ID NO: 12751 - protein, 290 aa, Oryza sativa (japonica cultivar-group); identical to SEQ ID NO: 1034

SEQ ID NO: 12752 - protein, 159 aa, Arabidopsis thaliana
  misc_feature (36)..(36): Xaa can be any naturally occurring amino acid
  misc_feature (138)..(138): Xaa can be any naturally occurring amino acid
  unsure (1)..(159): unsure at all Xaa locations
STHASEVSCFEPRYSHEFFICLDFEGMIADRRGAPXGHFILLHPCDHNPSGIDRTPERWVKIAGLLRDKNHVPFVAVGYQGFASRSLDEDATSVRLFAERGMEYLDVLSYLKKSRPDVERLGATKVRSYSSESGTRVXSQWKRIARPMYSYSPVHAGEN

SEQ ID NO: 12753 - protein, 479 aa, Cryptococcus neoformans var. neoformans
MASRNPVVTRRAATRSRNDENAAPQQSVRTKPSISHLGPASKTAAVNVSVAAGKKPVAVKVGAKRTALGGVVVNGKEETEAGKKPLKASGKTVTEARQPLASRQNNAQPTRPIAAIPHRSKATPANVYAPVEAPAKLTVEEDMQMEIDARRSQPVSNAADFATVDEELLDDESEEDDMEEEDEEDWLRMSEEEMVKAQEQLDVVQATFKDDVDMFDTTMVAEYADEIFEHMERLEESVMPNPRYMDFQTEIEWTMRTTLIDWLLQVHLRYHMLPETLWIAVNIVDRFLSTRVVSLVKLQLVGVTAMFIAAKYEEILAPSVEEFVYMTENGYTKDEILKGERIILQTLDFTISSYCSPYSWVRRISKADDYDVQTRTLSKFLMEVTLLDHRFLRCKPSMIAAIGMYLARKMLGGDWNDAFIYYSNFTESQLITGASLLCERLIEPDFESVYVYKKYANKKFLRASTFARDWALTNAANSS

SEQ ID NO: 12754 - protein, 622 aa, Yarrowia lipolytica CLIB122
MEQENIDIPDELYPLALLMDELKHDEFSLRISAMKKLQLIAAALRQERCRDELIPFLEDVTQEDEDEVLTVLAEELANLVPYIGGPEYSHLLIPSLETLSCMEEPVVRDKAVESINRICEGLPSRDHVAQTILPLVKRLSSAEWFSSKVSATGLYAAAIRHCPTEAVPELLKQYGELTRDDTPMVRRAAATHLPAVIEALPAEADSPEADDEIYSMFKAQVGDDQDSVRLLSVNVLIAKAEKLKRQGNSQHTSSLIEFALALLHDPSWRVRYMCADRFEKLAESLTSVVPEEGVEKTEVDEMERAFVPEFIKFMQDGEAEVRTAVAKQVPGFCRLVTPANLDKIVANVEELSQDSSQHVRAALGSEISALAPLLGKEKTIETLLPTFLQMLKDDFPDVRLNIISKLHLVNKVIGIDLLSQSLLPAVSDLAQDKQWRVRLAIIEYIPLLATQLGVSFFDKELGPLCMTWLWDSVYSIREAATQNLKKLTKVFGVDWAKDEILPHIIVVAADSNYLYRLTALCAVTTLIPVVDESMIKTSILPFIAELINDPIPNIRFNVAKTYTELVRALHEEKISSPEVIEEICTSTVIPHLERLSTDGDVDVRYFSTKALEDIAEIKKAHA

SEQ ID NO: 12755 - protein, 480 aa, Bacillus cereus G9241
MERFVWKPNTSLAAPLYKQIETYIKEKIVNGEWTVGTKLPSQRDLAHTFGVNRSTIVMAFDELVAKGYIEGNGRKGTIVVNNNENTSTYAPPPNWQSYVETGIHYPNLPAIQEINQAEFYPHVIRLGTGELAPSLLPEKKMKVVMNKLLKSNVILGYEQPKGNLNLRKQIADYLKGHGIYVSPDSILIVSGAIQALQLISIGLLPKGASILLEKPSYLYSLNVFQSAGIRLIGMPLDESGLDVSYIAKYKKQFNASILYTIPSFHNPTNFSMDTKKRTEVMEICNEIGLPIIEDAVYQDLWFDAPISKPLKAYDKNGIVLHIGSMSKVISPGLRIGWIVGPEPVIQRLADIKMQTDYGSSSISQQIAAEWFKDGLYEEHLQFVRGELTKRRDFMVSMLKKYCSEIATWYEPTGGFYIWLHMNVPVSNRSLFDKALKEKILLNPGTLYDRSANQFLRLSYSYATLEEIELGIKKLAQLIKK

SEQ ID NO: 12756 - protein, 539 aa, Chlamydia trachomatis
MSFKSIFLTGGVVSSLGKGLTAASLALLLERQDLKVAMLKLDPYLNVDPGTMNPYEHGEVYVTDDGVETDLDLGHYHRFSSVQLSKYSIATSGQIYTKVLTKERNGEFLGSTVQVIPHVTNEIINVIQSCADHHKPDILIVEIGGTIGDIESLPFLEAVRQFRCEHPQDCLSIHMPYVTYLRAAKEIKTKPTQHSVQNLRSIGISPDVILCRSEAPLSTEVKRKISLFCNVPEHAVFNAIDLERSIYEMPLLLAKENISDFLLNKLGFSPKPLDLSDWQDLVEALCDKERQHVRIGLVGKYLEHKDAYKSVFEALFHASVPANCSLELVPIAPESEDLLEQLSQCDGCLIPGGFGTRSWEGKISAARYCREQNIPCFGICLGMQALVVEYARNVLDKPLANSMEMNPETPDPVVCMMEGQDSVVKGGTMRLGAYPCRIAPGSLASAAYKTDLVQERHRHRYEVNPSYIERLEEHGLKIAGVCPLGELCEIVEIPNHRWMLGVQFHPEFLSKLAKPHPLFIEFIRAAKAYSLEKANHEHR

SEQ ID NO: 12757 - protein, 534 aa, Cryptococcus neoformans var. neoformans
MPSGIPTRRVRLVDENAPPPPGAVVTRTRSRALASTTSTATNVKPTTTSIPMMKRQRSTISSENKIVDKSDVRRNALGEVRNGKGGEKEKESGKGKVVAIERKPLATTQAKAQRVTRSASAQPVMGVKDGDKKRKAVITSKIPSRSRSTGAEPAQVEVKPTIKTEEEPVRKRRKTSSPVVEVGEDGPTVDGKELLLSSGSKNATAFRSPKIKAKDDGWTDLDAEDEGDPTMVSEYVVEAFKYMMDIQGQTMPDPEYMDNQAELQWKMRQILMDWIIEVHSKFRLLPETLFIATNLVDRFLSKRVISLVKFQLVGLTALFIASKYEEVCCPGVEHFLHMSDGGYTVEELLKAERYMLSTLQFDMSYPNPLNFIRRISKADGYDIQSRTVAKYLVEISCVDHRLLGYTPSMLAAASMWLARLCLERGEWNANLVHYSTYSEDEIRPCAQVMLDRILDPDFDESTSFYKKYASKKHMKASVYVREWATQLWPASADGSAVERGTELELLKMFLEDEEEENNKGSKRRMKAVDEEEEY

SEQ ID NO: 12758 - protein, 436 aa, Yarrowia lipolytica CLIB122
MAGSHVPSNHHHPQAQQIHDPDAMDSLPAPPRHLPFRPPKGKNSNTKNLSLMVPQGSNQSHNSHSNNNVSPPHTSIEPSIAAPLPFVLPVSSTPVRASAPSVAAASPLAASFSLGLSRKGSVKRSHVDAEPEDAAYDSDYRSEHKNYHSRTSPKRQSPSPQVQPAASATVSSVPPFSMEPPPFTMQRRTSQLSISIPLATCSGSNTLPAPLGTPTSQSHHSANSAASQLSLSDSESDPNSDNTTHTTPPPNYDDALPPSKHHLFAEELMTPSVHHENAYPDGPLLIYPSNVYLYSEPSVELARTFDVVINVAKEIDNPFSEEQYANDGQTNPEYVYVPWGHNSKFLPDLPYLTQLIDDRSAAGKRVLVHCQCGVSRSASLLIAYIMKKQQLDLNAAYDWVKYRSPEIGPNMTLIFQLMDWHKHLLGEKDALESDED

SEQ ID NO: 12759 - protein, 316 aa, Pseudomonas aeruginosa PAO1
MADFEILCFGETMAMFVAEQPGELDRVEQFGKRIAGADSNVAIGLARLGFAVAWLSRVGDDSLGRFVLDSLTREGLDCRFVEVDAQAPTGFQMKSREVDGADPRVEYFRRGSAASRLGLAHIREEMLGARHLHATGIPPALSASACELSHELMRRMRGKGASLSFDPNLRPSLWPSERRMIAEINALAAHAHWVLPGLEEGRLLSGWQEPADIAAFYLDMGVDAVAIKLGPSGAYYRDAHGEGLVPGVPVATVVDTVGAGDGFAVGVVSALLEGLPLPDAVARGNWIGSRAVQVRGDMEGLPKRSQLLDRERRRSA

SEQ ID NO: 12760 - protein, 312 aa, Brassica napus
  misc_feature (7)..(7): Xaa can be any naturally occurring amino acid
  misc_feature (12)..(12): Xaa can be any naturally occurring amino acid
  misc_feature (16)..(16): Xaa can be any naturally occurring amino acid
  misc_feature (22)..(22): Xaa can be any naturally occurring amino acid
  misc_feature (35)..(35): Xaa can be any naturally occurring amino acid
  misc_feature (45)..(45): Xaa can be any naturally occurring amino acid
  misc_feature (61)..(61): Xaa can be any naturally occurring amino acid
  unsure (1)..(312): unsure at all Xaa locations
EQPQPFXVSPQXSRLXAEIQEXQTLLKTYEVMVKXFQSEIQNKDXEIKQMMEKIEEANQKXLKLEKNLKLRGMGDGGGGGMEFPDLTVELFMSNYEAAAKAVHDFSKPLINMMKAAGWDLDSAAESIEHGVEYAKRPHKKYAFESYICQRMFSGFQQRTFSLDSERTATMDDDDDDTETFFPQFLALKDMDPLDALAANPHSNFGKFCRGKRDYVAGGGHPRTAFYQAFLKLAKSVWFLHRLAYSFDPAAKIFQVKKGSEFSDSYMESVLKNIVVDEKGESPSVGLMVMPGFWIGGSVVQSRVYVSGVKVVE

SEQ ID NO: 12761 - protein, 624 aa, Kluyveromyces lactis NRRL Y-1140
MHNNPVLKMENDQIEDGVGHRKEGAAEKINEMDEDSKKGVQFSGVCDGMKQTKSLVIRKTEIMASQYNTWYSQVLFLSCAFLCAYGYSLDSSIRYVYMTYATNSYNTHSLLSTISIINMMISAVAQLFFAGLSDVFGRLRLMIVAILFYVVGTVIQSQAYDIQRYAAGSVFYNIGVVGVMLQVSLFLADNSSLKWRLLYSFVPAWPAIINMWVSGNIVKAANPLVNWSWNIAMWAFILPLSCVPLLCCVVHMRWKASKTPEWQELESELTFYQKHGFVHTIVEVFWKVDIVGLLLLTASMGCILVPLTIAGGISEQWNNGKIIGPLVLGVFLVPLTIYWESNWAKVPFAPFLLLKDRGIWAPMSIMFLVCFIYQMAAGYLYTILLVSMNQTELSATRIMNLYSFVAGIYSPIFGFVVARTGRLKSFMLVGCCLYFLVMGLFYRYRGGLGAESGIIGAMVVWGIASCMYTYPVTTSAQSVTSHENMATVTAMLLTIFRIGGAVGASVSGAIWTNLLYPKLLQNLGDVELASAAYTAPLTFIVSHPWNTEVRTAMIDAYRHVQKYEVLVGLIFVAPMLVLTFCLRDPELTDDYGQKLAEGQCVQTEGEDPIAEWFSDRFKKLKRRV

SEQ ID NO: 12762 - protein, 561 aa, Bacillus halodurans C-125
MSTQWWKESVVYQIYPRSFQDYNGDGIGDIPGIISRLDYLKTLGVDVIWLSPVYDSPNDDNGYDIRDYKAIMDEFGTMADWETLLAEIHTRGMKLIMDLVVNHSSDEHAWFVESRKSKDNPYRDFYIWRPGKDGKEPNNWASNFSGSAWTYDETTGEYYLHLFSKKQPDLNWENPKLREKIYEMMTWWLDKGIDGFRMDVINFISKVDGLPDAEPQPGQPYVSGSNYFMNGPNIHTYLQEMHENVLQHYDLMTVGEMPGVTLELAQLYTGEERNELNMVFQFEHVGLDQGPNGKWDLKPLELKDLKASLSRWQKGLQDIGWNSLYWNNHDQPRIVSRFGDDQSYRVESAKMLATLLHCMKGTPFIYQGEEIGMTNVRFDSIEQYQDIETLNMYKEKRAQGVPHETLMASIHAKGRDNARTPMQWDETKHGGFTDGTPWLEVNPNYKEINVKQALKDPNSIFYHYQKLIQLRKEHAILVHGSYDLILEDDPEIFAYKRTYNGQTLLVVCNFYGRITDFECPAEVVLSEPTLLLSNYDEEENGSYTSFRLRPYEARVYLGKNE

SEQ ID NO: 12763 - protein, 507 aa, Oryza sativa
MDGSNENIQFSWGKKRAKGGIKMDTQFYDSFTFDNVKYSLYDNVYLFKSGESEPYIGKIIKIWQQNQAKKVKILWFFLPDEIRKHLSGPVMEKEIFLACGEGVGLADINPLEAIGGKCTVLCISKDERNRQPSPRELAMADYIFYRFFDVNSCTLSEQLPEKIAGVEGNLLLNSKVEQVTSCSDQEVHGVDQKMLNVPVPLPQSTVMEDESPVAAVSLPPSVFKEENVASAIPFPQPVVKEESAAAAIPPPHVALKEESVSKSTENITKPAQKVLPGERPPKRVKFSENVTVQNVPLDVPERPSRTGPLELAGRQADRSKWFKIELIRDALQLNCIAKPINHPTYDDPNNGKAYAIFKTKSAADSAISKINSGLVVGGRPLYCSKGLLKVPKPSETLLGHLTINNIRMGIRQREEQKKAVSTSHCSQPNTMEYDLALDWMLVRAKQETKFRTLHKKHKDERKTFASKMGKLKIDTANSGDRLVGIVGIAKDDHVFVLDALGEPYAGS

SEQ ID NO: 12764 - protein, 444 aa, Achlya klebsiana
MRELVHIQGGQCGNQIGAKFWEVISDEHGVDPTGSYHGDSDLQLERINVYYNEATGTYVPRAILMDLEPGTMDSVRAGPYGQLFRPDNFVFGQTGAGNNWAKGHYTEGAELIDSVLDVVRKEAESCDCLQGFQITHSLGGGTGSGMGTLLISKIREEYPDRIMCTYSVCPSPKVSDTVVEPYNATLSVHQLVENADEVMCLDNEALYDICFRTLKLTNPTYGDLNHLVCAAMSGITTLLRFPGQLNSVLKLAVNLIPFPRLHFFMIGFAPLTSRGSQQYRALTVPELTQQQFDAKNMMCAADPRHGRYLTAACMFRGRMSTKEVDEQMLNVQNKNSSYFVEWIPNNIKASVCDIPPKGLKMSTTFIGNSTAIQEMFKRVSEQFTAMFRRKAFLHWYTGEGMDEMEFTEAESNMNDLVSEYQQYQDATAEEEGEFDEDEEMDEMM

SEQ ID NO: 12765 - protein, 188 aa, Fragaria x ananassa
MASSTTNPSSGPRFRHSGKPGSPVCSIRGGLLLGSRAQVSASRRRDQDRGSLLPGQRPRPELRASLHRNHQPLRGGSAPLRPASLLILRPTSRIWSRHDPTTLNRQGRYVGLNMDLGYITTLESRLVSRGIQGSNAKELKDKSVVTEILPAKRFYRSEEYHQQYLEKGGDHGNQSAEKGCTDPIRCYG

SEQ ID NO: 12766 - protein, 459 aa, Kluyveromyces lactis NRRL Y-1140
MERGRTDNQYDALWGAKARENAVFEQIGLPAVINGFLAPEHETAYQVMFRIAEITAKLRSNDLTPPSGRARSPSPPPVYDARGRRTNTKEQRYKRKLEEERHRLVEIALKMIPNFVTPDDYRRPTRFQDKYYIPTEDYPDINFVGLLLGPRGNTLKKLQQESGCKISIRGRGSVRSGKAAADLPKGAMNMNEPLHCIIIADVEDKIPLGIKACESIVVKAITSPEGQNDLKRGQLRELAVLNGTLREDNYVQTFGRKRIGIEVASDAAKRFKNAESNIHDQSTIVNTHRLTPMMQISIDGLGGDGITATAGSNSSVGSPSSVSARSESLAAENSTSGIGITEGNLNIATPGMAPPGLSPPGMAAPGMAAPGMAAPGLAAPGLAAPGLAAPGLAAPGLAAPGLAAPGLAAAPGNVPPGLMPPGSVPTMNAPGLTPSTISTPSSIPSNQLPQSFTDNETNN

SEQ ID NO: 12767 - protein, 330 aa, Daucus carota
MVNLYVNLFVMCSVVVLAHGSSRNLPIVSFEEGYSQLFGDSNLMILQDGKSAHLSLDERTGSGFVSHDLYKHGFFSASIKLPADYTAGVVVAFYMSNVDMFAKNHDEIDFEFLGNIRGKEWRLQTNVYGNGSTGAGREERYGLWFDPSDDFHQYSILWSKDRIIFYIDNVPIREVKKTEAMGGDFPSKPMSLYATIWDGSNWATNGGKYKVNYKYSPYIAEFSDFVLHGCAVDPIEMSTSCDTAPKSQSVPTGTTKESRTKMQNLRKKYMQYSYCYDTTRYQVPPSECVIDPLESERLRGFDPVTFGTSHRGHGKRHHNRRSYRHGINSV

SEQ ID NO: 12768 - protein, 449 aa, Candida albicans
MREIIHLSTGQCGNQIGAAFWETICGEHGLDNNGTYVGNNELQKSKLDVYFNEATSGKYVPRAVLVDLEPGTIDNVKTSQIGNLFRPDNFIFGQSSAGNVWAKGHYTEGAELVDSVLDVVRREAEGCDSLQGFQITHSLGGGTGSGMGTLLISKIREEFPDTMMATFSVVPSPKVSDTVIEPYNATLSVHQLVENSDETFCIDNEALYNICQNTLKLPQPSYAELNNLVSSVMSGVTTSLRYPGQLNSDLRKLAVNLVPFPRLHFFMVGYAPLTSMGSKSFRSVTVPELTQQMFDAKNMMAASDPRNGRYLTVAAFFRGKVSVKEVDDEMHKIQTRNSSYFVDWIPNNVQTAVCSVPPKDLDMSATFIGNSTSIQELFKRVGDQFSAMFRRKAFLHWYTSEGMDEMEFTEAESNMNDLVSEYQQYQEASIDEEELEYADEIPLEDAAME

SEQ ID NO: 12769 - protein, 391 aa, Phaseolus vulgaris
LFSVDWHRDRINGKQEVMIGYSDSGKDAGRLSAAWALYKAQEELIKVAKDFGVKLTMFHGRGGTVGRGGGPTHLAILSQPPDTIHGSLRVTVEGEVIEQSFGEEHLCFRTLQRFTAATLEHGMHPPVAPKPEWRALMDEMAVIATEEYRSIVFQEPRFVEYFRCATPELEYGRMNIGSRPSKRKPSGGIESLRAIPWIFAWTQTRFHLPVWLGFGAAFRHVVKKDPKNLQMLQDMYNQWPFFRVTIDLVEMVFAKGDPGIAALYDKLLVTEELWSFGERLRSMYEETKRLLLQVAGHRDLLEGDPYLKQRLRLRDSYTTTLNVLQAYTLKRIRDPDYHVNLKPHLSKDYMESSNPAAELVKLNPTSEYAPGLEDTLILTMKGIAAGMQNTG

SEQ ID NO: 12770 - protein, 736 aa, Candida glabrata CBS138
MTIDDTSRRFEEDDASAPVFDKVYQNYMMPGLELYDARVTINHWQLRDCIKPSSGNHSKLYYIYDHSIRVLDTDLEGLRSYRSHRMSESHVSGSEGEKRRLSSKLKKDVVSYRNRDMLKGNLNVPSEKLVEFYFKPRCFTELNGLTACGGLVGSDDRGFPTNWNRLNHNAGATSPPTDRNATSVAGSNINTQNTTDSSPPAQPIKLARRDVLLDRSNYSNPNIWKGILSLYNQNTNVSMTFVLGQFINNCVTLNDRSNNQYDLYTCNNDGHMYQCDISNRDVQLVRRFSDLKFPLNNAALSHDSKTMIVSGDSNKFAIYRQENLSEQFTLNYDNQAQWGNSHSKIKRIHRYSSGDNTGYIDNIFEAPNGDHGFYNSFSENDLQFATLFQNGVCLIYDVRRLDSPLAEISSTRPHSHNGAFRVCRFSYGLDDLLFISEHQGRVHVVDTRNFVNHQIILIPDKVTPPMDTEDQNTYNTTQSTQQQAADYQSSVSNYMSTYNNARRRYSFPSVGVKNWEPWITPANYIPLQYLEPKILPFPKVIDKLTNESIISHYNSSQYGSSRQNSGSYYAASTDSDNRVSKRRDARNSFRIRRVSTSSKRTIPQEGNNSGLLRAQNQQTNQQQELHTSSGSSNGNTVFDDDDIYDAYQDVNTNENMYPLSGRFEPTINEISGRYNPVNNTVVDYSSTDFTEENNISGIDWVEDRNGSSLIIGTDYGIMRWNINSWARRSFSSYDFC

SEQ ID NO: 12771 - protein, 238 aa, Nostoc sp. PCC 7120
MSSNLANKLRVGTKKAHTMAENVGFVKCFLKGVVEKSSYRKLVANFYYVYSAMEEEMEKHSQHPIVSKINFSQLNRKQTLEQDLSYYYGANWREQIQLSPAGEAYVQRIREISATEPELLIAHSYTRYLGDLSGGQILKNIAVTAMNLNDGQGTAFYEFADISDEKAFKAKYRQTLDELAIDEATGDRIVDEANAAFGMNMKMFQELEGNLIKAIGMMLFNTLTRKRTRGATELATAE

SEQ ID NO: 12772 - protein, 443 aa, Chlamydomonas reinhardtii
MREIVHIQGGQCGNQIGAKFWEVVSDEHGIDPTGTYHGDSDLQLERINVYFNEATGGRYVPRAILMDLEPGTMDSVRSGPYGQIFRPDNFVFGQTGAGNNWAKGHYTEGAELIDSVLDVVRKEAESCDCLQGFQVCHSLGGGTGSGMGTLLISKIREEYPDRMMLTFSVVPSPKVSDTVVEPYNATLSVHQLVENADECMVLDNEALYDICFRTLKLTTPTFGDLNHLISAVMSGITCCLRFPGQLNADLRKLAVNLIPFPRLHFFMVGFTPLTSRGSQQYRALTVPELTQQMWDAKNMMCAADPRHGRYLTASALFRGRMSTKEVDEQMLNVQNKNSSYFVEWIPNNVKSSVCDIPPKGLKMSATFIGNSTAIQEMFKRVSEQFTAMFRRKAFLHWYTGEGMDEMEFTEAESNMNDLVSEYQQYQDASAEEEGEFEGEEEEA

SEQ ID NO: 12773 - protein, 447 aa, Wolinella succinogenes
MKSLIWFRRDLRLEDNRTFEQASGEVLPLFIFDSHLLSPLPKEDRRVGYIYGEVMRLKSELRARGLDLAIFYGEPLKILSRLKEQGFSRLFASQDYDSYALSRDEAARELLDCRFVLDNYLFDPNEVLKKEGSPYTIFSAYYNQSLKILSEGHYAKGLDLPKKLAPYPIPAPPSLESMGFSPLPLLESLKILPQKRLEEFSSKITRYALDRDSLEAEATSGLSLFLRFGTLGVREVIRRLKVWQEEGIKVAPFYRQILWREFYAMLLYHFPHSEREDFKPMQMRWSESQERLERWQKGECGVPLVDAGMRELNHTGFMHNRARMVCASFLTKNLHLHWSWGERYFASKLLDYDVAQNAGNWQWCAGSGADAQPFFRIFNPYTQSLKFDPKGEYVKRWIPELRGISTQNWSSEERWEGLKERYLAPIVSAKRSAQEAKAMQNTLRVSS

SEQ ID NO: 12774 - protein, 353 aa, Haemophilus influenzae Rd KW20
MKLSKTFLFITALCCATPTLAIQNSTSSSGEQKMAMENTQNIREIYLAGGCFWGMEAYMERIHGVKDAISGYANGNTEKTSYQMIGLTDHAETVKVTYDANQISLDKLLKYYFKVIDPTSVNKQGNDRGRQYRTGIYYQDGADKAVIGQALAQLQTKYKKPVQIEVQPLKNYIVAEEYHQDYLKKNPNGYCHIDITKADEPVIDEKDYPKPSDAELKAKLTPLQYSVTQNKHTERSFSNEYWDNFQPGIYVDITTGEPVFSSNDKFESGCGWPSFTKPIIKDVVHYETDNSFNMQRTEVLSRAGNAHLGHVFDDGPKDKGGLRYCINSASIKFIPLAEMEKAGYGYLIQSIKK

SEQ ID NO: 12775 - protein, 142 aa, Paxillus filamentosus
YIMLKPDGVDRGLIGEILARFEKRGFKLIAAKLALPSKEHLEKHYADLKDKAFFPGMIKYMQSGPVFCMVFEGLDAVKTGRAMLGATNPLASQPGTIRGDYALAVGRNICHGSDSVENAEKEIALWFPDGTLQYQLSQEAMI

SEQ ID NO: 12776 - protein, 2580 aa, Magnaporthe grisea 70-15
MEGSPIALDEFEPPVRIIYRLRQISGYIWDEDSPIYHTSYDTWHVSGTRFVPAHVAFQSPTAHHTPVSASSPPITSSSLSSATSPTSFTKPSPVRPPGLSDTHSSNGLFPVHCESCSECSAASTSPSSQTHATEAPLIEEPVVARVSFHVLREERAFHIAKNLIAGSDRHCDHIAKPLELIRLARLPGDRGSVAVTIYSDAGENYLPEVLDLGPAFFKARKAGEGLEIIKRSDFRLEDPISLPNFLDFAIGATECLELLHHGQGIIHGEIRGDAFHFNLESKKVKLASLGSGVRSFERGLTSTGWSALSKETGAKNKLLFISPEQTGRMPVEPDTRTDIYSLGILFWMLLTQQPVFVGATPLDVVQMVLNRRVVNVSSERMDIPEAIGRIVAKCTEKDIHDRYSSASGLRYDLEKVKQFLIDGNWLALKEWQVAERDVSSFFLLPPIMVGREEERKRLGKIIERAAKGHALNLRANPNRFSDGSNLSNEFPDGATIYAEISSDGASSADGNTTRHSGSFTNTLSTDLRFRNFCQPSQSYDGNPLFSPDTLPSANPSFYSARASTRPWDRHQSVSFDTRSLADTVVSAERDLSYRHSSAIDSVSLGRQLGSAKLRRRGHCEIVLIEGAGGLGKSCLLEAVWPEMRRKGYAAKAKFDTARKEPFGPLLKLLSSLFRQVWGGESDTTTPLHQALKQQVFPTWKSLHKLLDLPEFLLGTVEPVMLRTIPIVNGAPIPAHGKLVSRAGPKRRGSSPGSSSSSARNVRPSTQSSHDFLRAGTSTKSIRLMNSYLDILRTFTHYKFICFCLEDLHFADDESMDLISQVISARLNMLILITYRPEEMTAAKMQKILTPPDLEDPIKSTGLTITRIPLSPLVEDDIAKYVAATLRRPPEEISPLVLVIQSKTAGNPLYMREMLSACHRKKCVWHDYRENKWKFDLDRLFKEFEGEQNYDVLNTDFITRRLDELPAASRAILSWAALLGTSFSFEFICHLLSGEFDDDGKDWHSGHKPTGYSQDEAVAGLESAVQAYIVVQGDRDDRFRFAHDRYIQAAAKINSCDTRKMHFIVAQTLMKYCARDNHTKENTASHICEALGIIRAQVKDRMAYRSLLYECAEVSTARGARPTAAKYFSGAVALLQTDPWNETNEDVSYDETMRLYLAAAECYLFMGQLQLASGVLDTIFDCATSAFDKAPAWVLRSRVYAQSGNSTKALACLKDCLRTMGVDCREDRTVEQCDEEFERLSAKIQSMDFNDVLQPRATHDEARADSIGAVLAEAISAAWWSDWLCFYQLSLYMLEMHLTTGAIPQSPMAFVQVSMIALARFNRLVLARDLGEYAFALLNSTRDSFSMARGYMIQASFVGHVVQSVGLTAEQLESSLNYAASAGDRISAILGFGLYAQVRFFASEHCIDLESICNYSCEEIPNWQLDSRGGTMLIAVRQVSRALQGKTRVREALDVLSDDQHQAPAYKIWLEQAMENTNRGLIFYESLEMAPLFLYGHYERAAEVGKFCVENSALIWSARNTRFAMLFYGLAIAGLVLRQRQDPRTGQRTAPDSTDVQDTIRELEKLHKQIVDWQVLDKVSYYCWSKLLEAQIAELTNAHGVALQRYEEALDHAAEHDFVFEEALGNYLMAGTFIRLSARRSAWAALRDALSSYRQMGAAGVAEYIESEHSLLMRGPTVNPRLVNAGTQTDGDAEAQSKHYNVLGDDGAAQQLTERGVAMTDASNDKVGAWRKSMTTVELDSGLPSLDVVDLHAILQSSQIISSVLNVDELLKTMCDVILSTCGTSATLAAMVVQEQGADVPRADAAPEWCVAASGNPEKGAEAHSPRIPLTNASVVAENVVLYTTRFREAVFVPNILTDDRFSNVSATWLHRNPAGKAVIAMPICHGDKPLLGVLYIEGTPNSLSHRYRDVLQLLVNQVGISYSNALTMKAVEKVSAENVSMVQMQKQALEHAIEAEKKAKDAEAKARQNVKLAEEAAKAKSIFLANVSHELRTPLNGVIGNSELLRDSLSNKEQLEMADSIRVSADLLLTVINDILDFSRMEADKMKLYIIAFNPEEMVREVVRAVSYSNQEKTRRNNVQIIKEINLPQLLIYGDPIRLHQVLGNLIGNSLKFTDRGSITIGARVDSETEDSATLSFWVKDTGIGIPPAQLAKLFQPFSQADPSTARKYGGSGLGLSICKSLVETMMKGKITLDSADGVGTTAMFTVKFDKARPEIKAGEAQQIKQMVTSPETAQMRAELQHHHRHQHYHQYYHEENLEAARAMPSVVDLSQIPREMIRICIAEDNAINSRIAIQYAHRLGYITVDAYENGQLAVEALRKKAAEGVPYHICLMDVQMPVLDGYSASKLIREDPVEEVRSILIIAMTASAVAGDRERCLAAGMNDYLAKPVRSDVLRKKLDAYVVGVNPTEHASEQASSSSTSPSAPTFPRYESNGAASDPPSRESTSARVSPRPSSVENFASPMPGFRSPGSDAPRLAESSIASESNGNSARRQPRKLTKNRGGAETSKVDSNVMVVEKTPKVLQKKNAPYRAGSTDAQHYENQSSLGSGRLDGNSRSHSIASLSSGGSREKIGTYPADH

SEQ ID NO: 12777 - protein, 209 aa, Arabidopsis thaliana
MATPPTLPVTNQQAVQSQPPINTPAFRTFFSRLSTSIRDGLSQRRPWTELIDRSSMARPESLTDALSRIRKNLAYFKVNYVAIVSLVLAFSLFSHPLSLLVLIGLLGGWMFLYLFRPSDQPLVVFGRTFSDRETLLALVLSTIVVVFMTSVGSLLTSALMIGVAIVCVHGAFVVPDDLFLDEQEPANAGLLSFLGGSATSAAAAVSGRV

SEQ ID NO: 12778 - protein, 493 aa, Triticum aestivum
  misc_feature (10)..(10): Xaa can be any naturally occurring amino acid
  unsure (1)..(493): unsure at all Xaa locations
MGGAAVAAVXAAAGVGVALLARRQMREAKRWGRADAVLRGLEERSAAPPPRLRQVADAMAVEMHAGLAAGGGSKLGMIITYVDSLPSGQEKGLFYALDLGGTNFRVLRVQLGGKEGRVVKQECDELSIPAHLMTGTSQELFDFIAAALAKFVASEGEDFHLLEGRQRELGFTFSFPVKQSSIASGTLIKWTKGFSIDETVGADVVAELSSALDRQGLDMKVTALVNDTIGTLAGGRYDDNDVVAAVILGTGTNAAYVERANAIPKWHGLLPKSGDMVINMEWGNFRSSHLPLTEFDQALDAESLNPGEQIYEKLISGMYLGEIVRRVLLKMTEEASLFGDDIPPKLKIPFILRTPHMSMMHHDTSADLRTVGAKLKDVLGIQGTSLKTRRLVVAVCDIVAKRGARLAAAGIHGVLKKLGRDIPGSDKHRTVIAMDGGLYEHYTIFSETLENTLREMLGEEVSSSVVIKLANDGSGIGAALLAAAHSQYLEAEV

SEQ ID NO: 12779 - protein, 329 aa, Mesorhizobium sp. BNC1
MGLLVEGAWQDKWYDTSKTGGRFERSKSQFRDWVTRDGRPAEGRTRSFKAEPGRYHLYVSYACPWAHRTLIFRKLKKLEDAISFSVVHHFMGENGWTFKNEDGATGDDLYGLDYLHQIYTKADPHYSGRVTVPVLWDRKTETIVSNESAEIIRMLNSAFDEWGDASLDFYPESLRSEIDTVNELVYANINNGVYRAGFATTQEAYEEAFRQLFETLDVMEGRLSRHRYLLRDRLTEADWRLFTTLVRFDPVYHGHFKCNLRRIADYPNLSNYLRELYQMPGVAETVNMLHIKAHYYGSHRTINPTGVVPLGPELDFAVPHDRERFAKAA

SEQ ID NO: 12780 - protein, 256 aa, Aegilops umbellulata
  misc_feature (132)..(132): Xaa can be any naturally occurring amino acid
  misc_feature (141)..(141): Xaa can be any naturally occurring amino acid
  misc_feature (246)..(247): Xaa can be any naturally occurring amino acid
  misc_feature (249)..(249): Xaa can be any naturally occurring amino acid
  unsure (1)..(256): unsure at all Xaa locations
CELDNIMRLTGITGIVNGMDVSEWDPTKDKFLAANYDITTALEGKALNKEALQAEVGLPVDRKVPLVAFIGRLEEQKGPDVMIAAIPEILKEEDVQIVLLGTGKKKFERLLKSVEEKFPSKVRAVVRFNAPXAHQMMAGAXVLAVTSRFEPCGFIQLQGMRYGTPCACASTGGLVDTIVEGKTGFHMGRLSVDCNVVEPADVKKVVTTLKRAVKVVGTPAYHEMVKNCMIQDLSWKVPAKNWEDVXXEXGVEGSEP

SEQ ID NO: 12781 - protein, 151 aa, Paxillus filamentosus
NPFTEFDRLFDDAFAARFRPSTTTSEVGRIPTSNNGATRPGSFRPKMDLHEANDGNTVTATFELPGMKSEDVTIDIHQGRLTVSGETTSSHAQEEGGYAVRERHYGKFSRTLQIPVGTKPEDVSAKMDDGVLKITFPKVTAEQRPHRITVQ

SEQ ID NO: 12782 - protein, 256 aa, Aegilops uniaristata
CELDNIMRLTGITGIVNGMDVSEWDPTKDKFLAANYDITTALEGKALNKEALQAEVGLPVDRKVPLVAFIGRLEEQKGPDVMIAAIPEILKEEDVQIVLLGTGKKKFERLLKSIEEKFPSKVRAVVRFNAPLAHQMMAGADVLAVTSRFEPCGLIQLQGMRYGTPCACASTGGLVDTIVEGKTGIHMGRLSVDCNVVEPADVKKVVTTLKRAVKVVGTPAYHEMVKNCMIQDLSWKGPAKNWEDVLLELGVEGSEP

SEQ ID NO: 12783 - protein, 256 aa, Agropyron cristatum
  misc_feature (186)..(186): Xaa can be any naturally occurring amino acid
  unsure (1)..(256): unsure at all Xaa locations
CELDNIMRLTGITGIVNGMDVSEWDPTKDKFLSVNYDVTTALEGKALNKEALQAEVGLPVDRKVPLVAFIGRLEEQKGPDVMIAAIPEIVKDVDVQIVLLGTGKKKFERLLKSIEEKFPSKVRAVVRFNAPLAHQMMAGADILAVTSRFEPCGLIQLQGMRYGTPCACASTGGLVDTIVEGKTGFXMGRLSVDCNVVEPADVKKVATTLKRAVKVVGTPAYHEMVKNCMIQDLSWKGPAKNWEDVLLELGVEGSEP

SEQ ID NO: 12784 - protein, 390 aa, Kineococcus radiotolerans SRS30216
MTDAAVGPDRAGERQGAQQGDMVQLLGPDGVRRTHPEHEVDLEPEELLALLRDMVLLRRLDAEGEALQRQGQLGLWPGSRGQEAAQVGSATACRRQDQVFPSYRDHGAVLGRGIDPVDILSIFRGVDHGGWDPAEQRVHPYTLVIAAQMLPAVGYGMAVQRDGAVGTGDPERDTAVITYFGDGATSQGEAAEALNWAAVFQAPVVFLCQNNQWAISEPVSRQSPVPLHKRAEGAGMPGVLVDGNDVLAVLAVTRAALERARSGGGPTFVEAFTYRMGAHTTADDPTRYRLSAETEAWREKDPIDRFRTYLRAEGILDDEYEAALAAEADEFAARLRAGVIALPDPQPVSMFDHAYAEPHPQVLAERDEFLAAWEQHEREVHAEELVGGAS

SEQ ID NO: 12785 - protein, 323 aa, Mycobacterium bovis AF2122/97
MADAPTRATTSRVDSDLDAQSPAADLVRVYLNGIGKTALLNAAGEVELAKRIEAGLYAEHLLETRKRLGENRKRDLAAVVRDGEAARRHLLEANLRLVVSLAKRYTGRGMPLLDLIQEGNLGLIRAMEKFDYTKGFKFSTYATWWIRQAITRGMADQSRTIRLPVHLVEQVNKLARIKREMHQHLGREATDEELAAESGIPIDKINDLLEHSRDPVSLDMPVGSEEEAPLGDFIEDAEAMSAENAVIAELLHTDIRSVLATLDEREHQVIRLRFGLDDGQPRTLDQIGKLFGLSRERVRQIERDVMSKLRHGERADRLRSYAS

SEQ ID NO: 12786 - protein, 411 aa, Zea mays
MFVIEDKGGAIALMLASLLFLGTWPAVLTLLERRGRLPQHTYLDYSITNLLAAVLIALTFGQLGDSRRGMPNFFTQLGQDNWPSVLFAMAGGVVLSVGNLSTQYAWAYVGLSVTEVISSSMVVVIGTTLNYFLDNRINRAEILFPGVACFLVAVILGSAVHSSNAADNEQKLGASTNAYKLGTSGTVEPSKQAVDRDAPKDLEESGASGIRQPDKAEAGTAEYLIELEERRSIKVFGSNTFIGLGIVFFAGVCFSLFSPAFNLATNDQWHTLRDGVPHLVVYTAFFYFSISCFVVGVGLNVLFLYRPMAGVPRSSFGAYLRDWDGRQWALLAGLLCGFGNGFQFMGGQAAGYAAADAVQALPLVSTFWGVLLFGEYRKSSRKTYVLLGFMLFMFVAAVAVLMASSGHRSTE

SEQ ID NO: 12787 - protein, 256 aa, Australopyrum retrofractum
  misc_feature (7)..(7): Xaa can be any naturally occurring amino acid
  unsure (1)..(256): unsure at all Xaa locations
CELDNIXRLTGITGIVNGMDVSEWDPTKDKFLAVNYDVTTALEGKALNKEALQAEVGLPVDRKVPLVAFIGRLEEQKGPDVLIAAIPEIVKDEDVQIVLLGTGKKKYERLLKSVEEKFPGKVRAVVRFNAPLAHQMMTGADVLTVTSRFEPCGLIQLQGMRYGTPCACASTGGLVDTIVEGKTGFHMGRLSVDCNVVEPTDVKKVATTLKRAVKVVGTPAYHGMVKNCMIQDLSWKGPAKNWEDVLLELGVEGSDP

SEQ ID NO: 12788 - protein, 159 aa, Chromobacterium violaceum ATCC 12472
MTTLYDFSAQRADGAEQALSAYEGRVALLVNTASECGYTRQYAGLQELQDYFAGQAFVVLGFPCNQFGGQEPGGEDEIVDFCRSRFGVSFPLFAKLQVNGDGAHPLWRWLTQADSDRPHPIKWNFTKFLVDGRGRVVKRYEPAVEPHELVDDIKALLAR

SEQ ID NO: 12789 - protein, 468 aa, Mycobacterium bovis AF2122/97
MREYDIVVIGSGPGGQKAAIASAKLGKSVAIVERGRMLGGVCVNTGTIPSKTLREAVLYLTGMNQRELYGASYRVKDRITPADLLARTQHVIGKEVDVVRNQLMRNRVDLIVGHGRFIDPHTILVEDQARREKTTVTGDYIIIATGTRPARPSGVEFDEERVLDSDGILDLKSLPSSMVVVGAGVIGIEYASMFAALGTKVTVVEKRDNMLDFCDPEVVEALKFHLRDLAVTFRFGEEVTAVDVGSAGTVTTLASGKQIPAETVMYSAGRQGQTDHLDLHNAGLEVQGRGRIFVDDRFQTKVDHIYAVGDVIGFPALAATSMEQGRLAAYHAFGEPTDGITELQPIGIYSIPEVSYVGATEVELTKSSIPYEVGVARYRELARGQIAGDSYGMLKLLVSTEDLKLLGVHIFGTSATEMVHIGQAVMGCGGSVEYLVDAVFNYPTFSEAYKNAALDVMNKMRALNQFRR

SEQ ID NO: 12790 - protein, 95 aa, Streptococcus ratti
MLKPLGDRMVVQLIKEEEKTVGGFVLAGTSQDKTQKARVAAVGEGIRTLSGDLVAPSIAQGDTVLLESHAGTPVKDGDKDYLIVREADILAVVQD

SEQ ID NO: 12791 - protein, 531 aa, Streptococcus ratti
MAKDIKFSADARSAMVRGVDTLADTVKVTLGPKGRNVVLEKSFGSPLITNDGVTIAKEIELEDHFENMGAKLVSEVASKTNDIAGDGTTTATVLTQAIVREGLKNVTAGANPIGIRRGIETAVATAVDGLKAIAQPVSGKEAIAQVAAVSSRSEKVGEYISEAMEKVGNDGVITIEESRGMETELDVVEGMQFDRGYLSQYMVTDNEKMVADLENPYILITDKKISNIQDILPLLEEVLKTNRPLLIIADDVDGEALPTLVLNKIRGTFNVVAVKAPGFGDRRKAMLEDIAILTGGTVITEDLGLELKNATMDALGQAARVTIDKDTTVIVEGSGSKEAIENRVALIKSQIETTTSDFDREKLQERLAKLSGGVAVIKVGAATETELKEMKLRIEDALNATRAAVEEGIVSGGGTALINVIEKVAALDLEDDAATGRNIVLRALEEPVRQIAKNAGYEGSVVIDKLKNSPVGTGFNAANGEWVDMIKEGIIDPVKVTRSALQNAASVASLILTTEAVVADHPAPEAPAAPA

SEQ ID NO: 12792 - protein, 149 aa, Nostoc punctiforme PCC 73102
MSRKVSKVFKQSGVIPYRVNNGKVEILLITTRNFQHWVIPKGDIPDGMSPPASAAKEAWEEAGVIGQVDTNELGTYKYRKGGKSYRVKMYLLPVEMLSEDYPEASKRKRQWVEVTTAIRWVKFSSLKRILKGFFQVKSHFCAFQDTSHI

SEQ ID NO: 12793 - protein, 525 aa, Streptococcus sobrinus
MAKDIKFSADARSAMVRGVDVLADTVKVTLGPKGRNVVLEKSFGSPLITNDGVTIAKEIELEDHFENMGAKLVSEVASKTNDIAGDGTTTATVLTQAIVREGLKNVTAGANPIGIRRGIERAVSTAVDELKAIAQPVANKEAIAQVAAVSSRSEKVGEYISEAMEKVGNDGVITIEESRGMATELDVVEGMQFDRGYLSQYMVTDNEKMVADLDNPYILITDKKISNIQDVLPLLEEVLKTSRPLLIIADDVDGEALPTLVLNKIRGTFNVVAVKAPGFGDRRKAMLEDIAILTGGTVITEDLGLELKDASIASLGQAAKITIDKDSTVIVEGAGSADAIAERVAVIKSQLESTTSEFDREKLQERLAKLSGGVAVIKVGAATETELKEMKLRIEDALNATRAAVEEGIVAGGGTALVNVIEKVTALDLAGDQATGRNIVLRALEEPVRQIARNAGYEGSVIIEKLKASKSGTGFNAADGSWVDMVEAGIIDPVKVSRSALQNAASVASLILTTEAVVADHPEEN

SEQ ID NO: 12794 - protein, 95 aa, Streptococcus mutans
MLKPLGDRVVVQLKEEKEQTVGGFVLAGASQEKTKKAQVVAVGEGVRTLTGELVASSLAQGDTILIENHVGTPVKDDGKDCLIIREADVLAVVND

SEQ ID NO: 12795 - protein, 249 aa, Prunus persica
NKSQDRGYEGKAGEYEEGSGARAAECGEIKDRGLFDFLGKKEAEKPQEEVIVTEFEKVKVSDHEAPHPHHHEPESYKVEQEEDKEKKHGSLLEKLHRSDSSSSSSSDEEEGEGGEKKKKKKEKKGLKEKICGDHDQKVEDTAVPVEKIYEEPTHEEKKEEEKKGFLEKIKEKLPGQQKKPEEIPASYDDQQCHAQHAEPAEPAGVGCEPKEKKGILEKIKEKIPGYHPKTEEEKEAIKEKEKEKETSSY

SEQ ID NO: 12796 - protein, 494 aa, Vibrio cholerae O1 biovar eltor str. N16961
MDTIMPLPTHFYTTQQLKQGEQDAASERGLELFHLMERAGQAVFTIAFAQYPTSHHWLICCGGGNNGGDGYIVAVLARHMGIDVTVWQLGDPEKLPADAHRAYQQWKELGGAVYAPQSEVPESTDVIIDALFGIGLKEVLRPQVVPLVELLNQSGKPIVAVDVPSGLCADTGQVMGTCIKAQHTVSLIGLKQGLVTGQARCYVGTLHYAGLGVEEVFAQHNTPSLVSIDGKLRHSLLPPRQACTHKGQNGKALIVGGNEGMGGALILCASACARSGAGLSAAMTHPDNVTAMLTITPEVMSTSWNKQHLFEERIEWCDALALGPGLGRDAQAQQIMQRLSSLKVPKVWDADALYFLAHNPSYDAQRIITPHPVEAARLLGCEVEEVEQDRFAAIRQLQQRYGGVVVLKGAGTLVDDGKEIAVCLQGNPGMASGGMGDVLTGIIVALLAQKIPLADAAKLGVWLHSSAADLNTKSHGQRGLLASDLLPHLRELLN

SEQ ID NO: 12797 - protein, 528 aa, Streptococcus mutans
MAKDIKFSADARSSMVRGVDILADTVKVTLGPKGRNVVLEKSFGSPLITNDGVTIAKEIELEDHFENMGAKLVSEVASKTNDIAGDGTTTATVLTQAIVREGLKNVTAGANPIGIRRGIETAVATAVDELKAIAQPVSGKEAIAQVAAVSSRSEKVGEYVSEAMEKVGNDGVITIEESRGMETELDVVEGMQFDRGYLSQYMVTDNEKMVADLENPYLLITDKKISNIQDVLPLLEEVLKTNRPLLIIADDVDGEALPTLVLNKIRGTFNVVAVKAPGFGDRRKAMLEDIAVLTGGTVITEDLGLELKDTTIDALGQAARVTVDKDSTVIVEGSGGKEAVANRVNLIKSQIETATSDFDREKLQERLAKLSGGVAVIKVGAATETELKEMKLRIEDALNATRAAVEEGIVAGGGTALINVIEKVAALDLTDDAATGRNLVLRALEEPVRQIAKNAGYEGSVIIDKLKNSSAGTGFNAANGEWVDMIDAGIIDPVKVTRSALQNAASVASLILTTEAVVADHPAPEAPA

SEQ ID NO: 12798 - protein, 331 aa, Vibrio cholerae O1 biovar eltor str. N16961
MLNVIFFSAKHYDIASFSKLVDPTQLSLHFHDFRLTDKTAQMAKGCEVVCAFVNDELHASVLEQLYQGGTRLIAMRCAGFDKVDLEAAKRLGMQVVRVPAYSPEAVAEHTVGMMLCLNRRFHKAYQRTRDANFSLDGLVGFNFHGKTVGVIGSGKIGVATMRILQGLGMQILCFDPYPNPDAIALGARYVELSELFAQSDVITLHCPMSKENYHLLNESAFDQMKDGVMIINTSRGELLDSVAAIEALKRGRIGALGLDVYDNEKDLFFQDKSNDVIVDDVFRRLSACHNVLFTGHQAFLTEDALNNIAQTTLNNIQLFFDNQASGNELIQ

SEQ ID NO: 12799 - protein, 229 aa, Yarrowia lipolytica CLIB122
MLSLVRPAVTRSILRGAPGSMRLLSSTARLHAPATDSAINIYAGGSAAAAPPAGFRIHRPATWEESEEGALSKATKYFLLAEMFRGLYVVLEQFFRAPYTIYYPFEKGPVSPRFRGEHALRRYPSGEERCIACKLCEAICPALAITIDAEERIDGSRRTTKYDIDMTKCIYCGYCQESCPVDAIVETPNVEYATETREELLYNKEKLLANGDKWELELQYALDADAPYR

SEQ ID NO: 12800 - protein, 507 aa, Candida glabrata CBS138
MSANPTNTSDVRGDRVVTNSTGYPYNDPFATQRVGQHGPLLMQDANLIDSLAHFNRERIPERNPHAHGSGAFGYFEVTDDITDICGSAMFSEIGKRTRFLTRFSTVGGEKGSADTARDPRGFATKFYTEEGNLDWVYNNTPIFFIRDPSKFPHFIHTQKRNPQTNLKDPNMFWDYLTTPENQVAVHQLMILFSDRGTPASYRHMNGYSGHTYKWSNKKGEWHYVQVHILTDQGIKNLTNDEAVEIAGKNPDYCQQDLYENIAKGNYPSWTVYIQTMTEEQAKKLPFSVFDLTKVWPHKDFPLRRVGKMVMNENPLNYFASIEQAAFSPANTVPYQEPSADPVLQSRLFAYADAHRYRLGANFHQIPVNCPYASKFFNPVIRDGPMNVDGNFGNEPNYYASNKQYQIPNQDRPIQQHQEVWNGPAQPFHWATSPGDIDFVQARDLYKVLGKQKDQQEHLAYNIGTHVAGADPEIQQRVIDMFSRVDEGLGANIRKEIEKNASAPTAKI

SEQ ID NO: 12801 - protein, 1547 aa, Nostoc sp. PCC 7120
MINWNDYLESLCKDYAQWWNAYTLTDVVGQQRIEQKRSPLLLDFIVQTVQSAKEERSASQEQVERLDVLAGLRKYAQEHVLLVGRPGSGKSTALLRLLLEEAERPLPQPLPDAERGVLAPPSLAGKGVGGLGQIPILVELRYYQTSILDLIRDFLKRHCLLLDTATIEQLLFDGQFLLLVDGINELPSEKARQDLYKFRQDNQKTTPMIFTTRDLGVGGDLGITKKLEMQPLTAEQMQQFVRAYLPAQGEQMLQNLGDRLREFGETPLLLFMLCLLFVETGDIPPNLGLLFRELTQRYKNELKPNVPVKGVSRDHWSWLLQHLAFNMTKGDKLTELNVAILKSKAEEVLTQLLKDEGFNPPRDQASESLKDLLNHDLIQLAANDQIEFRHQLIQEYYTAECLLKLLPSLSDDSLQREYLNYLKWTEPLKLMLELVDDRALAVRVVNLALKVDYQLGAKLAGAAKPELQQQTVDLIPGLKIPLLFKICLLGLTKSEKAISHLNPLLEDENSSVRDSAASALGEIKSEAAIPGLIKLLEHENSSVRYSAASALGEIKSEAAIPGLINLLEHENFDVRYRAASALGEIKSEAAIPGLINLLEHENSSVRYRAASALGQIKSEQAILGLIKLLEHENSSVRYRAASALGQIKSEQAILGLIKLLEHENSDVRYRAASALGEIKSEQAIPGLINLLEHENFDVRYSAASALGEIKSEQAIPGLINLLEHENFDVRYSAASALGEIKSEAAIPGLINLLEHENFDVRYSAASALGEIKSEAAIPGLINLLEHENFDVRDSAASALGEIKSEAAIPGLINLLEHENFDVRYSAASALGEIKSEAAIPGLINLLEDENSDVRYSAASALGEIKSEAAIPGLINLLEDENSPVRRRAASALGQIKSEAAIPGLINLLEDENSPVRRRAASALGQIKSEAAIPGLINLLEDENSSVRYSAASSLGQIKSEQAILGLIKLLEDENSSVRRRAASALGEIKSEQAIPGLIKLLEHEDSDVRYRAASALGEIKSEQAIPGLIKLLEDEDSFVRYRAASALGEIKSEQAILGLINLLEDEDSSVRYRAASTLGQIKSEQAIPGLINLLEDEKSSVRDSAASALGEIKSEQAIPGLINLLEDENSSVRDSAASALGEIKSEQAIPMLMNRLENEEFVSANNGNTLYSALEALEAIQENCQYYRCLTEQKPQLYLPPSQPSKTSLMYILHLSDLHFGTPDEANKWSNQLAMDLKQELQIPHLDALILSGDIANKSTPDEYAAAQKFLDELRQDFSLKFEQIIIAPGNHDLNWQISEEEGYIPTLRKKYQESMDESCVIDDGGAYIAVVDPENHKRRFEHFSNFYQAIKNQPYPLEYEKQYTLDHFPNQNLLILGLNSAWQLDHHYKSRASININALTNALTDIRRNQYYQNCIKIAVWHHPLDSAWEDRIKDQSFMEQLAVAGFRFFLHGHVHKAETSLYRYDMSANGRKLDRICAGTFGAPTRELNPGYPWQYNLLKFADNKLTVYTRRREELNGPWKPDARWLMGAGQNPLPYYEVMMDYT

SEQ ID NO: 12802 - protein, 395 aa, Oryza sativa
  misc_feature (38)..(38): Xaa can be any naturally occurring amino acid
  unsure (1)..(395): unsure at all Xaa locations
MTMPYASLSPAVADHRSSPAAATASLLPFCRSTPLSAXGGGVVAMGEDAPMTARWPPAAAARLPPFTAAQYEELEQQALIYKYLVAGVPVPPDLVLPIRRGLDSLAARFYNHPALGYGPYFGKKLDPEPGRCRRTDGKKWRCSKEAAPDSKYCERHMHRGRNRSRKPVETQLVAQSQPPSSVVGSAAAPLAAASNGSSFQNHSLYPAIAGSNGGGGGRNMPSSFGSALGSQLHMDNAAPYAAVGGGTGKDLRYTAYGTRSLADEQSQLITEAINTSIENPWRLLPSQNSPFPLSSYSQLGALSDLGQNTPSSLSKVQRQPLSFFGNDYAAVDSVKQENQTLRPFFDEWPKGRDSWSDLADENANLSSFSGTQLSISIPMASSDFSAASSRSTNGD

SEQ ID NO: 12803 - protein, 549 aa, Oryza sativa
MQAWFSGTGPSASSASSSSSPPQPSLLAEWNSYAAARSAEEEEDGGGGGFGIDIEAAVRSANDRVSGTFGVVSKGVLGLPGSFKSTTSSVPSSKSLVYFGLFLASGIFLVFIAFTIFLPVMRLPFTMGFVGSMAATIYVSMVLHSYILSVFFSCLQNLTGILGGMARLPYPGTGDGVFAAHGYLRFGLGIWYILSLSLSAYELIKTAKYIATPGKGILAADESTGTIGKRLASINVENVEPNRQALRELLFTTPGAFQYLSGVILFEETLYQSTAAGTPFVDVLKAGGVVPGIKVDKGTVDIAGTNGETTTQGLDSLGARCAKYYEAGARFAKWRAVLKIGAAGEPSELAVKQNAEGLARYALICQENGLVPIVEPEILTDGAHDIKTCAAVTERVLAAVYKSLNDHKVLLEGTLLKPNMVTPGSDSPKVGAEVIGEYTVAALRRTVPPAVPGIVFLSGGQSEEEASQNLNAMNKLEVLKPWTLTFSFGRALQQSTIKKWGGKKENVAAAQAAFLARCKANSEATLGKYGGAAGDAATSESLYVKGYTY

SEQ ID NO: 12804 - protein, 408 aa, Frankia sp. EAN1pec
MTPTPRQVVVTGLGATTPLGGDVPSTWEGLLSGRSGARRLTEDWVEQLPVHIAAPLAVEPPLGRVEARTLDRSQQMALVAAREAWAHAGSPEVDSERLAVCVASGIGGVLTLLNQHDVLRERGARRVSPHVVPMLMPNGPASTVGLAFGAKAGVHAPVSACASGSEAIALALDIIRAGRADIVIAGGTEAAIAALPIAGFAQMQALSRRNDAPEAASRPFDKARDGFLLGEGAAVIVVEAAEHAQARGARVLGTLAGAGISSDAYHVAATDPTGAGAARAIRAALRSASLEPEDVIHVNAHATSTPTGDVAESIALRLALGSALDSIAVTSTKSMTGHLLGAAGALEAVVTLLSLRERVVPATRNLDALDDEIALDVVSIDNRELGTGAGLSNSFGFGGHDVCLAFTV

SEQ ID NO: 12805 - protein, 513 aa, Mesorhizobium loti MAFF303099
MSPLGILRRHRVAALLGAALIISPVVVSFAQSANSTGVSKIVATTQTPVAGITAPNGSFAPIVAADKPAVVTVTSIMKGQPASDDDGMPLGNSPFDQYFRQFFGDQGMPAPQTPPQQAQRAEALGSGFIVTADGTVVTNNHVVDGASSIKVTLDDGTELPAKLVGRDAKNDLAVLKIKSDKPLPTVKWGDSDRLMTGDQVLAIGNPFGIGTTVTAGIVSARGRDLHSGPFDDFIQIDAPINHGNSGGPLVDVNGNVVGINTAIYSPNGGSVGVGFAIPSDQAQKVVAKLMKDGSIQYGYLGVEIQEVTPDVASAIGLDHAGGALVSKVNDSSPAASAGVEAGDVITGFAGQDVKDPKDLSRAVADVAPGAKETLDVWRKGKAMQISVEVGQNSDDVKTASAGESGAPSAEQGSRAPAIGLGLMDITPDIRQEMNLAGNEHGAVVARVNPDKAAAAAGIQPGDIIVAVNQAPVKSARQVTQAIAQASKSGRKSVLLLVERDGGQLYVAVPFANG

SEQ ID NO: 12806 - protein, 317 aa, Shigella flexneri 2a str. 301
MTDKLTSLRQYTTVVADTGDIAAMKLYQPQDATTNPSLILNAAQIPEYRKLIDDAVAWAKQQSNDRAQQIVDATDKLAVNIGLEILKLVPGRISTEVDARLSYDTEASIAKAKRLIKLYNDAGISNDRILIKLASTWQGIRAAEQLEKEGINCNLTLLFSFAQARACAEAGVFLISPFVGRILDWYKANTDKKEYAPAEDPGVVSVSEIYQYYKEHGYETVVMGASFRNIGEILELAGCDRLTIAPALLKELAESEGAIERKLSYTGEVKARPARITESEFLWQHNQDPMAVDKLAEGIRKFAIDQEKLEKMIGDLL

SEQ ID NO: 12807 - protein, 218 aa, Triticum aestivum
  misc_feature (108)..(108): Xaa can be any naturally occurring amino acid
  misc_feature (132)..(132): Xaa can be any naturally occurring amino acid
  unsure (1)..(218): unsure at all Xaa locations
MMGRKALDYEELNENVKKVQYAVRGELYLRASELQKEGKRIIFTNVGNPHALGQKPLTFPRQVVALCQAPFLLDDPNVGLIFPADAIARAKHYLSLAPGGLSAYSDSXRYPGVRQEVAEFIQRRDGYPSDPXLIYLLMVPQRCDQMLNAIIRNKRTGFCPWSTIPVYSAAISFGGSLVPIFEKKLLGLILQSRNWKTRQGNTVHDINQKPSGKAKEKK

SEQ ID NO: 12808 - protein, 256 aa, Critesion californicum
  misc_feature (142)..(142): Xaa can be any naturally occurring amino acid
  unsure (1)..(256): unsure at all Xaa locations
CELDNIMRLTGITGIVNGMDVSEWDPTKDKFLAVNYDITTALEAKALNKEALQAEVGLPVDRKVPLVAFIGRLEEQKGPDVMVAAIPEIVKEEDVQIVLLGTGKKKFERLLKSVEEKFPGKVRAVVRFNAPLAHQMMAGADXLAVTSRFEPCGLIQLQGMRYGTPCACASTGGLVDTIVEGKTGFHMGRLSVDCNVVEPADVKKVATTLKRAVKVVGTPAYQEMVKNCMIQDLSWKGPAKNWEDVLLELGVEGSEP

SEQ ID NO: 12809 - protein, 93 aa, Brassica napus
LVCLRSTGQERLFVHKLDLFECSLEMWSFELLVLLSGLLPNPVLETSVLSICLNTAGTVWMIPFGLSGAASTRVSNELGAGNPRVAKLAVRVV

SEQ ID NO: 12810 - protein, 352 aa, Ischaemum koleostachys
NIYDLKADDKTKNWKKLVNVAVSGAAGMISNHLLFKLASGEVFGQDQPIALKLLGSERSFQALEGVAMELEDSLYPLLREVSIGIDPYEVFEEADWALLIGAKPRGPGMERAALLDINGQIFADQGKALNAVASRDVKVLVVGNPCNTNALICLKNAPNIPAKNFHALTRLDENRAKCQLALKAGVFYDKVSNVTIWGNHSTTQVPDFLNAKIDGKPVKDVIKDTKWLEEEFTMTVQKRGGVLIQKWGRSSAASTAVSIADAIKSLVVPTPEGDWFSTGVYTTGNPYGIAEDIVFSMPCRSKGDGDYELATDVSMDDFLWERIKKSEAELLAEKKCVAHLTGEGNAFCDLPN

SEQ ID NO: 12811 - protein, 1068 aa, Xanthomonas axonopodis pv. citri str. 306
MTALPVRSTHLMQTISTTRDRWIWVIAGALMAGTLGMELVTPLGYAVWLTYFVAVGVTVFQNRPQVPLIVGVLSCILLAIGFQLAPPSTNSSFSSVNRSIGGVSFLAMALVVMQAIRARRQAEFALWLQQAENTVEASLRGDQAPQELADAAVRALCQTLDAQVGALYRIEGDRLRLTGGAALPPDLPQTLPTAAGQLGEVLQRGTVRRIRGMDAGHLQIASGLGQSSCQELLLAPITADDRVIGIIELGRVTDPRTAGSREEELLARCGENIGLALRTALLRAQLVALLEETQRQSEELQTQQEELRVANEELEEQSRSLQQSQSDLEVQQAELEQTNVQLEERTQALEAQKQALLIAQNQLVRNSNELSTASRYKSEFLANMSHELRTPLNSALILAKLLADNKDGTLSAEQVKYAQAILSSNNDLLALINDILDLSKIEAGHVELADETVVTGSVLQRLRDTFEPLARQKGLALEITAAAGAPAQLVVDNQRLQQILKNLLANAIKFTEHGKVGLLVQASAPGRVRFAVTDTGIGIAREQSEVIFEAFRQADGSTRRRYGGTGLGLSISRDLAQRMGGSISVDSEPGRGSCFTLELPTDGAPAEVIGPADAAANVAAVAAPASGAHVQQRTGSTLGAQSGAPALAAAHMAPVPIASPNAAPIQRADDDRDQRSRPGRLILAVEDDTRFAQALVELAHELDFDCVVAPNAEEALRLAAELRPSGILLDIGLPDASSLSVLERLKRDPATRHVPVHVVSALERSQIALELGAVGYLIKPATRELLAGAIRQLEETNARAVRRLLIVEDDSALRANLQLLLARDQLDIVAVGSIAEAMDQLASSTFDCMVTDLALPDGSGYDLLERMAGNDAVAFPPVIVYTGRALTRDEEQGLRRYSKSIIIKGVRSPERLLDEVTLFLHSVEASLPSDQQRLLREARRRDAVLDGATVLLAEDDVRNIFALSSVLEPLGVTLQIARNGREALEHLAKHEVDLVLMDIMMPEMDGITAMRQIRANRQWQDLPIIALTAKAMADDRERCLEAGANDYIAKPIDVDKLVSLCRVWCSRQ

SEQ ID NO: 12812 - protein, 256 aa, Haynaldia villosa
  misc_feature (156)..(156): Xaa can be any naturally occurring amino acid
  unsure (1)..(256): unsure at all Xaa locations
CELDNIMRLTGITGIVNGMDVSEWDPTKDKFLTVNYDITTALEGKALNKEALQAEVGLPVDRKVPLVAFIGRLEEQKGPDVMIAAIPEILKDEDVQIVLLGTGKKKFERLLKSVEEKFPGKVRAVVRFNAPLAHQMMAGADVLAVTSRFEPCGLIXLQGMRYGTPCACASTGGLVDTIVEGKTGFHMGRLSVDCNVVEPADVKKVVTTLKRAVKVVGTPAYQEMVKNCMIQDLSWKAPAKNWEDVLLELGVEGSER

SEQ ID NO: 12813 - protein, 419 aa, Oplismenus compositus
PAGSRLVLTPLGASAARRRSVHLLRPRRPPLAAVRCSVDTTKQVQDGAATVAAEAPASRKECFGVFCTTYDLKADDKTRSWKKLVNIAVSGAAGMISNHLLFKLASGEVFGQDQPIALKLLGSERSLQALEGVAMELEDSLYPLLREVNIGIDPYEVFEDADWALLIGAKPRGPGMERAALLDINGQIFADQGKALNAVASRDVKVIVIGDPCNTNALICLKNAPNIPAKNFHALTRLDENRAKCQLALKAGVFYDKVSNMTIWGNHSTTQVPDFLNAKINGRPVKEVIKDTKWLEEEFTMTVQKRGGVLIQKWGRSSAASTAVSIVDAIRSLVTPTPEGDWFSSGVYTTGNPYGIAEDIVFSMPCRSKGDGDYELVSDVLMDDFLWERIKKSEAELLAEKKCVAHLTGEGNAYCDLPE

SEQ ID NO: 12814 - protein, 496 aa, Bifidobacterium longum DJO10A
MSEQFDLVIIGAGPGGYSTALRAAELGMKVALVERDATVGGTCLNRGCIPSKALITATHTIDTVHRAAELGVNASVNGIDFGTLRDYRLRVVKTMVGGLAGLLAHRGITVFRANAAFHADETAPATSNHIVHLVPSPDQSDILTYHKADVPEPSGPTMDLTATNIVIATGAKPRPLPGNPFAGALIDSTQALEVNEFPSSAVIIGAGAIALEFASMWNAAGSKVTLLIRKDRVLSAWDRRAGTTLTRELKRHGVNIITRASVTHVDTGANLGATVHYTREGQDGEQSVWGEIALVAIGRDPITDPAWGVTIDDHGHVATDAYGRTDKPGVWAVGDVTAGHALAHRAFEQGIVIAETIAGLNPKPVDEATVPQIVFSFPEAASVGLTVEQAQAREDLIEIKETNYPMLANARMLMSGTAGSLTIVSGCDAANPDTPRVLGVHMVSQMASDIIAEAEQLVGNHVPLADAARLVHPHPTFSETLGEALLKADGRPLHTR

SEQ ID NO: 12815 - protein, 245 aa, Triticum aestivum
  misc_feature (123)..(123): Xaa can be any naturally occurring amino acid
  misc_feature (162)..(162): Xaa can be any naturally occurring amino acid
  unsure (1)..(245): unsure at all Xaa locations
MAPTVMASSATSVAPFQGLKSTAGLPVSRRSNGASLGSVSNGGRIRCMQVWPIEGIKKFETLSYLPPLSTEALLKQVDYLIRSKWVPCLEFSKVGFIFREHNASPGYYDGRYWTMWKLPMFGXCTDATQVINKWRSQEGVPDAYVRIIGFTTSQVQCVSFIXAFKPPGLQGSGQALKTSFPKGQFKRALCSFGNFEIGLGFPSPFTFLNGSKKNGIGPVSLYKMAPKNLAHKKMLSGGFFIKRTH

SEQ ID NO: 12816 - protein, 202 aa, Brassica napus
MGVYETEKPTKDAAVVETQSPEDFDQPSPLRKIISVASIAAGLQFGWALQLSLLTPYVQLLGIPHKWSSLIWLCGPVSGMIVQPIVGYHSDRCTSRFGRRRPFIAAGAALVAVAVFLIGYAADIGHKMGDKLEQKSPRVRAIGIFAFGFWILDVANNTLQGPCRAFLADLSAGDAKRTRVANGFFSFFMGVGNVLGYAAGLF

SEQ ID NO: 12817 - protein, 255 aa, Eremopyrum bonaepartis
  misc_feature (247)..(247): Xaa can be any naturally occurring amino acid
  misc_feature (249)..(249): Xaa can be any naturally occurring amino acid
  misc_feature (254)..(254): Xaa can be any naturally occurring amino acid
  unsure (1)..(255): unsure at all Xaa locations
CELDNIMRLTGITGIVNGMDVSEWDPTKDKFLAVNYDVTTALEGKALNKEALQAEVGLPVDRKVPLVAFIGRLEEQKGPDVMIAAIPEIVQEEDVQIILLGTGKKKFERLLKSAEERFPGKVRAVVRFNAPLAHQMMAGADVLAVTSRFEPCGLIQLQGMRYGTPCACASTGGLVDTIVEGKTGFHMGRLSVDCNVVEPADVKKVATTLKRAVKVVGTPAYHEMVKNCMIQDLSWKGPAKNWEDVLXEXGVEGXE

SEQ ID NO: 12818 - protein, 423 aa, Panicum maximum
PAGSRLATAPLAAGAARRASVQRLRPRRPLIATVRCSVDAAKQVQDGAATVAADPPVRHKTGRLPRYGVFCPTYDLTADDKTKSWKKLVTIAVSGAAGMIANHLLFQLASGEVFGPDQPVALKLLGSERSLQALEGVAMELEDSLYPLLREVSIGIDAYEVFEDADWALLIGAKPRGPGMERAALLDINGQIFADQGKALNAVASPNVKVIVVGNPCNTNALICIKNAPNIPAKNFHALTRLDENRAKCQLALKAGVFYDKISNMTIWGNHSTTQVPDFLNAKIDGRLVKEVIKDTKWLEEEFTLTVQNRGGVLIQKWGRSSAASTSVSIVDAIKSLVTPTPEGDWFSSGVYTTGNPYGIAEDIVFSMPCRSKGDGDYELATDVLMDDFLWERIKKSEAELLAEKKCVGHLIGEGIAFCDIKE

SEQ ID NO: 12819 - protein, 255 aa, Henrardia persica
ELDNIMRLTGITGIVNGMDVTEWDPTKDKFLAVNYDVTTALEGKALNKEALQAEVGLPVDRKVPLVAFIGRLEEQKGPDVMIAAIPEIVKEEDVQIVLLGTGKKKFERLLKSIEEKFPSKVRAVVRFNAPLAHQMMAGADVLAVTSRFEPCGLIQLQGMRYGTPCACASTGGLVDTIVEGKTGFHMGRLSVDCNVVEPADVKKVATTLKRAVKVVGTPAYHEMVKNCMIQDLSWKGPAKNWEDVLLELGVEGSEP

SEQ ID NO: 12820 - protein, 254 aa, Heteranthelium piliferum
CELDNIMRLTGITGIVNGMDVSEWDPVKDKFLTVNYDVTTALEGKALNKEALQAEVGLPVDRKVPLVAFIGRLEEQKGPDVMIAAIPEILEEDVQIVLLGTGKKKFERLLKSIEEKFPSKVRAVVRFNAPLAHQMMAGADVLAVTSRFEPCGLIQLQGMRYGTPCACASTGGLVDTIVEGKTRFHMGRLSVDCNVVEPADVKKVTTTLKRAVKVVGTPAYHEMVKNCMIQDLSWKGPAKNWEDVLLDMGVEGSE

SEQ ID NO: 12821 - protein, 95 aa, Streptococcus mutans
MLKPLGDRVVVQLKEEKEQTVGGFVLAGASQEKTKKAQVVAVGEGIRTLTGELVASSLAQGDTILIENHVGTPVKDDGKDYLIIREADVLAVVND

SEQ ID NO: 12822 - protein, 526 aa, Streptococcus mutans
MAKDIKFSADARSSMVRGVDILADTVKVTLGPKGRNVVLEKSFGSPLITNDGVTIAKEIELEDHFENMGAKLVSEVASKTNDIAGDGTTTATVLTQAIVREGLKNVTAGANPIGIRRGIETAVATAVDELKAIAQPVSGKEAIAQVAAVSSRSEKVGEYVSEAMEKVGNDGVITIEESRGMETELDVVEGMQFDRGYLSQYMVTDNEKMVADLENPYLLITDKKISNIQDVLPLLEEVLKTNRPLLIIADDVDGEALPTLVLNKIRGTFNVVAVKAPGFGDRRKAMLEDIAVLTGGTVITEDLGLELKDTTIDALGQAARVTVDKDSTVIVEGSGGKEAVANRVNLIKSQIETATSDFDREKLQERLAKLSGGVAVIKVGAATETELKEMKLRIEDALNATRAAVEEGIVAGGGTALINVIEKVAALDLTDDAATGRNLVLRALEEPVRQIAKNAGYEGSVIIDKLKNSSAGTGFNAANGEWVDMIDAGIIDPVKVTRSALQNAASVASLILTTEAVVADHPAPEA

SEQ ID NO: 12823 - protein, 245 aa, Hordeum vulgare subsp. vulgare
GTRCGLAAMSSYSSLISVSPGEQIGGYADQGDDDDMAAAANYLSSFCFDFGDEYSVGKAATASYPLHGQQQQAPTKADSHHSGQAASITSSQRFDNINTSLTSSDARSKGSKIAFKTRSEVEVLDDGYRWRKYGKKMVKNSPNPRNYYRCSSEGCRVKKRVERDRDDERFVITTYDGVHNHLAPLPPQGCAGYSLSLAQTRVDEGSSPLPMEGRRCFLDAMKMHAAGSLAGSSPVPAPRTLERHN

SEQ ID NO: 12824 - protein, 94 aa, Streptococcus sobrinus
MLKPLGDRIVVKFEEVEETTASGFVLAGSSHEATKAATVLAVGPGSRTLHGDLIAPSVAQGDKVLVENGAGLDVKDGDDKFSIIREADILAVLD

SEQ ID NO: 12825 - protein, 159 aa, Hordeum vulgare subsp. vulgare
AAKMSDGYRWRKYGQKIVKGNPNPRSYYRCTHDGCPVRKHVERAPDDINNMVVTYEGKHNHGQPFRSSNESRNESVSVITPAMTITEQSRIVSSTSDQKLPTSTEKAADSESTMDTTLELGGKKPPESAQTLHSMKINPDGLKNSLLKDTSAAVPVQNN

SEQ ID NO: 12826 - protein, 763 aa, Neurospora crassa
MFGPLSLNSRHRNAIVVRDPLTQRLEIRGLQLHECPTCHQPLRTSPESHVDDDSDRRESYVDPDYFRMLRDGHNGQTSSNPRPPSSPIRRLVRPVPAIDDRGNEVGVQNAEFVSSEPVPSETTRIKKEAFAPNYFETFFHEERTLGRGGKGVVMLVRHEIDGCNLGHFACKRVPVGDDHAWLGKVLVEVELLAKLSHPNLVSYRFSWVEDVKINKFGPKVACAFILQQYCNGGDLQQYVIGDLLKEPTIEQIKAQRRRRSKGFIERPSVTQRQLPFKEIFSLFKDITSGLAYLHTANYIHRDLKPSNCLLHREGGRTSCLISDFGEVQPENAVRVSTGSTGTISYCAPEVLIKDASGKYGNFTTKSDIFSLGMILYFMCFGRLPYANANSLHEELEDIDLLRSEITDWKGFEDERRERPDLPAKLYQLLKRLLAINPAERPSANEVLSAMKNESSLDGLGGNSTGSVPSIGLAGRRIQDLDSPMPPSTPMPGQSPAASSSDAPSLTVSEHTDHRHAKVSSSPDEDLPSSVDGYPPVSDTRQKGASDMLELGPVSRNGSVVAPHPSPPAITTPLLMPPPSTRLEQMRHCAVLTRYHAGMWLDANGLSLGVLLRLAFLAIKIFSLSWICWPYASNLSILTSVFALAILDLLHPVGRPEPRRGSNVMLGVPPPGSRRGSSYEQANNQNSQLHDHNGHMVRASPDIAPIYDNEQYRRAGTVVGWKTSVSLLLLHFAILWVTNHMGLLCAVGRWSHWPPPDLPHDEIV

SEQ ID NO: 12827 - protein, 525 aa, Streptococcus sobrinus
MAKDIKFSADARSAMVRGVDVLADTVKVTLGPKGRNVVLEKSFGSPLITNDGVTIAKEIELEDHFENMGAKLVSEVASKTNDIAGDGTTTATVLTQAIVREGLKNVTAGANPIGIRRGIERAVSTAVDELKAIAQPVANKEAIAQVAAVSSRSEKVGEYISEAMEKVGNDGVITIEESRGMATELDVVEGMQFDRGYLSQYMVTDNEKMVADLDNPYILITDKKISNIQDVLPLLEEVLKTSRPLLIIADDVDGEALPTLVLNKIRGTFNVVAVKAPGFGDRRKAMLEDIAILTGGTVITEDLGLELKNASIASLGQAAKITIDKDSTVIVEGAGSADAIAERVAVIKSQLESTTSEFDREKLQERLAKLSGGVAVIKVGAATETELKEMKLRIEDALNATRAAVEEGIVAGGGTALVNVIEKVTALDLAGDQATGRNIVLRALEEPVRQIARNAGYEGSVIIEKLKASKSGTGFNAADGSWVDMVEAGIIDPVKVSRSALQNAASVASLILTTEAVVADHPEEN

SEQ ID NO: 12828 - protein, 225 aa, Bacillus cereus G9241
MLFDLDDTLLNRDKAVDNFFLLVLEKCYEDVSDTVKNTMLQKFKEYDKREYGISDKTIVLESLFDEFAPKYRLPHNYIQDFWNENFPKCFSIDKNTIHFLHHIKKHFEVGIITNGSTQRQKAKIINTNLNNYFDTIIISEEVGFSKPDKRIFELALNKLNLQPENTLFVGDDLEKDIAGPQNANIKGVWFNPQKIKNTTKIQPYAEINTLDSLLSYVTPQYFFNK

SEQ ID NO: 12829 - protein, 526 aa, Streptococcus downei
MAKDIKFSADARSAMVRGVDVLADTVKVTLGPKGRNVVLEKSFGSPLITNDGVTIAKEIELEDHFENMGAKLVSEVASKTNDIAGDGTTTATVLTQAIVREGLKNVTAGANPIGIRRGIERAVSTAVDELKAIAQPVANKEAIAQVAAVSSRSEKVGEYISEAMEKVGNDGVITIEESRGMATELDVVEGMQFDRGYLSQYMVTDNEKMVADLDNPYILITDKKISNIQDVLPLLEEVLKTSRPLLIIADDVAGEALPTLVLNKIRGTFNVVAVKAPGFGDRRKAMLEDIAILTGGTVITEDLGLELKDATIASLGQAAKITIDKDSTVIVEGAGSADTIAERVAVIKSQLESTTSEFDREKLQERLAKLSGGVAVIKVGAATETELKEMKLRIEDALNATRAAVEEGIVAGGGTALVNVIEKVAALDLDGDQATGRNIVLRALEEPVRQIARNAGYEGSVIIEKLKASQAGTGFNAADGSWVDMVEAGIIDPVKVSRSALQNAASVASLILTTEAVVADHPEEKA

SEQ ID NO: 12830 - protein, 757 aa, Lactococcus lactis subsp. lactis Il1403
MKKSIIAFPRIGSNRELKFALEKYFRKEITEEELQTVAKEIRLENWKSQKEAGIDSPISNDFSFYDQTLDLSIALGAIPGSYKNLELSELDTLFALARGFQDEQNDVKARPMKKWFNTNYHYLVPEINKDTIIKANFSKLLNEYKEAKSAGFETRPTIIGPYTFLVLADYKSGATKDTVLSDVIVAFQTLLKELNQLGVEWLQIEEPALVLDQTEEEKKLFVSIYEELLKSKNNLNILLQTYFGDVRDSYKEIIKLDFDGIGLDFIEGRDSLALIQKYGFPKKKILFAGLVNGKNIWRNNYQKTLELLTALDEVADIVINTSCSLQHVPVTIKNETKLSKEILKHFSFATEKLNEIDEISDIYFNKNTSFLKKNVELFENERVRENSKLKQKLDKLTEKDFTRQPSLVERRASQSQSLNLPVLPTTTIGSFPQTAEVRKVRLQNKRGELRQADYDTFLEEKIKECLKLQEDIGLDVLVHGEFERNDMVEYFGEKLEGYVFTQKAWVQSYGTRCVKPPIVWTDVTRPEAMTVRWSAYAQSQTSKPVKGMLTGPVTILNWSFPREDISLKASTLQLALAVQEEVLDLEKAGIKIIQIDEAALREKLPLRKSDWYKEYLDWAIPAFRLVHSKVKPETQIHTHMCYSEFEDIIPSIDAMDADVISFEASRSELSIIDALKAHHFKTLVGPGVYDIHSPRIPSVKEIQNQLEKILDKLPIEQVWVNPDCGLKTRGNAETIPSLRHLVEATRVLRKEKVVYDK

SEQ ID NO: 12831 - protein, 215 aa, Brassica napus
MGPKAGTFVLFLLGLTFLSDARSFLHPTLSEEVTKNENVCTLCEEYVTSALTYLEKNETQTQILEDLHDRCSLIRGFEQQCITLVDYYLPLFFLHLESFQPHYFCKRMNLCGHVVALVEEARQDTCGVCHRTVSEILIKLQDPDTQLDVIELLLKGCKSFKNYEYEKKCKKLVFEYGPLILVNAEEFLVKNDICTLLRACPNKQTVLRLPGLADS

SEQ ID NO: 12832 - protein, 523 aa, Cryptococcus neoformans var. neoformans JEC21
MLAMTPPISSPEIIIIGAGVIGSALAYSLSHTGRKILLLERDLSEPDRIVGELLQPGGVAALAQLGMVDVLEGIDAAPVEGYCVVNGEEKVGVNYPQVDGNGHGKLIDEKVNGKNWHVATTSGLKEGRSFHHGRLISALRRKCIDQAPNVTVVEATVKDLLFCEHTNQVIGVSASFKSASGREPNVRKFYAPLTVIADGCFSKFRHHPALRTRVPDTRSHFVGLILQNCELPMKHYGTVCLTPNGPVLLYQIGNEKGEVRMLVDVKGKLPSVGDGSLKQHLIDNYLPYIPASLRSPLLDALSTQRLRSMPNSYLPPSIQGLRSNLQGAILVGDAYNMRHPLTGGGMTVAFNDAVLLTEYLKPGGKLRRKPWEDGLAPGREGLEDWDKIAERLREWFWERKQLSGVVNVLSMALYSLFGGSDKPDLAILREGCFKYFELGGECVAGPVGLLSALTPRPVQLFYHFFNVAFYSIYLLLIHGPPQRRTNGSVGAIAMLPLNLLLSFKVFYTACVVLLPFMLIEFRS

SEQ ID NO: 12833 - protein, 446 aa, Candida glabrata CBS138
MREVISINVGQAGCQIGNACWELYSLEHGIRPDGYLEEGLTKPKGGEEGFSTFFHETGAGKYVPRAIYVDLEPNVIDEVRTGPYKDLFHPEQLINGKEDAANNYARGHYTVGRDLLDDILERIGKIADQCDGLQGFLFTHSLGGGTGSGLGSLLLEQLSIEYGKKSKLEFAVYPAPQLSTSVVEPYNTVLTTHTTLEHADCTFMVDNEAIYDMCKKNLGITRPSFSNLNNLVAQVVSSVTASLRFDGSLNVDLNEFQTNLVPYPRIHFPLVSYAPILSKSKAYHESNSVPEITNACFEPGNQMVKCDPRTGKYMATCLLYRGDVVTRDVQQTVAQLKNKKTIQMVDWCPTGFKIGICYEPPTATPNSQLSAVKRAVCMLSNTTAIADAWKRIDRKFDLMYSKRAFVHWYVGEGMEEGEFTEAREDLAALERDYIEVGADSYGDEEF

SEQ ID NO: 12834 - protein, 507 aa, Pichia angusta
MSNPPVFTTSQGCPVSDPFTTQRIPLDSTGYKYAPPIGPLLLQDFKLIDTLSHFDRERIPERVVHAKGAGAYGVFEVTDDITDVCSAKFLDTVGKKTRIFTRFSTVGGEKGSADTARDPRGFATKFYTEDGNLDLVYNNTPIFFIRDPIKFPHFIHTQKRNPATNLKDPNMFWDYLTANDESLHQVMYLFSNRGTPASYRTMNGYSGHTYKWYNSKGEWVYVQVHFIANQGVHNLLDEEAGRLAGEDPDHSTRDLWEAIEKGDYPSWECYIQTMTLEQSKKLPFSVFDLTKVWPHKDFPLRHFGRFTLNENPKNYYAETEQIAFSPSHTVPGMEPSNDPVLQSRLFSYPDTHRHRLGPNYHQIPVNCPLKSGSFNPINRDGPMCVDGNLGGTPNYANAYNCPIQYAVSPKASGNKPDEKYTGEVVPYHWEHTDYDYFQPKMFWKVLGRTPGEQESLVKNVANHVSAADEFIQDRVYEYFSKAEPIIGDLIRKKVQELKRKASSPSKI

SEQ ID NO: 12835 - protein, 7510 aa, Streptomyces aizunensis
MGEVPMADQDKILGYLKRVTADLHQTRQRLREVEAQEPEPIAIVGMSCRFPGGIESPEGLWDLVAGGRDAITDFPTDRGWDIESLYDADPDQQGTSYTREGGFLDGVGKFDASFFGISPRETLGMDPQQRLLLETSWEAFERAGIDAATLRGSKAGVFIGTNGQDYPELLREVPKGVEGYLLTGNAASVVSGRISYTFGLEGPAVTVDTACSASLVALHLAVQALRNDECSLALAGGVTVMSSPRAFVQFSRQRGLAPDGRCKPFADGADGTGWGEGVGMLLVERLSDARRNGHPVLALVRGSAINQDGASNGLTAPNGPSQQRVIRQALTNAGLTPAQVDVVEAHGTGTTLGDPIEAQALLATYGQNRPEGRPLWLGSVKSNIGHTQAAAGVAGIIKMVLAMQHGVLPESLHIDQPSGNVDWAAGDVKLLTEAVPWPQTGQPRRAGVSSFGVSGTNAHTVIEQAPPADDAPETGADTAPTAEAPEAASADASEAGTPTGATGPVPVLVSGQSDAALRAQAERLAAHLRAHPGLGADTGTLTDLGFSLATSRSSLDRRAVLFGDRDSLLADLSALAEGEQPAGPVLGAVGEGKTAFLFTGQGSQRLGMGRELYATHPGFARALDEVRAELDQHLERPLFDVLFAAEGTPEADLLDETAYTQSALFAVEVALFRQLEQWGVGADFLIGHSIGELAAAHVSGVFTLADAAKLVAARGRLMQALPADGAMIAVEATEDEVAPLLTGRVSIAAVNGPRSVVVSGDEDAATALAETLRARGRRTKRLTVSHAFHSPLMDGMLDAFREVAESVAYAPPVIPIVSNLTGASVTAEEICAADYWVRHVREAVRFLDGVRKLSAQGVTTFVEVGPGGVLTALAQECVTGQDAVFVPVLRGDRPEAAAFATAVAQAHVHGVAVDWSAVFAGRGATRIDLPTYAFQRELYWPEQPTAWAGDVTAAGIGAADHPLLGAAIALADGDGHLFTGRLSLATHPWLADHTVMDTVLLPGTAFVELALQAGDHTGCDLLDELTLEAPLVLPPHGGVQIQLAVGAPDAEGRRSLTLHSRPEDAADDTWGEGAWTRHATGFLATAAQGAREPLADLTSWPPKNATKVDVEGLYAYLTESGFAYGPVFQGLTGAWQRGDEVFAEVRLPEQAHAEAALFGLHPALLDAALHAVGIGSLLEDTEHGRLPFSWSGVSLRAVGARALRVRLAPAGNDTVSVTLADETGAPVAAVDALLLRPVSPDQVHAARTAFHDSLFRVEWTGTPLPAATTVAAGQWALLGEPRTEFTAALPTAATHADLAALGAALDAGGPVPRAVIVPFSASGAPSATPVDAALPTAVADALHRTLELAQAWLADDRFAGSRLVFVTRDAVATTAGSDVADLAHAPLWGLLRSAQSEHPDRFVLLDLDGREDSLRALPAALATAEPQLALRAGKALVPRLARVAAAPGQEAPALDPDGTALVTGATGTLGGLVARHLVAAHGVRHLLLTSRRGEAAAGAAELAAGLRELGAEVTIAACDAADRDALAALIGSVPAEHPLTAVVHTAGVLDDGVLEALTPERIDAVLPAKVDAAVHLHELTRELDLAAFVLFSAAAGTLGGPGQANYAAANTFLDALAHRRRAEGLPATALAWGLWAERSGMTGDLADADLERISRAGVAALSSAEGLALLDTARAVGDPTAVPMHLDLASLRHADASMVPALLRGLVRAPARRSVESPGAAPAGGLAERLLPLTAAERDRLLLDTVRVQVAAVLGYPGPEAVDPGRAFKELGFDSLTAVELRNRLGSATGVRLPATLVFDYPTPNALSAFLRTELLGDAADSAPVAAVTARDDEPIAIVGMSCRYPGGVTTPEELWQLVAGSVDAISPFPTDRGWNLDALYDADPGRAGTSYTREGGFLHDAADFDPDVFGINPREALAMDPHQRLLLETSWEAFEQAGIAPSSMRGSRTGVFAGVMYHDYLTRLPAVPEGLEGYLGTGTAGSVASGRISYTFGLEGPAVTVDTACSSSLVALHLAAQALRNGECDMALAGGVTVMSTPDTFIDFSRQRGLSGNGRCKSFSADADGTGWAEGAGMILVERLSDARRNGHQVLAVVRGTAVNQDGASNGLTAPNGPSQQRVIRQALANAGLTTAEVDVVEAHGTGTTLGDPIEAQALLATYGQDRPAGQPLRLGSIKSNIGHTQAAAGAAGIIKMILAMRHGVMPPSLHIGEPSPHIDWTAGAVSLLTEAAEWPDAGRPRRAGISSFGVSGTNAHVIIEQPPVEEPATATETGSGTGLPAGTPLPFALSGRTPAALRAQAARLIGHLAPRPEAAPADVALSLATTRTALDRRAAVIAHDRTELLAGLTALAEGHDSARLVQHTAADGRTAILFTGQGSQRPGMGRELYETYPAFAEALDAVCAELDPHLEQPLKEVLFTADGDLLNRTGRTQPALFALETALYRLVESWGVRPDFVAGHSIGEITAAHVAGVLSLPDAATLVAARGRLMQELPEGGAMIALTATEDEVLPLLAGHEDRIGIAAVNSASSVVISGEEGLALEIAAEFERRGRRTKRLTVSHAFHSPLMDGMLDAFREVAESLTYRAPAIPVVTLLTGTVAGDELRTAEHWVSHVREAVRFLDGIRTLDAEHVTTYLELGPQGVLSGLGRDCLTDPADPADTAVFVPALRRDRGEAEALTAAIAAAHTRGVPLDWSAYFAGTGARRVELPTYAFQRERFWLEAPAGYIGDVESAGMGAAHHPLLGAAVALADGEGFLFTGRLSLDTHPWLADHAVMGNVLLPGTAFVELAIRAGDQAGCDLLEELTLEAPLILAPQAAARLQIVVGAPDGSGRRTLDVYSSDPDAPADEPWTRHAGGILATGAQAPAFDLTAWPPPGAEAVGVDGLYEHLGRGGFAYGPVFQGLRAAWLLGDDVYAEVALPDDRQAEAARFGLHPALLDAALHATFVQPSPDGDQQGRLPFSWRDVSLHAVGASALRVRLTPDGRDTLSLQLADTTGAPVAAVGHLTLRPVSADQLGSARSAHHESLFRIDWATVPLPSDAPAATDEWAVIAADGGTDGGTDGGTDGGIPAALPGRVHTGLDALGAAVDAGAPVPAHVLVHHTPAATTADAVHAATHEALRLVRAWLADDRFAASRLVFVTRGAIATQSDWDLTDLTHAPVWGLVRTAQSENPDRFVLADLDADPASTDALAAALATGEPQLAVRRGTVHAPRLARVPAATPLTPPPGESAWRMDIEDKGTLDHLTLVPSPESAAPLEPGQVRVAVRAAGLNFRDVLNALGMYPGDPGLMGSEGAGIVVETGPGVTGLAPGDRVMGMLPGSFGPLAVVDRRMIAPMPEGWTFAEAASVPIVFMTAYYALHDLAGLQGGESLLVHAAAGGVGMAAVQLARHWGADVYATASPAKWDTLRGLGLGDDRIASSRTLDFEETFRTATGGRGVDVVLDSLAREFVDASLRLLPRGGRFVEMGKTDVRSPQDVADAHPGVSYQAFDLTEAGLDRIQEMLTELLTLFRSGALRPVPVSAWDLRQAPEAFRYLSQARHVGKIVLTLPGEWNSQGTVLITGGTGTLGAVVARHAVTTRGARRLLLTSRRGEAAAGAAELAAELRELGAEVTIAACDAADRDALAALIESIPSEHPLTAVIHTAGVLDDGVVDSLTPERLSTVLRPKVDAAWNLHELTRHLDLADFVLFSSAAGTFGGAGQANYAAANVFLDALARHRHAHGLAATSLAWGLWAEASGMTGELDTADKDRMTRSGVLGLSSEEGVALLDTARLTGDALLVPMHLDLAPLRRTDASMVPALLRGLVRAPARRAVGATAAGAGTPLVERLVRLPENERDPLLLDLVRQQVAAVLGHATPDAVEPTRAFKDLGFDSLTAVEFRNRLGATAGIRLPATLVFDYPTPTVLAGYLKDELLGSEAAAALPKLAATAVEGDDPIAIVAMSCRFPGDVRTPEDLWELLAEGRDGISDLPDDRGWDTEALYDPDPDSPGTSYAREGGFFYDAHHFDPAFFGINPREALAMDPQQRLLLETSWEAFERAGIDPTGLRGKQVGVFVGQMHNDYVSRLNTVPEGVEGYLGTGGSSSIASGRVSYTFDFEGPAVTVDTACSSSLVALHLAAQALRNGECTLALAGGVTIITTPDVFTEFSRQRGLASDGRCKPFAEAADGTAWGEGVGMLLVERLSDARRNGHQVLAVVRGTAVNQDGASNGLTAPNGPSQQRVIRQALANAGLTAAEVDAVEAHGTGTRLGDPIEAQALLATYGQDRPEGSPLWLGSIKSNFGHTQAAAGVAGIIKMVQAMHHGVLPKTLHVDAPSPHVDWSAGAVSLLTEQMAWPETGRPRRAGVSSFGMSGTNAHAIIELAPDAATPSAARPEPAPAALPWNLSARTPDALRAQGERLLSHLETHCETHPETVLADIGHSLTTGRALFEHRATVVAGDRDGFRAGLAALAEGRTAAGLIQGSSSTGGRTAFLFTGQGSQRLGMGRELYEAYPVFARALDEVCARLELPLPLKDVLFGTDTGLLNETAYTQPALFAVEVALFRLVESWGLKPDFLAGHSIGEIAAAHVAGVLSLEDACALVSARGRLMGALPGGGVMIAVQASEGEVLPLLTDRVSIAAINGPQSVVIAGDEADAVAIVESFSDRKSKRLTVSHAFHSPHMDGMLDDFRAVAEGLSYGAPRIPVVSNLTGALVSDEMGSADFWVRHVREAVRFLDGIRALEAAGVTTYIELGPDGILSAMAQECITGEGAAFAPVLRAGRDEAETVLSALAAAHVRGVPVDWQAFYAPAGAQRVPLPTYAFQRSVYWLDAGRAQGDIASAGLGATDHPLLSAAVELPDSDGFLFTGRLSLATHPWLADHAVLGSVLLPGTAFVELALRAGDQVGCDLIDELTLEAPLVLPPHGGVQLRLAVAAADATGRRTLAFHSRSEDADAGTPWTRHASGVLAVGAERTPQSLTEWPPTGAESVPVDGLYEGLAESGFGYGPVFQGLRAAWRRDGEYYAEVALPEGTEDEAGRFGLHPALLDAALHALGLGSTDTEGGEGRLPFSWSGVHLHAVGASALRVRLTTSRSGEVALTIADAAGEPVATVAGLALRAVSREQLSTARDLTRDALFRVDWTALPAGGAVGSLDDWMLLGAGSQVYADLAGLGVAVAEGGGIPAALVVPVSEPDAESAAGGVAGTVHAAVERALSLVQEWLSDERFADARLVFLTRGAVAARAGDTVPGLVQAAVWGLVRSAQSENPGRFALIDVDGDGDGDGEVDGDVLSAALATGEPELAVREGALLVPRLARAAVVEGAGRELDVDGTVLVTGASGTLGGLFARHLVVERGVRRLLLVSRRGEAAEGAAELGAELTELGADVRWAACDVADRDALEAVLAGIPAEYPLSGVVHTAGVLDDGVVSSLTPERLSAVLRPKVDAAWNLHELTRGLDLSLFVLFSSAAGVFGGAGQANYAAANVFLDALAQHRRAQGLAATSLAWGLWAGVGGMGGELTESDRERINRGGITALEPETGLALFDAAQRTTDALLVPLPLDLAALRVQAGSGMLPDLLRGLVRVPVRRAAGQGSAAGGGSVLRTRLAAMPADERDAALLDLVRAEVAAVLGHASTDEVPADRAFKELGFDSLTSVELRNRLGATTGERLSATLVFDYPTPHALAEFLRTEVLGLDEPTDTATTAPTHLGTSLDDDPIAIVGMSCRYPGGVETPEDLWRLVVGGGDAISEFPQGRGWDLESLYDPDPDGKGTSYTRSGGFLHDAGRFDPAFFGISPREAVAMDPQQRLLLETSWEAFERAGIDPASMRGSRTGVFAGIMYHDYATRITSVPDGVEGYLGTGNSGSIASGRVSYAFGLEGPAVTVDTACSSSLVALHWAIQALRNGECTMALAGGVTVMSTPGTFTEFSRQRGLAADGRIKSFAAAADGTSWAEGAGMLLVERLSEARAKGHPVLAIVRGSAINQDGASNGLTAPNGPSQQRVIRQALAGARLTSDQIDVVEAHGTGTTLGDPIEAQALLATYGREREADQPLWLGSIKSNMGHTQAAAGVAGIIKMIMAIRHGVLPKTLHVDEPTPHVDWEAGAVSLLTESVPWPETGRPRRAGVSSFGISGTNAHTIIEQAPEEFVPVRVTESQTPGAGSRVLPFVLSAKSAGALRGQAVRLKAHVEASPEVSGAGAVDVAYSLATRRAVFDHRAVVVAGDREELLRSLAAVESEGAAAGVTRGAVGGGKLAFLFTGQGSQRLGMGRELYETYPVFARALDAACARLELPLKDALFGTDAGLLGETAYTQPALFAVEVALFRLLESWGVRPDFLAGHSIGEIAAAHVAGVLSLDDACALVEARGRLMQALPTGGVMIAVQASEAEVLPLLTDRVSIAAINGPQSVVIAGDEADAVAIVESFSGRKSKRLTVSHAFHSPHMDGMLAGFRKVAESLSYEAPRIPVVSNLTGALVTDEMGSADFWVRHVREAVRFLDGIRTLEAAGVATYVELGPDGVLSAMAQDCVTGEGAAFAPALRKGRPETETITTALALAHAHGTSVDWETYFAGTGAQGVELPTYAFQRDWYWLNSAVVQAGPGDASGFGLGATDHPLLDATIELPDSDGFLFTSRLSLDTQPWLADHAVLGSVLLPGTAFVEIAVRAGDQVGCDVLEELTLEAPLVVPERGGVQLRLTVAAADESGRRGLSLYSRDEDAPADEPWTRHASGVLATGAAAPDFDLAAWPPAGAEPVDIDGLYEGLAAAGFDYGPAFQGLRTAWLHGDAVYAEVSLDEESAESAEWFGLHPALLDATLHAAGLGGLVESTGQGRLPFAWSNVSLHAAGASAVRVRLAPAGRDAVSLQLADAAGAPVASVESLVLRAVSPDQIGAARGGRHESLFEIDWAALPLAPVSAAEQRPWALLADDGSGHAGLEAVGVRHEAHTGLAALADTGRAIPEVVCVPLAAANSQDLAGAGAVHAAVERALGLVQEWLSDERFADARLVFLTRGAVSAVPGEDVTDLVHAPVWGLVRSAQSENPGRFVLADTDGTDASYRALTAALASGEPEFTVRGGAVRVPRLTRSTAVAVEAVPELGSDGTVLVTGASGTLGGLFARHLVVERGVRRLLLVSRRGGAAEGAAELGAELTELGADVRWAACDVADRDALESVLAGIPAEYPLSGVVHTAGVLDDGVVSSLTPERLSAVLRPKVDAAWNLHELTRGLDLSFFLLFSSAAGVFGGAGQANYAAANVFLDALAQHRRAQGLAATSLAWGLWAEPGGMAGALDADDVSRLGRGGVSGLSAQEGVALFDAASASEQALFVPVKLDLAALRAQAGSGMLPPLLSGLVRTPTRRAAGTGGTGDTGTDGGTALRERLAGLAPAARDEALLELVCTYVAAVLGFAGPEAVDPARSFSEVGFDSLTAVELRNRLGAATGVRLPATLVFDYPTPDALVEYLRDELWQDGAAAVPPLLAELDRLEKTLVASVPDDDGRTRITERLQALLAAWSEAGESTDTADADVAEALETATDDDLFDFIGKEFGIS

SEQ ID NO: 12836 - protein, 443 aa, Polytomella agilis
MREIVHIQGGQCGNQIGAKFWEVVSDEHGIDPTGTALGDSDLQLERINVYFNEATGSRYVPRAILMDLEPGTMDSVRSGPYGQIFRPDNFVFGQTGAGNNWAKGHYTEGAELIDSVLDVVRKEAESCDCLQGFQVCHSLGGGTGSGMGTLLISKIREEYPDRMMLTFSVVPSPKVSDTVVEPYNATLSVHQLVENADECMVLDNEALYDICFRTLKLTTPTFGDLNHLISAVMSGITCCLRFPGQLNADLRKLAVNLIPFPRLHFFMVGFTPLTSRGSQQYRALTVPELTQQMWDAKNMMCAADPRHGRYLTASALFRGRMSTKEVDEQMLNVQNKNSSYFVEWIPNNVKSSVCDIPPKGLKMSATFIGNSTAIQEMFKRVSEQFTAMFRRKAFLHWYTGEGMDEMEFTEAESNMNDLVSEYQQYQDASAEEEGEFGEEEEEN

SEQ ID NO: 12837 - protein, 157 aa, Lactococcus lactis subsp. lactis Il1403
MNFYDFSAFKMNGETVSMSDFKGKVVIVVNTASKCGFTPQFEGLEKLYENYKDQGLEILGFPCNQFVNQDAGENSEINEFCQLNYGVTFPMFQKIKVNGKEAHPLYQFLKKEAKGALSGTIKWNFTKFLIDREGNVIERFAPKTEPKEMEEEIQKLL

SEQ ID NO: 12838 - protein, 153 aa, Triticum aestivum
MASGQQERSELDRMAREGETVVPGGTGGKTLEAQEHLADGRSRGGQTRKEQLGEEGYSEMGHKGGETRKEQLGEGGYREMGRKGGETRKEQLGEEGYREMGHKGGETRKEQLGEEGYREMGRKGGLSTMEESGGERAAREGIEIDESKFKTKS

SEQ ID NO: 12839 - protein, 159 aa, Bacteroides fragilis NCTC 9343
MKNEEYTYLGGLMQGIGSLLTGMKTTIKVYFRKKVTEQYPENRAELKMFDRFRGTLNMPHNENNEHRCVACGLCQMACPNDTIKVTSETIETEEGKKKKILAKYEYDLGSCIFCQLCVNACPHDAITFDQVFEHAVFDRTKLVLQLNREGSKVIEKKKE

SEQ ID NO: 12840 - protein, 209 aa, Glycine max
FPQRCCTMSSSLIANPTADRSRDSHRTKKKKKSLKQHQLQHEQSHAKWKSHAQQQLYSSKLHHALARVNISGDAPRRGRAVREAADRVLAVAAKGRTRWSRAILTNRLKLKFRKPIHKRQKVVVGPGRPKKARFSVLRLKGKTLPAVQRKVRVLGRLVPGCRKEPLPVILEEAIDYIPALEMQVRAMQALADLLLGSSSASTSAAAPPS

SEQ ID NO: 12841 - protein, 484 aa, Mesorhizobium loti MAFF303099
MYLGLDLGTSGVKALLIDAGQTVVGSGHGSLDVSRPHPGWSEQDPSHWIRACEDAIAELKASHPRQFAAVKGIGLSGQMHGATLLDAADHVLRPCILWNDTRSHVEAAVLDADPRFRKLTGNIVFPGFTAPKLAWVKNNEPAVFAKVAKVLLPKDFLRLWLTGEHISEMSDSAGTSWLDVGKRRWSAELLAATSLDEKQMPSLVEGTEKAGGLRAELASKWGVEAGIPVAGGAGDNAASACGMGTVGAGHAFVSLGTSGVLFAANASYLPNPASAVHTFCHALPDTWHQMGVILSATDSLNWLSEITGKGAGELTAELGDTLKAPTGVSFLPYLSGERTPHNDSAIRGSFTGLAHESSRAVLTQAVLEGVAFAFRDSLEALKTAGTTLTRVTAIGGGSRSRYWLKSIATALQVPVDIPADGDFGAAFGAARLGLIAATGADPLAVCSAPRTDATIEPDAKLGGAYADAYHRYRALYPAIRGATA

SEQ ID NO: 12842 - protein, 578 aa, Bacillus halodurans C-125
MKATIYHRPKSEDAYAYDKSTMHIRLRTGKNHVRKVNLIYGDPYDWTKNQWVTSKKEMTPTGSDAQHDFWFVEVTPPYRRLRYGFEIITKTETIYYGESGFLDTPSKDTSDYFCFPFMNPADLFSPPEWVKDTVWYQIFPERFANGDPSRNPEGTLPWGSAAPTPTNHFGGDLQGIIDHLDYLQELGINGIYLTPIFEASSNHKYDTIDYLKVDPHFGDKTTFKRLVDECHKRGIRIMLDAVFNHAGFYFPPFQDVLKNQQHSKYSDWFHLRDFPVRAEEPPNYDTFAFTPFMPKFNTENEEVREYLLNVATYWIKEFDIDGWRLDVANEVDHAFWREFRKRVKALKPDLYILGEVWHNSLPWLAGDQFDAVMNYPLTNAIIDFAGKQKIGQQRFEHVITQLTHMYPIHVQQVAFNLLGSHDTPRILTQTDNDVARVKLQFLLLFSQRGTPCIYYGDEIGMTGGQDPGCRKCMVWEEEEQNQELLSFVKRLIQLRKQEKAFGTEGDLTFVENDSSLLIYQKTYENQQLLFVINSTDQPDSVQLPVSWTNRNANDLLTGETFSLATEIVIPAKSAMVLK

SEQ ID NO: 12843 - protein, 323 aa, Magnetospirillum magnetotacticum MS-1
MPPDETPEILLIRQTRPDVAGRLSERFRLHRLEEAPDRDAFLGAAGPRIRGLAVGAMCPIDARLFDRLPRLEIVASFGVGYDSIDVAEAHRRGIVVTNTPDVLSDEVADLALGLLLATIRRIPQADRYLRAGRWREGSFPLTTSLRERRVGILGLGRIGRAIARRLEGFGVAIAYHGRTPQADVAYTYHDSLLGLAKAVDVLIVASPGGPGTRGLVDAAVLAALGPEGIVVNIARGSVIDEAALIAALQAGTIHGAGLDVFENEPQVPQALIDLDQVVLLPHVGSGSHQTRAAMGRVLTDNLFSWFDGKGPVTPVPETPWTGR

SEQ ID NO: 12844 - protein, 256 aa, Peridictyon sanctum
CELDNIMRLTGITGIVNGMDVSEWDPTKDKFLAVNYDVTTALEGKALNKEALQAEVGLPVDRKVPLVAFIGRLEEQKGPDVMIAAIPEIVKDEDVQIVLLGTGKKKFERLLKSVEEKFPGKVRAVVRFNAPLAHQMMAGADVLAVTSRFEPCGLIQLQGMRYGTPCACASTGGLVDTIVEGKTGFHMGRLSVDCNVVEPADVKKVATTLKRAVKVVGTPAYHEMVKNCMIQDLSWKGPAKNWEDVLLELGVEGSEP

SEQ ID NO: 12845 - protein, 321 aa, Hydrangea macrophylla
MAFTIPEVPLSSGGRKMPVLGLGTAADPPVDPETVRKAVTEALKLGYRHFDTAALYNSEQPLGDAIAEALGEGLIKSRDELFITSKLWCSDAHRENVEPALQKTLKNLKLEYIDMYLIHWPVSSKPGNYEYPIKKEDFLQMDYKSVWEAMEECQKLGLTKAIGVSNFSCKKLSDVLANAKVPPAVNQVEVNPCWQQKQLTEFCKSNGILVVAYAALGAVGTFYGTNRVMGSEVLNEIARIRGNTVAQVCLRWAYEQGIGVLVKSFNKERMEQNLQIFNWTLSDDESKKISEIPQGRACLGTDYTSVHGPFKTIEELWDGEF

SEQ ID NO: 12846 - protein, 161 aa, Paxillus involutus
VVLIGDSGVGKSNLLSRFTRNEFNLDSKSTIGVEFATRSINVDSKTVKAQIWDTAGQERYRAITSAYYRGAVGALLVYDISKHATYVNVTRWLKELRDHADSNIVIMLVGNKSDLKHLRAVPTEEAKNFSAENELSFIETSALDASNVESAFQTILTDVYR

SEQ ID NO: 12847 - protein, 256 aa, Psathyrostachys fragilis
CELDNIMRLTGITGIVNGMDVSEWDPTKDKFLAINYDATTALEAKALNKEALQAEVGLPVDRKVPLLAFIGRLEEQKGPDVMIAAIPEIVEEEDVQIVLLGTGKKKFERLLKSVEEEFPGKVRAVVRFNAPLAHQMMAGADVLAVTSRFEPCGLIQLQGMRYGTPCACASTGGLVDTIVEGKTGFHMGRLSVDCNVVEPADVKKVATTLKRAVKVVGTPAYQEMVKNCMIQDLSWKGPAKNWEDVLLELGVEGSEP

SEQ ID NO: 12848 - protein, 324 aa, Hydrangea macrophylla
MASNYSNIPEVSMSSSSRKIPIVGLGTATFPPVGSKTVVAAVLQAIQIGYRHFDTASVYQTESDLGEAIAEALRLGLIKSREELFTTSKLWCSDAHAQHVVPTLQKTLKNLNLDYLDLYLVHWPVSVKHGTYDYPIKTEDIIPMDYESVWGAMEECHKLGLAKAIGVSNFSCKKLGHLLSFAKIPPAVNQVEMNPVWQQRKLVEFCKENGVLVGAFSPLGALGTSWGSNNVMESEILKEIAKAKGKTVAQVSLRWAYEQGVIVLVKSYRAERMQENLGIFDWELSDEDTKKIREIPQRRVHRGEEFISENGPFKSIEEFWDGEL

SEQ ID NO: 12849 - protein, 481 aa, Xylella fastidiosa 9a5c
MRPLPTLLTLSIAAAFGGFAATGMNAWLDNRAEAASNTNAISPISSLPTGTVPQTTAANQPLPSLAPMLQQVMPAVVSINSKQVVRVRNPFFDDPILRRLFPEIPQERINESLGSGVIIDARNGYVLTNHHVIENADAVQVTLADGRSFKAEFLGSDADTDIALIRIKANKLTEIKLADSNKLRVGDFVVAIGNPFGFTQTVTSGIVSAVGRSGILGLGYQNFIQTDASINPGNSGGALVNLHGQLVGINTASFNPQGSMAGNIGLGLAIPSNLARNVVEQLVTKGVVVRGTIGVQTQNIDARMARSLGLSNPHGALVTRVLPNSAGATAGLQPGDVILAANDQRVDNAETLHNYEGLQPVGSSVTLEVHRGGKPLKIRLTLKELPRAIAGETLDSRLSGAIFVDLPESLRQSGVGGVMVNKVKHGSRAAANGLVAGDVIIAASIGGFSDLASWRASFSHPPQRLILRVLRDNTQYDALMR

SEQ ID NO: 12850 - protein, 230 aa, Methanococcus maripaludis S2
MEKNDIFVVIPAYNEEKMIKNTLINLKSHGYENIIVVDDGSRDNTSKIAISEEVIVCKHIINRGLGGALKTGLKCAVKYNPKVIVTFDADGQHDPEDIFKVSEPILEDSFDVVVGSRLIDENELKNMPLIKKIGNWGLNFITYLMGGRMVTDSQGGLRAFSYDAAEIVSKQLKSNRYEVSSEFIVLFKKNNLKFKEVPIKTIYTEYSMARGTNVITGFKILFKLLIQKLI

SEQ ID NO: 12851 - protein, 256 aa, Psathyrostachys juncea
CELDNIMRLTGITGIVNGMDVSEWDPTKDKFLAVNYDATTALEAKALNKEALQAEVGLPVDRKVPLVAFIGRLEEQKGPDVMIAAIPEIVEDDGVQIVLLGTGKKKFERLLKSVEEKFPGKVRAVVRFNAPLAHQMMAGADVLAVTSRFEPCGLIQLQGMRYGTPCACASTGGLVDTIVEGKTGFHMGRLSVDCNVVEPADVKKVAITLKRAVKVVGTPAYQEMVKNCMIQDLSWKGPAKNWEDVLLELGVAGSEP

SEQ ID NO: 12852 - protein, 484 aa, Pirellula sp. 1
MLDFGTAGTQTLGRREIIGTAVEQRASDEQRSNIGQSKLNQRVFLWSLTSSLAGFLFGFDTVVISGAEKAIQGLWALGDFQHGLALSAALWGTVIGSLVGGWPTDKFGRKKTLLWIGILYLVSAIWSGFATDVFSFMIARFIGGLGVGISTVAAPLYISEISPPKHRGTLTGLFQFNIVFGIMVAFASNYLIGTWGNENAWRWMLAVEAIPALIFTVMCISLPSSPRWLIAVKKDQAAGMSVLKQLRPDASDEEVQRTVDEIVASLRAESDLTPAEPFWSRRLFTPISIAFLVAFFNQLSGINAVLYFSPRIFELAGMGEQAALLQSIGIGITNLIFTFVGLYLIDRLGRRTLLLIGSAGYILSLGTCAYAFQSETFSIVPACIFAFIASHAMGQGAVIWVLISEVFPNEHRAAGQSLGSFTHWIFAALLTLVFPAVVETFHPAAIFGFFCFMMVLQGLWVITMLPETKGISLEQMEAKLGIRV

SEQ ID NO: 12853 - protein, 161 aa, Paxillus involutus
VVLIGDSGVGKSNLLSRFTRNEFNLDSKSTIGVEFATRSISVDGKTVKAQIWDTAGQERYRAITSAYYRGAVGALLVYDISKHATYVNVTRWLKELRDHADSNIVIMLVGNKSDLKHLRAVPTEEAKNFSTENELSFIETSALDASNVESAFQTILTDVYR

SEQ ID NO: 12854 - protein, 256 aa, Pseudoroegneria spicata
CELDNIMRLTGITGIVNGMDVSEWDPTKDKLLAVNYDVTTALEGKALNKEALQAEVGLPVDRKVPLVAFIGRLEEQKGPDVMVAAIPEIVKDEDVQIVLLGTGKKKFERLLKSVEEKFPGKVRAVVRFNAPLAHQMMAGADVLAVTSRFEPCGLIQLQGMRYGTPCACASTGGLVDTIVEGKTGFHMGRLSVDCNVVEPADVKKVATTLKRAIKVVGTPAYHEMVKNCMIQDLSWKGPAKNWEDVLLELGVEGSEP

SEQ ID NO: 12855 - protein, 391 aa, Pseudomonas fluorescens PfO-1
MPRHQHILAWLNDVASDLHATRQDIHAHPELGFEESRTSALVARSLEEWGYEVHTGVGKTGVVGVLRNGSSTRKLGLRADMDALPIIENTGVAYSSRHQGCMHACGHDGHTAMLLGAARYLAATRQFDGTLTLIFQPAEEGQGGAEAMLADGLLERFPCDALFGMHNMPGLPAGHLGFREGPMMASQDLLTVTIEGVGGHGSMPHLAVDPLVAAASVVMALQTVVARNIDAQQAAVVTVGALQAGEAANVIPQQAILRLSLRALNAEVRVQTLDRVRSIIEAQAESFGCTSTIEHRPAYPVLVNHAAETEFARQVGVELVGTDAVDGNTPKLMGSEDFAWMLQRCPGAYLFIGNGVARPMVHNPAYDFNDDILLTGAAYWGALTESWLKPA

SEQ ID NO: 12856 - protein, 256 aa, Secale montanum
CELDNIMRLTGITGIVNGMDVSEWDPTKDKFLSVNYDVTTALEGKALNKEALQAEVGLPVDRKVPLVAFIGRLEEQKGPDVMIAAIPEIVKEEDVQIVLLGTGKKKFEKLLKSIEEKFPSKVRAVVRFNAPLAHQMMAGADVLAVTSRFEPCGLIQLQGMRYGTPCACASTGGLVDTIVEGKTGFHMGRLSVDCNVVEPADVKKVVTTLKRAVKVVGTPAYHEMVKNCMIQDLSWKGPAKNWEDVLLELGVEGSEP

SEQ ID NO: 12857 - protein, 175 aa, Triticum aestivum
MAPIVMASSGISVAPFQGLKSTAGLPVSRRSNGASLGSVCNGGRIRCMQVWPIEGIKKFETLSYLPPISTEALLKQVDYLIRSKWVPCLEFSKVGFIFREHNASPGYYDGRYWTMWKLPMFGCTDATQVINEVEEVKKEYPDAYVRIIGFDNMRQVQCVSFIAFKPPCCEESGKV

SEQ ID NO: 12858 - protein, 296 aa, Staphylococcus aureus subsp. aureus COL
MKIVIIGGFLGGGKTTVLNHLLAESLKESLKPAVIMNEFGKMSVDGALVSEDIPLSELTEGCICCAMKADVSEQLHQLYLKEQPDIVFIECSGIAEPVSVLDACLTPILAPFTTITHMIGVIDASMYKHIKSFPKDIQGLFYEQLAYCSVLFVNKIDSADVETTSKLLKDLEVINPEADIQVGMHGSVTLPISVRQMTATSDNKHKSLHQMINHQFVQSPVKCTKAEFIKRLACLPSHIYRLKGFMTFEDTAHTYLIQFTQGQYELTPVAFSKKVPEYLVLIGKGISKEDYQCLEQ

SEQ ID NO: 12859 - protein, 339 aa, Crinipellis perniciosa
MVKVGINGFGRIGRIVLRNALQLQDIDVVAVNDPFIDLEYMVYMFKYDSVHGRFDGTVETKDGKLVINGKSIVVYGERDPAAIPWGSVGAHYIVESTGVFTTIEKASAHLKGGAKKVVISAPSADAPMYVCGVNLDTYDSSHTVISNASCTTNCLAPLAKVIHDKFGIVEGLMSTIHATTATQETVDGPSNKDWRGGHGINNNIIPSSTGAPKADSKVIPSLHGKLTGLSFRVPTPDVSVVDLVVRTEKACSYDDIKVAIKEAANGSLKGILTYTEENVVSTDFVGNNASSIFDATAGIQLNKNFVKLIAWYDNEWGYSRRVCDSCRRMTRRWADKWFN

SEQ ID NO: 12860 - protein, 190 aa, Zea mays
  misc_feature (77)..(77): Xaa can be any naturally occurring amino acid
  misc_feature (102)..(102): Xaa can be any naturally occurring amino acid
  misc_feature (111)..(111): Xaa can be any naturally occurring amino acid
  misc_feature (136)..(136): Xaa can be any naturally occurring amino acid
  unsure (1)..(190): unsure at all Xaa locations
MAEGFRLLHLVRAFLALLPEVQSAHRKITVTEKKLSTLLFPSYIFLCCSQIPLYGIHSTTAADTFYWMRVILASKRXALGMELRITPSGTSVMTMQLLDASXIIEDDDRVXREDRALLNGAQKLLASLTAMVEAVXYVLCAMYVSVRQPGTDDAILIILQLFLAGIIVIWLHELLQKGYGLRSGMSLFIA

SEQ ID NO: 12861 - protein, 477 aa, Bacillus cereus G9241
MTTSKKLPKYRQIVDYMKEKIENGEWPIGSKIPSQRQLAKSFQVNRSTVITALDELMADGLIQGEIGAGTIVTNNTWSLLATNPPPDWSEYVKAGIHKPSKLMVREINEAEANNKLIHLSKGELSPHLFPLETMQSIIKKVSEELDYFGYEEQKGFYPLREAISKYVKSFGIQASPSSILIVSGALQALQLISIGLLHRESTVLLEQPSYLYSLHVFQSANINLSGISMDPHGILPNELLKRIKYSQKKNILYSIPCFQNPTGVLMSKERRKEILKICEKEQLPIIEDDIYRELWIDEPPPVPLKSIDKHGHVLYIGSLSKTLSPGLRIGWIIGPEPVIDRLSDIKMQTDYGSSSLSQRVAAEWINKGFYEEHVAIVRIKLKERRQIMIRALDKYCADIATWDIPSGGFFIWLKVVPSIPMKKLFSKALSKGILLNPGRIYEEESDRYIRLSYGYASPEQMTNGIKLLSELIRKLMT

SEQ ID NO: 12862 - protein, 420 aa, Tropheryma whipplei str. Twist
MGDELENVTGSDATDEVLATARRIAVSSGKGNFKVPKLRQKLKLVAKKMKPKCILHKYVWFALVIVAVAFLSGFTSSVVTYRLLSSDQQKESPLLPLTPPIYSSGTKELDLPSATAKRVISSVVTIQVSAGNGMSGSGSGVVFNDNGDIVTNAHVVTLDGRVDKPDLRVLARDGRRYKAVLVGVDRMLDIAVVRIKPRALPAITFGDSSAVTVGSSVIAVGAPLGYDFSVTRGIISSVLRSINLTSFGLAGQVNAVPVIQTDAAINPGNSGGPLVDLNGRLIGINVAIASAGLFSSGNVGVGFAIPSNLVHRVATALAANRPVSHGYLGVSVSDGSDRDESYEGAVVKSVTPGSPADTAGLKPGDLLLSIGGNKISNMIDLVAFVRSRPGGTPVPIRVERNGKEISLTVTLSSLEEIKGT

SEQ ID NO: 12863 - protein, 530 aa, Candida glabrata CBS138
MFRPVLKVRPSFSYPYSIVSSRSVRLASTATANANTAAATSTVAAHGTQETPFDFEGHFESELAKKRLDKSYRYFNNINRLAKEFPLAHRQLEDDKVTVWCSNDYLALSKNPQVLDAMRKTIDKYGAGAGGTRNIAGHNIPTMRLEAELAALHKKEGALVFSSCYVANDAVISLLGQKVKDLVIFSDELNHASMIVGIKHANRPKHIFRHNDLAQLEEMLQMYPKSTPKLIAFESVYSMAGSVADINKICDLAEKYGALTFLDEVHAVGLYGPHGAGVAEHCDFEAHRVAGIATPPQGDNGRLRTVMDRVDMITGTLGKSFGTVGGYVAASSKLIDWVRSYAPGFIFTTTLPPAVMAGAAEAIRFQRSHLNLRQDQQRHTAYVKKGLHDLGIPVIPNPSHIVPVLIGNPDLAKQASDILMEKHRIYVQAINFPTVSRGTERLRITPTPGHTNDLSDILIAAVDDVFNELQLPRIRDWEMQGGLLGVGDKNFVPEPNLWTEEQLSFSNEDLNSNVFEPVIDQLEVSSGVKL

SEQ ID NO: 12864 - protein, 200 aa, Haemophilus somnus 2336
MLNKEIIARYEGLIFDMDGTVIDTMPCHKQAWELVGAEMGYALDGDVMYQLGGAPVRTIAKAIMEKAQMPLYLMEDVISLKRKYGIELIMKNATLLPAADIVKQYVGQKPLALGTGSHRYVTEMLLEKFQLQSYFGAIVTAEDVINHKPEPDTFLRCAELLNLDPLKCLVFEDADLGVQAGLAAEMDVFDVRVNQIITSK

SEQ ID NO: 12865 - protein, 490 aa, Saccharomyces cerevisiae
MEATSSALSSTANLVKTIVGAGTLAIPYSFKSDGVLVGVILTLLAAVTSGLGLFVLSKCSKTLINPRNSSFFTLCMLTYPTLAPIFDLAMIVQCFGVGLSYLVLIGDLFPGLFGGERNYWIIASAVIIIPLCLVKKLDQLKYSSILGLFALAYISILVFSHFVFELGKGELTNILRNDICWWKIHDFKGLLSTFSIIIFAFTGSMNLFPMINELKDNSMENITFVINNSISLSTALFLIVGLSGYLTFGNETLGNLMLNYDPNSIWIVIGKFCLGSMLILSFPLLFHPLRIAVNNVIIWIEITYGGANPEEDPQVSEYTRASNLRPISMTVEDPAQPSDALDATSYNEQECLLPNGNFDNGSIESQENNNDERGTMAVAGDNEHHAPFVKSRFYWITALLLISMYTLALSVQSFALVLSFVGATGSTSISFTLPGLLGYKLIGLDSLAIGKMIPPKDRFYKRCSLLLVFYGLSVMFLSLYVTVFNRSDEA

SEQ ID NO: 12866 - protein, 331 aa, Ashbya gossypii ATCC 10895
MVKVAINGLGKIGRLVMRIALSRANVEVVAINDPFITVDYAAYMFKYDSTHGKYAGDVQYEGNTLVIDGKKIKVFQERDPAQLPWGEEGIDIAIDSTGVFKELDSAQKHIDAGAKKVVITAPSSTAPMFVMGVNEEKYAGETIVSNASCTTNCLAPLAKVIDEQFGIEEGLMTTVHSLTATQKTVDGPSMKDWRGGRTASGNIIPSSTGAAKAVGKVLPQLNGKLTGMAFRVPTVDVSVVDLTVKLNKETTYDEIKAAIKAASEGKLKGILGYTEDAVVSTDFLGDNNSSIFDASAGIMLSPKFVKLVSWYDNEYGYSTRVVDLVEHVAAN

SEQ ID NO: 12867 - protein, 223 aa, Sorghum bicolor
IENKISRQVTFAKRRNGLLKKAYELSLMCDAEVALIIFSGRGRLFEFSSSSCMYKTLERYRSSNYSSQEVKVPLDSEINYQDYLKLRTRVEFLQTTQRNILGEVLGPLSMKELEQLENQIETSLKQIRSRENQMLLDQLFDLKSKEQELQDLNKDLRKKLQETSPENALHVSSWEEGGHSGASGNVLDPYQGLLQHPESDPSLQIGYHQQAYMDQLNNEDMAG

SEQ ID NO: 12868 - protein, 236 aa, Streptococcus suis
MKALIFDVDDTLYDQIQPFERALERHIEVAREQIEPLYLSFRRYADEVFEATAIGKMSLKDSHIYRMKHALADFGYQVSDATALAIQIDYDYFQGQIELSPVFPEIFSWCQVQGIAMGIITNGPYRHQLRKIRTMGLVNWFELEHVLISGQVGITKPNPAIFQLMEERLGMSGEDICYLGDSFENDIIGAKTAGWQAVWFNHRKRSEPESSFQADYMIDEWFNLDSLIKNIIKPIG

SEQ ID NO: 12869 - protein, 564 aa, Oryza sativa (japonica cultivar-group)
MACLAPHFKWAPCPHAHHHHSTSSLPSSSSSSTSAPSSSSRCSFSRGGPFRVHCAVTATTSAAAPVVVEAPGGGMRLAYAAAPDSSAPALQKKIQSALASEVFLNEEAVVTAAAAEAVALARAAAEAAQEVVRMVQNNKNERNTRPKKAVVNYLANEILRTEMKPNILDKYSDGILSEEIESYGILSDEAELDGDTQDIPSIAVKSARQTEGRARRTRAAIKAATIVRTSPKPATSSKKKRSKGASSGTNPLGSLWKMTGRRLLTAKEEVEFSEGIQDLLKLEAIQAELAEYNGGQPTFAQWATAAGVDERTLRKRLDHGIYCKNRMVTSNVRLVISIAREFEGPGMELYDLIQEGMQGLIRGAEKFDASKGFRFSTYSHWWIKQAMRKSVSEQSQIFRLPAHMVEASYRVKECIKRLRRKLKRRPTNEEIAADTGMPIKRVEAAVNLPKYSVSLDSKIGSTDMTYQEVTADPTAETAEEMLNRLSMKRDVHKALDTLTTRERQVVTLRFGLEDGRIRTLQEIGNTMGVSRERIRQIESAAFRKLRSKKRVNALKDYLVPVGNW

SEQ ID NO: 12870 - protein, 164 aa, Brassica napus
MPALACVDTYTTDVFIPPSPQPSSTAAVVDTWSPSLSSSLYRIDGWGAPYFSANSSGNISVRPHGSNTLPHQDIDLLKLVKKVTDPKQTGGLGLHLPVIVRFPDVLKNRLECLQSAFDFAVQSQGYESHYQGVYPVKCNQDRFVVEDIVRFGSQFRFGLEAGSN

SEQ ID NO: 12871 - protein, 427 aa, Ipomoea batatas
LGGGAGTRLYPLTKKRAKPAVPLGANYRLIDIPVSNCLNSNVSKIYVITQFNSAYLNRHLSRAYASNMGGYKNEGFVEVLAAQQSPENLWSQGTADAVRQYLWLFEEHNVLVLEFLVLAGDHLYRMDYERFIQAHRETDADITVAALPMDEKRATAFGLMKIDEEGRIIEFAEKPKREQLKAMKVDTTILGLDDQRAKELPFIASMGIYVISKNVMLNLLREKFPGANDFGSEVIPGATSIGMRVQAYLFDGYWEDIGTIEAFYNANLGITKKPVPDFSFYDRSAPISTTPRYLPPSKMLDADVTDSVIGEGCVIKNCKIHHSVVGLRSCISEGAIIEDSLLMGADYYETDADRRLLAAKGSVPIGIGRNSHIKRAIIHNIARIGNDVKIINNDNVQEAARETEGYFIKSGIVTIIKDALIPSGTII

SEQ ID NO: 12872 - protein, 567 aa, Zea mays
  misc_feature (218)..(218): Xaa can be any naturally occurring amino acid
  unsure (1)..(567): unsure at all Xaa locations
HFVLEENMLEVDCPCVTPEVVLKASGHVEKFTDLMVKDEKTGTCYRADHLLKDFCKEKLEKDLALPQEKADEFKRILAILDDLSAEELGAKIKEYGIVAPDTKNPLSDPYPFNLMFQTSIGPTGLSVGYMRPETAQGIFVNFKDLYYYNGQKLPFAAAQIGQAFRNEISPRQGLLRVREFTLAEIEHFVDPEDKSHPKFVDVADLEFLMFPRELQLSXESAKLMKLGEAVSKGTVNNETLGYFIGRVYLFLTCLGIDKGRLRFRQHLPNEMAHYAADCWDAEIECSYGWIECVGIADRSAYDLKAHSEKSGVPLVAHEKFSKPREVEKLVIVPSKKDLGLAFKGNQKMVLEALEAMSEKEAFEMKAELETKGETNFKVCTLGKDVVITKKMVSISMEKKLEHQRVFTPSVVEPSFGIGRIIYCLFEHSFCTRPSKSEEEQLNVFRFPPLVAPIKCTVFPLVKNQEFDATAKEIAKALTTAGISHIIDTTAISIGRRYARTDEIGVPFAVTVDSATNVTIRERDSKEQIRVDINEVASVVKQLTEGQSTWADVSAKYPAHVGPQGDQE

SEQ ID NO: 12873 - protein, 516 aa, ASPERGILLUS NIDULANS FGSC A4
MSFLIKNPFTTESRVGGNHPPTGGEDTSLQKELATVDEVLAKKMASVNSAIDEIGMTPFQWKLFFLNGFGYAVDSLLVVCQSIAQPAVTQEFGNPSKHIAGVALASQIGLLVGAAVWGFSADVIGRKLAFNSSLFICATFVLIAGGMPNYVSFCAMVAIYSAGAGGNYVLDATNFLEFLPVSHSWLVTFLAVWWAVGYTITGLLAWAFMSNYSCHPDATVAECTRAANMGWRYLHITCGGLVLVASILRLVLIRMAETPKWLVSQNRDDELIEILSNLSKKYNRPFSLTLEELSSQGRVQGTEKSVFSALRLASHFTGLFSTKKLTYSTVMIIINWLLIGTVSPLYSVFLPYYLQSRGADTGDNSNYTTWRNYAINQVAGLIGPVIAAVLVELRLIGRRRTLAIGAAVTTALQFGYTQIKTPAQNVGVSAAITAASNIYYGTIYAYTPEILPSSHRATGYGLCVVLNRVGGIVGVLVGSFANVQTTVPLFICAGIYAALIITSLSLPFESRGKRTV

SEQ ID NO: 12874 - protein, 256 aa, Thinopyrum bessarabicum
CELDNIMRLTGITGIVNGMDVSEWDPTKDKFLAVNYDVTTALEGKALNKEALQAEVGLPVDRKVPLVAFIGRLEEQKGPDVMIAAIPEIVKEEDVQIVLLGTGKKKFEKLLKSVEEKFPSKVKAVVRFNAPLAHQMMAGADVLAVTSRFEPCGLIQLQGMRYGTPCACASTGGLVDTIVEGKTGFHMGRLSVDCNVVEPADVKKVVTTLKRAIKVVGTPAYHEMVKNCMIQDLSWKGPAKNWEDVLLELGVEGSEP

SEQ ID NO: 12875 - protein, 474 aa, Shigella flexneri 2a str. 301 [sequence omitted]

SEQ ID NO: 12876 - protein, 256 aa, Lophopyrum elongatum
CELDNIMRLTGITGIVNGMDVSEWDPTKDKFLAINYDVTTALEGKALNKEALQAEVGLPVDRKVPLVAFIGRLEEQKGPDVMIAAIPEIVKEEDVQIVLLGTGKKKFEKLLKSIEEKFPSKVRAVVRFNAPLAHQMMAGADVLAVTSRFEPCGLIQLQGMRYGTPCACASTGGLVDTIVEGKTGFHMGRLSVDCNVVEPADVKKVVTTLKRAVKVVGTPAYHEMVKNCMIQDLSWKGPAKNWEDVLLELGVEGSKP

SEQ ID NO: 12877 - protein, 766 aa, Magnaporthe grisea 70-15
MVQSAILGFPRMGVNRDLKKATEAYWAGKISQDDLLAEAKRLRLAHWKIQKDAGVDIIPSNDFALYDQVLSHIQDFGAVPERYSSSKLNPVDEYFAMGRGHQKDGVDVPSLEMVKWFDSNYHYVKPTLQDNQTFTLTANPKAVNEFNEAKEAGINTRPVLVGPVSFLHLAKADRGQSVDPIDLLDKLVPVYEELLAKLKAAGAETVQIDEPVLVFDLPAKVKAAFKPTYEKFASLGDKIPKLVFATYFGDIVHNLDLVPKDVYAVHVDLVRNPEQLETVVGALGPKTILSAGIVDGRNIWKTNFQKAIETVESAIQKLGKERVIVATSSSLLHTPHTLASEKKLDPEIADWFSFASEKAVEVAIIAKAVTEGPAAVREQLEANAKSMNARATSSRTNDPKVKERQSKIVESDYNRKSEFPTRISQQQAKLNLPLFPTTTIGSFPQTQTIRAQRAKLTKKEIDAEQYAKFIEEEIENNVKIQEELGLDVFVHGEPERNDMVQFFGERLDGYAFTTHAWVQSYGSRCVRPPIIVGDISRPAPMTVKESRYAVEISKKPMKGMLTGPVTCLRWSFPRDDVHQSVQAEQLALALRDEVVDLEKAGVDVIQVDEPALREGLPLRSGKERDAYLQWAVKAFKLSTCGVEDSTQIHSHFCYSEFQDFFHAIAALDADVLSIENSKSDAKLLKVFVDSAYPRHIGPGVYDIHSPRVPSEQEIKDRIEEMLQYLKPEQLWIDPDCGLKTRQWKETKEALTNMVNAAKYFRAKYAK

SEQ ID NO: 12878 - protein, 256 aa, Triticum baeoticum
CELDNIMRLTGITGIVNGMDVSEWDPTKDKFLTVNYDVTTALEGKALNKEALQAEVGLPVDRKVPLVAFIGRLEEQKGPDVMIAAIPEIVKEEDVQIVLLGTGKKKFERLLKSVEEKFPSKVRAVVRFNAPLAHQMMAGADVLAVTSRFEPCGLIQLQGMRYGTPCACASTGGLVDTIVEGKTGFHMGRLSVDCNVVEPADVKKVVTTLKRAVKVVGTPAYHEMVKNCMIQDLSWKGPAKNWEHVLLELGVEGSEP

SEQ ID NO: 12879 - protein, 251 aa, Triticum monococcum
CELDNIMRLTGITGIVNGMDVSEWDPTKDKFLTVNYDVTTALEGKVLNKEALQAEVGLPVDRKVPLVAFIGRLEEQKGPDVMIAAIPEIVKEEDVQIVLLGTGKKKFERLLKSVEEKFPSKVRAVVRFNAPLAHQMMAGADVLAVTSRFEPCGLIQLQGMRYGTPCACASTGGLVDTIVEGKTGFHMGRLSVDCNVVEPADVKKVVTTLKRAVKVVGTPAYHEMVKNCMIQDLSWKGPAKNWEHVLLELGV

SEQ ID NO: 12880 - protein, 228 aa, Staphylococcus epidermidis RP62A
MPKLILCRHGQSEWNAKNLFTGWADVKLSKQGIEEAQSAGKKIYGNQIEIDIAFTSLLTRALETTQYILAGSDQQWIPVYKSWRLNERHYGGLQGLNKDDARKKWGEDQVHQWRRSYDVRPPRESEEQREAYLKNRRYQHIDHRMMPYCESLKDTLERVVPFWTDHISQHLLDDKTVLVSAHGNSIRALIKYLEGLSEEDIVGYEIKTGAPLVYELTDDLVVKDKYYL

SEQ ID NO: 12881 - protein, 256 aa, Triticum urartu
  misc_feature (41)..(41): Xaa can be any naturally occurring amino acid
  unsure (1)..(256): unsure at all Xaa locations
CELDNIMRLTGITGIVNGMDVSEWDPTKDKFLAVNYDVTTXLEGKALNKEALQAEVGLPVDRKVPLVAFIGRLEEQKGPDVMIAAIPEIVKEEDVQIVLLGTGKKKFERLLKSVEEKFPSKVRAVVRFNAPLAHQMMAGADVLAVTSRFEPCGLIQLQGMRYGTPCACASTGGLVDTIVEGKTGFHMGRLSVDCNVVEPADVKEVVTTLKRAVKVVGTPAYHEMVKNCMIQDLSWKGPAKNWEHVLLELGVEGSEP

SEQ ID NO: 12882 - protein, 266 aa, Lycopersicon esculentum
PSWAFDHLTTEGEILRMKLDHLSGTGFQSKSKYMFGKVTVQIKLVEGDSAGTVTAFYMSSDGPTHNEFDFEFLGNTTGEPYTVQTNVYVNGVGNREQRLKLWFDPSKDFHSYSIMWNQRQVVFLVDETPVRVHSNLEHRGIPYPKDQPMGVYSSIWNADDWATQGGLVKTDWSHAPFVASYKGFEINGCECPATVAAAENTRRCSSNGQKKYWWDEPVMSELNLHQSHQLIWVRANHMVYDYCTDSARFPVAPVECQHHQHKTNHN

SEQ ID NO: 12883 - protein, 213 aa, Brassica napus
  misc_feature (202)..(202): Xaa can be any naturally occurring amino acid
  unsure (1)..(213): unsure at all Xaa locations
MATNIGMMDSAYFVGRNEILGWINDRLHLNLSRIEEVASGAVQCQMLDMTFPGVVPMHKVNFAAKNEYEMIQNYKVMQEVFTKLKITKPLEVNRLVKGRPLDNLEFLQWLKRFCDSINGGIMNENYNPVERRSRGGKEKSIKGSSKVSKSLQTNNTHHTPTVTASSKPTGPKQARSHAIGGGSNSSAEVQALSKELEDLKVXVDVLEKERDFY

SEQ ID NO: 12884 - protein, 402 aa, uncultured bacterium 562
MKNVVITGVGIKSCIGNTYDDVLESLKLGKSGIVSNTSYAEMGFRSQVSGSMDIDFSQLIDRKLLRFMGESAAYSYLAAQDAISMASLSDEQLDSPRVGIVAGSGGASTRVMVTTADIAREKGPKRIGPYAVTKSMGSSISAILGTAFKIKGVNYSISSACATSAHCIGHGADLIKSGQQDIVIAGGGEDEHWSSSSLFDAMGALSSNFNDNPSVASRPYDKNRDGFVISGGAGILILEEEEHAKKRNANILAKLSGYYATSDGYDMVAPSGEGALRCMQGALKSYGSDVDYINTHGTSTPVGDIAELNAINELFGDNRPVISSTKSMTGHSLGATGAQEAIYSIMMLRDKFIAPSINIEDLCDEAKGLKLNTETTSSEIKSAMSNSFGFGGTNASLILTKY

SEQ ID NO: 12885 - protein, 741 aa, Vitis vinifera
MESCDCIDPPWPGDELLMKYQYISDFFIALAYFSIPLELIYFVKKSAVFPYRWVLVQFGAFIVLCGATHLINLWTFGMHSRNVEVVMTTAKVLTAVVSCVTALMLVHIIPDLLSVKTRELFLKNKAAELDREMGLIRTQEETGRHVRMLTHEIRSTLDRHTILKTTLIELGRTLSLEECALWMPTRTGLELQLSYTLRQQNPVGFTIPIQHPVINQVFSSNRAVKISPNCPVARLRPLAGKYMPGEVVAVRVPLLHLSNFQINDWPELSTKRYALMVLMLPSDSARQWHVHELELVEVVADQVAVALSHAAILEESMRARDLLMEQNVALDLARREAETAVRARNDFLAVMNHEMRTPMHAIIALSSLLQETELTPEQRLMVEAILKSSSLLATLINDVLDLSRLEDGSLQLENGTFNLHALFREVLYLIKPIASVKKLFVSSSLAPDLPEFAVGDEKRLMQIMLNVVGNAVKFSNEGNISIFAFIAKSESLRDSRAPDFFPVHSDNHFYLRVQVKDSGAGIDPQDISKLFTKFAQCQSLAARNSGGSGLGLAICKRFVNLMGGHIWIESEGLGKGSTAVFIVKLGIPEYSNESKLPFFPKVSANHCQTNFPGLKVLVMDDNGVSRSVTKGLLVHLGCDVTTVSSADDCLRVVSQEHNVVFLDVCMPGVDGYEVAIRIHEKFTTCRQGPLLVALMGNTDRVTKENYLRVGINGVVLKPVSVDKMRCVLSEVLEHRFLFETC

SEQ ID NO: 12886 - protein, 402 aa, Saccharophagus degradans 2-40
MNQKLPVTVLSGFLGAGKTTVLNHILNNRDHLRVAVIVNDMSEVNIDAATVKNEVTLNRSQEKLVEMSNGCICCTLREDLLIEVNKLAKEGRFDYLVIESTGISEPLPIAETFTFADETGVSLSDVARLDTMVTVVDAANFLNDYDEAKYLQETSESLGDDDERTVADLLVDQIEFADVILISKSDVVSNKHLARTQAVLQTLNPEASIHTIANGKVNVKTVLATGKFSFDKAQQSAGWLKEMRGEHIPETQEYGISSFVYQARKPFHPQKFYNFLHSEQLAGKLLRSKGYFWLATRPEAAGQWNQAGGIARYGFAGMFWKAVPKENWPDDEDYLASIKKSWEEPFGDMRQELVFIGQGLDKQAVIEALDKCLLTEKELLAGKDYWLGLDDPFPAWNDKEAA

SEQ ID NO: 12887 - protein, 250 aa, Zea mays
MLAIFHEAFAHPPEELYSPASEKCSKQPKLPEETLDDFLSRHSDNTFSMSFGKAAVLAYVRPSASFSVHQRLFCGFDDIYCLFFGSLNNLCQLNKQYGLTKTTNEAMFVIEAYRTLRDRGPYPADQVVKDLDGSFAFVVYDSKAGSVFTALGSDGGVKLFWGIAADGSVVISDDLDVIKEGCAKSFAPFPTGCMFHSEGGLMSFEHPMNKIKAMPRVDSEGVLCGANFKVDVYTRVNSIPRRGSEANWSL

SEQ ID NO: 12888 - protein, 284 aa, Yarrowia lipolytica CLIB122
MTKESVHNLPTVSTSQPAEPVDAIPPTAYVPPDEAYTRSRPMGLGENMRNLFIACIGEFVGTFMFLLFAYLIATVANYDKTVAGPNAAKIIMISFGFGFSLLVNVFIFFRVSGGQFNPCVTLALTLVGAVPPVRALCLAITQLLAGMAAAGVADALTPGPVTFINTLGDGVSRTRGMWIEMFCTAQLCLTVLFLAVEKHRATFMAPFPIGMSLFIGHLVAVFPTGAGINPARSLGPCIVGKSFPHYHWIYWVGPILGSIFSVGLYHTLKFLDYETSNPGQDNQD

SEQ ID NO: 12889 - protein, 410 aa, Streptomyces aizunensis
MNLHLESYSTGVTAKELAERRREFLEIGRRSGHFPSASARQDGVDSQISVWCSNDYLGMGQNPQVIEAMKKTIDTHGVGSGGSRNIGGTNHYHVLLEAELADLHGKEAALLFTSGYTANDGSLSVLAGTPKDTIVFSDEKNHASIIDGLRHSGAQKHIFRHNDVAHLAELLAAAPADRPKLIVLESVYSMSGDIAPLAEIAELARRYDATTYIDEVHAVGMYGPQGAGIAAREGIADQFTVVMGTLAKGYGTVGGYIAGPAALVDAVRTLSRAFVFTTSLPPAVAAGALEAVRYLRNSDVERKVLAENAQLLHRLLDEADIPFISPDSHIVSAFIGDDETCKQASRLLFERHGIYVQSINAPSVPLGQEILRIAPSTVHGREDVENFAEALRGIWKELNIPTATDRNWLS

SEQ ID NO: 12890 - protein, 820 aa, Clostridium thermocellum ATCC 27405
MKAVIMAGGEGTRLRPLTCNRPKPMVPVVNKPVMEHIIELLKKHGFTDIAVTLQYLPDMIKDYFGDGSDFGINLRYYVEDKPMGTAGSVKNAEEFLDDTFLVISGDALTDIDLGKAVEYHYSKGSMATLVLKKVDIPLEYGVVVTDENGRITRFLEKPSWGEVFSDTVNTGIYILSPEVLKYFNKNEMFDFSKDLFPMLLKENKPMYGYITDEYWCDIGDLMAYSKAHMDVLDGKVKINIPGNKIKDRVWVGEGTVIEENVVIEEPCVIGANTRIKKDSVIGSYSVLGDNNIIGERSGIKRSILWKNNVLETNTQLRGTVVCSKVNIKEGVFAFENSVIGDDTQIGKNAVIKPSIKIWPNKIVEGGTEVNSNLVWGSKFVRSIFGFRGVAGEINVDITPEYASKLGAAYGAIFKGKGKIGVSSDDSAAAKMLKMSFMSGLLSAGLKVLDFGVLHLPVARSAVRFYGADGGIHISTSSTNFGRLTVDFLDKNGSNIKREVERKIENAFQREDFSRCEGEAIKDVEVIPDYTKYYLRNIINNTRSKDFGYRIALNSLSGFILETVGNLLETFGCTVEKTSLDLRNAKTMRNGNKSAEMTYFTDMIKMGNYDLGVSIEDTSEKMMLVDNNGRIVSDDMFTALISLIVFKTVQGGTVVVPISTSSVVDKLAEQNNGKVIRTKTSPQDIMNKMLGNETKENVYEQFTLHFDAIAGLVKILDFMKSENYSLSDLVNMIPDFYVSEKEVECSWNVKGKVIRQIIQENEGQSIETLEGVKIFKDGGWVLVLPDAEQPVCRIKSESYSAEFAEELTNFYVNKVREISQK

SEQ ID NO: 12891 - protein, 232 aa, Brassica napus
PRVRLRSSFRLLYITRTNLLVRASPSSLSRLPSKFTSAKQLVRSHHQIPLSTTGAKLSRSEHSMAASSEPKSIYDFTVKDAKGNDVDLSTYKGKVLLIVNVASQCGLTNSNYTELAQLYQKYKDHGFEILAFPCNQFGNQEPGSNEEIVQFACTRFKAEYPIFDKVDVNGDSAAPIYKFLKSSKGGLFGDGIKWNFAKFLVDKDGNVVDRYAPTTSPLSIEKDLKKLLGVTA

SEQ ID NO: 12892 - protein, 301 aa, Ashbya gossypii ATCC 10895
MGLLSYIRSAYEGDESEHTDLREMEKHIELCSSCDACSPEWEAEVARDTQVFARLKIEREASLYGTSKPASVHFVVPTSQMDWAHSACDERPGSVQQRVAAWVAQQDAGPDGMPMRCSVSSQPIDILDVEVMRGHKNNVLILPHFIKLVGLTADRVEQVLDELLPLLRANDMPALLARPDIWECPEDSFIFLCSHTTRDKRCGITAPVLRKHICAHLQTHGLYRDVSDARPHGCTVAFVNHVGGHKYSANAVIFLKRSRTMLWLGRVSPVHAEPIVKHLLLPAVPQLPFPENVRCVRKYDF

SEQ ID NO: 12893 - protein, 379 aa, Pseudomonas syringae pv. syringae B728a
MKAIVYSGPRDVSVKNVPDAKIQKPTDALVRVTSTNICGSDLHMYEGRTSFETGRIFGHENLGQVIEVGAGVDRIKVGDWVCLPFNIGCGFCENCEKGLTGYCLTANPGSAGAAYGFADMGDHEGGQAELLRVPYADFNCLLLPEDAAEREEDYVMLSDIFPTGWHATELAGLLPGESVAIYGAGPVGLMAAHSAMIKGASQVFVVDNHPDRLALAAKMGATPINSLEQGAVDQILNLTDGKGTDRGCECVGYQCCDRHGHEANHVTMNNLVASTKATGGIGVVGVFVPQDPGAKSDLAKEGKMAFDFGSFWFKGQQIRTGQANVKAYNRRLAELIHHGRAKPSQIISHRLKLEEGPDAYKHFDARDEGWTKVVLKPGA

SEQ ID NO: 12894 - protein, 461 aa, Bacillus halodurans C-125
MAMVEDTRPEHTYAEQTPRSKSWIEQAKKVMPGGITANIKHFAPYPIVMKKGCGAFITDVDNHQYVDYLLAYGALMLGHGHPEVKQAIDEMFADSGTLLFGAPHPLEVTFGHEIQQLYPSMERLRYTNSGTEATLLAMRIAQAYTNKKRIAKFEGHYHGGYNDVLYSVSPTLSEAGPADAPIPVKESKGMHVTDGEEPLILPFNNLTACERLLRAQQDSIAAVMIEPLQGGFIPATDTFIAGLRELTEELGIVLIFDEVKTGFRIRLGGAQEWYGVSPDLTTLGKVIGAGFPFGIVGGRKDIMEVTSPTTGSDVFDQSQSTFSRAKDVVFHSGTYNGHPLILAAGLKTVDVLKRDIKDVFARTDMLKDELEALFVRKGVPMKAVGIGSIFSVVLTEEDIFNYRDLQASDLQTRKLIDLHLLNEGIYTKPLNRYSLSTAHTEREVERTISAYDRVLSRLFGG

SEQ ID NO: 12895 - protein, 413 aa, Erwinia carotovora subsp. atroseptica SCRI1043
MSKRRVVVTGLGMLSPVGNTVESTWSALLAGQSGISLIDHFDTSAYATRFAGLVKNFNSEEFISRKEARKMDAFIQYGVAAGVQAMQDSGLEVTEENAPRIGAAIGSGIGGLGLIEENHTALVNGGTRKISPFFVPSTIVNMVAGHLTIMFGLRGPSISIATACTSGVHNIGHAARIIAYNDADVMLAGGAEKASTPLGVGGFGAARALSTRNDDPQAASRPWDKDRDGFVLGDGAGLMVLEEYEHAKKRGAKIYAEIVGFGMSSDAYHMTSPPEDGSGAALAMENALRDAGVSTSQIGYINAHGTSTPAGDKAETQAVKSVFGADASRVLVSSTKSMTGHLLGAAGAVESIFSILALRDQAVPPTLNLDNPDEGCDLDFVPHEARQVSNLEYVLCNSFGFGGTNGSLIFRKV

SEQ ID NO: 12896 - protein, 476 aa, Pseudomonas syringae pv. syringae B728a
MYPDVQLYIDGQWRASRDNRTLSVINPATGEALGAVAHAGIADLDEALAAAERGFATWRATSAYDRYKLMQKAANLVRERADSIARIMTQEQGKPLAEARMETLSAADIIDWLAEEGRRSYGRLVPSRNVSIEQKVIKEPVGPVAAFTPWNFPINQVVRKLSSALAAGCSIIVKAPEETPASPAELIRAFADAGVPAGVIGLVYGDPAEISGYLIPHPVIRKVTFTGSTPVGKQLAALAGKHMKRATMELGGHAPALVFDDADIDLAARVLATAKFRNAGQVCVSPTRILVQRKVLDAFTEKFVGLTREIKVGNGLEAGTTMGPVANDRRIPALVDLIDDAVRGGATLSAGGKAGEGPGYFFEPTVLSGLKPHMRIMNEEPFGPVALLVPFDTLEEAIAESNRVPFGLASYAFTTSMKTAQALSTYIEAGMLSINHQGIGLPEVPFGGIKDSGYGSEGGTEAIEAYLNTKLVTQYN

SEQ ID NO: 12897 - protein, 247 aa, Brassica napus
RPRVRTHSRTVALVMTTAKVLTAVVSCATALMLVHIIPDLLSVKTRELFLKNKAAELDREMGLIRTQEETGRHVRMLTHEIRSTLDRHTILKTTLVELGRTLALEECALWMPTRTGLELQLSYTLRQQHPVEYTVPIQLPVINQVFVTSRAVKISPNSPVARLRPVSGKYLLGEVVAVRVPLLHLSNFQINDWPELSTKRYALMVLMLPSDSARQWHVHELELVEVVADQVAVALSHAAILEESMRA

SEQ ID NO: 12898 - protein, 536 aa, Vibrio parahaemolyticus RIMD 2210633
MRNVLRNHRLYRSLLALSVIGALSACNSSGGDSNSSTPLPDTSYACQANVMTQSNQLRTYQIMVESFVDGDTSIGHGTGYGTSHHNGDLQGVIDSLDYIQDLGMNAIWLTPVFESEAIAGQDHWADRLDATGYFATDYFKIDPKFGDLATAKTLVEEAHKRGLYVFFDGVFGHHKNGLIKPSPSGLLPSGSSNPVDYPASLDFYKEVATYWIKELKIDGWRLDQAYQVPTDAWTQLRKAVDEASQSVTYTNSKGDQVNPLGYMVAEIWKGESEIANEAYGSNSDPALCSAFDFPMRYRIVETLAVNESGVGGRGVDWLDNGYSTHNQYPTHAQPNLMIGNHDLVRFGDLLQRGNLADVNDAEYWLRHKAAFAFQAAYTGPITLYYGDEIGDQVDGFAAKEDNNTCAIQGLCDDHVARSSAKIEGVTATLDANQADLKAYVTSLMTMRDTHPALYQGSRTNLVASNGSYVDLKQSGSDKVLFALNTLESARTVILAQESVGTGELVDLLTNEKIAPSNGQYQLPMSPLQGRFFAVTP

SEQ ID NO: 12899 - protein, 862 aa, Taxus brevifolia
MAQLSFNAALKMNALGNKAIHDPTNCRAKSERQMMWVCSRSGRTRVKMSRGSGGPGPVVMMSSSTGTSKVVSETSSTIVDDIPRLSANYHGDLWHHNVIQTLETPFRESSTYQERADELVVKIKDMFNALGDGDISPSAYDTAWVARLATISSDGSEKPRFPQALNWVFNNQLQDGSWGIESHFSLCDRLLNTTNSVIALSVWKTGHSQVQQGAEFIAENLRLLNEEDELSPDFQIIFPALLQKAKALGINLPYDLPFIKYLSTTREARLTDVSAAADNIPANMLNALEGLEEVIDWNKIMRFQSKDGSFLSSPASTACVLMNTGDEKCFTFLNNLLDKFGGCVPCMYSIDLLERLSLVDNIEHLGIGRHFKQEIKGALDYVYRHWSERGIGWGRDSLVPDLNTTALGLRTLRMHGYNVSSDVLNNFKDENGRFFSSAGQTHVELRSVVNLFRASDLAFPDERAMDDARKFAEPYLREALATKISTNTKLFKEIEYVVEYPWHMSIPRLEARSYIDSYDDNYVWQRKTLYRMPSLSNSKCLELAKLDFNIVQSLHQEELKLLTRWWKESGMADINFTRHRVAEVYFSSATFEPEYSATRIAFTKIGCLQVLFDDMADIFATLDELKSFTEGVKRWDTSLLHEIPECMQTCFKVWFKLMEEVNNDVVKVQGRDMLAHIRKPWELYFNCYVQEREWLEAGYIPTFEEYLKTYAISVGLGPCTLQPILLMGELVKDDVVEKVHYPSNMFELVSLSWRLTNDTKTYQAEKARGQQASGIACYMKDNPGATEEDAIKHICRVVDRALKEASFEYFKPSNDIPMGCKSFIFNLRLCVQIFYKFIDGYGIANEEIKDYIRKVYIDPIQV

SEQ ID NO: 12900 - protein, 398 aa, Synechococcus elongatus PCC 7942
MTAAYFTHSTEYEAVSSDVANLSETPSSEAVETAVSSRQSTDLIRLYLQDIGRVRLLGRDEEVSEARWVQRYMQLLAVRNCVAVEEGGVLKDYVDLQEGRDRLTAQLGHRPSFEAWAKIVDCSLTELRQALQLGLHRWAEVCQLDLEELKQVCKEGQRAKDHMIKANLRLVVSVAKKYQNRGLELLDLVQEGTLGLERAVEKFDPTKGYRFSTYAYWWIRQGITRAIATQSRTIRLPVHVTEKLTRIKKAQRKIAQTKGRTANLEEIAQELEMTPDQVREVLLRVPKSISLETRVGKEKDTELGDLLETTDFTPEERLTQESLSNDLQRLLLELNHRERDVIRMRFGLRDGQIYSLAEIGQVLDLSRERVRQIEAKALQKLRHPRRRNQIRDYLELLH

SEQ ID NO: 12901 - protein, 424 aa, ASPERGILLUS NIDULANS FGSC A4
MASAIVTGATGITGSAIVHHLQKDASYKKIYALSRSDPGYKDPKLQHAAIDLQGSADDMAKTLSGISAEYVYFCAYMAHDDPAELCRINGTMISNFIQALEKTGAISKLKRFILTCGFKQYSVHLGNAKQPFHEEDPVLEGEVGGETWPPNFYFTQQRILAEAAARSEGQWDWVVTLPQDVLGFARGNFMNEATAVGLYCTVSKVLPGSELPFPGCKAGYFAFNTWTSANLHAKFCLWAATAKGAGNNIFNVINGDTESWQDLWPRLARRFGCKIPNPMFPHGGTADTKGYKNYESSTVRMPNKHPLSTRVSDLGVSSDPSKEEPPTLFCQINPEKWAAREDVNKAWAQVRDKYGLDQKAWEKATWDFLTFALGRDWSCVGTMSKARKLGWSGYADTWDELVDVFETLEKEGILPPLERLKSDF

SEQ ID NO: 12902 - protein, 682 aa, Nocardioides sp. JS614
MGAREEWFTVARSWVVRVTGLLALMALVGVTAVQGAPDGGRAIGIWPVGLATGCFMVAPRPRTPVLVVLVALLATGSIWVGGRGPDVAVGLGVGLAVGAWLMWRVLAQGRRERPMLHTSADLARFLGGAFASALVVAAAAAVTSSVTGWGDPGLLALAVGTSNLSAQSAVVPFFCRLRNHAPLAGPTERLAQWLLILTITPAVFVPQDFPSVVFLVVPVLVWGAMRSSPYEALAQLITTLGFAIPLTTWGHGPFADAGPRFQMSVDGQGILLATYGVVCALVVIPLVLTVSEQLEHARQAAAERDKVQNIVNGTAGVAIIGTDEHGRVTLFNPGAERLLGYRADEVLGRLIREFHSADAISEKAAELGVAADFGVVARSLIGQGATDMRFLRKDGEERSHSMSLNRIEDDRGRVIGYVSTSEDITERVEAEGRLVEALETERQAVERLREVDQVKDAFVSSVSHELRTPITSILGYTEMLEDGVYGDLGREQLDAVRRVAANSTRLLSLINDLLTLSRVQEDEIGIVDRVFDLRSVVSAGTAVVAPTLERRSLELTAELPDEPVPFLGDRDMLERVVINLAGNAAKFTPEGGRIGVRLLVGPEESVIEVSDTGIGIPHQEQERLFSRFFRSSLAQERAIPGSGLGLSIAHAIVEKHGGTMSVDSEPGEGTTFRVHLPALTAP

SEQ ID NO: 12903 - protein, 96 aa, Buchnera aphidicola str. APS (Acyrthosiphon pisum)
MKIRPLHDRVLVKRQEVESKSAGGIVLTGSAAGKSTRGTVTAVGKGRVLDNGDIKPLDVKVGDVVIFNEGYGAKTEKIDNEELLILTESDILAIVE

SEQ ID NO: 12904 - protein, 548 aa, Buchnera aphidicola str. APS (Acyrthosiphon pisum)
MAAKDVKFGNEARIKMLRGVNVLADAVKVTLGPKGRNVVLDKSFGAPSITKDGVSVAREIELEDKFENMGAQMVKEVASKANDAAGDGTTTATLLAQSIVNEGLKAVAAGMNPMDLKRGIDKAVISAVEELKHLSVPCSDSKAITQVGTISANADEKVGSLIAEAMEKVGNDGVITVEEGTGLQDELEVVKGMQFDRGYLSPYFINKPETGIVELENPYILMADKKISNVREMLPILESVAKSGKPLLIISEDLEGEALATLVVNSMRGIVKVAAVKAPGFGDRRKAMLQDISILTGGSVISEELAMELEKSTLEDLGQAKRVVISKDTTTIIGGVGEKHSIQSRISQIRQEIQEATSDYDKEKLNERLAKLSGGVAVLKVGAATEVEMKEKKARVEDALHATRAAVEEGVVAGGGVALVRVAGKIADLRGQNEDQNVGIRVALRAMEAPLRQIVSNSGEEPSVVTNNVKDGKGNYGYNAATDEYGDMIDFGILDPTKVTRSALQYAASVAGLMITTECMVTDLPKEDKSSDSSSSPAGGMGGMGGMM

SEQ ID NO: 12905 - protein, 519 aa, Pirellula sp. 1
MFDPMMDDFDDVSAQSTDVVTGGFRKLPVDDSEDDNAVSVADAPEGEVQLDSPDELIALDESETWSDDPVRMYLTQMGEIPLLTRRQEIELAKRIEETRRRFRTKLLENHYVLVEAYKTLKKVYRGQLPFDRTVQVSVTDRLEKEQIIGRLPHNLKTLQTLLNRNRHDWKVAMSKSAPARRRAEAWRALARRRRRAVRLVEELGLRTQRIETRIGLLEKFSRRLDEIDELVRQQKRTKHGREVREQLLHERRQILTACQETPTSLRNRVKMLGSVYSDYQQAKRELSEGNLRLVVSIAKKYRNRGLSFLDLIQEGNAGLMRAVDKFEYRRGFKFCTYATWWIRQAITRAVADQSRTIRIPVHMVETMSRVRNVARQLLQELGREPSIEETARRADVTIEEARRVLTMSRFPISLDRPVGNSEDSQFGDLLPDGTAESPQIGATQEMLRQRITGVLKSLSYREREIIKLRYGLGDGYSYTLEEVGHIFKVTRERIRQIEAKAVRKLQQPSRSQDLVGFLD

SEQ ID NO: 12906 - protein, 480 aa, Glycine max
  misc_feature (271)..(271): Xaa can be any naturally occurring amino acid
  unsure (1)..(480): unsure at all Xaa locations
REEVRRSRGRKKGLECYGERGESGDREWRLPSVGTDAKKRRVTYFYEPCIGDYYYGQGHPMKPHRIRMAHNLIVHYGLHRRMQVNRPFPAAEADIGRFHADDYVDFLSTVSPQILSENSHSHYRQLKRFNVGEDCPVFDGLFDFCRASAGGSIGAAVRLNREDADVAINWAGGLHHAKKAEASGFCYVNDIVLGILELLKVHRRVLYIDIDVHHGDGVEEAFYTTDRVMTVSFHKFGDFFPGTGHIKDIGVGAGKNYSLNVPLNDGLDDEXFRGLFRPIIQKVMDVYQPDAVVLQCGADSLSGDRLGCFNLTVKGHADCLRFLRSFNVPLMVLGGGGYTVRNVARCWCYETAVAVGVEPSPKLPYNEYYEYFGPDYNLHVEPSTMENLNTPRDLEKIRNTLLEQLSRLPHAPSAPFQTTPSVIEVPEEEEEDMDVRPKRRIWSGEDFDSDHDDDMASSKNSDLTAQTSRSVADDMDEDKD

SEQ ID NO: 12907 - protein, 908 aa, Saccharomyces cerevisiae
MAKNNHISASGNSTSGDHRLKEEVLTPTTSASTPHRIFSVDDDPKEIQNDIRYLEGLHEGLKFALHANKSKRSVSSQSPIVHSSNNTLHHHEHQQHLPPTLESLSSKSHSVPDLNTATPSSPKRMHSSIRELPHDDNDDEDANDDSRFIIHDSHGHDLLIDEINCQSPSHLENNDQASNASSTESFTLRERQDAINETHPFGIRIWKPALYKKHRSVQRTAAQDIHETQLKTITWEVTCSNVLWFILFGFPIAILFYSAAIVVFLLGGGGLVTNSAKEYSKCLYKLANYFLWPFGKMVYLLQDEQYLQEDKDEGISMQQFYNWVTSYSNRLVFHQSQAKFQQREDHPAPATESSSLMPPANTTATPLNSNHPSYNSIRHEIPHAAAQRRYFGRGKWSWGRVLFYTIFHLVLQPILAVLSLCLWLLVFTIPMSNVLWQIMYHCRRHPLALGFKYVENSSQSHENEITQQQLNKNILLCTFRAAGWHYYKYTVDGTNVIVVNLISIVFFTIFDFYVLKNFLHWKTWFTYESSIFILCLTSTIPLAFYIGQAVASISAQTSMGVGAVINAFFSTIVEIFLYCVALQQKKGLLVEGSMIGSILGAVLLLPGLSMCGGALNRKTQRYNPASAGVSSALLIFSMIVMFVPTVLYEIYGGYSVNCADGANDRDCTFSHPPLKFNRLFTHVIQPMSISCAIVLFCAYIIGLWFTLRTHAKMIWQLPIADPTSTAPEQQEQNSHDAPNWSRSKSTCILLMSTLLYAIIAEILVSCVDAVLEDIPSLNPKFLGLTIFALIPNTTEFLNAISFAIHGNVALSMEIGSAYALQVCLLQIPSLVIYSIFYTWNVKKSMINIRTQMFPLVFPRWDIFGAMTSVFMFTYLYAEGKSNYFKGSMLILLYIIIVVGFYFQGALSE

SEQ ID NO: 12908 - protein, 382 aa, Zea mays
MLSSASSAAGAAMGMGGGGYAHQPPPQRAVFTAAQWAELEQQALIYKYLMAGVPVPPDLLLPVRPGPAAAFSFAGPAAASPFYHQHHPSLSYYAYYGKKLDPEPWRCRRTDGKKWRCSKEAHPDSKYCERHMHRGRNRSRKPVESKTASSSSPAHPSPPQLSTVTTTAPLEPLAAAGGKVHGLSLGGGAAGSSHLGVDASNAHYRYGSSRYPLGAKPDGGELSFFSGASSGNNSRGGFTIDSPSDNNSWHSALASSVPPFTLSTKSGDSGLLPGAYASYSQSHSHMEPPRELGQVTIASLAQEQERQQPFSGGMLGNVKQENQNQPLRPFFDEWPGTRADSWPPEMDGAPRAGRTSFSSSTTQLSISIPMPRCELHLRNQNS

SEQ ID NO: 12909 - protein, 445 aa, Staphylococcus aureus subsp. aureus COL
MSKAHQLIQEDEHYFAKSGRIKYYPLVIDHGYGATLVDIEGKTYIDLLSSASSQNVGHAPREVTEAIKAQVDKFIHYTPAYMYHEPLVRLAKKLCEIAPGDFEKRVTFGLTGSDANDGIIKFARAYTGRPYIISFTNAYHGSTFGSLSMSAISLNMRKHYGPLLNGFYHIPFPDKYRGMYEQPQANSVEEYLAPLKEMFAKYVPADEVACIVIETIQGDGGLLEPVPGYFEALEKICREHGILIAVDDIQQGFGRTGTWSSVSHFNFTPDLITFGKSLAGGMPMSAIVGRKEIMNCLEAPAHLFTTGANPVSCEAALATIQMIEDQSLLQASAEKGEYVRKRMDQWVSKYNSVGDVRGKGLSIGIDIVSDKKLKTRDASAALKICNYCFEHGVVIIAVAGNVLRFQPPLVITYEQLDTALNTIEDALTALEAGNLDQYDISGQGW

SEQ ID NO: 12910 - protein, 211 aa, Hyacinthus orientalis
RIAICNAVAVAKIMNATLILPVLKQDQIWKDKTNLEDIFDVDHFIEYLKDDVRIVRDIPDWFTDKAELFTSIRRTVKNIPKYAPAQFYIDNVLPRIKEKKIMALKPFVDRLGYDNVPPEINRLRCRVNYHALKFLPEIDEMANLLASRMRNRTGNPNPYMALHLRFEKGMVGLSFCDFVGTREEKAMMAAYRQKEWPRRYKNGSHLWQLAL

SEQ ID NO: 12911 - protein, 162 aa, Brassica napus
  misc_feature (153)..(153): Xaa can be any naturally occurring amino acid
  misc_feature (159)..(159): Xaa can be any naturally occurring amino acid
  unsure (1)..(162): unsure at all Xaa locations
MASLKVPTNVPLPEEDAEQLHKAFAGWGTNEKLIISILAHRTSAQRSLIRSAYAAAYNEDLLKALDKELSSDFERVVMLWTLDPAERDAFLAKESTKMFTKNNWVLVEIACTRSPLDLFKVKQAYQARYKKSLEEDVAQHTSGDLRRLLLPLXSTFRYXGDE

SEQ ID NO: 12912 - protein, 431 aa, Escherichia coli
MVSLEKNDHLMLARQLPLKSVALILAGGRGTRLKDLTNERAKPAVHFGGKFRIIDFALSNCINSGIRRMGAITQYQSHTLVQHIQRGWSFFNEEMNEFVDLLPAQQRMKGENWYRGTADAVTQNLDIIRRYKAEYVVILAGDHIYKQDYSRMLIDHVEKGARCTVACMPVPIEEASAFGVMAVDENDKIIEFVEKPANPPSMPNDPSKSLASMGIYVFDADYLYELLEEDDRDENSSHDFGKDLIPKVTEAGLAYAHPFPLSCVQSDPDAEPYWRDVGTLEAYWKANLDLASVVPELDMYDRNWPIRTYNESLPPAKFVQDRSGSHGMTLNSLVSGGCVISGSVVVQSVLFSRVRVNSFCNIDSAVLLPEVWVGRSCRLRRCVIDRACVIPEGMVIGENAEEDARRFYRSEEGIVLVTREMLRKLGHKQER

SEQ ID NO: 12913 - protein, 392 aa, Daucus carota
MKNTRRRSVSAGESEAPEPEKKVVEEMENGGEEEEDEMENEVEEEAKPELPEGFFEIEHIRRKRVKKGEVQYLVKWRGWPESANTWEPVEHLEAVPDVVDAFEQRQSGKHKSSKRKGRPGGSTSQAKRRQSTAPTVSVDLVQDHSPIPYNNGDSLNNGMDTNMGGIHISETVENNGSGVLSSQVQGAQEQNGGDANHSETINEAAGNLGVDMQGWRAPEVNDHARDGEDSAHAGHSISRRKKSAVVKRFRKDETDCRTNHTMSEDSVRVTRSRLQAEQQRQKNPVDESGTHDDAAIVQIIKPMSFEASGPDQDVVVTFTARRSDGKEIIVDNKFLKVNNPLMLINFYEKHLKYNADMERRHRSMLKVFGCEHGDTLLLHLLGFSMCSPLSTD

SEQ ID NO: 12914 - protein, 1197 aa, Polaromonas sp. JS666
MAQNLHAKQVTTSPPTPPMDAPVMPSPLPARPDAPPASPDARARPEVAVQRIIKVRRDYNSWVASETMEDYALRFTPQRFRKWSEFRVANTAFGAASFLILEAVGATLLVKYGFTNAFWAIVATGLIIFLAGLPISIYAARYGVDMDLLTRGAGFGYIGSTLTSLIYASFTFIFFALEAAVMAYALDLALGIPPSWGYLICALVVIPLVTHGVSAISRLQVWTQPLWIVMLVVPFIYVLLRNPGAFSGVLHYGGERGVGGEFNLHLFGAALTVGIALITQMGEQADYLRFMPVQTRANRWRWWGGVLVGGPGWVVLGVVKMLGGALLAYLAITNMVPPDRAVDPNQMYLAAYEYVFPDYGLAVAATALFVVISQLKINVTNAYAGSLAWSNFFSRLTHSHPGRVVWVVFNTLIAFMLMEMNVFQALGDVLGLYSNIAIAWVMAVVADLVINKPLGLSPRGIEFKRAHLYDINPVGVGAMALASLLSVAAYLGLYGELARAFSAVIAMGTAFVTAPLIAWATRGRYYIARSSGTSEADASYQRYATQQCVICERAYEGPDMAHCPAYQGPICSLCCTLDARCGDLCKPQASLSAQWSAALRWLLPHRIWPYLDTGLGHFLLLMLIIVPLLASVFGLLYHQEMGALGDFMLSGSALRSGFLKAYMALLVIAGLVAWWLVLAHKSRQVAQEESNRQTHLLMREIELHRQTDEALQLAKLHAEHARHAADQANQAKSRYISAISHELRTPLNSILGYAQLMGEDAAIPPHRKQAVSVIRRGGEHLLSLIEGTLDIARIEAGKLTLTVKPMQFADCVHEMAGMFELQAAAKGLGFRFETAGNLPELVRADEKRVRQILINLLGNAIKFTAQGQVIFRLRHAREMAYIDIEDTGPGMSEAELAQIFEPFARGAAAGHSAEGTPGAGLGLTIAKMLTDLMGGEMTVLSTPGQGSVFRVRLFLPEVHVTAGAGKSTLAAPARRQPRGYEGVRRKLLVVDNEEPDRELLVQLLEPMGFDLRTAASGHDCLDLLAAGYQPDVIFMDLAMPGIDGWETLRRVRSAGHTGTHLAIVSANAFDKGLDNDVGIPPEDFILKPVRHTELIDWLERRLGLRWCYEAQADAGQLPAPAAPPPRVLPDAPQLAALLEVVTLGFYRGIMNKLAEIETQQPATAAFVEDMRALARQFQFEAMGRQLTNQEAAHEQRA

SEQ ID NO: 12915 - protein, 458 aa, Vibrio sp. Ex25
MTFLSQLSIHADKAFLRRLFAIALPITLQSMMFSSRSLVDVLMLGQLGEAEIAAVGVAARATFVTTIMLVGVTTGGALLTAQYWGAGDKVGVRRSTALTWMIAMVFAAIAVALFVIFPQPVMKLTTDSQEVIELGASYLIISSVSMFAVACVASMSVGLRAMHQPGLSTFFSGIGILSNVFLNWVLIFGHLGFPALGITGAAIATVSSGAIEVGCLFGYLWLKKHIIAFGWDDIRAGLVLDKITRFLSLSLPTTFNFLAWAGGLFAYHAIMGQAGVQGLAALSVMTPVESIALAMMIGLSNAAAVLVGNQLGAKNFEPVYYQAWATVILNVFIAFVVAVVLIVSNQWILNAFSALTADTRQLAEQFLVILALGVVLRSVPMMVIVGILRAGGDVKFCLYQDILAQWVIGIPLAAFAAIQLGWDPQWVYLLFLTEEVVKWTICLPRMVSRKWMKNLIGQ

SEQ ID NO: 12916 - protein, 463 aa, Neisseria meningitidis MC58
MSGQLGKGADAPDLVYGLEDRPPFGNALLSAVTHLLAIFVPMITPALIVGGALELPVEMTAYLVSMAMVASGVGTYLQVNRFGPVGSGMLSIQSVNFSFVTVMIALGAGMKEGGLTKDAMISTLLGVSFVGAFLVCFSAWLLPYLKKVITPTVSGVVVMLIGLSLVHVGITDFGGGFGAKADGTFGSMENLGLASLVLLIVLVFNCMKNPLLRMSGIAVGLIAGYIVALFLGKVDFSALQNLPLVTLPVPFKYGFAFDWHAFIVAGAIFLLSVFEAVGDLTATAMVSDQPIEGEEYTKRLRGGVLADGLVSVIATALGSLPLTTFAQNNGVIQMTGVASRHVGKYIAVILVLLGLFPVVGRAFTTIPSPVLGGAMVLMFGLIAIAGVRILVSHGIRRREAVIAATSVGLGLGVAFEPEVFKNLPVLFQNSISAGGITAVLLNLVLPEDKTEAAVKFDTDHLEH

SEQ ID NO: 12917 - protein, 323 aa, ASPERGILLUS NIDULANS FGSC A4
MENYQKIEKIGEGTYGVVYKARELTHPNRIVALKKIRLEAEDEGVPSTAIREISLLKEMNDPNIVRLLNIVHADGHKLYLVFEFLDLDLKKYMEALPVSEGGRGRALPDGSTLSRNLGLGDAMVKKFMAQLIEGIRFCHSHRVLHRDLKPQNLLIDRDGNLKLADFGLARAFGVPLRTYTHEVVTLWYRSPEILLGGRQYSTGVDMWSCGAIFAEMCTRKPLFPGDSEIDEIFKIFRILGTPDETIWPGVTSFPDFKPTFPKWKREDIQNVVPGLEEDGLDLLEALLEYDPARRISAKQACMHPYFQHGSSYYSGRARRNGFH

SEQ ID NO: 12918 - protein, 474 aa, Dechloromonas aromatica RCB
MSKQFDVLVIGGGPGGYIAAIRASQLGFLAACAESNPYADPKGEPRLGGTCLNVGCIPSKALLHTSHLFEEANHSFEAQGIKVGKATIDVPVMKARKDGVVNQLTSGIKMLLKKNKVSFLAGHGSFVGKEGDYWKVKVGAEEVLTKQVIVATGSKARHLPNLPVDQKIVMDNEGALNQESVPKKLAIIGAGVIGLEMGSVWRRVGSEVTVLEAMPDFLAAADVDVAKEALKLFSKQGLNIQMGVKIGDIKATKKSVSIAYTDKDGKEQKLDADRLIVSIGRVPNTDGLNGEAVGLKLDARGFVEVDGHCKTNLPGIWAIGDVVRGPMLAHKAHEEGVMVAELMAGQAGHCNFDTIPWVIYTSPEIAWVGKTEQQLKAEGVEYKAGKVPFLANGRALGMGDPSGFVKMLACKKTDRILGVHIIGANASEIIAEAVVAMEFGGASEDLARICHAHPTLSETVHEAALACDKRTLNF

SEQ ID NO: 12919 - protein, 525 aa, Xanthomonas axonopodis pv. citri str. 306
MNHRIRTQMFGLIAMTLPLAACAQQPAPAAKDLAPIAANRSATPAPQLVAGLPDFTNLVEQVGPGVVNIETTITRKDAMARQQRSGPGGRGGGAMPDDDQMPEFFRRFFGPDFQMPGGPRQGPGGGDDDGGIAGKSMGSGFIISADGYVLTNHHVVDGASEVTVKLTDRREFKAKVVGSDEQYDVALLKIEAKGLPTVRLGDSNTLKPGQWVVAIGSPFGLDHSVTAGIVSATGRSNPYADQRYVPFIQTDVAINQGNSGGPLLNTRGEVVGINSQIFSASGGYMGISFAIPIDLAFSAAEQIKATGHVSRGMLGVAVGPIDSLKAQGLGLPDSRGALVNDIPAGSPAAKAGIEVGDVIRAVNGKSIDVASDLPPMIGLMAPGTKVTLDVLRDGKPRTVTVTLAPLQDGTGNAAPRTAAEEAKPGAPASVELLGLQVADLTAAERSRLGLEVGEGVRIAAVTGAAARSTQPPLSPGLIIARVGRTKVGSVAELNRALSSYKKGDVVMLLVTDGKATSYVALKAGG

SEQ ID NO: 12920 - protein, 758 aa, Buchnera aphidicola str. APS (Acyrthosiphon pisum)
MTILNHTLGFPRIGLNRELKKAQEQYWSGELMIKDLLLVGSELRKKNWQKQKESGIDYIPVGDFAWYDHVLTTSMMLGNIPERHNNTVDSIDLDCLFRIARGCPPDISASEMTKWFNTNYHYIVPEFYKNKVLKYSWKQILDEVDEALLLGHKVKPILLGPITYLWLGKVKGEYFDRLDILKDIILIYKHVLKELSNRSIDFVQIDEPVLVLELPKKWKDAYHYAYKELSGITKLLLTTYFDSIEHNIEFIRDLPVQGIHIDLVHGKYNLKNFSSKIPSEWMLSLGVINGRNIWRSDLLKWFKSIKSISNHHRKILIGSSCSLLHTPIDLVAEKHLDKEVKRWFSFAVQKCEELRLLSSALNDNDIDSIKEWSLPIYERSVSKRVNKIEVENRLSNVLIDKHQRLSPYKTRSIEQNKKFNFPILPTTTIGSFPQTISIRKLRRDFKLGLVTEEEYTKIIKKNIKKVIKIQEELDIDVLVHGEAERNDMVEYFGEHLDGFAFTDNGWVQSYGSRCVKPPIIIGDISRPKPMTIEWSKYAQSLTKKPVKGMLTGPVTILLWSFPREDVSLKKIATQIALALYDEVLDLEKEKIEIIQIDEPALREGLPLRKSSWHEYLSWAVDVFRLSASGVKNTTQIHTHMCYCEFNDIMDSIALLDADVITIEAARSDMELLESFKKFKYPNEVGPGAYDIHSSNIPSVQSIISLLNKAMKYIPLKRIWVNPDCGLKTRNWNETILSLKNMVEATKILREKMKDSECD

SEQ ID NO: 12921 - protein, 432 aa, Dechloromonas aromatica RCB
MTTERKATLSIDGQAPVDFSIMSPTHGNDCIDIRTLGGKTGLFTYDSGFLSTASCKSKITFIDGDVGQLLYRGYPIEQLAENCNFLEVTYLLKNGELPNAKQKADFESTIKNHTMVHEQLSKFFSGFRRDAHPMAVMTGVVGALSAFYHDAMDFSDAEHRNVSFNRLVAKMPTIVAMAYKYNTGAPFMYPDNSLDYTANFMRMMFGNPCEKYVPNPVLVRALDTIFTLHADHEQNASTSTVRLAGSSGANPFACIAAGIACLWGPAHGGANEACLQMLEEIGDVSRVPEYIARAKDKNDSFKLMGFGHRVYKNFDPRAKLMRQVCNEVLAELGLENDRLFKLAMELERIALEDPYFVEKKLYPNVDFYSGIVQKAIGIPTEMFTCIFALARTVGWMTQWEEMISDPEYKIGRPRQLYMGAAKRDVVPLAQRG

SEQ ID NO: 12922 - protein, 458 aa, Staphylococcus epidermidis RP62A
MAKQLQRELNNRHIQLIAIGGAIGTGLFLGSGQTISLTGPSLLFTYMLIGIVLFAFMRALGELLLSNSKFNSFVDIANEYLGPFGGFVIGWTYWVCWIVSSMSDLTAMGQYFAYWYPQVPHWLTVLFIVLLLISFNLLGARLFGELEFWFSIIKVVTIITMVIVGLVLIFLSFKTEYGHASFGNLIHHGGMFPHGAAGFLMSFQIAVYSFIGIELIGVTAGETKNPEKTIPKAINNVPIRILLFYIGGLLVIMSVIPWFKVDPDSSPFVKLFTLIGVPFAAGIVNFVVLTAAASATNSGIYSNSRILFGLAKQGLGPKVLTKTNSNGVPYLSMLVSSITLLIAALLNFVFPDAIKLFIYVTTLSTVLFLVVWGMIIVSYIAYVKKNPEQHQSSAFKLWGGKIIAYIVLSFFIFIFILLFFSKDTRVAIFISPLWFIFLFFYYKKYKNNAESLADRQRH

SEQ ID NO: 12923 - protein, 594 aa, Dechloromonas aromatica RCB
MSIPVLKFDAVIVGAGGAGLRSAIQLSEAGLKTAVLSKVFPTRSHTVAAQGGVAASLGNSEEDHWTWHMYDTVKGSDWLGDQDAIEFMCKKANEVVVELEHYGMPFDRTDDGKIYQRPFGGHMSNFGEKPVRRSCAAADRTGHAMLHAMYQRNVKANTQFFVEWMALDLIRDEEGHVLGVTAMEMETGQIVIFHARATIFATGGAGRIFYSSTNAFINTGDGLGMAARAGIPLEDMEFWQFHPTGVAGAGVLITEGVRGEGGILRNSSKERFMERYAPNAKDLASRDVVSRAMATEIKEGRGCGVNKDYVLLDITHLDPATIMKRLPGIHEIGLQFAGVDCLKEPLPVVPTCHYQMGGIPTHYSGRVVMPKNGDMNSVVPGFYAGGECACASVHGANRLGTNSLLDLLVFGKSAGDSAVEDLKAGRAHRELPKDVADKTLARISALDNRKGGANVHETRLAMQRTMQDHAGVFRFGDMLKQGVEKILEVEKAARQLEIKDKSMAWNTARTEALEMENLIEVAKATMISAEARKESRGAHVRDDAPDTAEFPNGRNDKEWLKHTLFSPVDNSISYKPVNMQPLTVEAVALKTRSY

SEQ ID NO: 12924 - protein, 464 aa, Thermobifida fusca YX
MPLVAGVDSSTQSTKIVVRDAETGALIRQGRAPHPDGTEVNPHVWWHALLKAAEGGLLDDVAAISIAAQQHGMVALDADGTPVRDALLWNDTRSADAATDLINELGGPAAWSQAVGSVPVASFTVTKLRWLAQHEPDNAARAESILLPHDWLTQRLTQATEPVTDRGDASGTGYYDPATNTYRTDLLTLAFGRELRTPRVAAPAEVVGSVTTPELPAIDVVGPGTGDNMAAALALNARPGDVVVSIGTSGTAFAVAEKPTADPTGTIAGFADATGRFLPLVCTLNAARVLTAGAAALGVTLEEFNQLALTAPPGAGGLVLLPYLDGERTPDLPNATGRLDGLTRANLTPANLARAFVEGMLCGLADAVDALVHQGVPVNRVLLIGGGARSAAVRAIAPQILGRPVTIPAEGEYVADGAARQAAWALSGKPTPPEWEDAGTVVSEADPTPQVRERYAEARNRLEP

SEQ ID NO: 12925 - protein, 546 aa, Solibacter usitatus Ellin6076
MAKYIFVTGGVVSSLGKGIAAASIGCLLESRGLKVTCQKFDPYLNVDPGTMSPFQHGEVFVTDDGAETDLDLGHYERFTHSKLTQSNNLTSGRIYEQIIARERRGDYLGKTVQVIPHVTNEIKAAMKKVSQDVDVVIAEIGGTVGDIESLPFLEAIRQMRHEQGRDNCLFVHVTLVPWIAAAQELKTKPTQHSVKELRALGIQPDILLCRCERFIPEDMKEKIALFCDVDVQAVITARDVKSVYEVPVGFAAEGVDEIAMRLLKLEAGPRDLAKWNAMLDRIEQPKGEVSIALVGKYVEYEDSYKSLKEALLHGGLAHQLKVNIHWIEAEGVAGENWERQLEDYDGVLVPGGFGKRGIDGMLNAIRFARENKVPYFGICLGMQTLVIEFARNVCGLEAADSTEFNSGTPHRVIFKLRELKGIDELGGTMRLGSWACKLAEGSFAHKAYGTREINERHRHRYEFNREYEDRLKAGGLKITGETPDNTYVEICELGDHPWFLGCQFHPEFKSKPMEPHPLFKAFIGAAWEYRMRRLSAIEEPLFSRAD

SEQ ID NO: 12926 - protein, 375 aa, Saccharomyces cerevisiae
MSTEEQNGVPLQRGSEFIADDVTSNKSNNTRRMLVKEYRKIGRGAFGTVVQAYLTQDKKNWLGPFAIKKVPAHTEYKSRELQILRIADHPNIVKLQYFFTHLSPQDNKVYQHLAMECLPETLQIEINRYVTNKLEMPLKHIRLYTYQIARGMLYLHGLGVCHRDIKPSNVLVDPETGVLKICDFGSAKKLEHNQPSISYICSRFYRAPELIIGCTQYTTQIDIWGLGCVMGEMLIGKAIFQGQEPLLQLREIAKLLGPPDKRFIFFSNPAYDGPLFSKPLFSGSSQQRFEKYFGHSGPDGIDLLMKILVYEPQQRLSPRRILAHQFFNELRNDDTFLPRGFTEPIKLPNLFDFNDFELQILGEFADKIKPTKVAE

SEQ ID NO: 12927 - protein, 639 aa, Zea mays
MGNTCVGPSITMNGFFQSVSTALWKTPQEGDALPAAANGPGGASPGRSQSALPKPASDVHHVAVQSEAPEPVKIAAYHSEPAPAVRSEAPEPVKIAASHSEPAPMAAKPGGAAANASPSPSPRPRPQVKRVSSAGLLLGSVLRRKTENLKDKYSLGRRLGQGQFGTTHLCVERATGKELACKSILKRKLGSDDDVEDVRREIQIMHHLAGHPSVVGIRGAYEDAVAVHLVMELCGGGELFDRIVRRGHYTERKAAELARVIVGVVEACHSMGVMHRDLKPENFLFADHSEEAALKTIDFGLSIFFRPGQIFTDVVGSPYYVAPEVLKKRYGPEADVWSAGVIIYILLCGVPPFWAENEQGIFEEVLHGRLDFESEPWPSISDGAKDLVRRMLVRDPRKRLTAHEVLRHPWVQVGGVAPDRPLDSAVLSRMKQFSAMNKLKKMALRVIAENLSEDEIAGLREMFKMIDADNSGQITFEELKVGLEKVGANLQESEIYALMQAADVDNNGTIDYGEFIAATLHLNKVEREDHLFAAFQYFDKDGSGYITADELQVACEEFGLGDVQLEDLIGEVDQDNDGRIDYNEFVAMMQKPTVGGSRRRPICRTASASGSASGSGRRSGWPRPLCLWLPCCLRVGVDD

SEQ ID NO: 12928 - protein, 330 aa, uncultured bacterium 577
MKSLVTGANGFVGSAVARCLLEAGHEVRCLVRAGSDQSNLKGLPVEISEGDLRDVASLKRAVTNCENLFHVAADYRLWVPDPETMYEINVKGTQELILAASGADVSRIIYTSSVATLGINVDGNPADENTPSSLNNMTGHYKRSKFLAEQVVQHLTDKHQLPLVIVNPSTPVGPRDVKPTPTGQIVLDTLCGRMPAYMSTGLNVAHVDDIAQGHLLAYTHGKTGERYILGGENLHLIQILQAVDEIIGKKIKRMNMPAGMMLPVAWIMEKVAIATNTQPRASVDSIRMAEKKMFFSSAKAIRDLNYKYRPSSEAIQDAVTWFQNNGYCKG

SEQ ID NO: 12929 - protein, 444 aa, Spinacia oleracea
NSQTCLDPEASRSVLGIILGGGAGTRLYPLTKKRAKPAVPLGANYRLIDIPVSNCLNSNISKIYVLTQFNSASLNRHLSRAYASNLGGYKNEGFVEVLAAQQSPENPDWFQGTADAVRQYLWLFEEHNVMEFLILAGDHLYRMDYERFIQAHRETDADITVAALPMDEKRATAFGLMKIDEEGRIIEFAEKPKGEQLQAMKVDTTILGLDDERAKEMPYIASMGIYVISKDVMLNLLRDKFPGANDFGSEVIPGATSIGLTVQAYLYDGYWEDIGTIEAFYNANLGITKKPVPDFSFYDRSSPIYTQPRYLPPSKMLDADITDSVIGEGCVIKNCKIHHSVIGLRSCISEGAIIEDTLLMGADYYETDADRKLLAAKGSVVLGIGQNSHIKRAIIDKNARIGDNVKIINSDNVQEAARETDGYFIKSGIVTVIKDALIPSGTVI

SEQ ID NO: 12930 - protein, 413 aa, Arabidopsis thaliana
MKMALLLNSTITVAMKQNPLVAVSFPRTTCLGSSFSPPRLLRVSCVATNPSKTSEETDKKKFRPIKEVPNQVTHTITQEKLEIFKSMENWAQENLLSYLKPVEASWQPQDFLPETNDEDRFYEQVKELRDRTKEIPDDYFVVLVGDMITEEALPTYQTTLNTLDGVKDETGGSLTPWAVWVRAWTAEENRHGDLLNKYLYLSGRVDMRHVEKTIQYLIGSGMDSKFENNPYNGYIYTSFQERATFISHANTAKLATTYGDTTLAKICGTIAADEKRHEMAYTRIVEKLFEIDPDGTVQALASMMRKRITMPAQLMHDGRDDNLFDHYAAVAQRIGVYTATDYAGILEFLLRRWEVEKLGMGLSGEGRRAQDYLCTLPQRIRRLEERADDRVKRASKSKPSVSFSWIYGREVEL

SEQ ID NO: 12931 - protein, 561 aa, Escherichia coli O157:H7
MKSPAPSRPQKMALIPACIFLCFAALSVQAEETPVTPQPPDILLGPLFNDVQNAKLFPDQKTFADAVPNSDPLMIRMQQNQSGFDLRHFVNVNFTLPKEGEKYVPPEGQSLREHIDGLWPVLTRSTENTEKWDSLLPLPEPYVVPGGRFREVYYWDSYFTMLGLAESGHWDKVADMVANFAHEIDTYGHIPNGNRSYYLSRSQPPFFALMVELLAQHEGDAALKQYLPQMQKEYAYWMDGVENLQAGQQEKRVVKLQDGTLLNRYWDDRDTPRPESWVEDIATAKSNPNRPATEIYRDLRSAAASGWDFSSRWMDNPQQLNTLRTTSIVPVDLNSLMFKMEKILARASKAAGDNAMANQYETLANARQKGIEKYLWNDQQGWYADYDLKSHKVRNQLTAAALFPLYVNAAAKDRANKMATATKTHLLQPGGLNTTSVKSGQQWDAPNGWAPLQWVATEGLQNYGQKEVAMDISWHFLTNVQHTYDREKKLVEKYDVSTTGTGGGGGEYPLQDGFGWTNGVTLKMLDLICPKEQPCDNVPATRPLSESTTQPVKQKEAEPTP

SEQ ID NO: 12932 - protein, 206 aa, Zea mays
MASLLARQAAQALRARQTAQLGPAASAMQGHLRTYMNAGIPKRFKEDEEKEQLAKDLAKDWNAVFERSINTLFLTEMINYPFEKGPLSPRFRGEHALRRYESGEERCIACKLCEAICPAQAITIEAEEREDGSRRTTRYDIDMTKCIYCGFCQEACPVDAIVEGPNFEFATETHEELLYDKEKLLENGDRWETEIAENLRSESLYR

SEQ ID NO: 12933 - protein, 353 aa, Pseudomonas syringae pv. syringae B728a
MTQTALVVGASGIVGSAITQLLLENDWQVAALSRSPSARPGVIPVAADLQDPDSVRAALADVKPTHVFITTWSRQATEAENIRVNAAMVRNVLDAVRPAGSVKHVALVTGLKHYLGPFEAYGKGTLPQTPFRESQARLDIENFYYAQEDEVFAAAEKDGFTWSVHRPHTVTGVAVGNAMNMATTLAVYASICKATGRPFVFPGSRVQWDSLTDMTDARQLARQQLWAATTPAAANQAFNITNGDVFRWSWMWGQIAEYFGLQPADFPSEPAPLETQMANDQAIWDDIVREHQLKESDINRLISPWHSDADLGRPIEVVTDMSKSRKLGFTAFQASDDAFFDVFEKLRRDRLIP

SEQ ID NO: 12934 - protein, 1283 aa, Arabidopsis thaliana
  misc_feature (475)..(475): Xaa can be any naturally occurring amino acid
  unsure (1)..(1283): unsure at all Xaa locations
MHRDMYSSRGTGYGQQQYGSQSGYSQNLGSGYPGSSVSGGAEGGSQISLSSRHPSITGAPQETDIGGGYRSHLSTAASHYGTQYGSVYGSTSLSSSQPLSTNGLGSSVLDNRSGYVPTLPDSPKFASGSYLSPSSHGYGQKTDDLYSDKLSGYIPVDRRQYGEQSSSYLGRELQNEPTRRYADPSNFARQTDLYDRIDQASLLRGEQLLKMQSLHTSSVDAGVNRQTDYLTERSSTVRHSDQEAMHYGGRLESDPHGLSVRNTSSYASQHTPSLLGAVPRRNLDDYIYPESSSNPGYGVSLPPGRDYGTGKGIHSAASLDLDYPGGMLARGTGAAPRVDDLRKGDRASYLREFDLREEERRREDQRARDKEREREREREHDRERERQRERERQRARDRERERILERREKERQGERERERKRALEIKRDRTPTARATSKDTKERTPVPKSISRDARSCCELAETEAYTFYAYCCEXFEHDYIEDGGADVKSTSTKPLALKTGGKSVWNAKMVLMSGLSRTALEDLASDKFFEDRIPHICNILKFAVLKKDHSFMAIGGSWDPTDGMDPSVDQSSLIQTMLRHSKDKLHLDLSNCRHWNPFLEIHYDRVGTDGVFSYKEITVLFVPDLSECLPSFDVWRTQWLAHRKALTERDRLLSQEVKKDTVEVTKDAEKKSPGDTSGTPTTGTKKTVKKIIKRVVKRPVNDGKATGMKGEKSDVPEHVAIPETTVPKEESTGTSSNKKIVKKVAETGDTSDPSAKANEQTPAKTIVKKKIIKRVAKRKVAEIDNKMDGDSKKDGDSDEKKVMEVGKKSSDSGSVEMKPTAESLEDVKDENASKTVDVKQETGSPDTKKKEGASSSSKKDTKTGEDKKAEKKNNSETMSEGKKIDRNNTDEKEVKEKVTEKEIKERGGKDESRIQVKDRKKCEEPPRAGFILQTKRNKDSKLRSLSASLDSLLDYTDKDLDESSFEISLFAESLYEMLQYQMGSRIFEFLKKLRVKIVRQRNQRKRHQEELSVKQNEAKSQDKRQKTAEHEDKEASVISESAPGKDDKETSGKETVDGSREIADKEAVAKTKETLGSKEVTVGEAANMEVENQDEEDDDGDDDPEEDPEEDPEEDPEEDPEEDPEEDPEECEEMDVANTEQEEPAEEPQKKEENLEKTSGTVADPITEAATDNRKEERGPNDSKTEIKPKSETDKHGKQDGGTSDAAKREETVDKELLQAFRFFDRNQAGYVRVEDMRVTIHSLGKFLSHREVKELVQSALLESNTGRDDRILYNKLVRLSL

SEQ ID NO: 12935 - protein, 248 aa, Glycine max
MVFEETELRLGLRLGLPGNGAAPTTEAAAELGVRKRGFSETETDETTSVDLMLNLSPKEASAAATTDGADPRENPKTSPKEKNLPLLDPAKPPAKAQVVGWPPVRSFRKNMFAAQKSSGGEESEKNSPNASFVKVSMDGAPYLRKVDLKMYKSYPELSDALGKMFSSFTIGNCESQGFKDFMNESKLMDLLNSSDYVPTYEDRDGDWMLVGDVPWEMFVESCKRLRIMKGKEAIGLAPRAVEKCKNRS

SEQ ID NO: 12936 - protein, 664 aa, Shewanella sp. ANA-3
MSSRKVLANAIRALSMDAVQKANSGHPGAPMGMADIAEVLWNDFLKHNPNNPKWVDRDRFILSNGHGSMLIYSLLHLTGYDLPIDELKQFRQLHSKTPGHPEYGYTPGVETTTGPLGAGISNAVGMAIAEKTLAAQFNREGHEIVDHYTYCFLGDGCLMEGISHEACSLAGTLGLGKLIAFWDDNGISIDGHVEGWFTDDTPKRFESYGWHVIANVDGHDSDAIRAAIEAAKAVTDKPTMICCKTIIGFGSPNKSGSHDCHGAPLGDAEIAAAREFLGWPHAPFEIPADVYAGWDAKEAGNAREAAWNDKFAAYAAAYPELAAEYERRVLKGELPADFEAKAQAFIQECQAKGEGIASRKASQNAIAAFGAVLPELLGGSADLAGSNLTLWAGSRGIQEDPAGNYVYYGVREFGMSGIMNGVSLHGGFINYGATFMMFMEYARNAVRMSALMGIQNIFVYTHDSIGQGEDGPTHQPVEQLANLRMTPNMAVWRPCDAAETAVAWKAAIERRHAPTSLVFSRQNLKAQARTAEQLANVAKGAYVLQDCAGTPEYILIATGSEVQLAVEAAAALTEQGKQIRVVSMPSNTEFDKQDAAYKESVLPKAVTKRIAIEAAHTDFWYKYVGFEGTVVGMTTFGESAPGNVLLKHFGFTVENVLNAAKSLG

SEQ ID NO: 12937 - protein, 758 aa, Neisseria meningitidis MC58
MTTLHFSGFPRVGAFRELKFAQEKYWRKEISEQELLAVAKDLREKNWKHQVAANADFVAVGDFTFYDHILDLQVATGAIPARFGFDSQNLSLEQFFQLARGNKDQFAIEMTKWFDTNYHYLVPEFHADTEFKANAKHYVQQLQEAQALGLKAKPTVVGPLTFLWVGKEKGAVEFDRLSLLPKLLPVYVEILTALVEAGAEWIQIDEPALAVDLPKEWVEAYKDVYATLSKVSAKILLSTYFGSVAEHAALLKALPVDGLHIDLVRAPEQLDAFADYDKVLSAGVIDGRNIWRANLNKVLETVEPLQAKLGDRLWISSSCSLLHTPFDLSVEEKLKANKPDLYSWLAFTLQKTQELRVLKAALNEGRDSVAEELAASQAAADSRANSSEIHRADVAKRLADLPANADQRKSPFADRIKAQQAWLNLPLLPTTNIGSFPQTTEIRQARSAFKKGELSAADYEAAMKKEIALVVEEQEKLDLDVLVHGEAERNDMVEYFGELLSGFAFTQYGWVQSYGSRCVKPPIIFGDVSRPEAMTVAWSTYAQSLTKRPMKGMLTGPVTILQWSFVRNDIPRSTVCKQIALALNDEVLDLEKAGIKVIQIDEPAIREGLPLKRADWDAYLNWAGESFRLSSAGCEDSTQIHTHMCYSEFNDILPAIAAMDADVITIETSRSDMELLTAFGEFQYPNDIGPGVYDIHSPRVPTEAEVEHLLRKAIEVVPVERLWVNPDCGLKTRGWKETLEQLQVMMNVTRKLRAELAK

SEQ ID NO: 12938 - protein, 328 aa, Dechloromonas aromatica RCB
MSKAPMRVAITGAAGQIGYSLLFRIASGEMLGKDQPVILQLLDLPQAQQAVKGVMMELEDCAFPLLAGMVATDDPNVAFKDADVCLLVGARPRTKGMERADLLTANGAIFTVQGKAIAENAKEDVKVLVVGNPCNTNAFIAAAAAKKVGRTNPNNYHGMLRLDHNRALSQLAGKTGRAVSSLKKLVVWGNHSPTMYADYRFCTSNGDSVKALVNDHAWNNDVFLPTVGKRGAAIIEARGLSSAASAANAAIDHVRDWVLGSDEWVTMGVPSDGSYGIPAGIVFGFPCECKGGKFSIIQGLEIDEYSREKINFTLKELTDEAEAVKDML

SEQ ID NO: 12939 - protein, 269 aa, Anabaena variabilis ATCC 29413
MTMEDFVTPPAFGEKVRERWTLAGRKALITGATKGIGLAIAQEFLALGAEVIIVARNAEAIEQQINAWDSAGKVHGVTADVSTSEGRQIIHEYVSKTVGELDILVNNVGTNIRKKATDYTEEEFAGIFQINLTSIFELSRLFYPLLKTSKNSSIVNIASVAGLISVRTGAPYGMTKAALVQLTRSLAVEWADDGIRVNAIAPWFIQTPLTEPLLNNPETLSAVLSRTPMKRVGQPEEVASLTAFLCMPTASYITGQCIAVDGGFLAFGF

SEQ ID NO: 12940 - protein, 142 aa, Paxillus involutus
YIMLKPDGVDRGLIGEILARFEKRGFKLIAAKLALPSKEHLEKHYADLKDKPFFPGMIKYMQSGPVFCMVFEGLDAVKTGRAMLGATNPLASQPGTIRGDYALAVGRNICHGSDSVENAEKEIALWFPDGTLQYRLSQEAMI

SEQ ID NO: 12941 - protein, 222 aa, Solibacter usitatus Ellin6076
MKLSMRTGAVALSGAIACFLTLRALTAGEIPPPFADVPAPTTNQLATAVFAGGCFWGVEGVYEHVKGVKAAVSGYAGGPASMAHYDLVSNGDTGHAESVKVTYDPAQISYGKLLQIFFAVAHDPTELNRQGPDWGTQYRSAIFYSSEEEQRVATAYIEQLNAAKAFSKPIVTQVAPLKAFYPAEDYHQHFLERNPTHPYIVYNDLPKIAQLKRRFPELVTKK

SEQ ID NO: 12942 - protein, 153 aa, uncultured bacterium 577
MENLEKLNLTELKSKLSAEQFKVTQKGGTEEPFRNLYWNNSEPGLYVDVVSGESLFSSLDKYDSGTGWPSFTRPVQNSGIIEKKDNEYGMVRTEVRSGYADSHLGHVFTDGPSPTGKRYCINSASLRFIPVDSLSEERYKDYIDSDSKENKIE

SEQ ID NO: 12943 - protein, 142 aa, Paxillus involutus
  misc_feature (17)..(17): Xaa can be any naturally occurring amino acid
  unsure (1)..(142): unsure at all Xaa locations
YIMLKPDGVDRGLIGEXLARFEKRGFKLIAAKLALPSKEHLEKHYADLKDKAFFPGMIKYMQSGPVFCMVFEGLDAVKTGRAMLGATNPLASQPGTIRGDYALAVGRNICHGSDSVENAEKEIALWFPDGTLQYQLSQEAMI

SEQ ID NO: 12944 - protein, 503 aa, Triticum aestivum
  misc_feature (337)..(337): Xaa can be any naturally occurring amino acid
  unsure (1)..(503): unsure at all Xaa locations
MAMASLARRRAAEAVLLRRPHAAAWASACRGYAASGEESDVVVIGGGPGGYVAAIKAAQLGLKTTCIEKRGALGGTCLNVGCIPSKALLHSSHMYHEAKSSFAHHGVKFSNLEVDLPAMMAQKDKAVSGLTKGIEGLFKKNKVEYVKGFGKLVSPSEVSVDLVDGGSTIVKGKNIIVATGSDVKSLPGVTIDEKKIVSSTGALALTEIPKKLVVIGAGYIGLEMGSVWNRLGSEVTVVEFAPDIVPSMDGEIRKQFQRMLEKQKFKFMLKTKVVGVDTSGSGVKLTVEPAAGGEQTVIEADVVLVSAGRVPYTAGIGLDAIGVETDKGGRILVDNRXFMTNVKGVYAIGDAIPGPMLAHKAEEDGVACVEFIAGKEGHVDYDTVPGVVYTHPEVASVGKTEEQVKASGVAYQVGKFPLLANSRAKAIDDAEGMVKVISEKETDRILGVHIMSPGAGEIIHEAVLALQYGASSEDIARTCHAHPTVSEALKEACMNTYDKAIHM

SEQ ID NO: 12945 - protein, 250 aa, Zea mays
MAKNYPTVSAEYSEAVDKARRKLRALIAEKSCAPLMLRLAWHSAGTFDVSSRTGGPFGTMKHQSELAHGANAGLDIAVRLLEPIKEEFPILSYADFYQLAGVVAVEVTGGPEIPFHPGREDKPQPPPEGRLPDATKGSDHLRQVFGKQMGLSDQDIVALSGGHTLGRCHKERSGFEGAWTTNPLVFDNSYFKELLSGDKEGLLQLPSDKALLSDPVFRPLVEKYAADEKAFFDDYKEAHLKLSELGFADA

SEQ ID NO: 12946 - protein, 666 aa, Treponema pallidum subsp. pallidum str. Nichols
MAGRACRRYSPRYLCLQCGGHQCRGFHPRLCYRCCGAGAAHGRRACRFSGVFLCSAQGEYLQGCLCGGYFFRRFSGCIRRGVARCCPTFCCRLRAVKTASLCLRSAWLNVALGGVLGVLSGCRVFDERADVRVDRTGKEYLDAQVACAKEELRARPLRALMCAIALKRNAPAHQKVAQLYAQALARVKEAFRYSVEKQKWSEALVFFRSLSALRIPLKDWTERSLHRAQIEQWKKEGAHVLVAAQEKRAGTSAARSPAAMIKGTVTILVDRGIRVEHGRGFADRVIGSGFFIDKRGYIVTNYHVIRSEVDPAYEGYSRAYIKLPSDNTVKVPVRVVGWDALADLALLKTEITPEVVFGLGSSKNLDVGSKIYAIGSPAGLERTLTSGIVSAKKRKLLSVGGGVLQIDASINRGNSGGPVIDEEGCVQAVAFAGVEQHAGLNFAIPVELLKQVLPSLYRGGLVTHPWLGAFGETHRVWKNAGVGGVLSSYVIPGSPLSYAGIPEGAIITTVNDASVSCVADLQAELEKYVPETIVRLAGYRLRDKSKLHDLAAYEQDEWYCQLGVRPEHPARILYKYDLSYRAFLPLFGMRLARTGTRNTYRVESLVPGNFADEHGFSTYDVIEIQNIYMIEASEAIVADVYAKRRKAGYIDTFMRLVAALDNPSFF

SEQ ID NO: 12947 - protein, 160 aa, Arabidopsis thaliana [sequence omitted]

SEQ ID NO: 12948 - protein, 267 aa, Triticum aestivum
  misc_feature (124)..(124): Xaa can be any naturally occurring amino acid
  misc_feature (172)..(172): Xaa can be any naturally occurring amino acid
  misc_feature (237)..(237): Xaa can be any naturally occurring amino acid
  misc_feature (246)..(246): Xaa can be any naturally occurring amino acid
  misc_feature (255)..(255): Xaa can be any naturally occurring amino acid
  unsure (1)..(267): unsure at all Xaa locations
RRRKFIRSDPIQSSPPTISPGNLRSERSEGSLVLLLKMQIFVKTLSGKTITLEVESSDTIDNVKAKIRDKEGIPPDQQGLIFAGKQLEDGRTLADYNIQKESTLHLVLRLRGGMQIFVKTLTGXTITLEVESSDTIDDVKAKIHDKEGIPPDQQGLIFAGKQLEDGRTLADXNVQKESTLHLVLRLRGGMQIFVKTLTGKIITLEVESSDTIDKVKAKIRDKEGIPPDQQRLISAGXQLEDGRTLXADYKIQKEXTLHLVLRLGVGQ

SEQ ID NO: 12949 - protein, 312 aa, Pseudomonas syringae pv. syringae B728a
MFLVCGEALFDIFTRADDSGSLNRLGFDAIAGGSPFNVAIGLRRLGVEASFLAGLSTDYLGRRLRAVLEKETVNTDHLIDFDAPTTLAMVAVGSDGSPTYSFRGDGCADRQLRLEHLPELDGQVRGIHVGSFSLVVQPIADTLLALVARESSTRLISLDPNVRLNPAPDIQRWRSQVAAFAEHAHMIKVSDEDLHLLYPDSDPQKIAEGWLGKRTQLVIVTRGTQGASVFTRQHGTWSAPAKTVVTADTVGAGDTFQAALLTFLSERQLDTPEGLATLSRELLDEMLSFAVGAAALTCTKVGPDLPYRHQLG

SEQ ID NO: 12950 - protein, 493 aa, Pseudomonas syringae pv. syringae B728a
MFLGIDCGTQGTKVLVLDTESGTVLGEGSAPHSLISDHNGRREQDVQQWLDALQQATREALAASGVSGQQIQGIGVSGQQHGLVLLDAQGQVLRPAKLWCDTESAPENQRLLDFLGGAQGSLQRLGLVIAPGYTVSKLLWTKEQYPDLFERIDKVLLPHDYLNYWLTGRCCTEFGDASGTGYFNVRTREWDLPLLAHIDPSGRLGKALPQLLQAHEPVGALRAEVARLLGLNPDALVSSGGGDNMMGAIGTGNIQPGLITMSLGSSGTVYAYADEAQVSEHESVATFCSSSGGWLPLICTMNLTNATTAIRELFALDIGGFNQVVAQAPIGAEGVLMLPFLNGERVPALPDATGSIVGLDSTNLTQANLSRAVVEGTTFGLRYGLDLLRDSGIKSEKIRLIGGGSKSAVWRQIVADIMNTPVICTDHSEAAALGAAIQAAWCWSRANGKAQDLQQLCERCVSLDQSSETHPVVHNVAAYQQVYQGYQAQLRKV

SEQ ID NO: 12951 - protein, 277 aa, Bacillus cereus ATCC 10987
MSLTSLKDYTTLHNGVKMPWFGLGVFKVEDGSEVIESVKAAIKNGYRSIDTAAIYQNEEGVGQAIRESGVSREELFITSKVWNSDQGYETTLQAFETTLEKLGLEYLDLYLVHWPVKGKYTESWKALEKLYKDGRVRAIGVSNFHIHHLQDVFEIAEIKPMVNQVEYHPRLAQEELHAFCKEHNIQLEAWSPLMQGQLLDNPTLQEIATKYNKSTAQIILRWDLQNEVVTIPKSIKEHRIIENANIFDFELSADDMKAIQALNEDRRVGPDPDNFNF

SEQ ID NO: 12952 - protein, 399 aa, Candida glabrata CBS138
MIRAQASRLICNSRVITSKRTFALAARAASMRPAASLMAQKSIKPIVATRGIKQINFGGTVETVYERADWPREKLLNYFANDTFALIGYGSQGYGQGLNLRDNGLNVIIGVRKDGASWKAAIEDGWVPGENLFEVEEAVKKGTYVMNLLSDAAQSETWNSLKPLLTKGKTLYFSHGFSPVFKDLTHVEPPKDIDVILVAPKGSGRTVRSLFKEGRGINSSYAVWNDVSGKAHEKAQALAVAVGSGYVYQTTFEKEVNSDLYGERGCLMGGIHGMFLAQYEVLRENGHSPSEAFNETVEEATQSLYPLIGKYGMDYMYDACSTTARRGALDWYPIFKDALKPVFQDLYESTKNGSETKRSLEFNSQPDYREKLESELQTIRDMEIWRVGKEVRKLRPENQ

SEQ ID NO: 12953 - protein, 181 aa, Pyrococcus horikoshii OT3
MALRPAKIDRYVDKPAYTRREYIRGAPGPKITIFDMGNPAGDFEFEVALHTAEPVQIRQNALEAARQQVNRYLQKNVGRSNYHFKIRVYPFQVLRENPMATGRKADRYGNGMRRPFGKPIGLAARLKRDQKILSIRVNRQHLKFAIEGARRAAMKFPCKCYYRIYDKEGNDVTTKILSQGL

SEQ ID NO: 12954 - protein, 365 aa, Aspergillus oryzae
MAEFVRAQIFGTTFEITSRYTELQPVGMGAFGLVCSARDQLTGQPVAVKKIMKPFSTPVLSKRTYRELKLLKHLRHENIISLSDIFISPLEDIYFVTELLGTDLHRLLTSRPLEKQFIQYFLYQILRGLKYVHSAGVVHRDLKPSNILINENCDLKICDFGLARIQDPQMTGYVSTRYYRAPEIMLTWQKYDVEVDIWSAACIFAEMLEGKPLFPGKDHVNQFSIITELLGTPPDDVIETICSENTLRFVKSLPKRERQPLATKFKNADPDAVDLLERMLVFDPKKRIRAGEALAHEYLAPYHDPTDEPVAEEKFDWSFNDADLPVDTWKIMMYSEILDFHNIDQGTEASQVLVEGAGDAQQNFV

SEQ ID NO: 12955 - protein, 183 aa, Erwinia carotovora subsp. atroseptica SCRI1043
MSTEIYAIPLTTIDGKATTFEAFKGQVALVVNVASKCGLTKQYDALEKLYETYRDKGLVVLGFPSNEFAGQEPGSEEEIQEFCRGTFGVQFPMFSKIEVNGENRHPLYQLLIRQQPEANGTWKSDFFARLVNKGRKPKNPEDILWNFEKFLVDREGRVIERFAPDMSPDHDTIVKAIEAALAK

SEQ ID NO: 12956 - protein, 428 aa, Trichodesmium erythraeum IMS101
MSDSLFDDASRRLERALQYVSLSEDTKERLKYPKATLIVSIPVRMDDGSLRVFQGYRVRYDDTRGPTKGGIRYHPNVSIDEVKSLAFWMTFKCAVVSLPFGGAKGGITVNPKELSRMELERLSRGYIDAIADFIGPDTDIPAPDMYTNPMIMGWMMDEYSIIRRQLSPAVITGKPVSIGGSLGRNTATAMGAFFAIETIMPKFEYTPEKTTVAIQGFGNAGAFLAELLCLHGYKVVAVSDSQGGIYSAQGLDIPSIRQYKEVNKQIQAVYCKDSVCNIVEHTVLTNEELLALDVDILIPAALENQITEENVKDIQAKFIFEAANGPTTSGADKILEDRGVYVFPDILINAGGVTVSYFEWVQNRSGLYWTLDEVNQKLKAKMVAETENIWQISQELSISMRTAAYVHGLDRLGQAINAKGTRAFYAKR

SEQ ID NO: 12957 - protein, 587 aa, Neisseria meningitidis MC58
MGFPVRKFDAVIVGGGGAGLRAALQLSKSGLNCAVLSKVFPTRSHTVAAQGGISASLGNVQEDRWDWHMYDTVKGSDWLGDQDAIEFMCRAAPEAVIELEHMGMPFDRVESGKIYQRPFGGHTAEHGKRAVERACAVADRTGHAMLHTLYQQNVRANTQFFVEWTAQDLIRDENGDVVGVTAMEMETGEVYIFHAKAVMFATGGGGRIYASSTNAYMNTGDGLGICARAGIPLEDMEFWQFHPTGVAGAGVLITEGVRGEGGILLNADGERFMERYAPTVKDLASRDVVSRAMAMEIYEGRGCGKNKDHVLLKIDHIGAEKIMEKLPGIREISIQFAGIDPIKDPIPVVPTTHYMMGGIPTNYHGEVVVPQGEDYEVPVKGLYAAGECACASVHGANRLGTNSLLDLVVFGKAAGDSMIKFIKEQSDWKPLPANAGELTRQRIERLDNQTDGENVDALRRELQRSVQLHAGVFRTDEILSKGVREVMAIAERVKRTEIKDKSKVWNTARIEALELDNLIEVAKATLVSAEARKESRGAHASDDHPERDDENWMKHTLYHSDINTLSYKPVHTKPLSVEYIKPAKRVY

SEQ ID NO: 12958 - protein, 527 aa, Kluyveromyces lactis NRRL Y-1140
MLFKNTVRFGLAALMAASCSAQGDAVAPEDSAVVKLDADTFHEFIKEHPLVLAEFFAPWCGHCKTLAPEYVKAADELESKDIPLAQIDCQENQQFCQEQGIPGYPSLKLFKNGNPEAAGEYQGGRDAKAIVNYMLKQSEPAVQVVEDEKAFNEIIAKNLDNTYVVDGSVPEFNETFYQVADSLRDDYSFIQHGSDGKLSIYLPGESEPIVYEGEDFDAETISTWIAVEAFPYFGDVNGETYQAYMAVKVPLAYFFYTSPEEREEYESHFVDLAKKFRGKVNFAGLDASKFGRHAENLNQKQQFPLFAIHDTIKDLKYGLPQLADEEFAALEKPITLATEEITKFVEDFLEGKAEPIVKSEEIPEIQENSVFKIVGKNHEEIVRDPKKDVLVEYYAPWCGHCKKLAPTYESMAEFAHENDELKDKVLIAKIDATANDVQSVEIPGFPVLYLWPAGEETEPILFEGPRTAEAFLAFIKENGSHGVDGLALYEEYLVEVEKKKQEEEEAQKAKEVEEVAEEDSELEQDEL

SEQ ID NO: 12959 - protein, 196 aa, Kluyveromyces lactis NRRL Y-1140
MSFNSPFLEFFDAINQEVDQFNRLLNSSGVVAPKKIEGNYPADSRQVAKQSKNNSNSLSNWFKDPWFADLGQNLIPPLDILDHEKEYEVHVSVPGIKEKKDINLEYHKDANEIVISGEIPDVTTEETKDSAKIRERRYGKFSRVVRLPDSPGIDVENIKANYTNGVLVLNVPKLKPTEEDKAKVYKIEVGDEAAKL

SEQ ID NO: 12960 - protein, 367 aa, Shigella flexneri 2a str. 301
MSDSQTLVVKLGTSVLTGGSRRLNRAHIVELVRQCAQLHAAGHRIVIVTSGAIAAGREHLGYPELPATIASKQLLAAVGQSRLIQLWEQLFSIYGIHVGQMLLTRADMEDRERFLNARDTLRALLDNNIVPVINENDAVATAEIKVGDNDNLSALAAILAGADKLLLLTDQKGLYTADPRRNPQAELIKDVYGIDDALRAIAGDSVSGLGTGGMSTKLQAADVACRAGIDTIIAAGSKPGVIGDVMEGISVGTLFHAQATPLENRKRWIFGAPPAGEITVDEGATAAILERGSSLLPKGIKSVTGNFSRGEVIRICNLEGRDIAHGVSRYNSDALRRIAGHHSQEIDAILGYEYGPVAVHRDDMITR

SEQ ID NO: 12961 - protein, 477 aa, Lycopersicon esculentum
MGLISKIATNDGHGENSAYFDGWKAYENDPFHPTQNPNGVIQMGLAENQLCFDLIQEWIVNNPKASICTYEGVQDFQDTAIFQDYHGLPEFRKAVARFMEKVRGDRVRFDPERIVMSGGATGAHESLAFCLADPGDAFLVPTPYYPGFDRDLRWRTGVQLFPVVCESSNNFKVTKEALEEAYSKAQESNIKVKGLLINNPSNPLGTILDKETLKDILRFINDKNIHLVCDEIYAATAFSQPSFISISEVKSEVVGCNDDLVHIVYSLSKDLGFPGFRVGIIYSYNDAVVNIARKMSSFGLVSTQTQRLIASMLLDTIFVEDFIAKSSMRLLQRYGLFTKGLGQVGITTLKSNAGLFIWMDLRRFLENSTFDDELKLWHIIIDKVKLNVSPGCSFHCSEPGWFRVCFANMDDATMKIALRRIRHFVYLQPNKGVEVATKKQYCRTRSKLEISLSFRRLDDFMNSPHSPMSSPMVQARN

SEQ ID NO: 12962 - protein, 427 aa, Neisseria meningitidis MC58
MSKSIKLNVPGQAGLELPVLEASIGHDVVDIRGLTKNTGLFSFDPGFVSTASCESKITYIDGDQGLLYYRGYPIEQLAEKSDYLEVCYLLIYGELPTPEQKAEFDNTVRRHTMVHEQLTWFFRGFRRDAHPMAMMVGVVGALSAFYQDSLDISNPEHRKIAIYRLISKIPTIAAMCYRYSNGLPFNYPKNNLSYSENFLHMMFATPCEDYKPNPVLARALDRIFILHADHEQNASTSTVRLAGSSGANPFACIAAGIACLWGASHGGANEAVLKMLDEIGDVSNVAAYMEGVKQRKYRLMGFGHRVYRNMDPRASIMRETCYEVLKELGLEDSPKFKLAMELEQIALKDPFFIERKLYPNVDFYSGIVLSALGIPTEMFTVIFALSRSVGWISHWHEMISDPSLKIGRPRQLYTGSERRDYVPPGER

SEQ ID NO: 12963 - protein, 193 aa, Brassica napus
  misc_feature (182)..(182): Xaa can be any naturally occurring amino acid
  misc_feature (186)..(186): Xaa can be any naturally occurring amino acid
  misc_feature (188)..(188): Xaa can be any naturally occurring amino acid
  misc_feature (190)..(190): Xaa can be any naturally occurring amino acid
  unsure (1)..(193): unsure at all Xaa locations
MSTVSPSSQLVQVVPDNQNNTGDSSAEVNYEDLVQEAMESLSLEEGTDEPQIGDVVDGVIDGTTSEGGYLVTMKFGSQVLKGVLYHHAKRPQQAMGTPPSGMPPASQRRAKKKARETTEVDSKKPKFRRSGYNLFFSKKINFFFAEHARLKSKKQVYQDKGVTDGERYRTEIMLEYESAHEXDGAXAXAXAMQ

SEQ ID NO: 12964 - protein, 384 aa, Saccharomyces cerevisiae
MSETELRKRQAQFTRELHGDDIGKKTGLSALMSKNNSAQKEAVQKYLRNWDGRTDKDAEERRLEDYNEATHSYYNVVTDFYEYGWGSSFHFSRFYKGESFAASIARHEHYLAYKAGIQRGDLVLDVGCGVGGPAREIARFTGCNVIGLNNNDYQIAKAKYYAKKYNLSDQMDFVKGDFMKMDFEENTFDKVYAIEATCHAPKLEGVYSEIYKVLKPGGTFAVYEWVMTDKYDENNPEHRKIAYEIELGDGIPKMFHVDVARKALKNCGFEVLVSEDLADNDDEIPWYYPLTGEWKYVQNLANLATFFRTSYLGRQFTTAMVTVMEKLGLAPEGSKEVTAALENAAVGLVAGGKSKLFTPMMLFVARKPENAETPSQTSQEEATQ

SEQ ID NO: 12965 - protein, 144 aa, Zea mays
  misc_feature (60)..(60): Xaa can be any naturally occurring amino acid
  misc_feature (123)..(123): Xaa can be any naturally occurring amino acid
  unsure (1)..(144): unsure at all Xaa locations
MPQTAVSTTAGRTSGSDGDSWADTHRREKGRLSNRETPREAGLRKQHNLDELEQEVARLXADNARVGARATDIAYYDTRVKQDNTVLRTRADELIDRVQFVHEVLNLGEELSDEDVDRYERDXPDDDPVVHTWYEEYPDVMMPM

SEQ ID NO: 12966 - protein, 515 aa, Bifidobacterium longum DJO10A
MLRSRGIHVLQQKLDPYINVDPGTMNPFQHGEVYVTEDGAETDLDIGHYERFLDVFLSQKANVTTGQIYQEVLRKERAGEYLGQCVQVIPHITNEIKSRMRAQASDDVDVIITEIGGTVGDIESQPFLEAAREVRRDLGPDNCMFVHVSLVPYISAAHELKTKPTQHSVMMLRQLGISPDALVLRSDRPLNQSIKDKISLMCDVDAEGVVNCVDAPSIYDVPKILFEEGLDAYVVRELGLPFHDVDWDEWADLLERVHHPKHEVNIAIVGKYIDLPDAYLSVTEAIKAGGFANWAKVNVKWVAADRCETTEGAAAALDNVDGIVIPGGFGIRGIDGKIGALKFARETKLPALGLCLGLQSMVIEYSRHVLGIEDANSSEFEPDCANPVIATMEEQKDIVAGKGDMGHTMRLGSYPAELEEGSLVAELYGTTHVTERHRHRYEVNVAYKDRLREGGLRISGQSPDGELTEFVELPQDVHPFYVATQAHPEFKSRPTKPHPLFAGLVKAALDHQAAR

SEQ ID NO: 12967 - protein, 457 aa, Shigella flexneri 2a str. 301
MESKNKLKRGLSTRHIRFMALGSAIGTGLFYGSADAIKMAGPSVLLAYIIGGIAAYIIMRALGEMSVHNPAASSFSRYAQENLGPLAGYITGWTYCFEILIVAIADVTAFGIYMGVLFPTVPHWIWVLSVVLIICAVNLMSVKVFGELEFWFSFFKVATIIIMIVAGFGIIIWGIGNGGQPTGIHNLWSNGGFFSNGWLGMVMSLQMVMFAYGGIEIIGITAGEAKDPEKSIPRAINSVPMRILVFYVGTLFVIMSIYPWNQVGTAGSPFVLTFQHMGITFAASILNFVVLTASLSAINSDVFGVGRMLHGMAEQGSAPKIFSKTSRRGIPWVTVLVMTTALLFAVYLNYIMPENVFLVIASLATFATVWVWIMILLSQIAFRRRLPPEEVKALKFKVPGGVATTIGGLIFLLFIIGLIGYHPDTRISLYVGFAWIVVLLIGWMFKRRHDRQLAENQ

SEQ ID NO: 12968 - protein, 325 aa, Arabidopsis thaliana
  misc_feature (29)..(29): Xaa can be any naturally occurring amino acid
  unsure (1)..(325): unsure at all Xaa locations
MAKDGPNWDGLLKWSLSHSDGTRPTCQLXSEEDRKWFAEAMQSQTVDVVKRLKEITQVLQTPQQVLEAHEVTPQDIEGLLDELQEHVESIDMANDLHSVGGLVPLLGYLKNSNANIRAKSADVVSTIVENNPRSQESVMEANGLESLLLRFTSDTDMHSRTQALGAISSLIRNNKPGITGFRIANGYSGLKDALETDSVRFQRKALNLLHYLLQENDSDSDIAIEFGLHHLMMHLVSSFDADVREAALRGLLELVKARKDCSTCGSSIVKGDERLRQILKDRIKAITRVKAMSLFMSQEDLSAAKEERQLLDSLWTTIFNEPSSL

SEQ ID NO: 12969 - protein, 318 aa, Pisum sativum
MATENKILILGATGAIGRHIVWASIKAGNPTYALVRKTSDNVNKPKLTEAANPETKEELLKNYQASGVILLEGDINDHETLVNAIKQVDTVICAAGRLLIEDQVKVIKAIKEAGNVKRFFPSEFGLDVDRHDAVEPVRQVFEEKASIRRVVESEGVPYTYLCCHAFTGYFLRNLAQIDATDPPRDKVVILGDGNVRGAYVTEADVGTYTIRAANDPNTLNKAVHIRLPNNYLTANEVIALWEKKIGKTLEKTYVSEEQVLKDIQTSSFPHNYLLALYHSQQIKGDAVYEIDPAKDVEAYDAYPDVKYTTADEYLNQFV

SEQ ID NO: 12970 - protein, 313 aa, Brucella melitensis 16M
MSHGEAPLKIFVFGSVNVDVSARMAALPRPEQTVNASGYGIGLGGKGANQAVAVAKLGGAIRFVGAVGHDAFGELALKQMREFGLDTGSVRVIDDVDTGMAIIQVEETGQNTIAVCAGANARWSSADIDAYGADIAKARITLLQREVPHEANLAVAKAVRAAGGTVLLDPAPVGDASQMADLIALSDIISPNETEAAEITGIEPTDLASAEAAGRKLLERGPKIVILKLGSRGALLVTADEVKHFTPFKVKVVDTVAAGDSFNGGFAVAFSQARPLHDCVRYGSAAGAIAVTRVGAGAAAPTAREVEELIGRA

SEQ ID NO: 12971 - protein, 328 aa, Escherichia coli O157:H7
MGQLIDGVWHDTWYDTKSTGGKFQRSASAFRNWLTADGAPGPTGTGGFIAEKDRYHLYVSLACPWAHRTLIMRKLKGLEPFISVSVVNPLMLENGWTFDDSFPGATGDTLYQHEFLYQLYLHADPHYSGRVTVPVLWDKKNHTIVSNESAEIIRMFNTAFDALGAKAGDYYPPALQTKIDELNGWIYDTVNNGVYKAGFATSQQAYDEAVEKVFESLARLEQILGQHRYLTGNQLTEADIRLWTTLVRFDPVYVTHFKCDKHRISDYLNLYGFLRDIYQMPGIAETVNFDHIRNHYFRSHKTINPTRIISIGPWQDLDEPHGRDVRLG

SEQ ID NO: 12972 - protein, 506 aa, Zea mays
  misc_feature (362)..(362): Xaa can be any naturally occurring amino acid
  unsure (1)..(506): unsure at all Xaa locations
SSWTKRAVEIDSPQPISPDQLVDPPDSTCAQVIHPRSEICSNKWLPTANKRNVKKQKENKDESMGRYLGIGAPRNSSAEYQSSLNDVSVNPIEKGHENHMSKCKSKKETMAEDDCTNMPSATNAETADLISSIARNTEGQQAVQAVDAPDGPSKMANGNDKNHDSHIEVTPHELGLKRSRTNGATAEIHDERNILKRSDQSAFTRYHTSVASNQGGARYGESSSPQDNSSEAMKTDSTCKMKSNSDAAPIKQGSNGSSNNDVGSSTKNVAARPSGDRERVASPLAIKSTQHASAFHTIQNQTSPANLIGEDKADEGISNTVKMSHPTEVPQGCVQHHHHVHYYLHVMTQKQPSTDRGSSDVXCGSSNVFDPPVEGHAANYSVNGGVSVGHNGCNGQNGSSAVPNIARPNIESINGTMSQNIAGGGIVSGSGSGNDMYQNRFLQREAALNKFRLKRKDRNFGKKGMLCHCSVRYQSRKRLAEQRPRVRGQFVRQSEQEDQTAQGSER

SEQ ID NO: 12973 - protein, 323 aa, Cryptococcus neoformans var. neoformans B-3501A
MPTSLEALKASGTTVVADTGDFSSIDEFKPQDATTNPSLILAAVKMPAYAKLLEPAIKYAKSKGGDIEVQSENAMDRLLVEFGTEILKIIPGRVSTEVDAKFSFDTQATINKAHQIIALYKEQGIDKNRVLIKIASTYEGILAAKQLESEGIHCNLTLLFGFGQAVACAEAGVTLISPFVGRILDWYKKANPDTTYTAETDPGVQSVQKIYNYYKQHGYKTIVMGASFRNTGEIAALAGCDFLTISPKLLDELNKSQDDLPKKLDASSTGEAIPKTSYLDDEAKFRWALFEDVMAFDKLHEGIRGFAKDGASLKQMLIEKLKA

SEQ ID NO: 12974 - protein, 584 aa, uncultured bacterium 577
MTQLIEIKVPDVGDFKEIPVIEILVQPGDNVEKETSLITLETDKATIEIPAPQNGTVKEIKVKIGDTVSEGSIILTLKPITNPTDSPPHTKKDTKAEFSPPTVNPISTQPTTIPRGDFHADVAILGAGPGGYTAAFRAADLGKKVILIERYPVLGGVCLNVGCIPSKALLHMAKVVTDAEETIHAGVNFNTPKLELDKLRKWKESIIGKLTNGLTALAKKRNVEVIQGNGKFITPNMISVTTPNGQKTVSFEYCVIAAGSSVAHPPGIIQNDPRIIDSTGALELEDIPKRMLIIGGGIIGLEMATIYDAFGSKVSVVEMKDQLISGADKDLIKPLYRRIKKRYEAIYLRTKVSEINPQKDGLEVTFEGEESPGTQTYDRILVAVGRRPNGHAIEAGNAGVHVTKQGFITVDNQLRTNVPNIFGIGDIVGEPMLAHKATHEGKLAAEIIAGQKAAFDVRTIPSVAYTDPEIAWMGLTEIEAKNQGIDYEKASFPWAASGRAIAMGRDEGMTKLLFDKNTRRLLGAGIVGINAGELISETVFALEMGTDMEDISLTIHPHPTLSETINFAAEIAEGSITDLYMPKK

SEQ ID NO: 12975 - protein, 411 aa, uncultured bacterium 577
MQMVGREARTASHTMAKVDSSSKNKALTEIAASIKKNEKNLLSANKDDLEAAKAQGLDSALIDRLTLTSKGVTNMVEGLLQIASLADPVGEISDLNYRPSGIQVGKMRVPLGVIGIIYEARPNVTADAAGLCIKAGNAAILRGGSEAYNCNQAIAACVKEGLKISGLPETVIQVINTIDRDAVGELITMKEFVDVIVPRGGKGLIKRISDEACIPVIKHLDGVCHVYIDEGADLDKSIGIADNSKTQRYGTCNTMETLLVHEKIAREVLPPLCKIYLDKGVELRGDRSSCAIVVKMTQVTEDDWKTEYLAPILSVRIVSSLDQALEHINLYGSHHTDSIVTEDYSRARRFLREVDSSSVMVNTSTRFADGFEYGLGAEIGISTDKIHARGPVGLEGLTSQKFIVLGNGQIR

SEQ ID NO: 12976 - protein, 199 aa, Zea mays
  misc_feature (100)..(100): Xaa can be any naturally occurring amino acid
  unsure (1)..(199): unsure at all Xaa locations
MVMTLTRDEAEGSKDMQGVRAHAEELSTLSSAVAAGTDGTPRPPSSGAAARRAMAAEGVFECKTCSKRFPSFQALGGHRTSHTRLQARTMLSDQAAAAAXERDRARAHECAVCGLEFAMGQALGGHMRRHRGEAPPPAAAGGPGHAGPTCRRWTTVTAAPMAKVHGGRKTIAALPSLSCSTCSYSVACTNGCVRGDSEL

SEQ ID NO: 12977 - protein, 151 aa, Triticum aestivum
MGALDHLSDLCSMTETKEALKLRKKRPLQTVNIKVKMDCEGCERRVKNAVKSIRGVTSVAVNPKMSKVTVTGHVEPRKVLERVKSTGKAAEMWPYVPYTLATYPYVGGAYDKKAPAGFVRSAPQAMADPAAPEIHYMNMFNDEDVNACTVM

SEQ ID NO: 12978 - protein, 388 aa, Solanum demissum
MDEVMLPGFRFHPTDEELVGFYLRRKVQQKPISIELIKQLDIYKYDPWDLPKLAAVGEKEWYFYCPRDRKYRNSARPNRVTGAGFWKATGTDRPIYSSEGSKCIGLKKSLVFYKGRAAKGIKTDWMMHEFRLPSITDSTAPKRFLDKHIPPNDSWAICRIFKKANSNAHRALSHSWVSPPQVLPQNNTTSHDFLTSSHFTNNSNEMSSFIHKTSSTSPIQFNDLLQNSSNNNMSSSFTTLDLPLYKTLNSMSNHNNDPITSYTFSSSCVDNMNNIDASSLLLNMSSSIFGDYSIVLPDNMEGGGVHDDTTTTTLKEANNVIINNMEHMEELQWGNVVRSNNIGVLPLMNNFPLNMAVDAWKTNLLWDSSSPCPSSEMSTSYSTNKCYT

SEQ ID NO: 12979 - protein, 296 aa, Saccharomyces cerevisiae
MITTPLVHVASVEKGRSYEDFQKVYNAIALKLREDDEYDNYIGYGPVLVRLAWLISGTWDKHDNTGGSYGGTYRFKKEFNDPSNAGLQNGFKFLEPIHKEFPWISSGDLFSLGGVTAVQEMQGPKIPWRCGRVDTPEDTTPDNGRLPDADKDAGYVRTFFQRLNMNDREVVALMGAHALGKTHLKNSGYEGPWGAANNVFTNEFYLNLLNEDWKLEKNDANNEQWDSKSGYMMLPTDYSLIQDPKYLSIVKEYANDQDKFFKDFSKAFEKLLENGITFPKDAPSPFIFKTLEEQGL

SEQ ID NO: 12980 - protein, 661 aa, Treponema pallidum subsp. pallidum str. Nichols
  misc_feature (634)..(634): Xaa can be any naturally occurring amino acid
  unsure (1)..(661): unsure at all Xaa locations
MTEEAMRAMALSIRSLTIDAIERANSGHPGLPLGAAELAACLYGTILKHNPANPSWFNRDRFVLSAGHGSMLLYAALHLSGYDVSLEDIKNFRQVGSRCPGHPEYGCTPGVEATTGPLGQGISMAVGFALAEAMLAARFNTDEHAVVDHHTYALVGEGCLMEGVASEASSFAGTMRLGKLIVFYDENHISIDGSTDLTFSEDVAKRYEAYGWQVLRGSMYSYTDIMDLTACAKRDDRPSLIILRSIIGKGAPTVEGSARAHGAPLGEAGVREAKKALGLDPACSFFVAPELTAVLQKRKCECAHVEDSWNELFEAWSTQYPEKRADWDAAFVPGGVSTSQLARVVCPHFEKGSSLATRTASGKVLDALCSVLPNLVGGSADLRGPNAVAVSSLRPFSAEHRAGGYCYFGVREFAMAAIVNGMQLHGGLRAFGATFMVFSDYFRPALRLAALMRIPSVFVLTHDSIFVGEDGPTHQPVETLAALRAIPNVLVLRPADAEETFEAWKIALLHRSGPVCIVLSRQNVPVFEKSDSSWRSTVEESGAYVVREGGATPELTVLASGSEVDLALRAAQLSKRRVRVVSVLCKERFEAAGDEVQRRIQGGARVVVAEAGVYQGWGAWAKREKCLVLDRFGXSGPGTQVAQALEFTAEALVEIILDWLA

SEQ ID NO: 12981 - protein, 262 aa, Pyrococcus horikoshii OT3
MVKVGYIQMEPKILELDKNYSKAEKLIKEASKEGAKLVVLPELFDTGYNFESREEVFDVAQQIPEGETTTFLMELARELGLYIVAGTAEKSGNYLYNSAVVVGPRGYIGKYRKIHLFYREKVFFEPGDLGFKVFDIGFAKVGVMICFDWFFPESARTLALKGAEIIAHPANLVMPYAPRAMPIRALENRVYTITADRVGEERGLKFIGKSLIASPKAEVLSIASETEEEIGVVEIDLNLARNKRLNDMNDIFKDRREEYYFR

SEQ ID NO: 12982 - protein, 362 aa, Oryza sativa
MSRSGAMDLASGLGGKITKDEVKSAVDEYEKYHGYYGGKEEARKSNYTDMVNKYYDLATSFYEYGWGESFHFAHRWNGESLRESIKRHEHFLALQLGVKPGMKVLDVGCGIGGPLREIAKFSLASVTGLNNNEYQITRGKELNRVAGVSGTCDFVKADFMKMPFSDNTFDAVYAIEATCHAPDPVGCYKEIYRVLKPGQCFAVYEWCITDHYEPNNATHKRIKDEIELGNGLPDIRSTQQCLQAAKDAGFEVIWDKDLAEDSPVPWYLPLDPSRFSLSSFRLTTVGRAITRTMVKALEYVGLAPQGSERVSNFLEKAAEGLVEGGKDKARSLKETLWRSKKHLMKLRSLKSSYAYEEMLKCV

SEQ ID NO: 12983 - protein, 457 aa, Streptomyces avermitilis MA-4680
MNVSVVLFTSDLRLHDHPPLRAALDGARQVVPLFVRDRAVDGAGFAAPNRLAFLADCLRDLDAGLRERGGRLVLRSGDVVDQVCKVAAEADADEVHLAAGVSAYAHRREQRLRSALEADGRRLHVHETVITAVAPGAVTPSSSDHFAVFTPYFRHWEREHLRDALGAPRGVRVPESVGSERLPTRTELSGLSQGLAAGGEEEGRKRLMAWLRGGITAYEDRHDDLAGDATSHLSPHLHFGTLSPVELVHRARRTGGPGAEAFVRQLAWRDFHYQVLAARPDAATADYRGRGDRWRSEAAAREEVEAWRTGRTGYPVIDAAMRQLRHEGWMHNRGRLLTASFLTKTLYVDWRVGARHFLELLVDGDVANNQLNWQWMAGTGTDTRPNRVLNPVTQAKRYDPDGAYVRRWVPELEGLRGAAVHEPWKLKGLDRAAYDYPDPIVELADGLARFRHARGRD

SEQ ID NO: 12984 - protein, 449 aa, Listeria monocytogenes str. 4b F2365
MEKHYDYIAIGGGSGGIASINRAAMHGAKCALIEPKFLGGTCVNVGCVPKKVMWYGAQIKEAMDLYADAYGYQVDASFNFQKLVENREAYIERIRGSYKNGLDNNKVEWIKGYAEFVDEKTLRVNGELVTADHILIATGGEPALPSIPGAEFGITSDGFFALKELPKKVAVVGAGYIAVELAGVLQQLGSETHLFVRKHAPLRNFDPLLTDTLTEIIEQSDMMLHKHAVPQKVEKNPDGSLTLSLEDGRTETVDTLIWAIGRKPVIQGLQIEKAGVKLLESGHIAVDKFQNTNVAGIYAVGDVTGHYELTPVAIAAGRRLSERLFNNKKDAHLNYENIPTVVFSHPAIGTVGLTEPEAIEKYGKENIKVYTSSFTSMYTAITDHREPCRMKLICEGKTERVIGLHGIGYGVDEMIQGFAVAINMGATKADFDNTVAIHPTGSEEFVTMK

SEQ ID NO: 12985 - protein, 1122 aa, Shewanella sp. ANA-3
MGLEHMAFDWLSQFFIFSHDSLLLNVYYNPLLVTISILIAIFAAFMAFQVTTQAVQSQSRARQQSMLLTGSLVLGGGVWSMHFIGMLAFDLCSPVSYDFGLTALSLLPCIGASWVALNLLSKPSFQFSQVLLSGTLVGAGIGTMHYVGMAAMEMAPLLRYDPWIFALSIVVAVLLAIIALWVRTGLNQLISSNMSTITSNFIASIVMGLAISGMHYTGMAAARFVRPEGLELSQQTSEISFYLALGVSVITTAIICLVLIVNVIFKYKDLSLLAKSNEDRMRAMMNTAVDGIITIDGQGIIVNVNKAVTTILGWSPAELLGANVKKIVPEAIRPHHDGYLARYAQTREAQIIGTGREVEAQHKAGHLVPVRLSIGHVMQGKAHYFVGFISDLSQRNEMEQELKINEAKFRSLITNIPGIAYRCKSTEGWPMVFISDAVQNITGYPAEDFELPHPKRFFSDLYHPDDIETIYAQAQPPTFSMEYRIIRADGGVRWLFEHGNYILDETSKEVWIDGFLMDITERKEMEQDLVTAKNNAEQAAAARAAFLANMSHEIRTPMNAIIGFSDILLESVLDLEQQKQLSTINRSAKSLLHLLNDVLDSAKLDKGKLELENRVFCLTDEIDTVISTLWLQAKKQRLSLEVDVAPTMAANFIGSPERIRQVLINLIGNAVKFTCEGTVTVRVFPQDTTQDTTKITFEIIDTGIGMSPEQLNRVFEAFAQADASMSRKYGGTGLGTTISKQLVELMGGELTAESTLGQGSTFRFTIPLQPSSEPLSTQRADNGSLPPLTLLVVDDIQQNIDLLSVWLTRQGHKVITARDGEQALLRMQKADIDITLMDLQMPVMDGLTAAKMRREQEAESQLPHMPIIALTASVLEQDKSAAEQAGMDGFANKPIDFALLTREIARVLQLNPPQAEFESLPPVSTLLVDEAKGVKLWGSKPLFIKELMKFIAQWPEKSQALQQAMSGQDTATIKLLSHSLKGVSGNLGLLQWMAHFGQLEQLAQAESPSREAMEAIVAQISDSLVEIGDYIESTTVPAAAVSAAVHAGTGDPAQLLTHIDALLASIAHHSFEESDLEALTARIDESLRLRAAIIAEALDNFDFDIAHNELTELRRFITANKE

SEQ ID NO: 12986 - protein, 302 aa, Triticum aestivum
  misc_feature (73)..(73): Xaa can be any naturally occurring amino acid
  unsure (1)..(302): unsure at all Xaa locations
LLQLSELTFWSTKRMAVSVLAILLASCALAAASFDKEFDVTWGDGRGKILNNGQLLTLGLDKISGSGFQSKHXEYLYAGKIDMQLKLVSGNSAGTVTAYYLSSQGPTHDEIDFEFLGNVTGEPYTLHTNVFTQGQGQREQQFRLWFDPTNDFHTYSILWNPKHIIFMVDDMPIRDFKNLEGKGIAFPKNQPMRLYSSLWNADDWATQGGRVKTDWSHAPFSASYRGFKADACVVTAGGRPRCGSSVGTEVAPGTGAAGEWYNQELDLTRQQRMRWVQSNYMIYNYCTDPKRVAKGVPAECSM

SEQ ID NO: 12987 - protein, 481 aa, Kluyveromyces lactis NRRL Y-1140
MSDPKLTKAVDSICDQFIVTKSKISQLTEYFIDCMEKGLEPCESDISQNKGLPMIPTFVTDKPSGQEHGVTMLAADLGGTNFRVCSVELLGNHEFKIEQEKSKIPTFFFQDDHHVTSKDLFQHMALITHQFLTKHHKDVIQDYKWKMGFTFSYPVDQTSLSSGKLIRWTKGFKIGDTVGQDVVQLFQQELNDIGLSNVHVVALTNDTTGTLLARCYASSDAARAINEPVIGCIFGTGTNGCYMEKLENIHKLDPASREELLSQGKTHMCINTEWGSFDNELNHLPTTSYDIKIDQQFSTNPGFHLFEKRVSGLYLGEILRNILLDLEKQELFDLKESVLKNNPFILTTETLSHIEIDTVENDLQDTRDALLKAADLETTFEERVLIQKLVRAISRRAAFLAAVPIAAILIKTNALNQSYHCQVEVGCDGSVVEHYPGFRSMMRHALALSPIGPEGERDVHLRISKDGSGVGAALCALHANY

SEQ ID NO: 12988 - protein, 477 aa, Neisseria meningitidis MC58
MSQYDVVVIGAGPGGYVAAIRAAQLGFKTACVDAGVNKAGNAPALGGTCLNVGCIPSKALLQSSEHFHAAQHEFAEHGITVGDVKFDAAKMIERKDAIVTKLTGGVKFLFQKNKVTSLFGTASFAGKNGDAYQIEVDNKGEKTVIEAKHVIVATGSVPRPLPQVAIDNVNVLDNEGALNLTEVPAKLGVIGSGVIGLEMGSVWNRVGAEVTILEAAPTFLAAADQQIAKEAFKYFTKEQGLSIELGVKIGDIKSEGKGVSVAYETAAGEAKTEVFDKLIVAIGRIPNTKGLNAEAVGLEKDERGFIKVDGECRTNLPNVWAIGDVVRGPMLAHKASDEGVAVAERIAGQKPHIDFNNVPFVIYTDPEIAWVGKTEEQLKAEGVEYKKGTSGFGANGRALAMGKAKGTVKVLADAKTDRILGVHMIGPVVSELVTEGVTALEFFASSEDIARIIHAHPTLSEVVHEAALAADKRALHG

SEQ ID NO: 12989 - protein, 491 aa, Candida glabrata CBS138
MAIKLIDLARTFLPLLPEVEVPFEKITFDDKVVYTIFSALIYLFAQFPLVGLPKETAPGTQVNDPLYFLRGVFAAEPKTLLEFGIFPNVASALILQLLAGLKVIKVNFKNQKDRELFQTLIKLFALFQYFILANIFIYSGYYGQNLSIVQVGLINLQLCGAGLVTTLISEVVDKGFGFSSGMMVINTVSIATNLVSDTLGISQISVDEDNNTEPQGSLINLIQSFRAKHRSLLEGIISAFNRDYLPNLTTTVIVLGIAAVICYLQSVRMELAIRSTRARGMSNIYPIRLLYVGCLSVLFSYVILFYIHIGAFTLIQLIAKNNIENPICKVLGHYDMVNNLLAVPSFPLSLLTPPRSLLSSITEQPLTLITYTIFMVATGVYFADKWQEISGSSARDVAAEFKEQGITLNGRREQSVAKELNKVIPVAAKTGAAILAAITVCGELLGLKGKAAGIVVGVAGGFSLLELITLDYQQSGGQSALTQVLGAPMGM

SEQ ID NO: 12990 - protein, 412 aa, Haemophilus somnus 2336
MVVTGIGGITAFGNDWQKIKTAFQRKQNAVKSMNDWVERFPELDARLGAVIEDYYPPKHWNRKQLRSLGRVSQLVVDASERALANASLLDKDGIILEYLKDGRMGVACGSSTGSTNDIKDAAELLMTGKSDGFNANTYVRMMPHTTAANIGIFFGLTGRIIPTSSACSSGSQAIGYSYEAIKYGLIPMMLAGGGEEFCPSEVYVFDSLYAASRNNDNPSHTPRPYDKARDGLVIGEGGCMFVLEELEHALARGANIIAEVVGYGANSDGSHVTRPQKDTMQRCMELALKDAGIEPSKIGYVSGHGTATEQGDIAETQATEAVFGYVPMSSQKSYLGHTLGACGALESWFSIEMMRDGWFAPTINLDNVDERCGKVDYIQHDGREIHTDYVMNNNFAFGGVNTSLIFKRWTDE

SEQ ID NO: 12991 - protein, 612 aa, Buchnera aphidicola str. APS (Acyrthosiphon pisum)
MDQNPQSQLKLLVTHGKEQGYLTYSEVNDHLPEDIIDSEQIDDIIQMINDMGIPVVEEAPDADDLILNEINTDTDEDAVEAATQVLSSVESELGRTTDPVRMYMREMGTVELLTREGEIDIAKRIEEGINQVQCSVSEYPEAITYLLEQYDRVKTGQIRLSDIITGFVDPNAEEIFPPTAIHIGSELLDEQQNNEEDEENNQEDHEDDHSIDPELANEKFSELRIQYNNTNNTIKNKNRTHKDSLLEIYNLSEVFKQFRLVPKQFDHLVNNMRHMMERVRKQERIIIKLCVEICKMPKKNFIKIFPIKKINYLWFIREQNTNQPWSENLKKVKEDVFISVKKLIKIEEETGLTIEQVKDINKRMSIGEAKARRAKKEMVEANLRLVISIAKKYTNRGLQFLDLIQEGNIGLMKAVDKFEYRRGYKFSTYATWWIRQAITRSIADQARTIRIPVHMIETINKLNRISRQMLQEIGREPTPEELSEKMLIPEDKIRKVLKIAKEPISMETPIGDDDDSHLGDFIEDTTLELPLDSATSESLRSATHDVLSGLTAREAKVLRMRFGIDMNTDHTLEEVGKQFDVTRERIRQIEAKALRKLRHPSRSEVLRSFLDD

SEQ ID NO: 12992 - protein, 488 aa, Listeria monocytogenes str. 4b F2365
MSIKETALPKVQTKLFINGKWTDGDNKETKDIVNPANGEVIAKIAQAGPNETKKAIKAAKEAFPDWAKMELADRVKLLHKIADLMEEKADTLAKIMTLEQGKPLKESKGEVLTGAENFRFAAEEARRLYGETIPAPNNHAFIVKKQPIGVVAAITPWNFPGGMVTRKLAPALATGNTIVLKPSGDTPLSALAIFEIFEEAGLPKGVANIVMGSSKEIGETLTDSDDVRKLTFTGSTKVGQTLFKQSAETLKKISLELGGHAPFIVFDDANLDAAVNDLVAAKFRNNGQVCVSPNRIFVAKEIKEKFTKALVAKVEQLKVGNGLDDVNVGPLIREDAIDKIDKQLKNATDKGAKVLTGGGRLTGSDYDKGNFYKPTVLDNVTREMDIFYEETFGPVIPLITFETEDEAIEMANDSEFGLASYFYTKDLARVEKVGAALEYGMVGANEIAISNPETPFGGVKHSGFGRENGHYGMEEYIQVKFINLKYRD

SEQ ID NO: 12993 - protein, 156 aa, Candida glabrata CBS138
MSTELTVQSERAFQKQPHIFSNPKFKTSKRTKRWYKNAGLGFKTPKTAIEGSYIDKKCPFTGLVSIRGKILSGTVVSTKMHRTIIIRRDYLHYVPKYNRYEKRHKNVPVHVSPAFRVQVGDIVTVGQCRPISKTVRFNVLKVAAATGKANKQFHKF

SEQ ID NO: 12994 - protein, 103 aa, Trichodesmium erythraeum IMS101
MAAVTLSVSTVKPLGERVFVKVSESEEKTAGGILLPDSAKEKPQVGEVVSAGPGKRNDDGTRAEMEVKVGDKVLYSKYAGTDIKLGGDEYVLLAEKDILAIVN

SEQ ID NO: 12995 - protein, 260 aa, Mesembryanthemum crystallinum
MVDQQYMEAIEGARRDLVALVQSKNCAPIFLRLAFHDAANFNAADKTGGVNGSLRLQEELGQPPNGGIKVGIDLIEEVKKKHPTVSYADLYQLAGVVAVGASGGPAIFFVPGRKDTDVADTLNIPNPNGGADHLRTVFHQMGLVDKDIVTLSGAHTLGRAHSNISGFDGPFTREPLKFDNSYYVELLKGDTEGLVKFPTDKVLLQDDVFRPLVEIYAKHQDAFFRDYAESHKKMSELGFTPKFPNPTTGGGCHSHARHCC

SEQ ID NO: 12996 - protein, 281 aa, Zea mays
MEKESSATYEPKRNSEIRVFESSDEISTDLAEYISQVSEISVKERGYFAIALSGGPLVSFLGKLCEAPYNKTLDWSKWYIFWSDERAVAKNHAESNYRLTKEGFLAKVPILNGHVYSINDNATVEDAATDYEFMIRQLVKVRTIGVSERNDCPKFDLILLTMGSDGHVASLFPNHPAMELKDDWVTYITDSPQPPPERITFTLPVINSASNIAIVSTGDDKAKAVHIAVSDMAEGLDAPTSLPARMVQPTDGKLVWFLDKAAASFLDSKNDDDDACYDRHE

SEQ ID NO: 12997 - protein, 315 aa, Buchnera aphidicola str. APS (Acyrthosiphon pisum)
MKKKLINFNNSLVLVVGDLILDCYWYSKNHYMLSEQLTPIVPINKIKEQPGGAANVAKNIAEIGGYTKIVGFIGMDNEGLILKKLMDHIRIDSDLISIKNNKTITKIRILSEKKQLIRVDFQEKYISNKNNLLHQKIIDSISSFKILVLSDYAKGTLANIQNIIDLAKKMSIPILIDPKGIDFKKYSGASLLTPNLFEFEKIVGKCYRENEILQRGIKLLSELQLSALLVTRSKNGMTLFQKEKKPIHFPAASKIASDVTGAGDTVIAIIAASLATGYSLEEACFYANIGASIVIQKIGTETLNINELNSVLNHQ
